United States Patent Application Publication US 2014/0057251 A1 - sequence listing, part 18

SEQ ID NO: 19857 - DNA, 4448 bp, Cannabis sativa
attataatattaaaaaaattaaaaactaaaataaaattatcatacgtgacttagcacgtaacatctatttagtatatataaacacataaaaattttcttgatttgggagatcaagtggacttgtttaaatttaaaaaaaaaaataaaaaaaaaacaaatattttaagaaaagaaaagaaaaaaaaaacttataaatatttaaacttttatttatatctatctaagacagttacaaaggtaatatatgaaaattattttatttaattgtaattaaaaaaaaatgccacaaatatgataactaacatcacatcaaacatttactaaaaaaataaaataaaaaataaaataaaataaaataataaaaataaataaaaaaaaaaaagaaatatcttatactgcaaatgttagtgagcatgtgtgcccttaaaaagctctgtggcagttagtttttcttttttctttttaactgttttagctatcaaactcattcatctctatccttaatattctccttttagtttttatctgctgttaaaccgtatattattaacctctctttttcaaattttaactgttccctccatcaattccttttgaattcctgcgatttgccctgtattcatgtgatctgatcctctgttgcaacttcatggaacatctactgcatgatatgaatcatactctccatctcacagactcggaaagggaagttcaaacacttcctactggattcagcactggtaatacctcccgtccgaatcatgtgttgtatgctagagtcatctcctctcgagatatcaataggaaaaccttccgaattaagatgggtggcttttggaaaggccaatacccggccactattactgatcatcactccggtctcttccttgtgacttttggttgccttggtgatcttaagaaagtactactgttggaaccatggcatttccaaaatcatcttattgtgctatcttcacccactgcccttcaaacacctacacctgaatctatgattcatacccctttttggatacaacttcatagattaccttttttaagtaagacaaaagccatggccgaatgggcaggtaacctccttggcacttatgttgatgtccatgaagactctttgaatgaaggatgtggtccttttctgcggtttcgtgccatactggacatttctaagccattactcagagggaaaatggtgaaactcaaggactcacttgatgaattttggttggaatttcgttatgagcgattacccgagttttgctttgaatgtggtaccattggacatccttttgaatcatgtcacaagtttcttgaacaaatttacaatggcaacgatccttctcttgaatatggtccggcaatgattggctctcctcttcctgactctggctatgatcgctacagaacagattttttcaaaggtggagcatggcccttaatgactagacttgccaagaattccttcactgctgctatccgaagttgtctcaggttccacttcctttgccattaaatatgaccactaaagaatcctcatcatcctctaaattaccatcctcttcacatgttaccatgccaattactcctcccactcctttatctgctactacaccgacttcatatcctatatcctcagatacaacaccagttataccattcccttcctatcttcccattacaccaatgattgccacctatccacccgattcacacacagtcaagcctcccactcgaacaccattaatgcctgctacttttcctctgaattctcccagttttagcacggttgtatcctcaactgtttcaccaacattacaccctcccctgtcaaatgctaaaggtaaagctattcttgtctcggatgatgattttgaaaatgttaatcctaataagcaatttaagagacagcttgactcggaatctcttcgcaatgttcttaaacgatgccaatcaaatactctacatatccaatcggactcttcagcaccgagtggtaattgcccaactccgtatgtttctagcactggtaatttggattcagaggagtttcagtctgaagtttcagcggttgttgctccgcaacaccgcgcacagccatgaatatcataagttggaatgctcggggtttggggaacccgagtgcattcaagtatctgcgcttgcttgttcaagagcaagctccatgtgttctttttataatggaaactaagttacaatgtggtagtatagatagatttcgtaatacattacatttttctaatggcattgaagttccaaggcaaggactcggaggtgggcttatgctcctttggaagacccatgtcacactttccattaacaatttctcacaaaatcacattgattgttttatggaaagtcaagatggaccatctttgcattttactgggttttatgggcatccttgtgctgctcaaagacatctcacttggactctgttacgacgatgctatgatatttctccattatctccttggctggttttaggagattttaatgaagtcctttctcatgaagataaaatcggtggatcaagaagagtagaagctcagattactgctttcagatcagctattgatacttgtaaactcagtacaattccttttcaaggtgaacgaacaacttggactaacaagcatcaaggaaatggaaatgttaaagagcgccttgattatggatttatcaatggtcattgggaggctacttttcttactccatctttaacacatttggacttttataactctgatcatagagctttaaaagcatctgtatccgctctcaatgatcagcttgagattccgcattttcgatcacgatttcggtttgaaaaaatttggttgcaggaagctgattgtgccgagattgttttagccaattggaaaactggtaccagcaactctttaattcagatcactaataatatttcgaattgtgcttccagtctgcaacagtggcatttttcacactttggtaatttgaaaaaagaaattaaggagtctcatgaacatgtatcagctcttcagaactcatcgagcacatatcctcaccactttgctgctctaaaaaattctaaattgatcttggatgaattactagctaaggaggaggattattggcaccaaagggcaaggatttcttggatgaaatcaggtgattcaaatactaaattcttccaccaacgtgcaaatgctagatcctctaacaatcgcattaaaaaactccgagatgaagctggtaacacccaaaccagtgaatctgcactactgggaattatttccacatattttcagactattttcagcagttctgggattgatactcatgcaattaattatatattggatgttattccaacaacaatagatgctcagtctcgagaagcactttcagcaccttacactgcttctgatgttctcaatgcactaaactcaatgagtgatgataaaagccctggaattgatggtatgtcagtcatgttcttcacaaattattggcacattgttggatctcttgttacagaatcagttttagatgttctcaacaaaggtgcggatcctactccctaaacaaaacgatcattacactcattcctaaggttaaaaaacctcagctcattacacagtaccgtcccattagcttgtgtaatgtcctctataagttgatttccaagtcaattgtgttgagaatccagccattcttgccattggttatttcggagtatcaaagtgccttcatgtctcaacgattgattactgataatgttctcatagcttttgagctgctacattcacttaagaatcgaaaatgaggaaaacaaggttatgctgccattaaactggacatgtctaaggcttttgaccgtgttgaatggcactatgttgctcaagttatgttgaagatgggttttggttcaaccacggtgaatcttattcttcgatgtttgcagtctgtttcttattcttttttactgaatgggaaagtacttggagatctaacccccacacgtggtattcgacaaggtgatccactctcgccatatctttttctattttgtgctgaaggtctttcaaggttactgcaatctgaagagaacaatggatctttacaagggctgtgtgtctcaagaactgatccctcagtttcgcatctctttttcgctgatgatagtgtgctcttttgtcgtgctactcaacaatcagccaactctattcaacatgtgttacatatttatcatcaggctagcggtcaagcaatcaatccggataaatgtgtgctctctttctctccgaatacaaggcattctcatcaacgctatttccaacaacttcttaacatgcccattcagccttgtcatgaggaatatctcggacttccctcttttactggtcgagataaaactaaacttttcagtg

SEQ ID NO: 19858 - DNA, 5597 bp, Cannabis sativa
tgcatttttcgtgaaactgttaaatttttaattgattattttgttgacaagtaaaagattggaaaattgttagatttattgtagctagttaaagtttccggaagatttctaaattataaggaagtgctgtcatttaaattccacaataaagatattagtgaataaaataaattattgagtggaacttgtgctagttaaatcttatggattattatctggtcgagattaaacgttaaacctgagatcattcccactcaccaagcatttaattatgacatggttttgtgaaactttgttaataagtcctgctgctaaagttagacaggtgtgtattccattttgtgacctacctgttgaggaatgagtttgctttccacagatgtgcacacttggaatttctagttcagagttatgattgatccagtggaataataaatttggccacttgaggctactttaagtgaagtgattgggtgggtgagtggagtagtgtttggttgaagttcctgttaaagtgtgtactattgaaattgaaaataagaggtagaattaatttgaaggtgtcaactggtttatttggttacctgagtatcctacctaggatcaaatgttggcggtgttatggtttgcgtattaaggagatgatataagtgataaaagaagaaaatatgtaaacagtcaatggcttgctgcaactcctttgtggctttgattgtggtatattatggactagttctagcttattagtgtggcccatgttctcttgtcttgtctacactgtaaaacaaaatttcataatactaagtttctgtaatagtattacttgaacttcttagctactctgttaagatgtctattttcattttcctaagatcatttaagaatggtttattgtgtgacttatgtattgtttgattgtctgctttacttgagctgttcagatcgtgttgtttacattttcatttttacctcgtttctcaatttcaagtatgatacactattgctcataatgagggtatgatggtggacagtacacaattagattctctatacttatttactacctttggcatagtttacaaacagctgttatttttattttattttgtggggattcttttgtatcattatttcttgattttgaggacaacatagatatcttaactgatattttttgttatggttcaattgcgttcagattgcactgtggttagtatcatggtggaagccaattcgacttgtcgtcatcctatcaaagatattctttgcaggtattttttttttttttactaaaaactttatgtcaaatacagtaacttatctttgtaatttatactttgaacatgtaatttggcaggtgtttcgctgttcgcagctctagggtttcttctatacggtggaaggtaattcacatgcttttaaatgtcctagcaagatgaggacatgcaaagccaacaacttctgtatatttaggaactacaagaactaataagcttttttcaaacaaataaatattcttttaccgaagtccctctatcaatcttaattacctattttttactttcttatgacagacttttcttgatgttgcaacgatttcctgtagaatcaaaggggcgacgaaagaagctgcaggaggtggctactttttgatatatattttttgaaagaagcactaagatttcaattttctgtttgaaattctttatttattgtgtgctttggcttgacaggttggctacgtgacaaccatatgcttttcttgtttccttatcagatgcataatggtgaggcatagtttactttattgagctttgcatgttagtctttgatgataaagaggataattttttattattattattttttaattttttaaatgtaaatagtttgagcctctgcatcaattcttatgcgtgcatattcatttctcatttcaattcttgttatttttaggtttgctttaacgtctttgataaagctgctgatcttgatgttttggatcatccaattctaaatttgatatattacgtggtaaggtttctcatttatgtttttttttttttcggtagcatgtttattcgagcctaaattgttataataataataactaagggttacttcataaggtcatagatgattaatcttttttgttgtttggttcctaatcgataatggtaatcatgttcatatcattatataacgaatttatatattttctcctgatctttttctatacacagttagtggagatattgccctcctctttagttctgttcattttgaggaagttaccaccaaaacgagggatcacacaatatcatccaattcgctagaacgaaatcacaacctaatctgctgcagcaaaacaaagcgaaatggcggggaggtacaaaagtgttaatgtttttcaagatgcttatctacctcgagcgaactcttagaaaggagggaaaaagttgacctctttgtgttttaaggaactcttggattaagtttgttctttttagtaatgatatagatcctgttaaaaagaatgatctttcttagtattgtgaaatgtgatcttgactgctgtttgttattatcttttgcttttgatttgttttggctcatttatgggttcactttctgttactaattaatttctactccatgaacagaaaaacagcaggaaagaaagtaaattgaaaaagaaaaaaaaaaggtttggtttttgtgtatgaattcttattctgtttagacactttggtaaatcttcccattttatcaaaggagtacttttttattttttagttttttgatttattctagtgtgcaagcatttacagattcaacagaaattggtataaatgtaaacaaaagcacaattatttacaacttgattatgttgtataaggaaaaattgatttatttgttagctacagtgtaatttccacaacaaaataaataattaaatagtaataaacgaagaacacagatgtttcacatacctggataatggattattctgcaaaattttggggaacacataactgagatgactgcctttgctttcagtatttttttgtgatatgaactcatctcagaatctgagattttgtaaaggggaaaaacaaaagaagaagaaaaggttttgagaagaaggtagatgcaaaaaatgaatgaagattgaggaaatgagaatatggagtggtggtggtgaaggtggtaatggctgattttgcattatgttcattatggaatggtaggtttgggttatggttttgacaatttgttttgactagtaggtttattagaagtaaacttgatattcaagcaaataaaaagtaactttattcttgattttatcatatttgggatgattaaggtgatcttttgtagtatcagttaaaaaacataattatcgtagaaaaaaatagagatcacatggttattaccaatgatgcagaatttgctccagtcaatgtgaaaaagagatgtaatcttagttgttaatatgcgttttcaaaggaaaaattccataataaatttaatttttatttgtgaaataattttaatagtaatgattcacatcttaaatttacacactctatgattaattatatatcatagtatgtaatttttatgtgtaattgtaaactggaagtgtgacagtcgatattcataaaatgtataactaaacaaagttgaagaactttttaaagtcaaaaagccatcttaaacaagttcagtaaacttataattccagtcccaaaattatattagaacaaaatcttactgtattctattaaaatttactctctctaggaaattattaattttttttcgtaaggtattaattttgtttttgacaacaaagaaattgttacaaggagtataccaaaaaaaaatggtataaaaaaagaaaagaaaaaagtataccaaaaaaagaagtccaataaaatatttaatggaaacagaacaggcgaccaagtgtaagtacataaaagaaaagaccaaaatataaaagtgcttagaaacacgtgtatagcctagtgttagtacgtttaatattatattttcattttgtatgattattcaatgcatggatgcaatctgtagaatcaaatcaatgtttatccaaatttaattcaatccaatccaaatgtgagaagcagaaagtgaatttgagtattttgatgtgacatttcatacataacaaagagtatttatttcattttaaggacctcctattttcagggaaggactgtatctttttcttttcttcctcataaggactccctttctctcccaattcttcccccaaggactcttttatatatacttctcttcctcccaaaccctaaccatgatcccttcttctttcttatcatactttttgtctttctttcattctttacatgactatgttattggataatcatcaccactctcaccctcaacttggtatgtttttttttctatttttaaaatataatgagttcattgagaaaatgtatgtgttgatatttttcttttagggattgaggaaaataataataaggaagtgaaggatggtggtggatttgttgtccctatctcaaattcttttggcaacacatttaggtactactacttgtgttgttcaatttagtcaagtttgtaattattgcttttcaatcaaaaaatagtgtgacaaagaatactagcttaattttctcatttttatagtaagttttatgcaaataatgccagggattataatgttgaaagtgaaagaaattctggggttgaggaattctaccgaatcaatcacattaaccaaacatatgaatttgtaagttattcaaaaatgtcatttttttttgtgttctcttgaaaaagaatgaaatttggttgcattcttgttttttaggtgaaacgtatgagagaggagtatggtaagcttgagaagatggaaatgagcatatgggaaagttgtgaatttctgaatgaaattgtggatgagagtgatcctgatttggatgagcctcaaattgagcatttacttcagactgctgaagccattaggaaggattatcctaatgaggattggcttcaattgattgctcttatacatggtatcttatccatcttcctatattagagttattcctatattgtttatgtgtggaaataaattatcctacataagatgaatgtattactcctttcattgccaattggttttgagatgaaaccctattcatcttatttcaaattgacaaatacttccgcttgaacagctatcttgaactaattagaagacagtcacatgacttattttgctgctcgtacacgtacagtacttaccaaaatatcttattttgttgtaatgttagatcttggaaaggttctcaatcaccctgctttcggagggcttcctcaatgggcggttgtcggtgagcgttttcttatcaacgatatctaagtaactcttctttaaggccatgtttggaaagtaggattagaaataggataggaacattacctaatttgtataactgttttcatcaggtgacacatttcctgttggatgtgcctttcacaagtcaattgttcatcacaaggtcttt

SEQ ID NO: 19859 - DNA, 2300 bp, Cannabis sativa
taagtggcattagttctctgtatagctacaatcatagtctcatatatgaataaagaatttttttggtatttatatataaactattcaataataaatattaataatttaacattcatgcatatatcaaaatgtttaactctttattaataatcaaaaatatctttataggcttttcaaagcataaactctaacaagatcagcgtctctctcattttttttgtcagtgatagccttatattccttgatgcatttaaggatggtgttactcttcgtgaggttctagatgtttatgtctcgctatctggtcaactaattaacttaaaataattagatcttagtatgaggtgtagagtgagtaaagtccaaggtgaagagcttgctgctactagtggagtcaaattagtgaaagctcatacgaagtatctcagtatgcctgttgttatgggtcgaaagaaaataaaagcttttgggggtctctaaaactgggtttgagaaaagcttcaaggttgaaaacgaccatttttctcaagccgggagggaaattcttaataaggtcgtcatccaagccttgtcttgctatattatgagttgttttcgtatcccaaaaggtgtgttaaatgatattcaggccatgattgctcgtttctggtgggggcttcctctaaaaagaataaaattcattagggagattgggataaaatttgtaagccaaaggagaaaggtgagcttggcttctgtaatttggagaattttaaccaagctttacttgctaaacatgggtggaaacttctaactaatcctaattgccttcttgcatgctcgggttatataagcgttatattacccccagtgatgatttttttgggtctcattgggtcactatggctccttaatctagagggaaattctttggggttgggaaattattgagttgggtgctaggtggtgcattggtaatggaagaaaggttagaattaataaagatcattggataccaaggggtcttctttttactcttcggttgtcagtgtcgattatggaagggtccgagttcactctctgcttgattctgacgggaattggaaggcagatgaggtttgtagctagttttatcttgatgataccccctgcattttaggtgtggtcccttaccttgaggttcctaatttggttaaatggagtttgacccctacggaagaatattttgttgttgacgggtataatctaagattccttcagtctgtaggttgagtgctctaataatcagtgatgaaggcttggtggaagtttgtttggggctccaagatgactctgaagataaaaacttcatatggagagcttgtaatcattggctgacagtgacaattgtgctttctaaacgaggtatgactatgaatcctagttgttgttggtgtaagaatgaagctcaaactatctgtcatgctttgtggagatgtcgggttgtcagatttatttgggaaaaaaaaataaggaattttgatttatttcctaaaaaagtctctaatgtgttagactttcttatggttttgttttcttgagttcccaagattaaaatagagttacttattggtttatcttggttagtgtgggagcgaagaaataaacaaaattcaagcaaaagcttcctgctaatctggtgcggcttgcttgggctttggacctgtggttgttggatattttgttgccataccaggctactgccactaaggtcccaaaagcttcaaagttgggttgcccccctcttgggtctttcatggtcaatgtggatgctttaatttgtgttgaaataaatagttgcaatttgcgggttattgtcagagattgtagaagagctttggtggttgttgaaaccaaatttctccctagctctttctcgatttcgttggctgaggcccttgctgttcgtttagggttggaattggctcaaaggtggcatatgtcttagttctatatagcttccgattgtctttatgtagttagtggaatgaaaatggttgagtacagcaaggttgattgggggtggcattttagtcgagatcaagttaaaaaacttattgtttagttgtattgattttattttttcacctgagtgcactgggggacccaatgaaggaccagtgtgggcttaagcccatgctgaaaaaaatatttcttttacttcttaactaacaaaaaaatcttttaattattttaaaagcccacaacaaatgcgcaacaaaatgggagatcaatagttgaatgataatttgatagtatatctcaaaaaggatgtattcaat

SEQ ID NO: 19860 - DNA, 5099 bp, Cannabis sativa
tttaatttttgacggtaatattatttaagttatattttagaaattttcgtaggtatttgaccctgaccgttacgggttaagtcaataaatacgtgatacgatcaagtatggaagttcaagaaatataacttaagtattattactgttaaaaattaaacttaaatatttatccgctaccaagaattatacttaattatttatgccataaattacaaaaactattaacaacctaattcatcaatcttttgttgggaaaaaataaaccaaacaagttaataaaaaaaaaccctattattttttttttttgacataataaaatcccattatttgatggagatcaaattgaagaagaaagagatagaaaagcctttataaatgggaaattttgacttgttctttgtagtgccattctcaactccaaaaaaaaaaaatacacttaaaaagacaaagaaaatgtagttatttttgaaaatgtagttattttcaaaaaaaaaatgtagttatttatttggtacatttgtaagaaaaaaaaaagtaaaacataaattaatagaattagaacacattaagtaatgaaatcaaatcaaagaaaacaagacaagacataaaaatatggtatggagtgaagcttggtctttgtttgatctttgatctccttgcttgttgttatgcatttcattaaacaccactaactaactacttcttctccgaaagacttggagacttctttactcactaacataaactatttgttctccacacaaatatatacatatacatacacaaaaataaaggacaaaactttattctcatttccacttttcttgggctctattcttcttctagatgaaacaaaacaccaacccaaaaatcaaaaatcatcacttgttgcaaatttctgtgtttgtgtgtgtgtacggatgagagatgaagaagcctagaaatggttcatcttctttacaagtcaaatgtcagaacatctacaacaacaacaacaacattaacaacaacaacaataacaataacaacaacaacaacaacaaaaggaagagtttttatgagctttctttgtctttggttctctccctttggtgtcttgcttttttgtattactctaagcttggccttagtcatggcaatggaggtaaatttttttactttttttttatttctaatcatttttatgaatgtgtggaataaagatttgtttgcccttttacttgctgacccatttctaaattttggattttttggttatggtagtgttcaaaattgcatttttgtgtactatgctcttggaatttggataatttgttattggggtttaatacccttattgtgtttttccttttttaggcaaaaccctttttctgtttatcatgattatgtataaggaataaagaaagtttaaacatttagtatgtataaggaatgagatgaaattgttaaggtaatataatcccactaattgtttgagtttgttaggtaattagttaattgtgtttgtaaaacttgttaaagttattactctcatttcctctcttattggatgctcaaacaaagtccattgtgttatacatgaaaaattatttctttatcattggtcatatgatcatgagtacttaaacatgttataaattgaaacaaacaattttgaagtttctttctttcttttagagaaaagacttagaaatctaaaaactagagtgtgtagtaatttgtttcctttatcagaaagttctttgcaaaatgatgatacttctttgcacaatggcattcgagatggatttcgtagcgttttctaatttgttatgtttcttgttcattctaactctacaaccgacctgaaagacctaaacataaggaatctcaatatacaattagaataattaacaatgtaatttccttttcgtctttttaattgacatagtccaagtcctctaataaaatgatgataatgcatcatgaatgtttggggtagctcaattggtagagtagaggattaaaaatctctcgtgtcaccagttcaaatctacataagaaatttgtatgattatctattctagaaaatattaattagtatagaatccccacatacaaattctatatatagtataaatcatgatatatatttatccatcttagtgttgagaggtgcttttcgagggtgtctaaaaggttattttgcgaaaaatgagatggcctataaaatgaaagctattttagtcgatttgttatcataacatgccataccaatggtgtttgaaatgctactcttttacacaaatcaatgtattgactgatgtcttttgttatgcagggaatttacttcatgacaacaaaagcacaatcagcaatactaatctcaacagtggtcagctcagcaagaatgccaattctcatgtggaaaacaaaaccagcaaacacaaaaccgaaatgcttgtagagtttaatacctctaaaagctataacactaccaacaagaacaaccagcagaattattcaacttcaaagtactcagtccccaaaagacaaggattagaagtagtttggggtgtgttggagtttagagctttagtatgtaaagttcaacaagcaaatgaagagaagaacaaagtagaaggagaagaactcaataatcgaaaagtacttcatcatcccacttatctcaatcttgacgagtttcgaaacataacaaagcaagaaaaaggccaagacactcctgcttctgcttctgctgctgctactcagctcgttaacatcactcaccggcgtgaacttgatggggccgagtacaattatgcagctgcatcaaaaggcgctaaagttgtggctcataacaaagaagctaaagggccaagcagcatattggaaaaagacaatgacaagtatctgagaaatccatgttctgttgctaaaaaatttgttgtgattgaacttgctgaacaaactctaattgatgttgtgaaaattgccaactttgaacactattcttcgaatttcaaggagtttgagttgtctgggagtttaagctatccaactgaaatgtggaccgagttggggagatttgttgcttctaatgtaaaacatgctcaaacttttaagcttcctgagccaagatgggtgagatacttgaagttaaatcttctaagccattatggatcagagttttactgcacacttagtcttatagaggtatatggtgttgatgcaattgagcgaatgctcgaagatcttgttgcttctgctgaaccggtttcaaacaagttgttagagcctaactcaactgcaatgcctcattcaaaatcaatgtctagttcaactgatcaaaagactgttaaagtccataatgggaaccgaaatgctggtgcagcaggcctaaaaaccgctgatgatgcacttaaaccggctgctgctgctgctgctgctgatgtgagcaagactaagttatcaattgtcacaaccaattttcctgatcctgttatggaagttagacaacaaccgaatgggagagttcccggtgacagtgttctaaagattttgatgcagaaagtgagatcacttgagctgaacttgtctgttttagagaactatatcaaagaaatgaatcagagacaaaaagatgttatgcctggacttgacaaagagatttctaggatgtcattgcttttggacaaaagcaaaagagacattaaagacctcttgggatggaaggagataatggtataactttgctttttctttttctttttcatacaattttcacttcatttttcttcgagtaaatactattatagactctgtattttgcaagattaccgataagatcctctgctttgttaaatgacaaataggaccctcagtttctagcacgaatagatgcaaaaaagtctaggttaggttattattaattttttaatttgacgaatattgagttcaagatactattttgtattattttttttaaaaaaaaaaccgggtccgaattgtcatttataaaacagagggtctagtatgtctggtcttagacataggtggactaggcctgtgcctagagctcacatagcctaggagcccaaaataaaattctctttaaaaatacacattttgtttactaattttaaaaatacttttctttctaaataagggcccaaattatttttttcctataatccactgaagttcaaggccggttttagagtccagttggtaatttttgcaaaacaaataatctaaaatagtatttaccctttttattttgttcaaagcttaaattatttaacattgtcaactcaggaaaaagcagttactgatcttgagtcatggaaaactgttgtgtcaactcagctggaagttttggcaaaagaaaacaacttgttgaggttagttttactttgaaaaataacttgtttctcattctcttcatatcatttttacccttttgacatggtaaaaaaattgttctttctttacacaaacacagatcggaaatcgaaaagattgtagatgttcaagcaagcctggaaagcaaagagcttgcagtgctagcaatcagtcttttcttcatttgtttcgcgattttgaagataatttcggtacaagttttgacattttttagaccatcttctcaatctgataaagtatgcaaaagaacaagtagagggtggatgttgatcctcgtgagtagcagtatgacagtgttcattactttgatctatagttagtcactcccatcatttgtagcaatagttagtcactcccatcaaagtatgcaaaatatatgataatgagattattctcttttacatgaatgagtcttgaatcttgctaatgacatataatcctaatcaaagactatttgagttcaacaactcatcaattatacaatgaacgcttatagttacttgcttctgagatttctcggcaacaagattttctccaaaataaacacagtattatgtggtggatcttaatcagcatcacaaaacacttctagagagaaatctaaagtaggtttgaacaataaaccataatctaaatgtcccaactttgtatctgagaattctcttcacagccgtccaatgtgtgagcaacaggct

SEQ ID NO: 19861 - DNA, 7554 bp, Cannabis sativa
cttgtgagtagatctaagatccgggtaaaataattttcaacagatgatgggtgcactcattgggaaagaagagaagactatcgttctaccattttttatagaatggctaacgaccttgacttcttctacaagcacatgtggggaagatttcgttcaacatggtgaaagaaacttggagtagagactttgtagaaaagaagaagaatttagtcaggaagaatgaaaaagggacgtcttagaaagagtcaaagtacatggcctatggctatactgcaacattgtagtattgggcttacgagtccatcttgaagctaggtgacaaatttgtgatcaaaaagttgcatcactttcccagaatggtcgcctaggagagtaaggatgtgacactcaacaaggaggaagttattagtttgtttggcaaaaatgtatgttttttaatcctttgtatttggtcgtatttatttgcttatttcattttaattttagtctaatgatatttttgtttttatttacagttaacagtgtactccttttgatgtctctgaccaaatgaagaagagttttttaggaacgtcattggagttgaggcacctctatttgtggatttggaagaactaaagttgggtagtaatggaaaacctactcaggatagtttgcgtagccaggtcgagaagcttgacaaattgttggaagagcgggcaaatgaaacccaaatcattaaagaggctacaccacaatctccattaccaaaggcccattctgttcccactccagcatccattcccatcacctcagaggctcaagaactagtatactatgtgattttagcaaggttagagagtgttgagaaggaaaaaattgctttgaagcaaggccaaactgctattttgaaagggtagatgaagattataggttacttgaagaccctaatggcactcatggaagatcacagaaggccaaatgcaggggcaaagtcgtaaccacaccccgagtctcctggtgatgatttaattctcctgaatgattacaaacttgatgatgcagattatgttctctatacacctgagaacatgcagatcacatccattggagatacttaagagtctgaggtccaagttttagacacagctccaccaccaatggagaagagactaaaaaagaggttgaggtggattgatgagtacactgaaataaaaaagaagttgaagccatcagttgcacatttgaatgttgacacgcttcgagccgttgataagaagttattgttcagttttgagaattggtgtgtaggcatcattgggaacaagtattcaagagagtgcttctctggtctacacggtgcgacttggttttagaagtttctcactaacaatgaatggctttttgatgatgtaagtttctaagttatgtactatttacagttgtttatatttttttttatttaatgtgctcatttctaacttatttgtatgaattgtgtagcatatgggtgcgtcatttcatctgatgagatggtggcaaccctttttcccaaatgtgtacaaacaccggtgtaccatcatgccaactttatttctttctttgttgaagggtcgatgggatgcttggaaagatgtgaaccactgaggcattgtttaggatgagtccatattggacctagtttgttgtgatgcagtttagttcttgccatcttggcaaaataaggactgcatatacatgtccatattcttagaggcttagaaataataggtagctctggaggtgaatttggagttgtggatgttattcatcttcgatttgagtactggctcaatcacccttgaggagttgaagaagttgatggaagattttgctagattttcccatcattattggatcagtcttgtttatttgacgcccattatatggtcatggtctgttaggtgacaacctccgaaaaccaggttacaccattcgattgggatctcatcgacgataaagcggttgtaccatatacaaacatgaggtaataatacaaggtttttaagaatacatttactgagtaaattaatatattgacaaatatgatcataatttactaaattattgtttatttactaatacattgacgattgtagaatgtacgcaatagagcatatcgagcataagattttagactgtgattcaatcgagtaaattatgacaatatgcagctctttagacgcgaatcggcgatatatttattctaccaaaacttatgatgagttatgtattttttgacgagacaaccttgccttttatttggacaatctttccttttaatttatctatttactaaaaagttgattctctgaatacttgctaactatctttttttgttgggggggggattgaggtttgttgggttttcatgtaagtttgatgtaggcctgatgcctatctgatatagactcgatggttatttatgtggcaactagttttttaatttttcttttaagcccgatataggtctgatacacatccaatggtactatgtggattctagttctcagggtttcgttttgagtctgatgcctacccgatgcttcctcgatggttgtatttctaagtatgttaaaaaatttgggcaaaatcgagttgtatactggtccaatgttagtccgataaccgataagtctgatggcactatatgggtatgtaaaacagttgtgaatttttaagttttcaattttagcctaatatagttcgatagtactatatgggtatgttatcacttgtgaatttttaagttttcattttaagtctgatacatgtccaatgttagttcgatactggtttgatggtgctctttggattttaaacaatcattgaatactcatcgaaccaacattggacctactacttttcatgaaaaaaattgtgcagtaagtaaattaaaatgctcatgccacaaatgttagtataatgtttaacaaagttcaacaatattaaccagaaaactttccctggtaacgtggacataaatatttgacacatggcatgaaggatgacatcacaaagttgagtagacctgagtcatagtagttgacttgggaggggaccctagccctgcacccttggttgacttcgggagctttagtatggaagtttagcctataataacttgaatccaactcactatcttttagtattatgtgctatgaagacatggagaaacctaatccaagcctcgagagctgaaattacatgaacttgcaacctgaaagccaacatgggcacctagggtttcacccagcgcccaagtttgagattcccaactaggatttcagttttgggatcgtcttagtgtaaatgggtcaaaaattgcattgggacatcaaatagacataccaccgacatatttgcagaattagaatcagaatcagagcaaattcatttttgagcactcagagccccgagcaccccaacgcccaggttgacaatctattaatctaggtgccttccaagtaccagatcgacggtccgacttttccaacttctttgtattcatcaaaaatgggaaagatgtccttttagagaagaaacaatacttcataagttctagaaatgaggcctagcgcccaagttgacacctgggactggcctagcgcccaagttgacattttgtcaacctgggctgtttttttatggtgttttccaagaactcttccgagcatcttctctatttttagaaaatattgatattcaactattttgagggacaaaactaaatttttgatgtgccataactgggacccagcgcctaggttgacacttggtgctaggcccacgcccaagttgacatattgtcaagctggtctttttttgatcaagttcactaaaaagtgttttggacattttttctgtcattagaaataatgatgatttaagcaaactcgtcaagaaaaccacaaactagaggccctggaaacggggcccagtgcccaggttgacctggtgttcggcctagtgcccaggttgacaatcaacccgggacgctgccttcaattgctcaaatgcagaatctaatttgaccaatgaatttggatggtcaaaaacagggtaggtgacctcgtcctcaagttcaagaaccttgaaagtattaaaatgagatcgtaggagcttgggaatgagcacccatcgcccatgttgacaaatggtccggtgcactagtttttggttatccgattctgattttgttttgaccgtctctctattttatcacaataaataagatccatgaagtcagaaaagtcaaattcacaacttcacatttctcatttctaacatgagaaactcactcaaaaatgaaaagtttcaagtctttcatgtctacaaaataacatcatcttcgagaactgttgaccagctttgccagaacacataaatagactaattgatgtcacaatatcacttaggcatcttaaactacatgccttggatgtttttacacttacccaatgtccatgttggtgtcatatgtcaacctgggcactgggatgtaaacctaggcgttgtatgtgaacctgagcgatgggtcatgaactacctttagtaaaacaactatatctcattcaatattgatccgattgatgcgactcaactttcattcgaagctaattcaatgctatattaattaatgtctcacacattaatcgtaattctaaagctatcaatttcacttccaagggagttacaaaaataagctctgagttacccacagcaggactcgttgagctccaaatagtggctatcaccaccaagagcttatttttacagttagatcatcatcaatggtcaaaagaatctaatttttattttcccatatttttgtggctctccttcacctataaaaggagagctcccttaacccattttttactttcaaaaaactacccacaaggtcagagcttatctctctagaaattagaacttcaaatacttagtcttttttttttttgtaattaccatctcataagaaataaaaattcaaacaagacgtaactccattattatcgtgatacagggagtgaactaccataaatttgttgtgtctatcttataattcttaactactttttcattctcgccaatctagcgagcaggtgtggcttagaagtctagtaaagatttttgagtcaagaaaaaagaattcaacaacaatacataatagtacaattcataacagtaaaattacaaaaaagtcaacaaaacgttttaaccttggtacttgcaaaactttctgttatgccccttacaaccacacttgctacaagttcattgaatcacaatcttctcaccattgaaaggagttcagtttgacttaattcttccaaccttttgcttcttgggtcgccctactggtttcttctcatcagacactcaaactgtcatgttatttatgtcatcaaaaaattcccaatcattctcatcacaaactggcataattatgccttcatatgtgctcctccaatattctattgtgtaacatggcaagcaccgtgcgtacaggctaatacttcattgttaagttgcaacacatacatgaggccaaggaaacttcatgatttggaacaagccacaagtgtaagtttgttcctacaagtccactacgggactggtctcaactgatccgccagggtggacattcaaagtataaggtccacatatatcaacgttcaaataacaagatttctcaaatataatgccaagtcctcctctatttctgatgctagggtcttcgtacacttgtcagctttttcttttcacgtagcaaacaactctttgactttgaacctcaagaattcaacacaagaagtgatcaggaagcctcttgagttcttagttatgttgttgaagctttcagtccaattactcgtcattacgttgtaatattccccatagaaagtatgaccaaacccatctttcaaatctaatatcctcaatatataatgcaaccacatcattcattgcttttatcttctcaaattctctatgaaactttatttttgaatacctgtaggcacaagtgtaaattgatctgaatacgtcagtctgtaacttgtggttgacgctcacagtaatgtggtggtattatgcaccttgatatgtatcagggaacacgagctctaaatcatgaaccaacaaccatttccacagaaaaattcgccaaaaaagcaacaacccacaaattgaacttctgaatgacattctaaactaaatgtgacaatcccaaaaaaatgcatgaaacatgacttacccattgattctaatgacggtgcacttgcttcctcaatgtaccttgaatgagagcttggagtaactaaattttttaaaatatgcaagatttgagtgtgatttggttaaggagaaaatgagatatgtgaagtgagtgaaggaagaaagagaagggaagaggaggaatagattttattatatagagtggtattatggggataaaattaaaagtgtgcatatatttttaataaaaactttggattaaattttcattttctccaaaatatatgcatataaactcaaattttcctattcagatgacaccaatacacacacacacacaccaagtagtgttgttcacaattttgttttgcgaagtaatttaaccttgctgtcaattaacccttctaaatcgatattctttcttatttttttttcctattctctttctttttcttccttttttttgtagtttttattttttcttcttcttcttcatcattcttagtaccatcgccagaaaccacctttatccaccataatcaccaccgaaaccaccactgcacaaccaccactacccactaccaccgcaacaaaattattgcaaccaccaccacaaccattgcatttattagatccaaatcaacctaagaaacacaaaataaaagtgaaatctaaaaaataatcttaaatgtggaaaacaatctctattctaatcgattgtctttacccaaaacacaaatccaaaaaacaagacccacctgattcttatcataaacaacttatcaagacaaaacacaatacccaaataagaaaatgaataaacaaaaaaaaataaaaagaaatgatgaactgatatcattggttgggactccgacatcgtgagttggtttttggggtttacgactttgaatgaacagatgcctcctttccctactagtgtgcacagacaagagagaaagagaagatgaagggtggggtttacgggagcagggacctccctccactagagaagggaagaaaagagaacggctaccgatgctcttctccttttggtgctggtgcgtgtgcaggcgagaaagagaatatagtgagtggcagggtgggtttttgggggtagggacctccgtcctggtcctggcttgagaagacgccacctggagatcgaaggaggagcgaacgagtgctggtttgtgcacatgctgtagagagaaaatgtgcgtaggaggtagagagagaagagtgctggttaggaaattagggtttctgtaacgccctaatgctaaggcacgctacagt

SEQ ID NO: 19862 - DNA, 5108 bp, Cannabis sativa
  modified_base (210)..(219): a, c, t, g, unknown or other
ttattttaatttaagtaaaattataaaactaatacaggaaaaaaatagggaaaatacagatttttctaccattaatggacatctaaaatgagtgggccctaggcgtgggcctagcccgccgatgcctagggtcggccatgcatgtgtgtgttatattttcaccctaaaggggagtttataatgaacaattgactctacaatattttctannnnnnnnnntcatatagcttgatcaagttttaattttttgaatttttcggtctcatttttatgaacaacaataatgcttccatccaaattttaaatgtgtccaactttaaggcatggaaacgagatatgaaaattactttaggcataatagatttggacttatgcatgtgagaagaaaaatatgttgatcttactgatattagcactgttgcccagaaaactcttcatcaacaatggaaaaattcaaatcatcttagtcacattgctatttaaaagcttcaattccttaacatttatttaggggtttgaaaaattacaaaaattgtatatgcagtttgatttgaaaaaaaggctacaacccgcaccacccacaccatgaacacccttagcgttgggtgcttattttggagcttctaggatgtcgttttgatacttccaagattgattgtcaacttgggtgatgggcccaataccagaacttgaggacgatgtcttctactctacttttgaccattatagagagaatgtccagaacaaaattggcatttgaatgatcgaaaccagcgcaccaggttgattgtcaacctgggcgctgggctcagtttcaggtcctcgagtttgtggttttcttaccgagtttgcttatatcttcattattttttatgaccgaaaaaatgctcataacacttttttgagaaactgggacccaccgtccaagttgacacgtaacactgggcccagcacctagtttcggcctcttggaagttccgtttggtccctaaaaatagttgaatcttaatctttgctgaaaacgaagaatatgtccaaaagagttgtcagaaaaaatcctcgaaaagggccccgatcgacaaaatatcaacttaggcgcgggcccagccccatatatcaacctgggcactgagccttgatcctggcccacccaatctataaggccggttttgattatgtccaaatcttcttttaataaattcaaaacaaaattcatattgatgaaattacataaaaattataattttacaaatattaaatactaaattatgccactaaaaaaataattaaatttatactcgttaaaaacacaaactttagatacttttaccaaaattatgcatcaataaaatagcaatcttttctaaaatagttgaaaaatttctatttcaatcaaacataaaaatgaacaacaccaaatttggattggtcaaaataaaaaaataaaaaaaacaccactccaatcaatccaaatcatattataacaataaaacatcctctgttttactcatttcacaagttaaaaacaaaaaatttattaataattgtagactttgtggaggaaattgactcatttagggtttagcagagcagagagaataataaagagctgacctttattcatatactattttaatggcttttgtgagtgaaaaatcaatctttaaagagttttaagagagagaaatgaaaaaaaggaagaagccaactaccgagttgactgcgtaattatatccaatcatggagacacgcttttcttgctggctgttgtttgttgaggttgagattaaggacgaagatgaatatgatggtgctgtaaatagccaaaataaaaaacattaaacaccctttccttatttatttatttatttattattaaatttaatttaattccccatttttatagccatattttatgagattattcctcttgtctgatccattccattccatttttactactctctctctctgtacatctatctattattctttcttggctggatcatttgatatatgtagaaccaaaggtgttattcccatctgggtttttttttcttctttgtagattttgattctccaaatgggtactggagattcttacttttgagtggaaatctcgatgtgggtattctcaagatttcatttttaaggggaatatctggggaccaggagaagattctaaattctttcatgactggtttcagagattaggattctctatttgagaaaaagttttggaattgatcagtcttctgactattttgtttgatatgacatttttgtgagtttcattggaaaagagattggatttctctcttttgtgtttttttatttttggtttctcgaagttgacgatattaatttattcattaactcatttgacattgttgtcaaaatcttttcttcttcttcttcttcattctctgtctgttgttttgtttttttattcaattagagaacacattgttctctctctttcgttaggaattatgtggttagtgaggtcctaaccgatgtaaccaaatagctttcttatgtacgaggaaaaaaaatattaaaaagaaactgttgtgagagggtggttactggtttggtgcaaaggaagaattttgttacacaaaaaggttacttttttattcatattttttcagtaccctttatctaaaacttttgggatggattaaggaagtggttgttggtgttcttcccttttgatgttccattcaagagatataaggagctctttctttctactcagccagaagaaagctttaataccataacataaccattactcaatgaaatttctaagcattgtggggaattcctttggatgttcagcatctggggaacgtttagtttcagctgctagagatggtgatcttcaagaagccaaggctttgttggaatgtaatccaaggttggttaggtactccacttttggtgttcgaaattctcctcttcattactctgcagctcagggtcaccatgaggtagtttctgctatgatttttcttcatatatacatacatatatataggaatgtttatgtttggattggtagtgattgtatatctctatgttcttaggtagtttctctgttgattgagtctggagtagatattaatctgagaaattatcgtgggcaggtaatattcaaaccttttcaatatgtatttagattgcttttatctcatgaaagattaaagaattgtgtttttacattttggtgaatagactgctttgatgcaagcttgtcaacatggtcattgggaagttgttctgattctcattcttttcaaagctaatgtaagattattattatcatcattccttgcaaagttttattttgattgataagattggtgatgtgatgagtttcttggcaatctaactatagattcacagagctgattacctgaatgggggtactgctcttcacttagcctctttgaatggtcatactcggtgtattcgccttctcctggctgattatattcctagctccccagttttcggtaaaacgttgaggaaagctgtagacaaggaagaatctaatccagattattataagaagtaagttgtttctctcagattatcactgttatctttaaatattttccaatgtgttctacttgagcttgagcaatctcattaagttgatttcttgttcctgttttgtgtacactagtgctttgtctcagattattaatagccctgctgatggaggggtaactgctctacatatggctgcattgaatggccacattgaaagtgtacaattgcttctagatctaggtggttcggtttctgtagtaactgtggaagacggaactacaatcgacctaatcggtacttaatcaattataccatttttcttgcttggaaatcaactgtagtcctgtatgtgatcaattatgttttaaccattgttttagtgagcatagattggctttgaaatatcaattctcgggttctttcctggtaaactttgcagtatctcttgatgcaaaattcaatgtcaaaagtgttctcattgccccttttaaatcttaagaaatgatttcaaacctgcctgcagaactttcgggttttctacaatgtatatgttcttgcatacttgttagtatgtcttttcaattttcattaatttatatcatctctatagttcaaatcatagttcatgatgactaagttttatgttcatcctttctgttcttttcttatctttcataatctaaggaggagtattctgaccctcggctctcaagtatgagcttacttactgaactacatcgtataaaagcgaccctattgtcactctgcaggtgccggaagcacagctctacattatgctgcttgtggtggaagtgcacaatgttgtcaagtgagtatttaatgataaataaagttagtttattttaacttttgactcgaatttatgttgtaattttaatcttcaaatacattgctatgcagattttgatagccaggggtgccagtttgattgctgaaaatgcaaatgagtatgcagttctcttttccctagttttgttgtttcgaaatcaatccatgtatttttccactgcaagtgctaacaaaccacgaatgcatcactaagtacacggcgacacactcttgctggtgtccaatcagaaaaatgaatctgagatatgttgtgcctgtatttgatcggttcgatacagcccaattcttgtgtcttaattatataatcagctgacagcttccgtggatagtgaatgcatcgtaatacatgatgtggattagactttggttttaaagtctaagcgtgcagtaacattaaaacctgagattgaaacatgtttaagcatcccgccagtttgtaatctttaatctttaaccaactttatatgtactaatgttttatttgattgtcttataaggtggacaccgttgatggttgcacgttcatggcatagaaattcgcttgaagaaatcctaagcacgcagccaccaagtcagtctcaaatttctctttcgcctttcctgtctcttccccttatgagcattgtcaaaatagctaggtgagtgaagttatacaaatgaagatttcctattcttac

SEQ ID NO: 19863 - DNA, 3033 bp, Cannabis sativa
atccacataattattaatatttataacaagatttttattattgagtgataatgttttctaaaaattagacatattgcggccacagattatattaaacaccttgcaacagaaaagcacattaaagatagatttctctcgctgttttttttttttttttttttgttctagcaattaagttttgtttatctatacatatggtattctatatttcatagtctagctaatgttatgcttgcattaattgagtgaacttttcaatattagttataacttaataaataataaaacaaaaaaattgaattacaccactgattttattttattcactaagataaaatatgaaaaaggaattgttgactttcacataaaatatggaaaagagattgatttttttttttttgttccaatcattaagttttgtttatttatatatatttaattctataggtaatgttatggttgcatttgagtgaactgtttaattttatttataacttattaaataataagataaaaaattgaattactcattaggagaaaaacataaagaattaaagaattgttgactttcacataaaatatggaaaagagattgaaggatgcaatgactaaggttggcataagtagtcagaaaagaggacataggaaaagaaaagaggaatgtataggcagagcttcttttaaccaaaaaaaaaaaaaaaagtataggcagagcttcctaagatacttggaagaatttcttttatatatattttaacataattttgaaatctgctgaaaatgaaggaaatcaataattaatatgattttttttaattataggtaactcaaaactcttatctaggtgaaaagatagattttaaactcttttgcctacaacattatttataattttaaaactatatggttagtgatgaaatgctatcgatttatcaactcagaacatagaattctgtaactgtgtattaaaatttgatgtaaatttcagtttgttgattttaaaatttgattatgaattgtaaaatattcggtatgtatttttttatagaaatttgttattgaaggagaggagggatgatgtaaaaaagctttataaaagcacttggagcaattgcggagactactgcacttttattgacaaaaataaaaaaggattacaaggtattaacattttttttctttgttaattctatgtatttgaattacaaactaaattatatgaatttttatcattgagtaataaatatttacaggaatcagacactgccacaatataggatcacaaattatatcaactattgagccacttagtagtaagtctccctttctttcattcaacatgcatcataatgcaaagtttctaataaacttatttattcatagattcattaaaatacaaatcatgttcagcgccttagtggtagatttgactctctccattcaacatgcctcacattgtaatgattctaatatacttgatttattaatagatccattaaaagttgttttcatattgtattacagaagcttagttgaaatgaacatttttttaattaaaattattgttggaagtgtaaagttttatggttcatgagtataattttgagataattcgtgctactcttaattaaatatgttttattcttcctttggtattttactttaatttattatagttaatggtccacaaataaattattaataccttattatatattatagttatataataggtattatatcaatttttaaaattctaaataataataacaaatggtattaccgaaaatgtttcgaccttctctcttacaaaattatagttatattttatttatatttgtgctaattacaaaatgtataaatttattattgagactatattacaataatataattaactaagtataaatatattttttctattattacaaatgataaatatcattttagaacccgtattacaaaagttattgatttgctattttttttttcttaaatgataatttaaaaaaaaaataaataagtagatgatctgaacttaggatttaccttttcttttttgagtgtaaatgtaataccactaactaatatttacaactcctgttaaataacaatttcgatcgaccctatgttttgcaacatagaacgtaataatattatgagcatatttgtaaaattaattatagttaagatagattagaaatcgagtcacaattgctattgaggttaggaaaagaaaattttaaacttaaagtaaaaacgtttgattataattagaatcggtatatcattatattatattttgtaaaacacaatatttaaattgtaatttaactaaatagaaacaacaatcactaactttttaaaaacacaatattctattacaaaacgcagatatatttactagtttagtataaaggtggtgtttgtaaattatttatttcaaggtacaatgatcactcatattctattgttgttttatattgtgtactgtgttaagttttaaatgttaatttttagttgttccaatgttatttttagttgttctgtttcgtgttctactgttgttttataaaaatacagtatttttaaaaagatttccatgtgacagtatttttgtaagttgtcttaatattaacatttgagtgagaggctttagtttgggccgaatgtctttcaaatctcagcccgttagagaaggcccatgggaagcaaccggatccatctagaaagctcccaaagcagctagagcaatattctgaggcggtttgtagaatgtctgagaaagtacggatttccactcatctatactataaaaacagagtcgaactcgtctcagaccaaaacagacacacaatcaactagtatactctgaacaatctttctcacctttctaagttttctaaatttctatacacaaaacaaaaatggcgatgattccaagcttgttcggtggtcggaggagcaacgtcttcgacccgttctctatggacttccctctctctgtccctaatatctcgaaggaaacttctg

SEQ ID NO: 19864 - DNA, 1836 bp, Cannabis sativa
aaaaagagataccaaaccaaaaccctaaggtaacaagaaaacgcaaagcaaagaaatcaaaataaaatcaagatcaggcaaacatcaataccagagcaacggtggctacggcggcgtaaagagcggtgaggagatgaaagatgcggtcctgccagagtggagattcatttacatcgttccaccaattggaagcctccgtcaacttataagccaccacgaccgccaacggagaagacgacgacgaagaagaagaagacgacgaagatgacgtcatatctccgacgctactcggtctcatccgatcaagaagaaatcgatgttccagcaaaggcgcagattcaaattcttattgttcttgttgttattgaagaagaagaacagagacaaacactcccaatctcagatgttattaatatttgtttaatttttaaaaattaaaattaaaattaaaataaaagaactgccggcaaaataagaggaaaagcagataagagggagaaaggagaaagaagtttgagagagagagagagaaaaagattataaaggacacacgtgtgagcgtgcgggcttgggtgggcttttggtttgtgtatgggctttggcccacgcgtccttcttcaaccgtttctatatctccacgtggataatgatatttttttcttaatttagactaattagttttcataattaaaatttataaatgttcctaatacaaaacacctcaatccaaatataaaatcaaaattgtccgttgttcaaataattttttttgttcactttcccataatatacaaatttgtaataatagaatttaactttgaaattattaatcaagttgaattattaatcaagttgatttttttatcaagttgatttttttaaaaaaaaataatataatattaatcaagtttaaaaacagatagtttctggtctgaacacccccaaaaaaacaacactaaaaattgataggtttcttcagattattataggttgttggagtggacatgggaatagtgatggtttgtgttgttgtgtatcaattttgactaaataaaaaatttataatcttacaataacttcatttaaagactaaatagactctaaaagtatttgtcatcttttaaatgctcaataatgtacataaaaattatataaaatatcattttttattatattttaaatttactatatctctatttcttaattccaaatggtacttaacttattatataacacatgttggccagagtggaataggacccaattgatgttgtcatattattcttctattttttggaccaacactttggtttatatctataactattgaataaatgttggaatgagtaacacttcaaagactaaaatgtagagactcctattcttagtagggaccggtttgtactttaggactccgtaattgttgcccctaatttgaatttcccaattttttgtaaagtactcttttataaaagagaatttcatttatatgggttttaaggtgtttaccgaattttttgaaaattgaatataaagaaagattaagttaaaaaaaaatgaaaatgaaaggaaaataatacacaattttatgtgacgtggtccaaacattaatgagttttagtttacaagacaattttataagcttttagcaatagaatttttacagctctagtatgattttttcaggttgtgaaccatttgcatggaggacatagtgctatatttataggcaactatggccccgtttggggtagcttttagaaaagttaaaagtgctttttgaaaaagctattgcttaaaaagtgtttggcaaaataaaaaaaatagcttttttaa

SEQ ID NO: 19865 - DNA, 2750 bp, Cannabis sativa
  modified_base (851)..(851): a, c, t, g, unknown or other
tttatttttttcaaatgggaggtgtatttgtgggatattaggaatgtggtcatatattaccaatattattaagtatgtatttatggaaaaaattttaaaattttctaagtatagaaaatcaaatttcccctttaaaattagccacgtgaatgaattctcgaattgacaaacaaaagaagtaaagcttgctgctaaagtcgctaaaggttcaaatttgatttgaagggatttcgaatctaactagtgaagagattcatttagcttactcaaggggatcttgagtgttagaatcaaaggattcaggtgttcgaagagattttgatactcaaggagattttgagtgttggaatcgagagattcaggtttaaatttataatcgtttgaggggaggcaatgtagtgttttacttgaggggaggattgttgggtgtataaataagtagggaatcttgtgagctttgaattgtttgttacatgaatattaaacattaattttgttttacaaaagtcaaatcataaattatgataagagaatattaattacttaatagtataagatttagattaattttcttatcaatcagtcgatctagatcttgaaaacaacaatactttaaaataacacgactatataatcaaatgataatacctcatacttagccttattgggaacattgtatagcgaatacagcccctaaaaatcagtgttattaaatatacttaagagctatgaaaatgaaagtagagttttatattttattattgttggtctaattatattcttttggtaatatttaattattttaataatatttatattttgaatttatcaaatataaattaattttatanaataataaaaaaaaatatttttgactaaaatcatattaaaaaatttaataaaaacgtaagaagctactagctcattctcactctcaactttaactaaggaatgtgtttagagagcatagttaaagatgctcataaaaatcttattacaatttcttaattaatttatgtattcacaaatacgtattagaatatttttttttcaaggtgtttgttatttgttacaacatcattcttgtaaaattttaaaaaatttcgaatagtttatagtgttaaaaataagttttaaatttttttgaatacgtgtggtcgattagaatataaaaaattttattttcagtaaaataaattatttataattttaacatgtaattataaatctaaaaattgattaattataaaaaaaaaaaaagaatgaaaatagtactcctttataagctttacaaaaacaattttaatttggattagaaaaagaaaagaaaagagtatggattaaagaagaaaaaaaccgccaatataacttccctaactgtcacagactgaaggaagtgggaccccaaaaagaagaagacccaaaagtttcagtgaaagaaagaaaatacacttcagagaaaatcactccactctctctcttactctctttctccttggttctctgcaactccaagatctagtgtagtgcaagtaaaagagtgttctttccatgccaagatttccttaaaagagaaaaatgccattgccattgtttcctttagggaccaaaaccgtcatcgtcttttccttcttggttttgatctggggtttccggagttgccatggccgcatcttcagcttcaagatgcaccatcgattctcagaacccgtcaagaagtggtcggagacttccggtgctggtaagctctctccgcctcaaaatttgccggagaagggaagctacgagtactacgccgcattggcccaccgcgatcgcctcctccgtggccggaagctttccgaaatcgatgcgccgcttgccttctccgaaggaaactcaacctttaggctcagcaatttgggattgtatgtttcttatcttttcgtttttgttccattttttctgtttctgtttgggttcttgaaatcagggtttctaaaatttctttttttattttcttgaaatgtgtttggagattaacgtagtctgcattatacgacggtcaagttgggtactccgggaatgatgttcatggtggctctagatactggaagtgacctattttgggtgccctgtgactgtaaccgatgtgctcctactgatggcacaactttttcctctgtatgctttctgattattttaactccttattcatttctttattgaaaatataatattttatctaatgctaaaatgatattaccagtgctttttcttaatattaatcttctgctcaatggtattggagggttttttattctgtaattattactacttcaaaagagaagactgtgtccaattctagattgtgaacattgactaaatttatcggttggagtgtcatttcttatagaaaaaggtgttacaaagtgaaagtgaaacttttggaatcttcaacgcattcatatgtgtgaatgattttgcacattcatccttacatgctatagttagtgctgcattcaaatgctttctgtggccgcttcattaactgtgtatagttatgcttcattgttccaggattttcagtctaatatgtatgaccccaaaggctcttcaacaagcaaaaaggttacttgcaacaatactatgtgtgcccgtcggaatcgttgccttgaattaggcagttgcccttacatggtctcttatgtctcagcagaaacatctacttctggagtattgatagaggatgtcctgcacttgaaaaggga

SEQ ID NO: 19866 - DNA, 6204 bp, Cannabis sativa
gtgccatccccactagtgtgtgtatatatataaaaattattgagcagtttagagattttaaaaatgagagaattgctaaatctgaaagaagaagaaggcgttgcgattagaggaatgccttactaacaaacctccttcttactaatcaaagtacaatggggtgatgagaaccttcaaagagtaggcaaatggctttaattcaaacactcccaaagtaggcaaattatatccaacactctatgcaacaatttccccacattctttttccaccaccataataaaaccatcacagcagccaccaagtccaacgggaagcctagtttcaaaagctaatatgaaaccactcctctggccataacaataaatttgatcagtttgatgctgagtaacggcacaaagcatagcagtataagcctaaagtattttctttcctcttcgtacaaaggcttgacatgaactcatggccattcctaactaaaggcaatgacaaatggcaaccatcctcttctgtagatattttcttggaattataagtgaaattttgaaagatttaacttcggcaaccatattatctaccaatataatcagcgatgtaacttcctgaatatggttttaccaagatcccataatggctgtcaaatacttaattctcaccatagccaagtcatattaaggtcgcccgcccactaccggaaccataaataagaagggccgtacctaccttccctttgtattctgcagcacagcaaaaaacagaaaattagaacaaaaaagagagacaaagtaactgaccattctttccagcaaaaacaaacagatcaataaagcaaataatggtaacataagctaataaatctgaacaaaaggttagctgccaatactaaaataaataacatttattaaaaagaagtatcaagtggcgatgattcataaaagcacaacaaacgagcatggtcattactctcctatccttgaaaaactaagaatcctgacaagagtatattttctaaatcccctcttcttttgctaatggagagagctccatcccaactgacccatcagacctttcaaatggactccgaagggacatcaagattcatctgtggagggatgagtgaaataggtcatgttcttcctttccattggagcacttcagttattaagatataaagtcttggagcactcagagtagagaaaccattaagagtgctcttacctatattctaatcttatcaggtcctctttcctttctagtttcactgctaagaaaaaagcgcacaaggtaactctaagcaattcaatcctcgatcgtccaactctcatcacttgcataaaacaaagtgatgattatttgctgagcaagctgaagttaagtaccatcgaagctgaactacatccattgttatgtgatttccatttccattttaccttctatagagggccttaaactaacctgccgtgaaaaattcaacgggatgaagtgaacccatattaaatacaacaccagtactcaattatagtattcacttcctttgaatcaactaaggccgaatataacatatgcaagcactgtggttaaacatgaataagcatcaaacttctggaactataattacagatttctagtagacaaattagtcagctacaactccaaatagaaatccaatctttagaagggaaaaaatttagctgagctccaaaccaagatccaactttcggcctactgtgcctataaatgtgaatccatgtacacacatacataaaaagtacttatttgtcctatccacatcaaccatagtattattaaaagataaagctctagaattacaagtgcaataatcatccaatattaaatgctagctaagatgaaatcatagtaacttatttattaaaatatgtgttgtagctatactgaattgaccccaaagaccaactatatggtggagaccaatcaattctatgggagactttattaagtattgaaaaagaaaggacctgctgaattgctgatagagttgggcagggagacatactagctatcaggaaagacgaaattaccaggaaattgaaagtgtctttcccttcactcgaatgtttttgcacttaaaaaaattgtgatgctatgatgaagaccaccatgaataacatcaaaacacctataatatgtaattcgaaatcttggtcaatgctgagtaatccatgctcaagaatcaaattttagactaatgtgaattcggtagatgccaccagtcaccaccattcgatatggaaaatatgatgtaccacaatatagaaattgggatcaaaatggcacccaaaccattatgtgaactatagaccctgggataggtagaatatagtaaataaaaggggcatgtgggccattgccatgaaggctgtgaagtatagagatacgagggtagaagaatgaggatatgatagcagttcctttgtttgggtttaccatgtgatcgcaatttcagtaatagggtaagggtacatcaaatacctaactctttcttctaaaattggccccttcacacaagtatctaaaagctacgagtttaggattttgtaggcaaaagcaatcaatccttttttattaaggttaaaataactaaacaaccaagtcacgtgcacagaaaaaaacaaacacaaatctcattcttaagaaggatgctgtagctgctatgtcagcataactacttttaagaatatcactatgagcaacagatgtgtagaagcttaaaaacatggagctagctagcaattcataacaaaggcaaacagcggtcaaaactatgatactaataaccgccaaagcctaatagaaataaggatcaagcactaagaaactaagcatcagatggaggtttaaaatgtaactaataagaagaagattgtatagtttgaaatctcccaagtaaacctttaaattaagtcttgtagaaaaagaagacaacaatcaagaaatacttgcaagccaaagtgaaatatgtttaagattaagttgaaatagagtgtgaaggattaggacagaaaacaaacataatacaactaattgggaaaagaaatgcaagattccagacccatgaaatatgagacaggatacttgcctatattctttcatcatagcagttggctcctcatcacgtggcatgtcaccatctttcttcagatacccctaggtcaagcaactcgattgccattggtagtcagaattccttgttgactgagagatcgctgaaccaagactcaattgtagaataagtgcccatgtttcataacagatcaatctattcattatggaggcaatatggttagtcattcctttgcatgcctttatgatagtgcaacctccttcattctacatacaatttgttccacgccctttaactatcctccttccactataagccaaatctaatgaattctttacacaccactatacttcagaagacttctcaccaccttgtttatataataaaaattccatctctcatactacggatcaagagagacccaactatctccacatcgcattaaaaaacattatcacaactattcaaaaactaccaatacaaaggcttgacatcctgccagtaaaacatgagctcttcctaatccaataggaccaatgccataaaaaatcttgatatatactattctataactataaattttgataatcaaactaattacctataaaccagaatgaactatatacttccattctcaaaaatttctaatccagttggaccaatgccatcaaataacaaatcccaattctatactatagcaactaagtaattaaaatgtcagttgtcccaaagcaaaagcagttaattcaaatccacagtaaatgagtccttataactctataaattggaactgtcactattgtttttaatcttcattaaaacgtgaacccttcataatctggaaaaaaacgcgtaagtagcaaccctccattgaaatagagcttccagaatgctattctcccagcagtaactgattccaaaagaaaaacacctttcttcaagtaaactcaattatatacttccaccataatgcattcgtatctcattaaacacaccatgattttaaacttcaacatacagcatcaacttcggcaacaaagagcgaattctgtgcatgatgtctggtattattttgcaccactgtattctgcactctacttagcatccacactaggaccacttggaaaaaagaacccaaaccaacaagtactagaacacaatttcttaagtcattaagtatttgcttctgcaaccaaccgtaccctccaaggagaggaggatagagtaagaaaatgacaccaaaagatttataaaaccaattatgtggactgttcatttatgtaacatataaccttttatgtgaaattatatcaaaaacatgtgcatcatagttatataaagaaaacattgtctctaccacctacataacaaaagaaaaagcaataaaacccctataaatggcactttcaggttaacatcgaattcgaaaaactaccatagaccttttcgcctcctgactcatctcaatttgaccgataaccatctcaacgccgattcatgcgtgatttctcatgcgctccccatgaagaagaacccggtccataaataggtcctttgtcagcaacaccctaaatgacaaaatataagggaaaatgttagaccccaagattattgaatatggtataagaaagtaaataaaaaggtagatgagccattgtggtgagggatggtttttgagtcgtaataggataatataaataggtgagttcaggcagagggtgaattatgcaaagaattgagccttctcaaattgcatcatggagagcctaggcctctcgaatgcctaggaaccatttcactgtaactctattgctgccatagcaacaataatacacaagtttcatatatttttctgctactgctcttgtatattctattgttcttgttaatctctataatttggagttgtgtaccagccaattcacatcaattggtatcagagtcattaatccactatggcaatctactcaatgatagaaaaacagaccaagttcttcaagggaatttgttgctgctcgatctcatctacagtgacaacgaagcgttgcttgaactcgatggcaccgtgaatacttggctggaggacataagaaaggttcaagggcttgacaaaaaagtatcaatggcttcaaaaagcttagtttcattagtgacaatgaaggagaagaacgttgcatccaatgggcttttttcaacccgatatggaaacaatgtgggacttctaataatgaagaacaagctattgtgaatggcgaaaaatagttgcaaattactttctccttttaatgacgtcgctagagaagaaagaattgatcgagacgtctcaaaagaagaaccaacagctagggacgtcgtcgaaggaaaagcaaccactagggacatcgtcagagaagaaccaacagctcgggacatcgccagagataaagaagccacatttgattgactccaagcttgccgcgtaagggggtcttccatggaaggaaacagttctgggcaggggtttgagagatacacactcataatatcatttgcttaaaccctatcttttaggcgcaagcccaatttattcagcatttttccaaatccggctcaattgatttttgctattacactgctccattttggactcaaatcttaaggctccttaatgttgctcggtgatataaaaaaacaaaaaatagatccatttgttctctatgaaatgggctcaattacatgggatcttggtctagccaattcattgggttcatctcaccaacccaaactactccatcaacagcttgccaatttgcctcttcctagtagcacatcgctggagtcgacactttgggttttcaccaatgtgcaacacaaggcaaaatccatagtgcttgatataccacattttttcggcatctccacgcatgggattcgggtctgcccttctgactcatggtccatatggattttctctcttgtgcctctctgttcaagggttgtggggttgatgacaaagaccaacttgttttctgcaacttgttattcgaaaataaaatgcctaaacatcgtaggtggatttttcatcaagagagagaacacgaacaaaagcttactatggcaagtt

SEQ ID NO: 19867 - DNA, 3426 bp, Cannabis sativa
  modified_base (2273)..(2289): a, c, t, g, unknown or other
  modified_base (3347)..(3354): a, c, t, g, unknown or other
gcgctgcaaccactttagaaactatcaaaccgtaaatttgaaaaaaaaaattaagaaaatagtatatggggtaattcccctttttttttatagtttttatatcatcatttgaataacaagcaaagttcctttttcaattaaatatatgtatataatactttttaatgagtattacctataaatggttactaaacaaatttaaatattaatattaattttaaaaatattaaaccagcaaattttgatctaataatgaataataaaagagaaaattaaatttatataggcttagtttaactatctaattaaaaaatatatataaaaaaaatatctctttttacactatataaaaaacatgttcatataaaaatatttaaatcaaattcaacttttacttatttatttttttttttttttgctaattttttttttaatttttttttcaatcaatggaacaatctcagcctatatgatgtaaaagtgaggaaattttctaattaggtagaaaaattaagcataaaaactcaaatttttctaattttatctattcatactaatatccattaagagtacactcaaagagtccccttgcagatgcttttggaataaacatttagggttgagtgaaataataaaaaatggttctttatccttttagttattttaattaaaatttggctaaaaaactaaagagtctcttatagatgcttttggaataaacattatttagggtgcgttaatttgtaaaagttttgcttctaaattttctatactagaaaataaaatatacaatttttgttttgatttgttatttaaaaaaaaaatgggttcggttaaaatttttattttttaattttaaaacgaacaataaaaataaaatgtgttttgtaactaatacttctatttttagttttttattcaaatgatgagagagagaaaaaatgaagtgaatattgatgagaaagattacaaaaaagattataattaccatttttccaattatattttctcgaaaaaatttttacttttctaattaaaaaaataaatattaatggttcaccttttattttcttttgttgttaattattataggcaacggagctcaaatgtggcagtgtagtggttgtaaccctatatgaccatcgctatgctgatggctactcaggcagcatgttcatagtatcgtgggctgaattcacacgatctaaacctcttatgatctataatcgcccctcatttcgccgatctttgctcattcctcgccgccttggttgcattgacacctctgtccaagatatgtatgtagacacaactatcactagtagtactcctaataacaaaaaccctacttcaccaactacactactcaacaatgatcataaccctaacataagtactataagtagtcgcttgtaccatattaaagctgaacatatcaaacaactacaaatccaagcttccttaaacaacaacaacataactaagattgagtcttttggtgctttcttgtggaagatgattgcgaaatattctctagcgaataataataagtatgtcaacaacaacaagttatgtagaatggggttttttattgacggacgaaaattgttagctcaagatgatgcattgaagttctactttggaaatgttttatcaattccgtgttgggccaagaaaacttatgatctaaacgacgagccacttaatcaagtggctcgagaaatccacgagagtctgagaggaatttcgaggaaggaacatttcttgggcattctagattgggtcgaggcacttcgacgtctaaagtcaagaggaacatttagaatatcaacttttgaaatggaggatggaccaaattttatattgtcatctggcctaagacttgagtttgaaaaggttgattttgggtggggtaaacctattttgtcttcaaatcatatgccaagtggatttcaagagatatcaaaaggtggctatgtgatgcccttgttgatcccaaatggaagtggtgattgggtggtgtacatgcacttacatacatcgctgcttgattttatagagaatgaagcttccaattttcttacacccttaacttttgaacacctaggaaaaataaataatacaaatctaaagagtaaaatataaaaagaaaagttatttgaataataaatatatatatttatcatgcatacaaatattaaaaataaatatcttataagacatatatttgtacacccttggtgttttgtactttaataataataataataatnnnnnnnnnnnnnnnnntaataataataataatatcttatatatatttgtggctatatatagcacattagtattttttttttgttctatatattttactaaaattttacacatgttgtaagtactcaacttttttatattgaccttaagaattttacagcaaattctaagtggtttactacctctaaaagttaattattttgagtatatattttgagaatgaccattcgttaggtttactaatattttactaatggtaaatgtttgaaagtgtacattaataatatatgaaaattaaatgttatatataaattgtacgggctacttcttttataatcatttggttgtgagatagaatctcatatttctaacatggtatcaaattaaaactctaacgagttataaccttgtgatttcgggatagtaacccaaaaagagccaatgtaatccaaaaaagtcacagcttgatcgggttgtgcaagattggtgagcaaaaaatagccaccatcttgagaggatgttagagagtcccacattaattgataatatgtgaaaactaaatgtcatacataaaatgcatgaactactcttctcgtaaccaattaattttgagataaattaaaatctcatgtttctaacaataaacaaataactttaataaaaatgaaatagtgtttgtcaaccaactaacatctacagttaattagtttgttcagtttttactgtttgtacctaactgtaactaattctgttacattcttgttttgctttctttagttggtctctcaaaaccttctatatctctctccctataaataatgaaatggttcttctctttggcttaacctttacaagccttagagactttgtcttcattgttttctgttgtttgcttagtattgataggttcatacagtgtttaatgtaaaagttggaaacatactttattttcattttttagggaagaaattcatcaaacaaagaaaaattacaccagaattggcaatattaactatttcgttattaaacttataaactaaattaataagtaaagacactacaagaaatgtcacttnnnnnnnnacatttttgtgctggcaaaagttagtattgcgctggtaaaatagaatctacttgtgctgcgttggcaaaagg

SEQ ID NO: 19868 - DNA, 2337 bp, Cannabis sativa
tgcaatgctttcacagatgattctgttatgaaaatgttagataagatcgttgtggctttgatcccactaacaggtagtcatgatgtagaaatattagatagagcccgcaatttgctgtgctttattgagttgatcaaagaagaattaccaaaaagtcaaaaggaggaaagtgtgcgtaggggagaaaaagaagcatacaaaattgttgaactaatgcaagatgccttttctgatgagcttggtccagtctctgtgacagctcaggaaagagtttccgttccagctaatttggtactcaaggaaaatcttggggacttggacacggtccttcctgatgttcaactatcttctttagattcattttctctagaaagtccacttcttgtggaggtaggtggtgttactaaacaaactcttcagaacaaagaagagttagaaccaagaaatgaatctacttctctgctttcagaacaccgcaagcggcatggactgtactatcttccttcacagaagaatgatttatcaaatgattatccaccagccaatgacctaagatcgcaggatgatgctgaagatctatatatgcttacagagcaatcacttacatcaaagaaaaagccaaacaacccaaaggcaaggcctgtggtggtgaaattagatgaaggagatatattgcctataacatccaagccagggtctaagaatgattcactttctgacgctgtgcgtgaagttcttttaggcagtgagactaatatcagttcatctcagaacaaaccatctgatagtactttccataagagtaaaggcaaggagaaattaaatgttgatactcgtgaattggaagaaggtttggatataggtaaacatgatcataaaatttcaagttcaaggaaaagcaaacaccaacatgtgaaagagagaagacaccgaagttcgggtgatgttggtgatcaaaggaatgacgaggggaagaaaaagagtagtcatcgccacagtaggcataaatctcgacaaagaacagatgcaccttcaagtgtgactccacagacacaggtgattccagatttcctattatgacagttgaaagtttcaaatttgttatttgttatcctctgctgctcaaaaatttggctgctccccgtttatttttaccaacatgacctgccaatgtgccaaggttaattttactgtacatttcttacattttgattgtatctggtttgtggttgcctttcatacttgaatcgattttccgtgttacataaaatttcattttatttataagtttcacatgaatatatattattccgttccttggtattatattaacttattagcattgaaatgctatctgtgcaacactgtattgaagatattatgctcgttacatagcttgtactatatctgggtacctttactgctattattatagtttcttgatcctcatatattatatattagatacattcaaagttaatgtcacttgtggttgtcaatgtcaatgtcactagtggttgttaccgcatctttcttattgctacatttaaagttaatatcacttaaaagttaatatcacttgtggttgtcattagtgtactttatttaaggatgttcataaaatattcaatgtaatttaatctatacgattagatttaatttaattcaattcacaaagtttggataattagattagattggaaaatttaaaatctgcttctatgcagatcgaatattgattaatatgtagagtaactgatcaaattcaattaacatatttatatatatttaataaaaatatttatgcaactaaaattttaatgcaaaaaaaataataataatttaaaattttaatatatatgatataaatatattttaaaatttaatggattaaatttatattctattattatatataagaaaaatataatttaaaataaatatattatttctttctacatatttgttttatcctttgaatttcttatttttattattttaatttttgttggaaattgtttattgagtttttcggcaacaaaatatttttagagcttaaaaaagtaatgaaggcgtagatattaaaataacaaacaaatttttttttatgtggtttaggtgttaattattttagtccacgagtccattttattaagctcatcggtcggtggctgtttatacgaaaatttctatggtaggtacccttgttttgtccttatagtatagtgatatttttttgactattgataaagatgacttttgaaagtacaagataattattatataactcaatgcattgaatcaaatattttgatgtcaaaaaaaaaaaaaaacttt

SEQ ID NO: 19869 - DNA, 3787 bp, Cannabis sativa
  modified_base (38)..(62): a, c, t, g, unknown or other
ttaacgggagatcaaacctaatcgttaaatttaacagnnnnnnnnnnnnnnnnnnnnnnnnntctgttaaaccaagaaatgccgtaacataaatacttttaatatataaagatatactaaaatattaggcttatacaatgcattctattaaattaagataaacacggattcatttcatctaattcgacattcagaataatatttttgtttatttttttttttcacattcgtatatgttatagttattacaattattttataaaattttgaaaaatttaaaataatttataatataaattataatatttaaatagtttatttcacatacgtatgaaataaaataattacgcgtgcaataaactatttgattatattttcggcatgttatatttttttaaaatttttaaaattttaccgaacatcttaaataactacactacaatataatatatacatttatatatatttattttattaaatatcaaaataaataaaaatatatcaatacacccccttttgcatcataaattttctaatattatatacaataacgtgataattttttttaatctgctatatattttaaaatgtaagttttgtgtacaaatatcattaataattgcgtaatttttctttctctatgtttttattagtaccagaatcccacttacttgtacaacaaaataacacttgaattactgtgaataaaataaaaattataataagacaaatttgagttcaaactttagatactttttctcttaatgtgacgaaatcaatttaatgtttacaaaaataaaataaatttaaataaaagccacaaaagagaatagaatcgattccattccatatagttaattagtcagcacacagctgcaacaccattctctctgttattcttttttttttgtattttttttttcataaaagattatgggatggcattaattttcttcaatttagaaaatgaaatcatctgtctttttctgtggtctataatttatataattaattatatgtctgttactgaatcagattccattccatgtagggttccttctttccttatataataatattacaaaagctatatatgtaagatttcaatgtagccctttcatttatggtctattcttcttaaatagaaactaagttaataataataataatgaattttgaaccctcatttttaactctttactatgattttgaaactgaaaagaataaaagaaacataattatggacaaaagaacaagccagacaaaacactctgttaggttatcattgtaaatggaaaagtggaggtgccaacaacaaaaaaatcacattatttattttcttcttattgtggaaagtttttatttttggaacttgtattaaaaatgtcttttttgtaaaaaggcatttgggaaattggtaatattgcaagagaaattgtttttagactgaaaacgacagcaacattcagtctgtcacacttgaaaacgacaaagaactcgatacccaaaaggggaatagtgccattcccataacagaacgtgtctagaagagaacttgccacaacaggtgaataattctgtaaaatagggcccctactgaagaagaaaaagaaaaaagaaaaaagaaaaaagaaaagagaaaagtgggaatgtgactattatcaatacataatataatttgagtagaagaaagaaagaagagctatattgtcctattgctttttatccaaaacagttttatactactcccaacacagtcactcattgttctgaaaattggaattttactgtcatttttcacttttcttttttactttctcaccttgcttatagagttcatgcttgaattaaaatggtcaattttagttagtgttatgataggataggatagcatagcataggctggagctccattattggaatttggaagagactaaagaatggttcaaattgattggttaaaaaaaatttactgtgcttttttggtttttactgttatgactagttttggatgatgagggtaagtaaatgggggtagtactagtagtagtagtagccaagatagatgggacttatgcatggcataaatgaacctgatctgttccttggaattttaccctaaccccaccccacaaattttacttctattggttaggaaaaatggtaactagctttatagctaggttttactaattagtgttttttctccaaactattggtattttatttgctattagatatattgaggtacttaataccacactcacactgatgctgttaacaattttttatataatttattaaattataatatatgacactcgatatttaaataaaataataatagtatgtcacttttaaggcgcccctttagcattttttttttttgcttatagttacattttgttttcctaataatatttgttaagttaaaatttttattttgtaagagtttattcatcataaaaaaaatatttgaacatatattataattactcctattaaatttatttattgtgtggtggcttttttattattttagtttatataattaaattaaaaaatatatatttaaataaattaaaaaatatatatttaattttttttaagtatcatattttgtttttttttttttttttgataaaaagtataatattttgtttagtggagctatagttcccataaagcaatgaatgagtttgtcctatgtaaaactcagtgatagtagtatgacatctcatatattgatactttttattaatttatttttttgtcactttagtgtttttttttttttttggtctattgttcataaaatttgtatatgtataggggtccttattgatagtttgaatgttggtttttagtagggtatccctcctacatttcttccattaaatttatctttctttcactttttcaataattgccatactagaacaatatacttttttgtttcatggaacacccttgtgacataattttctatgacaagtggaaaaaggagaattcaatcatatataagccattgcatggtttacatttatatatacataaaaaaattagttgaaatatatatttataataaaatatttcagtgcattattgtaggagtttgtggactaattaaagtaatgttatcatgcaatatgtacttatttttattttatcttcttcttcttttggggacatgaatggactattatatcattattcccttaattacatgattacatatagtcaacataaacccaccaaatattaagttgacttctttggttgttgatttgtcattttgagtatatatgtatattaagatgtgtatttgcatgaattaattcaatgtagtatttagttattggggtgtgttcataattttgaaaggaattgacaatttaaaactatttttatttatgataaagtgggcaaagaattggttagtcaaagtattaggcgataatatctatttttgaagtcatataaataaatgtctaaggctaagaaaataagtatcaacacattgaaaaaaaagaggaaacaacacatgtagaaaataaatgtactcaccaacattttatcttctgaatgaaagttttttgaggtattacagccaaaaaaaaaatctcactaaaacgacatttaagaaaaacaaatgattttcatgaaaataacattgcgtttttatgcggaattctatttataaattgttattgcaattagcgctgcaacttaaattgtaacaaaaaatcaatcgtacaaaaatctcctattgtaactagtgctgcaa

SEQ ID NO: 19870 - DNA, 4280 bp, Cannabis sativa
  modified_base (3934)..(3948): a, c, t, g, unknown or other
ccttccaagtgtctgatcggagattgaacttttgcatcgtatttgtcttcatcaaaaattgggaaataggtccttttggaggaaaagtaataatttttaggcacaaataacagcgcccaggttaccacctggggctgtccctgcgcccaagttgacatttttttaacttggccatttaaaatggagttttttagggattatttcagaaattttttccatcatcagaaataaaaaagattcaagtaaactcaaggagaaaaccacaatcatgagtccctagaaatagggccctgcgcccaggttgacaatcaacctgggacactgccctcaattgctaaattttaaaagcctttgaagtatcaaaaatgaaatcttgggagctcggagaaagggcccaacgcctaagtcatcatatggctttgtgcgatgggttctgcttatccaaatttgatgttgtttcaactgcccgtctagtttttcacaaataaaatgatatatgatttcaaagaaatcaaattcacaactttgcatttctcatttccagcacacccagaaattaagagttttgagtctttcatttctccaaaccagcaacatctcctagaacaggtgaccagctttgccaaaacatataaatggactaagtggtgtcaaactatcatttaggcatcttaaagtacatcccttggacgtttttatacttacacaacatccatgttgacattagatgtcaacttaggcgctgggatgtcaacctgggtgctggatgtcaactaggcgctgtgacttgaactgccttcagtaaaataactataactcactcaatttttatccgattggcgggatataacttgtgtttcgaagctaattcaatgctatatcaattcatgtacaaaactccagacgtaattctaaatctatcatcgtcaaaattcacctgaagggagttacaaaaataagctccaggttatctacaacagaacccactgggcaccaaaaattggccatcacctccagaagctaattttcaccattagatcatcatcaacagtcaaaaaataattatttttttcctatctttgtgggctttcttcacctataaatggagggctcccttagctcatttttacattcaaaaaactacccacaaggtcaaagcttctctctctagattttctctctctaaaatatagagcttctgacactcagtctattgttgtacttaccgtcttgtgagaaataaaaaattgaagtagacatagtcccattactatcacgatataaggggtgaactactataagttggttgtgtctctcttaattacttaactacttttattcattcctgccaatctagcgagcgagtgctgcttagaagtctagtcaaattttttgagtcaacacagtgcatatccagaattactgacaatgattgaaggtgctagagacactccaaaagcttgggtgtaagcatcctttagattgataaaactttgggccgttgtcaaaaattctgacaaggtgtcaaacctttgtctatgtatctcattctagaatagggatcttgcccaaagccttgactacataaccactaacttcatgtcatcattgacttagatctgtgttgttgcctccataatctatatgatataggatttcaggctctccccagattattgcttgatgttggtcaatgagctaacctccatatcaaggtccttagcaactacaaactatttctggaagatatagtgtaaatccttccagttttggctagagctagaaggcaacatttcccacaagcatttgatggatttagacaaagttaatgataaacacaaagatttcccatcttcattgacttgcaccactcgcatcagcctattatacttggataggtaagccctggggtctgtcttcccttcgtacaactccatttgctacaacataaatctttcgccagttgtgcctcaatgattctatttacacatggctctagatcctcatctttcgagttagatacgactccacttttttttttcaggccaaatggtttgtgagttttgttaaagcgactatttgatcctatagttgtctggtgtgatcatctaagagtccacgtccacaaattctatcattgatatagtttcttaaatcacctctgcaaggccttaccttctcacccttcactttttctcatttggcattcaaacgatccttcaggttcgttgttgacatgctgtgttccgagtctagatcctccacatggaagctcttgttaatagaatcgttggggtagtttttccatccacaaatgttaggaccttggacattagtacccaacccatcgttccacacgctctgccccacaaatttattggttggcatagctccggggtttagtgtccctttctttctggtagggttggtcaactacatttctattgctccatggaacattgtacatgggtcttcttggaggggcaaacaatacaccctttcctttgtcattttatagggtgaacgacctaactctaagatggttaaacttcttaatatgatagttttattcaaggaggctagcctgagcatgtaaatgtgcaagagcttttttcatctgacacgagactcccttttaatctaataacctcctgtagataaccgcaagctcttactgcagttgtactactttagagtcttgcttgtagtactcttcttcatagtctttgttgtggttttctttatggtcatccttagggtaatctttgtgacctccttactcatcttcattgatgggatcatcagcgacatgccatgacacccgcatgagagttttgttgaggggagctggttcttggtgtcattggtggtgttgtcctaaccatctcgatcaagtggtttgaccactgccttttgggttataaccatttttgtagatgacaacttcggtaaatctatcttcaggtgtcaacgaaagcaccaaaatatttaccaatatttttggaaactgattataaaataaataagcttaagaaagaagtaaatttaagaataagaaataagaatttttacgtggttagagcattaatgagatttagtccacaagtcaatattattgaactagaaaagcttcaaagtattgtttttccctagcttaagaaccctaattcttagcttttgatagtagatatgattatcccaactatttgcataaatgagtaatattctatttacggctagaattgggtatgggtgaacctagactcaacagggtttagaggtgtcaagtaggccaactaatggggtaaaatgcattatatattggctttgggaaaatttggtgaggccaaattcaccagataatggtcgtttgtatgagtggggaccatttggtgatgtcaggtgtcatgcacaaccatgttggtaccgagaatgtcagagaatattatgttggacaaaaagatggtttccttttggtggtgcacacacttcctgggtctaaaataagggacgagcccttgacatggtggtaccctatacatggaggatgccacataggatgtcatccagaggcttccagatgcctcttcaattacaagtatttggattaccccatgtggatatctagattcatcctgatggaccttttgttttctgagccaaataacatttctcgagccaatgtggtccgacctcgtcgagtctataagttgaacttagatctggatccagaaatcatagcttgactctacttatgagttgatttattaacttgattgggccttggaatgggcctactttggctgatattgggccttgaaagtgtacccatcatcaattggaaaacatgaataacaataatgataatattatatgtatatatattgaatattatatataaacaatataactttataatatatatatatatatnnnnnnnnnnnnnnngagagagagagagaaagagacaaaagagtctacaggagagaagagtgagactccactgtttgaccagaagcaatcgatgggggaagagtaatgctaactactagatctggggtagaagaactggatctaggggtggagggctatgttggaggtggagagattggataagaaaggacaaacatgaatgtagggaggatagggggtctggtgactcattctggtccgttttgtgttggccagctgttagagagaaagggaggggagggttgtggctggtcctctcgtagtcgcacaagagaaggggatggagcctcctaattttactttagggt

SEQ ID NO: 19871 - DNA, 5715 bp, Cannabis sativa
gttgaaaccaaattcccacaagtcttgctgaaaccaagattacaagcaatgcatatatgacaaagcaactgattaaaatcattaatgactaagaataaacacaagagcaacacatcactgtaagattgtaccacaattcactctttaatctcccaaaatgaagtctgatcaagttttcttccaaaatagtaatgtctcaaatatatcccataatttactacttaaataatagtaaataccaaaaacaaaagcatactaaagtgttgtcaactacttttcatatagcctaaattaattttaagagttttaacattagataaatattaattaaacaaacatcaatccaaaaatagaaagaaaaagaaagtaatacaatgtaaattctaaatttccattaatattcaaatacaatcaaaatcattaactataatacacaacagaagagcttgttttttttatcaaacttcacctttaacaagcctagatttttgtctaaataaaactccaaactttaaaaaaatcaaaacaaacaaaaaaagagcatcctaaagtgtcatccactaactaataaagagcactaaattttcctttataataaaaatggaagttagttagttagttaccagctatgatgaaatagggtcttcttctgtagccaaaaattgggataacatcagtaagaagaccccaaaggggtttaacaatccatggaatagaagtgattccaccataaatctgagcttgagaaggttgaactttctgaatatctttcatataatacttagttccaacacgcccaagtgctccactcaatccctggcttattccatagattaaaatcacccctaatactaaactccaatgcatttctgaggcaagctttttcaaccaatgcaccactggcccaccattactacaccctcttctttccatcacgtcatcatcatcatttttctcttccattatcatcatcttatcattctcctcctccaccaccatcactactactctctcaaaatggggatctggtgactcagtttgtgattcagtggggagaaaagctcagcttaaagcttaaatcattactacctgacttgaattgaatctacaattaagaagaggacgtagtttgagattaagataaatcccatgttcatgttcaggaataggaaaccaatttttgaagatgaatttctggagagagagagagagagagagagagagagagaggggtaaggttgggttgaccaacatcaaaaagaccatttacccaggtgacatggttgtgcttctttaccatttctccattattaaattaaatatgaatagttaaatacttaaaaatttaagttttagtaaatagttaaatttaatttttaacaataataatatataagttatatttttttaactttcctaagtacttaattaattaaatgtcaagtcaatagatgtataatttaatatttattcatatatcacatatttaaattactttttagataaaaaaataaaaatttaataatttagactaataaaaaactatcacgtggttattgaattaacacttaacgattaagtatttacgaaaattttaagaatatacttaaatatttaaatatttatgtcgtaaattattcattaaattattaatattaataaataagggtaaaaatcttttactgaagttatcgattgaatcttttttttttaaatgacaaattgaatttgttaaataataaattagaccctctattttaaaaattagtacaaaatagtatcttgatttaattttttttttcttaaaataaacgtaataataactcgatctagatattttatgacaagactacttacattttctacaactattcatgttagaaattatcttcaagttggttatataaaaaaataaaaaattaagcttaaggtgctattttgtactattttagaaatatatggtcaaatttatcattttataaaattaagagtctgattggtcactttttttttgaaaaaattgtctgattggtcacttttagcgaacacatagttcaaaatggtattaatcctatacattattggattgttcacaaaaatatataaaaaaataacgacataagtactcaaagttttgtatttgtaatcagaataaacctaattatttttaacggtatgagtacccagtgtttgtaaaactgtaattttcattcagttttatcagtacagactccgttcgtgtcttaaaaaaaatacatgtaagactcattctaaattatcaggttcggacggaaacatataatatcaattatttctaaatattcttttaataaatttaaatcaaagtttgtactaacgaaacttgatgaaaattacaattttactaatattgagtacctatgctgctgaaaaaattattgaatttatgttgattataaactcaattttaagtacttatgtcactattatcatttagttataacctcttctaattagaatataagtttttggtcctaagtgtataattaaacagtggttcttaaattatgatgaatctcacaatatagtttacttgttgtttctctttggctctttaaaagcaacggttaagtcttacaaaataaacagtaaattacttatttttagcacaataaagtactttttttttttggcgagcgcccgaaagtggaaagattaaaaccaatgtagatgctttcgtgattggttctcagagttcttttggagttggttggttagcccgagacaatggtggtcttttgcttcatggcttttcaaagattattccaggagtagttactccaactttggccaaagcagtgggacttaaggaagttctaagttagattaagtagtagaatctagctaatgtggtgattgaattcgattgtcaagtgatggttaatgtaatatgcaatttgcttgagctaaagtctctttttggcctagttgtttcggattgtattagactcattcaaagtctaaataacatttcttctgtctttgtcaaacgatctgctaaccaattttttgactcgggttgcttgtactcatttagattgtaattatggtggtagacttgtccataccaatttgcaagctttttgattagctgatttgcactaataaaatctaccagattattcaaaaagaaatgcttatagtgctctaatttgaaataatatatatttaattgtagatttgtaaagattgtaaactcaaattcataaatataagaatatcttattcttatgcaaggtaatcaaattcattagtacaaagttactaacaaagttacaaaggaagatatccttaatcataatatattgtaaactaactaaaatattttctttccattaatagatagtgtttctaaacaaggtaaattcatcaaggcatctttgaagtcggactctctcttaggcttaggcttacggtcagtaataactcggagttctttccaattaagcaaaggataaggacatatgttcttcaagttctctggccacatgagagccttcaagtacataaagatttatcagaaatcataaatagatttgaatttcgaaatactaaaagaattgtaatgacaagtaatgaacatacctcacatttgcgaacatgcagggttacgatattccaagaacaattgagattcataagaaaatttcgcatattggtaaaccactttgcatcatagtttttctcagtctcaagaattacaattttcccattcaacgaattcgaagactccaatgatatgttaaaattgatatagccttcataacaaaagtactctaattttggggcagattcaattgtaacacccttcataattccaatattagaactcttaaacttgaaacatttcaagtgttgacttgagattcttaagcccttagtaaattcggtgtaggtctggaagctcaaagttaaattctcaagaagaggaatattcgaaataagaagttcaaactttttggagggaaaagcatagatcatacccgataacgttagatttctaattttcttacaagcagagagatctattttgtctaagttaacacgaatatcctcaaattcaaaagattcaaggtttacagtttcaacttgtaatgcagacataatctctatatccttaaattccaagaactttaggcttaaactttgcagtcgaggctgataatctacactagagaaatcataatcacagacacacaaattctcaagagaaggacaacccaacaaaaacttaactaccacatcatcctttgaagcatttgattgtagaacatctaccaatgacaaagttttcaaagatgggaaactaaaggaacaagaactagcatccaacactaccccactcaacttcaaaatcgtcaaatattttgcattgtctagtattttcgatagcccatagaacctcttatatggaccaacatgttcaagcatactaagatcaaattccttaacattattctcaactacaaatgctaaccatttatctacaaaatgattctttcttgttgtatgatatccatcctcgaaataagaaattctatatccattcaaattaagcttaaaagtaaatatactcgattcaatcataaattgcttgcggtgtttcaaacaattgtctacaaactcataaaatttttcaatatcacaagtagtagcattttctgagaaaaagagagtggggactgaataccagatgtgtttccaacgctttgaaagaatacaagtctgtaccacatctttagttgggagaaacgataagatgtgagtgatgatttcatcaggaagtttcgaaattctgtcatcaccagctgttgttttcgcccatttctttgcagaacgaagaatcatgctgttatattatgtgattagtattctaattaagcataaaaacacaccaaaattagattgagaactgtaacaacaatactaactaacaagaaccaaaatgtgacatactaatatgttaaaggaacataaaagcgataatttcagtagggtttgaagcatacatacatatataatacaatgtaaaataagtaaaagtgaaaaacagagtaaatagagaatcagaggactaatgttcttccttaacagatattaaatcaatgaattctgaaagttaaattcagtgaataaaaacgaaaattaaagtgaattaagattaatccttacatgatgaatatgatgatgtagcagaatcaatatcaaatattcaaaatttgagatttagggtttttgatcgcagagagaagagggtttttcttaaacaataaaatgagagtgagagtggtgagaatggaattaattttaggaaagtaataaataatttcggtcatttattgaattttaaggcatttttttttattatttatttaattaaatttactattttttttttttttttggatcttttctttaaatagaagtgtaaaatcagtagattatgttttttttttttaatttatttataagaatataatcatcgagtactttattatactagatgagccacgtaaaatattaattttacataagttttagtggtttttgtttaagaatcccgtaactgagtaacgacaacaacaatggtagataaatctatttaagttttttatatttgtaaagattataaatctaaacttttaattttcttgatttaagattttgaattgttct

SEQ ID NO: 19872 - DNA, 2868 bp, Cannabis sativa
  modified_base (2761)..(2779): a, c, t, g, unknown or other
  modified_base (2836)..(2843): a, c, t, g, unknown or other
gattggattggatcggttccttttacatgtcaatcaacatccaatctgtacaagagcgaattttagattttccaattcaatccaatccaatctgtacaagtacatatatctgcattttacaaattgggttcgattgaatcgtgcggattggattgaatttggtattttatgaatacccctagttttatatatataagacccggttaacctcacataccacttttttgtgtcaccggtgccgcattcaattttggtcgttgattgtgattaaaattgattgtctttgtaatccaatggtaactagatcaattgattaaataatattatgtttaggtgctaatacagggggtaagggataaaaataatatcgagagtataaaagtaattttagtcataataactatggtagaactaatgaaatgatgtgacaggaacaatatggaacacattgtttcattaaagggaataccgagaaagtggagtagagctcaggaagctcagagaacagagtagagcttggaaaattaaagaacaaaatttgcgaaatttgaagggaaaaagcaaagaggaaagtgcatgcaaggatatgaagagaacaagtccatgtggaccaatccgaacgagagaaagagaaatattcaatggtcattcccacctataaatagaagacaccattgttaaaaaatgcatagattcttaaccacaccaaactagctcaaactgtaacgtccctgcttcaagcctctattgggcccttacacccacagaatcatagctcttatacacgagtacgtcactatagttgcttcctggaatgacgactgatcctacagactaacacaagtgtttctaatgtgctttgtcctcactcgcacgctttttggaaaaacttcccatgaggtcacccacccagaaatttccccaagtcaagcacgattaaccatggagttctttcgtgatgggctaccaaaaaacaagatgcaccttattgatatatgtagtactagtcaatctatttaagccctcttcaactatgtagtcccatacctacatagtctcgaaatcaaaatcatcccacttgaccttccccaagctatgtgggattgcacagcttactcgatatttccccttacgatcacgagactactgactgtcacaatcaccccccttacggggtctgacgtcctcgccgaccacactttcggctgagtcaaggctttgataccaaactgtaacaccctaacaattaggcacgctacgacaactaataatataacccgctaaaccaggattactagaaataagagcggagaaatttaaactttaaattagctacggaatgaggaatgaaaataaataacttgtaattatataacttataaagcctaccaaaagattacatgcatttcatgatcccgttaaaattttcacaaaacattacaagttacttttacatgccgacctaggtggcaaaactcgagtatacaaaatacgtccactggtagacccaacccgcttggtctagtatggcccgaacatgtacaatccaccgccgagccctcgcactcatggctaatcacaaatagatttaccttttcctgcacaatgaagagcccgtgagccaagcccaacaagagagtaaaagataacaataatattatgcaatataaatattcaaaatttatataaatactgatgccaccacatctactgtctatatattatagaattacgtgttgctctcacacgtctatttacaataaggctttagattggtttatctcgattctgattaccgagtctaacctaattatgccttgtccgcgtaattctttatttcaacttatataacatagcattgcattcaaatcatttaatcactagagtaataaccctaggtcatataaccgctcactttagagtaataaccctaatcacggttccttatttaattacaatcataatatcaaatatgagcgccaccacacttaactctacatgttaactattgtcttacctggtattccaagtatgtagagattctaaatccctgagtgctcctgaataagtaccagtaatcctagtcacaaattcctgggatttcaaaattacagttaatcctaaaagtcactttcacataatcatataattgcattccaattacaattaggcatatagagctcgaaacaagctttccaacgatatacggaatgttccaaatggagtttggattcaagagttacaaacagaataagtttaacacaatcttcccagaaaaccccctagcgggccgcgacactcacaagccatgccgcgacttctgggtaacaagcccagaaattccaacctagcaggttgcgacatgcaaaacccataccgcaacacttgggttaaaaactcgaaaaataccaattttcaacctactcgaattgtacccaaaaaccaaagcaagccacaacaaagcatgcatactttcaattcaaaatccaaaacaactcgtaactaatattaacaacaattctaggccaaacaaagcccaataacaagataagaacaagaattacaagtccaaatcatccatactaaaattacacttaactcaagcttaaaaactcaagcatcaaaaccccaattgtgaacccaaattttagaatattaacccagaaattaagcttcaatttcataatttcaaaccacaatttcaaccttaaaatcacacaaaataatatagatgcatatcgttgggttttgtgccctaaannnnnnnnnnnnnnnnnnnatcagatttactaattaataaatgacagaaattatttttatgttacatggttcacannnnnnnnttcatgattatgtttaatgtataaa

SEQ ID NO: 19873 - DNA, 3442 bp, Cannabis sativa
aaaagtagtcatatattgcctatggtataacatttaggtttagggatataattttaggattttttaagcatagaaaatcaaatttcccaaaagaaaaatccaaatgtatatttatattatttttggttttgatattgggccctcttctcctatttatgggaggataagtgtggattccaaatatgtatttatattgttaataattctttcaattccaaatatgtatttatattattaaaaccaatattagtgattagagaattaaagtcaatatgtatttacagctaatgcaaatgcaagaagtaataatttgaactatgactcattccaaatgtattaaagaaagaaaatatgtatatttaaatattatataacatgattatatataaatatatttatttatataaccactaatcatatagaataaagagaattattaaaatgtattattggtgcctaacatctttttcaatattccattgttattgttataattaaatattaaatttcatataacttaataaaatatcgcatcacttataaaaaagtgtcctatgcataaattagctaagcaaggaaattaaaatttctgatgccaacgaaattttgatcatgaggtgtcgtttagtattgggagaaaattatttgttcataaatatttattaaaacatatccatttcaaaaatatatataaatattaaaaatattataatcaaagagtattggtcaattgcaaatgtatgtatatacatatattatacattaaatattaaaaatgttatcagattgaaaaaaggtctcatatatcatgtaatgtaagatcaaaaactctataattactgaattacgaaaatgtttgttcaacataaatttataataatattcactatgctacgcgtctataccaaagcaagttagtactaatattaatatatatgattcatactactgagttttagcagggccggccctaagtttaggcgggctaggcccgtgcttagggctcacactttttgggagtccaaaataaaaaaaattaaaaaaaattattagacttttatttaagtaaaatttaagtgtattataaacaacaaatattcctagcttagttggttgagatggaggacataatgtccaaggtcatgagttcaaattctataacactcttcttttgatatttttttttatatatttttgagggccctaaaatttaatacatcttgagcccatatattttcagggtcggccctgagttttaggttactttttcatctccaaaaatataatatgatcagatcacccaattttgtgaccaaccattaacaaatcccaagtcaagtcacaaaccaacatatattattcacataaaaacacattacttccatcacataagggacaaagcacaaaaatggacacaaggctattagaggcttctcaaacaggaagtagcatgatgttacaccaattgcttcaagagaatcctctcatactccacacacatgctcttttctcatcagacaaccccttacatgtcgcttcgatggccggccacgtggactttgtcagagagattgtaaggctaaaaccagagtttgtgaagcaagtgaatgaagatggtttcagtcccattcacatagcttctgcaaatgggtatttggagattgtgatggagtttttgaaagttgaccaaggactttgcagaattgtgggaagaaacaaatggactcctcttcattttgcagccagcagaggatggtctaacctcatccaagaattgctcttggtttgtcctcagagtcttgaagatgtaactgtgcaaaatgaaacttctctgcatctttccattaagaatagtcaatttgaagcaactgaagttttgttggcatggattaaagaaaagaaaagagatgatatattgaatatgacagatgagtttggtaactcagtacttcatctggcaacttggagaagacaccgccaggtaataataataataagccaaactgtttgtttttgtttcaagtcaaatgattaatcatcacaataaagcaaaagagtggacaaatttgatcaacaagagaaaattatcattagctgaagtttcactagcaatatcgtcatgactcaagtacaactaatttttttcacaggtagtggagtggttgattagatttggaaataatacaactggtggtactttgatagtaaatgccgtaaacaagagtggccttactgcccttgatttgttactaattttcccaagcgaagcaggcgacagagaaatcgacgagctccttcgcaaagctggagctaagagagcaaacgacacctttgaacacagcactaatcaacaaccaatggacacccattgcaccatagagaacgaagatgaattggttgagtatttcaagttcaaaaagggaagagactcaccaagcgatgcccgaaatgccctcttggttatggcggttttaatggccgcagcaacctttcaagtgggaattaaccctccaagtggtgtgtggcaggacagtgacctgaatgggaatgggaatggcactactaataccccaaaacatgtagctggaagctccattttggggtcatacaattcagtctcatacatgttatttgtggtttttaactctattggactctcattgtcactttacatgattaccattctcacagagaatcttcctatgcagttggagtttcaattatgtgtaattgcactatattttacctattacacaggtttagcaaacatggctcccctaaacggtacgaggaccgccattgtagtattatctgcagttttgcctcctactattcatcatttagtgaagcttactagactaattatgaagaagattaaaagagttctactatatctctccaaatacttccgttgaaacaaacttattatcttacttgtgtagttgtatcgtatatatttatgccaattgttatagtgaggagttattatgcttatgaagctaaacactagcatattttattggattgtatggagataaatagaataaaatgagtaaattaattgtttatttataataaatgatgatgagaaatactattttgaatctttttgtaaaagttataaggaattattacatagaaaatataaattgatattttatttacaaaaatattttcataaggtaaaatcaacatttatacttttatgtaattttaattaccaaaataccacttattctatcattacttatacaatcagacgatggttgtagagtggttgctgtgtggttgcgtggtggttgcatcagacgaaggtttcaatcagacaatggttgcatagtggttgctaggtggttggccgaaagttgcatcagacgaaagtttcaatcaaacgaaagtttctgggtggttgaccgaaggttgcatcaaacgaaggtttcaa

SEQ ID NO: 19874 - DNA, 1865 bp, Cannabis sativa
cctggtcccagaccaacgcccgttgtcttcgtgtggcttcctccatagcaacatggcttggaatcaagcgaggtcaagtcgtgtctgtcatctctcccaacattccagccatgtacgagctccatttcgcagttcccatggctggagccattctcaacaccatcaacactcgtctcgatgctagaatagtttcagccatgcttcttcattctgaatccaagctcgtcttcgttgaccaactctcagttaagttaatcctcgacgccatctcaaggttcccaccaaacactccaatccctcggctcgtattgatccttgaccagtacgcggtttcatcatcttcaaagctaagtgagagcttttattgtgagtatgagaatcttgtggaaagaggagatcctaaatttcagtggttaaagccagcgaacgagtgggagcctatgatactaaactacacgtctggaactacttcggcaccgaaaggagttgttcactgtcatagagcgattttcatcgtcacactcgacacgctcgttgattggagtgtgcctaaacagccggtcttcttatggacactgcctatgtttcacgctaacggttggtgttatccgtgggggacagcggcagttggcgccacaaacatatgccttcggaaattcgacggtcagatgatcttcgaactcatccgaaggcatggtgtgacgcacatgtgtggagcaccagtggtgcttaacatgttgtcaaacactcctaatgtagggattctcaagagccctgttcatatactaacagcgggcgctcccccgcctgcggcggtgctcgggcgaactgagtcgctcgggtttcacgtcagccatgggtatggattgacggaagtggctggaattattgtatcttgcgcttggaaaagtaagtggaatctgttacccgcgaacgagcgtgctcggctaaaggcgcgacaaggggtgaagacaccggccatggctgaaattgatgtgattgatccgagttcgggagtgagtgtgaagagagatggtttagccatgggagaaatagtggtcagaggtggttgtgtcatgcttggttaccttaaagattcagtggccacttctaaggctataaaggaggatggatggttttacacgggcgatgtgggagttatgcaccctgatgggtatttggagattaaggacaggtccaaggatgtgatcataagtgggggagagaacgtgagcagcgtggaggtagagtccattctgtacgggcatccggctgtggatgaggcggcggtggtggctcggcccgatgaaatctggggtgagacgccgtgtgcgtttataacggtgaagaaagggacgaagattagaccgacagagaaggagatagtggcgtattgtagagagaagttgcctcattatatggttcctaaagttgtggtgattagagatgaacttcctaagacttccactgggaagattcagaaatatgttctgaaagatattgctaaaaccatgggatctccttctggagctggttattggagtaggatctagcttaatattattatatctatgtgtagtatttgattatgtatttgctattaaaaatatatatattgtaatttgtgtgtaactataaatttgaaacctttgactttaaggtctcatctcaagtctctaatgccagagatgatactttacatgttgctctcttattacactactgtatggaagtatgattatttcttaacattaaactaatagtaatatcataccaacacaataacttgtaactaattagcgttttctaatattatttaactaatattttctattcaaaatgtgttaaagtagtgtttttttttt

SEQ ID NO: 19875 - DNA, 3251 bp, Cannabis sativa
  modified_base (30)..(38): a, c, t, g, unknown or other
  modified_base (1259)..(1266): a, c, t, g, unknown or other
cgatcttctgattatattgaaatgagtttnnnnnnnnncataaaacccaacaatatatacatacaaatagatatttatatatgaatacatatacatatatacatactcatactcacacacatatgcatatacatttacatatattcataatatatttagattctcatgcgcagaaatatttttatatattgataatacatacacatatttatatatacatatatataaatacacaaaaatatacattcatatatatatacaaatttaaaacgtccaaaatgataaaaattaaaacaatataaatatatacacaaaattatactcacatatgaaaaatacaaataattaattataaaaattacaaaataacaaataccttcattgagacgggggaggacagtcgcgtctactgaatgggatcaaccggcaaggtagtggccagtggtgcttttttttagtgggcaaaggagattgagattttttgagtggttttctaaataaagggtaggggattttgagttgtggtggtcgaagttggattacggtgttatggtagtgcggtcgtggcgatggagctgggacagagagagacacagagagaatgcaaagagatggagagaagaagaagaatggcgaggaagaagggagcagattgtattatggtatgttacttttgctggcgcatttacttgtgtcagcaaaagtttaaattgaaaccctaaattgaaacaatgtgattgattaaatggctcaattttactaattgtgctagtaaaacattatttcccccagacaaattttcaccttaaatttttctaacaattttttagtgatttctatcggcgcattttgcaaaatatttcattcccaacaaaaacctattccaacgtgtgtcatttatgccaaagatttcaacattttgcagacactgatttgcaccatcaaaagtatattaaattgccaaaaaaggacataacttttggtgttaccctctatgccttttacaaataaaattcatgaaatattctcgaaaaatattattttgttagtgcaaataagtgcaagtaaaaagttaacttgattaaattagggatttgaaacaaccacttttatccatatatactacaaaaaagagtatatatttagtaacaattttttagtttcaacaacaaaaaaaaatgtgactaaatgtgactttcagtcacaataaaaaaagttacttgtgactaaacacaatatttagttacaagttgtcactnnnnnnnntttagtcacaataagtattgtgattaagaatatatttggccacaacaaattataatttctgtgactagtacttttaactacggattttttagtcacaatgtagaaatgaaaatttataattaatcacaatttttttacttttattcacaagttttgttgtgattaaaagtaaaattttttgtagtgatatttcgctaataacatcattaaatgtgacaactcttatagtattaacttgagccaaactcgtattaaactttgtatacgtataatagtttgacaaaatataaatttgtggtcaatggtgagatcacatgaacataagaataagaagaattaatgctatacctttaggcagagatcaaatgattaaataataatataaatgataagtgacattatatagggctcaaaggattaataaataagacgtacatttgtaataaagccaaatcaaatcattagtagttagttaccttttgtatatttcaatatatatatagacataattgcaaatagaaacaaaaggcaaatcgttaagaccacatgattagtgattatactataaaattagtaggccataaatagagagattagctagatttaattagatgagtgaatgagagtgttgagttaggaagggttgactggggtaaacgtgggccaagacacttataaaaaaaaagggttacaacacgttctacgcggttttgtttaacatgtagtatgcagcaattcctcgtacacacgttaaaaacaaaattatataatgttgtttgataagataaacactgtgatccacgaacccaatatgatttattgttttgtcttttgaacgaccacactacatactttcttttttattattaatttttctttattaaattaaaatatgtcacattcaaatttttgagacgaatatatactcgacggcagaaaaacgtacgtatggtaatcacaacaaaacataccatgacaattagggttaatttactattgaaaagtaagataaaataatatcacaaaataaaataaacaatttaatatctcattttcactttcacaagaacactaagttagtcaccccaaaagtttttcagttatgtctcttgggactgtgttggacaatgtagtgtaaaatttttattttaggtttatattaacgtttgagttatttgcagcaaaacttctttaactctcaattcacttgtaaataatcatccaacctctaagtttagtgggaaaatcatccaaaatgttgttccgtttgtatttttaaggtgttgtctcctcatctccgttaactccatattttgcctacgtggcaacgataaatcactaaaaaattatcctaagtggccatattttccaaaacttaatgtgtaaaaattaaaatgaataattaaaataaaaataaaaagtactttaaaacataaacaaaaccgtaattttaagaacagatcagacatctaaaaatatactatgaacaaagatcaacccaaaattcttcttctacttctcttcctcttctcttataaagaaaaattatcatatttaattcttcttcttcttctttttgtagcaggggtggtaaaatttcgggcaagggcggcagctagatttgggcatgcatcagacacatctaggaagagttttttctgatctgggttgagatctctctgatctgggctatgattggcatgaatctgggtcggagagaggagcagaaatagatcggagagagaaccaacaatttgatgagctcgtcggagagagagagagagagaggatgcaccctctgagcatctgttgtattatttattatataatttaatgtttaagattaaaattgtgatatgttatatataattacatatactataattggaaattatatgcatgtaataatcacaatattatgtgattgggagttacatatagttgtaacatataagaggtggagttaatattttgtaacttccaca

SEQ ID NO: 19876 - DNA, 3031 bp, Cannabis sativa
gattataactattactaaaaatgtggcataattatatttttttttaacaaatttatagataagtgatcctatatccttaactttttaagaataaaaagtgataaataaagaaaaaaaaatcttgtgataatgcataaagttatataaaaaaaataataattatataaggtactattttttctaaaaaatttatatttttatgtttaaagaattgttgttatatttttacagtttttcatagaaacaacacgaaaagaacaataaaactacataaaagtaacatgagaataacattaaaataacaataaaaaatagcatacagataacagaaaatcaacaataaattaacaagagtataacataaaaagaccgtattttatataaataaaattataaaaatatttaaaatctcgtacaattgtattttctcgtaattttatttttgttatttttatgtatttctgaaataattccaagaaaaaaatccatactttatataattttcatttttttaagtagtgggctgaaaaacagttatgggccttaaaaaaaataaggaaacttttaccttcacaatctgacaagtggggtctaactaactcgtcctactttttccaagtttctaaatatagtaagtcttcatttgtgtttgggaacacttccctagggcctttctttcagctgtaaaccacatcgaactcattattgtatttgtggggttttcattctgttttgccttgacttgttccttttctcttacccatgttttcttctgcctttcatttttctttacttttattttcacatttgaactatgaaattctagtggagtagttttacatgacacaaaatatggttgtcatgaattatatacaccaattattgttctaatttataaattcaagtaccttgtatatataaccaaagtggttttatttatgtggtattggactaagtagacaaactgacaaaattgaatgtaaatgtattcattaactaataaagaaaagaaagccataaaccgtcaagtgttttcattaatttcttgtatagtttcaatttatttgttgaatatagttaatgaccactactaggtaacaagtattataaattcaacttcatacaccaaatcaaagtcctttcatcatcatctatctctctgaattttttgggctgtatattacttttgaaaagaaattaaaatcaaaatattgtgtgatagaaaaaattaccaaattatttattttgatgttaacacttgtaccacgtgtaaactaaaaactattctttcaacagtttaaagtttactaatatgtaaattgactcattttcattgtaaaataaattgtttaattaggacactatgtgtagatttaaagcataagatcaatgtaccaaacagcataattggcagaatgcaacctcaacaacctccgcaagttacaccagatactcacataaatatctaattatgtaccaacatcctatttaataatgtaacattgtctctcaatcacgattagacctatcatctaatataactcattatgtaaacttacaaatataggagactaattatctcattatttcacgcctaatttattattcttacattctgctagtttgcaatctctctttgaacctttaagaaactcatttaaacgatgttcttgtcttttgttttagacaagttatcaaaaacaactagaagtggaatatagatggttaccacacattgcaactcaaccacaataaattcttctgtaggtcatttattttcaactctcttcatttattatcataaaaatatttaaaatatccaataaatataaaaaaaaaaaaaacttttagaaataacaaaataaaggaaaataataaaatttaaatatttgtaataatttaattaaataatatttaatattttttaaaaaaataatatgtgtatactgaatatttaaatgcacgaaataattgtgaattttctaacaaaattatttgtaaaaactattgcagactttgatctttgttataataataaaaattaaatcaactagtacactgagactcaactagagctaaaaataataatttgatttatcaatatgtatgttttattttatttttcttattacactatcaacatatttattttcattgttataaagctttttcacatttaaactaaaaagtttaaaaaatacctaatttgtactgtaaataatctttttcctaacattgcaagcctcgtctttgtccgatttcgtaaaagaatattagactcaataatctccacttgaattatggtatgtatctacttctttatatatttctttaacttttttttaattgatcgttttgttttgtttttctcttttttaagtttggtctcaatcatttgttgattttatagtattatattatgtaagcgatagaaacatttatttagattattattgtacagcatttcaataatctccatataacatatattaaatctgaaataaaaagataaaaataaatatatttacctcttgaagtgaatcgagatatcttcgaattttttcacaagttatatcctagacagtacgtcaaactcacacattgctcttccaaatctaccaccacacacaaaatttagtgtgagctaataggatataaatatataatgtattcttgagtttatctgaacacacactataggcagaattcacgacggtcccaaggacatttttttaaggaccgacatcgctataaaaattatctgagtagtgaaaaccgtcgcctatagtatactactggcgatggttttcaacactaatatagattaggcgtcggtttataagtgtggattaaaaattaaaaaaaatacactatttttgacaatttaaaaccgtcaagaatcgtggcccattataaaacctcgatttgaccgagtcaaaaagagaaaaatatatatgtataataataaataaataaatatatatgtatatataaaaaaactccttgtgtatcctctctctctctctctctc

SEQ ID NO: 19877 - DNA, 3280 bp, Cannabis sativa
attttcattcctcccaaccaaatgctaccttagagtctacgtttgtttatgaaaccattaacatctatgagatcataaggattagataaggagccaaaaaagtgacacaaattcaagcttcatggcaatgcactaataccaactatatacctaatgcataatgatgcggacagagatggcctaccttaaaagattgtatataaatgtgtgtttggactacataccgtcttgccaatcctggggaggttggctccaacaggcatgatttcctgcattccagaatgtacaaacggaagaactaaagggacattgtcggcatcaacaatcaacctgccaagtatagtatttaaccaaatgtcagtaaggcagaatataaggaaaaaaaaaaaaagaaccatagtagccaaaatgctactataaaagaggggaagggggtgttgtaattgttgaccttccgacacctcttttagaagatctcattgttcttcccccatcacgagaacgactgccttctgggaagatatgaacccacccaccttgattaagttttgaaatagcaatgtccatgccctgaaattaagaagatcaatatcaaaacatttgccacaacatcagcaaatcagtactaaaacttaacagaataaacgtacaaaaacataaaaaggtacatattagagaaatactacaaaaaaaaaaaaaagaaagaaagtgcaattggaccacatactttttccacatataagctagtgtacaacttcaatcattcaaacaaacaacagaatctgattcgtgaaacttccaccagatcagattcatcagagcatcgtagtttcaaagaaagaccaaatatctagtccctcactactactatgttagcaaatttttaaactaaaatatatgttttgcctggatcctacgcacacaccagtgagcaaggaactaagccatgtggcttttcttaacatttagttatcacagaattgtggtaagatcagatataagcatacaggaaactagtacagtggtagacttatatgaagttggcatgtcaagattgttgttttctttctaaaacattgtcaatagctttaatctacaacaaaccaaagacacacttttagtatttaccttctgataaattccatcaccacgagaaactggtaagaccttgactgatcgaaagaatgcagaagtcacaggatttttaaagcatctatcacttgcacaaagtgtccatctcaaattctgagcatccaaaagaacatgtggaggaagcaaagcagcaataacaaaaggatcgtctacagaagcaacatggttgctcacctgaatcagaagaaaataataatgtcaatcaacaacaactaatcaacatgaaattaaatcctccaaaaaggtgtgcgagaagggggatataccgttataagaggcttgtccttgggtctatttagcagagcatcatggaatttttctataccatagacctatataaattcgaaattgaaagttaactcttggattcttcaagtaaagaaaagagcaatcaagttccccaaatgcagggtctacgcgagatatcacacaaacctgaatgcggtttaatccgtgcataaacacatgacaaacattcccaataacaggaacagcaacagcttggagcattcgaagaatgaccgaatcctcttcggcactaaagtttttgctcactgcgatcacaaggatcaattcgatcacaaaaacaaatcatagaaaacaatctcaaatctcaaacatttaggcacaactttaaacgaaacacacagccaatttgaaagacaacgatctactaccttaaaatctaagacactagaacctctaaaaacaagaataagtctaccttaatagcttgcatatcgaacaatcaacccaattacacactctgggcactagtaaacgaatatttcttatcgtccaatgcgtacatacgattcaaaatcagaaaaatataaccatttataataaaagtacctcgtttgatatagaaagcggaggaagaaggaagagagtcacgacggaagtcttggaatcgttgaaggtaacgctggagagtggaggagaagtaaccatggacgaagatcgggtgacgacggagcctccggtccaccgccactctaaaccggttcctcagctgaagctgtagagaccgtgccttgttcttccagagatctccacgctcaattctggccgccgccatgagagtttgagagagcgacttagagagaatgaaatcaagtagtattcgatcttattcttccgcgcagaaaagaaatatagaatgtgttgtttgttcctctgtattgaaaaacccgagttactactgttgtgttagggtgcgcctgttacatttcattgtcttcaaagttcaatgagcatgtatttcattatttactaagttgccatttctggtttcatttgtttaaaaattatttttaatggattataacatagctatttttatttttattttttaatttggttgctcagataaatatcagtaggtttaaggtacagtacaaaacaatggaggtgtacacgctggcgttcatagtggagagacgtggccccaagacagaggaatgacgtggccattgggccacattccagaaagatcttttaaagaattttgggctatttacaaaatataggaaaaaggagtaaagttttgatatagagcattgctattaggtactagtagtgcctagtactttctcgatatgttgcattgtgattgctactccctaaaagctattatattaaattatatgagatccgatacttagttggactaataacgagacacataggagagtgttaggcaccattggtgccctttagcatttctctttaagatatgagttttgtatagataaattctcttaactatcattttgtatacacttaattctctaaatttaaattttaatagtaaaattctctaaattactaaaatgcttataaatttaaggtatatttattagggctgaacattggtcaatttgatcgatttttttctatataaaaatccaaaattcagttttcagtctggattggtgcaatccgaaaaccgaccgaccaatccagaacctatcttaaaaccgacaactttgaacttcgatttggttggtttaagctgcctaaaccaaactttttaaaaaaaaaaaaaaagatccaatttattctataaatacattattctacatctattctatataaagtgtgcctatataactgaaattcttgg

SEQ ID NO: 19878 - DNA, 12195 bp, Cannabis sativa
  modified_base (8538)..(8548): a, c, t, g, unknown or other
  modified_base (11852)..(11857): a, c, t, g, unknown or other
ccaaattactagagcagtcattactccgacttggtgtcactgacactattcctgtaggccgtccaagttctggtgccttcggcattctaatttctgctcctgccatgactgttgcacagcacacacaccaatacctgtctagaaggaggatgatggcttgcacaaaacaaacaatgcggaagattaatgcaacagacccttacgtggcccagcatgccacgttgccaagtgccgaactggacctgtccgctgctgaggaagaggactacgagggggacattgaagtccaagaagtggaagattaggatgacgaccgtcctgatagcccttccgaggctgaggaagagcgagttactcggcctctgcactttgggggctataatgaggctggatagctggtgtccgaacttggtgacgtcttggtcgagggggaagactacgtcacccaagaatatgctgaggcggtccctcataggaggcaaggtgccatgagggctagatgggtgtgtcctccgtccgtcgtaactgaggaccatttaaaaagtttggagaaggctgggtacctaggcagagttgagtgctttctccctactccaaatcaccgggcaactagtcagaaggaaggatacaatgcctcgttgggtgctcttacaaaataaggggcgatgttaccttcgcacccgtactttgaaaggatttcagactactaccacctttgtccgacacagttcacacccaagggcactaaatatttatccaccatgttcatcctctacgatattcaaggttggggtgagccgtctccgcacgacaccaattggctctttgatttgaagcctactctgaagcagagtaggtcggggtacttctacttctctcagctggatgacaagtggctgaagggcactgtggatttagaggttagcaaaattgggcattttgttaacaaatactacttcgtgagtggcatggagatttctcatactcagtttcaacaaatacccgcatattgtcatcctcccttcacactagggcttagggaaagggctcaaaaaattctccaactgtctgagactcctcgaaatatcactttgttgaccactgatgccaactttgtgaagtacgagctttacttgacagactttgtaccccagcccgttaaggagaagaggaagaaatctaggtcgagccaagctgaggatgtcgagtaggagaaagatcttattcaactgaagcgtgaggctaagttgaagggtagtgccaaagccaaacagtatgctcaagaatattctgagcaggagaaggaggctcaagaatatttagagcaggagaggccgcgcaagaagaagaagactctcctgaccgagcaggcgccaatagaacatgctattcggattagggagcctggtattcctgctcggccgtcgacccctatggagggaaagggaaaagccgtcctggaggagcaggaaggctcctcggacgatgccactccgtccgtaattgttcgagagaacgctctggcagcgtgcagagtacttcaacttgcatttattttttctaatttttatgtctccacatattttgtgccctcttctgactgtattgctttatctgtgcagaaatgtctcagaagatgattgaggttctgaagaagaggataggagatagctcgggcctgtctcctccaaccaaaaagtctagaggtggtgagaccccatccaaggaaaaaattccagttgaggaggtcatcgatctctctgaagagcgaccagctgagaatccttcgacctagaaggtctcgaagtctaaaagttcccagggagggagttcaaactggtccgagcaagccaaaactggatctgagcaggttaagagcggatccaaataggttagggcccctgccccaactctggcgctgtgcacggaggccaggagagggaaagacatgcttcaccactacgtggctcggtcgcttcctgaagtgagcgaacaattgaccggggcggacagtgaactgtctttggagcttgtcttaggaggagttctgaaggagatttcttgggtaagcgcccctatcctttttctttcattcttctttaaatggctcaaaatttaacacgttttctgtgcaggtcggcgtgaagatggcctatgcctactctctagccaagtcggccgctgtcaagaatcatgctacttctagcacgatgcagagagaagtggacctggccaagaaggatgctgcagatgcgcgggccgagctcaagaccgtgagaaaggaattgggagaggcaaacaagaaactctttgctgctgaggccaaggctaccgaactgaccaaggagctacaagatataccctcgaccacgcagcttgaggcagacaattattctttgtcccaagaagttactagtctcaaaaatgagagggaagctctccggactcttcttcacaagttggaggaggaggctaagactaagaagaccagggaggaggaacttaaagcaaaggtcggaggactcaagaaggagattgagaatcaaaaatccaaggtggagaagtttgagggggatgtggatgccttaaagacaatgggtcttgagattttttacaacttctggaaggccaatcccaaaggagactttgagaacctcgacacctccaacgacatgtatctcaattactgcatggcccaggtggccaatgagaattgtgaggcgaccacttccactgctcctaccgactagaacattgatgaccgtccagaccaatgatcctccagctcctttggacccagtcgatccttactaagagcctgagactcctgctgtttgattgccttctctttatttttctttttgtatatgtctgctcagctagtaggccttcttttgagacaaagtgaccggccaagctgtctttaaacttggaatatattttacatttttcagacaactggctaaccgggcagcttttaatcccaggtttgcatgctttcttatccttaatgaatttcgttccttgttatgagcattgtgtaactttgttcgtttttttgtgcttgttatttgtttttaccaaatgctttgtatggatgtagatgccccttaagtgaccgagcagacgtttgactcttggtcacttgcttttcacaagtattcttttttgtctgttcgagtctaagagtacgagcagaccattgtacgcacttaatggtaaatttataacttgctaatagatttgacacaatttgaatttaaataagcatctttattcatttattggtcggaacacacttggtaccagagtaacttacatagaagttattatattaatctaatttaatctttagcttcatataaacaaaacaaattgcataaaacagaaattttactttcataagtggtcatccgacctgagtactttttcatttcttctgaacctttgggcgtggactgcccagaaggccattcacttaagattaaatgttcttttgtttcgtacttacgatagtcatccgacctaatacttttaatggtagtattttcttaaatgttccccgttccaataccttggtaccagaacgagttgcattttttcatcgtacttaccaagtttgtatgctcttgactccaaaacttcaatcacttgatatggtccctcccagttcggtccgagcacacctgtcgtgttgtctttagtgttcaagagtacccttttgaggaccatatctcccacaaagaatttctgtgctctcacttgcttgttaaagtaccgagctaccttttgttgatgggctaccagtttcaagtttgttgcagctcgcttttcttcgatttcatcgagtgactctgcaaggagtgcatggttaacctcttgatcgtatgtcaatcttctgtgggacggaggttctagttccacgggcagcataacttcataaccatatgccatggcaaatggagtatgtctcgtcactgttttctcaattgtgcggtaagaccataatacttcagggagttcttccggtcagtttcctttagcatcttcaagtcgtttctttaaagtatctttgagtgtcttgttgactgctttgacttgactgtttgcttggggatgtgccaccgcaaaaaaacattttatgatcccatggtttgcacagaaattagtgaaggattgactgtcaaattgtttgccattatctgaaacaatcttgtacggtaatccaaaccaacaaattatatttttcactatgaagtcttgcactttcttggatgtgatggttgccaacggctcggcttctgtccatttggtgaaataatcaactgcaaccaccgcgtactgaactccacctttgcctttaggttattgtccgattaggtcaattccccaaatggcaaaaggctaagaactctgcatttgagttagtttgttgggcggtgcacgaggtatctttgaaagtctttggcatttgtcacatattttaacataggcctttgaatcttcaatcatagtcggtcagaaataaccttgcctcagaattttcttggatagactttgtccggctgtgtggttgccacaaaatccatcgtgtacttcaaacaagagccgtgcagcttcttcttgtgtaacacacctgagtaatggcattgagaatcctcttctgtaaatgactccatctacgatgatgtactgtacaacctttctcctcatttttcaagcttcgtttttgttacttgggagtttcctagtgttgaggtaggctgctattggtgtcatccagtttggagatgtgtcaatcatttcaatttcctccgtgccagtgacactaggtttttcgagaaattggatggggattagattggccttataatttatattagtgctcgcaagttgagctaatgcatcaatagttgtgttttcttctcttggaattttcttgagggcatagctcttaaattgtgcgagcaggtcatgtattttgcttagataggctatcatcttttctccccaagcttcatactccctagatgcatgatttactactaactgtgagtcgctgcagatattaatgtgttcggcatgcaattcccgagcaagttttaggccggcaataagggcttcatattctgcttcattgttggatgctctaaactcgaatttactgcatcgtgtaaatgttgcccccaggtgtgacaagggcaatccttgcaccagacagttgatctgtggctgacccatctacatgtaacttccaggttggttcgtctttgctattgctcggctgaggttcttatagtagctctgggttatattttttaaagtgctctcttctttacccgtacactcaactacaaaatctgctaaggcctgccctttaatcgatgttcggggctaaaactaatttcatactggcccaactccactgcccatttgagtaactgtccagaagtgtcaggtttttacagtacttggcgtaatggttggtcagtgtatacctgaatgggatgagcctgaaagtaaggcctaagctttcttgttgctaagaataggcaataagtgagcttttctatcagtgggtatcattcctcagcttcagtgagtcttttgctgatgtaatagaccgtatgttggatattgttctcttctctaatcagtacgacacttatagcatgttccgtgatagccaggtataaccctatttcttctctgtccagacgttttgagagtacagagggttttgcaagttgcctttttagctcttgaaaggcgttctcgcattcctccttccattcaaattttttgtttccttgcaggatgttaaagagtggaacacacttgtctgttgactttgaaacaaatctactaagtgcggcaatccgaccagttaaactttggacttctttagtttttgtacgcgatttcatatctaagagggcttgaattttctctagattggcttcaatacctcgggagttaacaataaagcccagaaacttgcccgagctgactccgaaggagcactttaggggattgagtttcatggtttatttcctgaggactttgaagcattcgtcaagggcatctatatgcccccaaccttcctgtatttgacgagcatgtcatccacatatacttccatatttcgtccaatctggtctttgaacattttatttaccaatctttggtatgtagctccgtcatttttaagaccaaatggcatgaacttataccccgaataggcatccatgaagcttaatatttcgtgtccggctgttgcatccacaagttgatctaatcttgaaagtggaaaatagcttttggggcacgccttgttgaggtcggtcaattcaattcatacttgccattttttgttcagcttgggtaccagtatgaggttagctacccaagccgggtagaaatcctcgattataaagttgtttttgcgtagcttttctacctcttcttttagtgcttggtcgttctttgtctagcatcttctttttgttgagcaggccgaaagtttggattgatattcaaggcatgtgaaattatagaaggatcaattccgaccatgtcctcatgtgaccaggaaaaaatgtctaggtttgctcttagaaattttatcagagctgattttacttcgagcaacaaaccttttccaattttgagtttcctagtcggaacatttgagtcaatttcaatttcttctgattcttccaatggcccaacatttgtacttggctccccaagtaggggatccacatctttgtcctcgccttgggcggttccctatttggcaatgctcttccccttacctaaactctgactaaaggattcttcttttttgaccttggttagggcaatgttataacattcctgtgcaacttgttgattcccttttaggcacctaccccattctttgttgggaacttgacgcatggatgaaatattgatgtaacaacttttaagtcatataaggctggtcgacccaacatgacgttaaatattgatggaacattaagtacaagaaattgtgacatcatagttatgctcttcgaagcttgcccaacagtgaggggtaggcgaattttccctataggtgtaacgctctggccggagaaaccatacacgggctagatataagggatcgtgtctttgagttggagccccattttttcatatggcgttttgaatagaatatttactgaggctctattatccatcatagttcgggccactgtttttttggttatctgtagggaggctaatattgacaatatcttcatcattgaatgttatagtggattcccctacccgtggcatttttggcttcctttcctctacggccaagaccacttctttttgctcatgctgtaaggtcagggcatacctctctcgagctttgcccgaatctccagctatatgtgggcccccaatgatgacttacagatgtccgtccactagtggaggcagtaacaagtcttggtgattgttttcctgagcgaccctctgattctggtcggccatgacatatttttgcacatgcaggttattttttcttatttgaaattcaatttcccgctacagattgttgcattcattagtgtcatggtcgtaatctccatgaaaatggaaaattttggacatgtcccgtttacttatgtccttttaatggaagcaggtttcttgtacggaactgctgactgagtggccatgtagatggtctccaggtcgtcagtcaggacagagaaagcagtgaacttggaaggattctctctgggggtcagttcggctttgcctgcgaactttccctttttcctattgccttgtatgtcgttgttgttagatcttttaccgcctaaatttgaactactagggtactaggggttttggatggacggttctagctgaaggagcttgtggttggcccgatatgggcttgacatctgctcgctgaatggcttcttcgagcttgatgaaaccatctgcgcggtttaggaaatcactcatagagtctacaggaccgctcttcttgatgtctttccacaactctccaagaatctcgatgccccccagtctggcggctaacttcccttcttcagttaaacgtgccacttttgttgccttcatcatgaatctgcttatgtaagctcggagaggctctcctggtatttgcttcacttcgaccaggtcttctagatgcaatggaagttgacgagaagaagagaattgtgcatgaaactctgaggagaaggctttccaagagttgaacctttctgtgccaacttgaaataccattgttgtgcggcttctgacagtgtggtaggaaaaactctgcaacacacatcttcttataccccttgcaaatccatttgcatttccaaatacttgagatgtgataagggatcttctttccctgtatacatcttccaggttagcatcttgaacttgagggataattttagaacattgatctcaggagtaaatggggatccgcgtgctcggtccaactcgagatcattgagcttttgaccnnnnnnnnnnnggaacatatttttcagttcatccaactgtgcttgcatggatggatgaacttgttcggccttttggccgatcagtgccaggtcaggatctctttgaactagatcttgaatgtggatttcgagctgagtggctgggtgaacatattgttcgtctaaccctgtccttctattcaggtcatccatgagatcatgagttgttgtcagtctgttgaatactaaaacaccaggttgtctcagtggctggttggtttggccaagcacttggtcagaaccactagtatgagtggaattattggatataactccacttgatgaatttccaaataaggtctggctgcctaccacttggcccataggtggaacctgtgactggggattggacagttgaccgtttaaattttgggcagtatgcccagcaggaatttcttttgagctgaccagggggatgctagcgtaggttcttggttagcaacttggtaggctcttcgtataaatacggtggtctgtcttgttcggtcgtcgatggctgcctgttgagccttcaacgtttccatctctttatccctccatttggcgaactgacgcctttgctcttcgaacacaaggttcaatgcagcacggagctcttcctgatcatgatgcaaggtagtatgaccttgcatgagcccaagagcataacagaggttcttgatctcagtgtcatctccaatgtttgtctgaacatttgttgctgaagggatcctagtgctgggagtacccagttcggctgctgaactggtatttccagtctcttgcacaccgggcgtaattccagccagaggagaggtcataccttgacccgcgataggtggttgtgtgtttggttgttcaggattggtggctagtgggacccttgcattccctggagtgtgcagtgcaaaatctaccgccagtggatccacctaatcgaccacacctctacgagtttgtaccagcaaagtatttatgatcaatcttaaagtaaagagcaaacttgagttcaactttcaatgaaagcaccaaaatattgacctcacttttagccaacgacaatgagtcaaataataagcgataagaaatataaacaaagtgaagtatgaacgaataaataataaagaacacaatgttttaaagaggttcagcctcgttcagttcgataatagcctactccccttgatttgcattaactcaagaacaaagaatacattgtttcctctcttaaagctctcacaatgaaatctttgagtatgctctcttagatttctctcaagtaattcttttgacccccatactaatgagaatggatcactatttatagggctaaatgcttgagagtaggtttttcttttgcttataatgtctataatcggtaagaacatatattacatatttagaatacatagattgtgggatttggatagcttgccatatctctatgatacgatcccagacttatagggattgcttttgtacttcacgatacaagttttgaaattgctaagtgttaatgcgctgctcgaattgtccactgctcggctgggtagatattatctgtgcaggtgtatgttatgctctgttcggaacatctcttaagccagatgtagggaattagtgcgaaaaataggataacaacataaattgcgtttaatttgttttatagatatatagatatatatatatttataaattattgtgtatatttacatttttaattattttaaacattgttaagaattttatatatttattaaataaaaaacataatttaaaaaataaaaataatagaaatttcataaaatattctgtttgtcaaaaataattaaagaaattttgaagtattgacaaaatttgaaaaagtcaagaatatatgttgcatatatctaaaatattataattaattaaacaagaattaccaactacacatacaaaagttatgtaatattaattttgcacaaactaaactgaaagaaatagtgatctataaatagtctctaagtgctataccacatttatttctaaataatgtgggatttttctacaaaataactcattaaagagtgaaatcaataaaattttaataagtaaataaaaaatataaaaaatgagaaaaaaataatttagaatagaatttatagaaggcgtcatgccaccacccatagcctggcacccatatatcgcatcacctaaacatgtgagcctatgtcatgacttggcatccatatatcttattgcctaatcaagcgagcccattgcattgcctaatcaggtaagcctgtgccataacctggcgcccatatattgcatcacctaatcaggtgagttcatgccatgacttggcatccatatatcgcatcgccttattagacaagccattacattacctaatcaggcaagcttatgccataaactgacactcacatataccacattgctcaatcaggcaagcctgtgccataacttggcacccatgtatcgcataacttaatcaggtgagcccatatatcacactgtcattgcctaatcagacaatcgacaatcaagaaacctgtcatgccatgtagtacattatactttccttacctttaattccgattcatgcatgccggccaacctaagtagagaaacattcccgatgatatcgaccctaagtcacaacaacggtaaaccaataagtgtctatcccaaaatattgcttaatatttgcaaaagacaatctagggttttataccaaatcttgcggtataaatataataaaataaaagtttatatttagggtctaaaacatacaccatattgtagatttcgtcataagcttcgaaacggtatatagaacgtctaaaatggatacccgattaaaaaattatgatcaaaatactatttttgatctcctcgaaaaaactaaaaacgacaaaccgttttattctgctaaaaaacaatctactgtttttttcacaagagcgaaaaatctcaagcttcaactcctcaaaacctcaccaaaatctaaccaattgattccaaacttcacagaacaactaaacaacatccatacaacaatctctacgtaacaaaaatcaaaattaagctcttaaacaaaaaaaaaatccgttaaggcacaagctttgagcttttaaagtccaaacttgatttctaactcaaaatagtgttaattccatttttggcatatttaattgaaaaaaaatattttattatgtatattttcggctggagtgtttaatttggtgtgcatattttgtgtataaaaatttggaaggaaagttgtctagcttnnnnnnttatggaaattgaggtaaaaatggtaagtttgattacacaatttattattatctaaccagctggtatattctgatcttgtgttagttttccattttgttagatcaaattttttgaagagaaaactggagttaaactttccttttttataaaagaaaagttgtacttactgcccacgattctgtaggtacagaaatggaaattcctaggctgattgaagatttattttcgggaagtttttagtaagatggggtcttgttcagaccgtgtgtaagctgtcaataaggtgtctattgattataaatacaccttatatcagctaggtttagtatctctttca

SEQ ID NO: 19879 - DNA, 1338 bp, Cannabis sativa
gtacactactttttttttttttttatatataatcaataaagagctatttgggtcatcacaatgtagatcaatatccaagttaatatttttacccttagtaacattaacctcatcacaatgccttccaactaaaatgcttttatttggcccaactagcgtacttgagcagtgaacttgttgagcatacaccacatcatccacgtgagacaaacgacccaatccattaattaagttctttttatttggcccatgagtcttaaccaagagagtgagctggttgagggcaccctctccattcataaaattctcacagcccaactcaccatcatgcccacaaatatcacatgtaatgtttggttgagaaaagtcaaccttacttttacctttcaaaccaatacaactgacctctcttctcttcaaattcgaaaccatatttaacttaggtaaagactcagagttctctcccagttgtagacacaacttcgaataaaggtttccacaaatggccataccttgtgagactcgactcggcacagtcgatgagttcttaggcacctaaactttgccaggtctgaaacgagtttgacatgtcattttcactagaggcccgatgttcgagccatctgtatgagtctctggagcaacttcagcatacacggcttgaagctccacttccatcaccggcaatgctaatcccaaatgtcttgcctctggcctccaactaattcttcccttgccaatcattgccctaaaaaatttaccaaagaagcagctcgggtaaaaggacaatgcattaatctaagggaaaaacagagagaaatagattccatgagcattaataatggtgacaggagacaccagagcacaattccctctttgatgacccatacaaccgcacaggtagcaaaaattatctattttctcatatttaaattgaacctagcaagcatcacaactaaccagtttgaagacacatccatagaacaaagggttattagcatcaacattaacttaaaatcttatccatttgttccaggtaactagtttagtttcatccagtttaatacacacaaccttacccgcctaaactgccaacacatttgcattaaccctagaaaagtaatcatgtggcaggtggtgtatttggatccacaaatgtattgtatcaaaggccaactctttgacaccaaagccagaagtccaaggaagaagcacaataatctctcctttatgcattaggtgttagggattatttaccaagatctaaatttactaccatgtatgttatttaacatcctaaatatgaattcctaaaacaatgtaatttaaacacatata

SEQ ID NO: 19880 - DNA, 3341 bp, Cannabis sativa
cattctttgttttttatggtttcaaccaagttgctaagagttaaatttcttttatctgtgccttttgttttttagtatttcaaactagaaatgtaaagtcatgggttttttggctcattccagcaaaagtatttttatttataagaaataggttctttaataaccaatatgttttcattttaaagacaacagtttctagtgttttgttctttgcttttatgttagtgcttcatgtccaggtacctaattacaacatttaagccagttccaagaggtactgaaggggctgttagtgttgaaggaacctttgctggacttttagcgtcaattcttcttgcatttgttagttgttgcattggtgaggtacttgtactttattcaaacttctatctgtacaaagctgtttgtttttcaccttgtatgtgttattttgacgttttctcatacatcggcatatttttttcatctctgttatactgttatattttacttttgtcaaacagataaatgcacctgaagctgttatatgcgtaatagcatcccaaattgctaattttggcgagagcataattggtgctgcacttcaagagaaggaaggatttcgatgggtaagtaaccatgtcaaagactcttgctttctattggccctatcactttttgattcagttcacatacagtggaattagttgttttttgcttggatttgtatattttggggttgcataattgtttgacatgggcagcctaaatcaggaatactaaacatgttgctggtttgaattgaaatatggaaacattgacactgaggtaaccgagtgccagtactgcaaattgttgaatctctttttgctggctgacaagagggattaggatctgatgataatctttacttttgtggtgtgcctctgttagagtgttttacttacgttaagctgcttgtatttatcttttctttgcagctcaacaacgatgctgtgaatgtcataaacatatcaatgggcagcattttggcagtgttgatgcagcaatttgtgcttcaaaactggcggatgtaacctttattaagccgtttttaaagggcgtcactctgggtttcttgacactgagccacttccaaaaaatgctttaagaaatcagaaactaaagaattgcactaagtgggaaaactgcattgcaaagcgtaattccttctcagctcagatcgtgacaaaaagttccaaaatttcttttcataattgtcaattccctacagtgcaacagataatacaagatcaatgtaaaaaaaaaaaaaatcacttcctttctttgtatatctctctttctctctctcttggtaagaaaaaaaaaagaaacttttagttataaatataaccgttgtaaattttataatattacgtgtctaaaaaagatgtttatatgaaaacgttgagaacgaatgatagtttaccttcaactttcaaaagtcaaaagatgaggaaaaaaaaatcgacaactgtgaagatgtccattaattttttgtagtaccaggcacctcctcctgacaccccacattaaataacaaactaaagaagaatccatatacaaggaaaactaaaaccaacaactttaccagaaaatgtccaaacaacaagacctgatcaagtcgtcacactgaaaatgccacaccattttcccatttgtaacactggtgaaaactgaattacagaagcagccaaatattttagatgagaaaaacaccttgttttgaacgcctattaaaaacaaaccaaaccataatcatgcaattctcgttttgccaccacttgtatactataactatttcattccttttattccattctcttaaacattgtcagccaacaaacttaaagaagaagaagaaaaaaatgtcatcttcatcttcttcttcctcttcctcacttgaagtcatcctcaccagctctcctgatggccccatcattgcatacgatgcttcctctggcacggctgtaacccagttttcgaccagcagatcaccccgccgaggcctcaccatcgtcgggaaaacttccattgcagcatcccacatctctcctatcactgcttctggctcaattcatctctataactggtggtgttccgcagcttttcataagctccctgtccctgaacttgtggctcctcttactgctactcaggatggttcttatctctttgctggtggcctttccggcaacgtatatacactctcagtcgcttcaggggatatcctcaattcacttcctgctcatactggaccagtttcttgtcttactatcagtgaagatggctcacttctgatctcaggttagaactaatacattacatgtctttgaaatagagtttttctttttttcttttacgttttaaataaaaaaaaaaaaaaatactcatgaatagcagagattcatggcatgaaattcatgattagtaaacagcattgcagaaaaattgaacttccatatgccgaataagtactttgttaattttgttgaatataaaatcacatccttcagtctcatgaaaaagtcttcatttgatttatattataatacatacattcccctttttgttcaaataacgaacaaaccagagtaccatgactccattgaaaaaggaaaaggtaatggctctaactttgggactattatagtctatatttgaagtagttaaatattcaaaatcaggacacccgatggttacacaaacattcatccttgttttcaatgattgtttctatatgcaaaagttcacatcattgagaatccaaaaacctttcagatcatcttacttatatttgttttgtgtacaaaaactaccaagtcaaggcttgccaggcattatgaggctaagtagtacacctgtatgaattggctgtattataaacaaaaagacaaaaatgctagcaaggaaagccttgtaagttgtaacatttgcaagttaccttttaggaagtgatgatggcaccattgttctcacaccaatcttccaacttttggggtcagcaaaacaagttacaaacaatttaacacagcacaagttttcagctcattccggttcagtcactgccattctttcctgtactagattatgcaactcccagatcatttcatgctcaacagattcaacatgtaaattttggagcctcaaccgaggtacccatctaagaaccgtggttttcccttgctctgttctgggaatcactgtaaacccatcggaatcatatttttacgccgcgggctcagatggatcgatctacaaagggtcaatcagaatcgggaatagaaaaattcccagtaatggaacagaggaagagctggtga

SEQ ID NO: 19881 - DNA, 1249 bp, Cannabis sativa
cgttaatattgactgatcccaactgaccatattaataaatttaatgtattaactgaactcaaattttcaaaaatattgtcccacctaagcaccaacttagttgactttttcgtatccattgacgatcgatcattctacttgcttgaataataaggtaaaaacaaagaaattaaagctaatacacaacagcattttttgtttgccttcatagtccaaattagttccacgtggcgtaaaactagaatcaatcgaagcaatacgtgtcaatagtggcttattccatttccaacaatatatatatatatataattatcattaaataaattaaaaataaaaagatatcacgtttgacatatcgtccgcatgaaaaggtctacgaacgatacaaaaataatgtaacgtgatattaacaatacacgcataatgatttggtactaatctttttattttttaagatatgaaaagttgagaaactggtacaagtgtcttatcatatgtatctatcatttgataagtatcaataatttttctaactattcacactaattgataataatttagcatagttaataattagttgataatctggtcgatcgatataattaatcaccaccacttttgttatttcaaaggcccacacccacagtatatatatttattataaataaacaattttatatatatattataattgtttaaattatattacaatataatatgtctcattatatctgggtccagttgcaatatggtcggccatcatacatgaacatgagaacatgagaaattttctcctaatttgatcgatcatcaatacggcttatcttaattatttgaataaaaatagaaatttattctttgtataattaatatgttcaaactatttatttgtaataaggattttttttttaaaaaaaaaaagttgttaataaggacaaacttaaatgtgtatgcacgtgaaacatatttgtaataagttagaagttaagtaaacatatatttagctagatatgtgttcacatttttattatatatatgctgtctttataagggtgtattaatagttaattaattagtttaccaattacaaagctcaaaattaaaatattttatataaaagtaattgtattaaaagaaaatcagttaatacaaatggtaaaaaataatgccatattactatggttggacgatatctgggtcgagtactagtcgttcaggagaaactttttccaatgcttttttgttattt

SEQ ID NO: 19882 - DNA, 4418 bp, Cannabis sativa
ttttttttttttttttttaataccagtacatcagtattattcatcagagggagtaactcctgataaaaaaaataaaacaaaaaagagccaaacttcctaaaaaaaaactattttttaagaacaaaaaatatattactcttaggtatattagagcatggagttaacttggtgaggggaaggaattaattactcaaataattaaaaaatgtagttagccaaacacaataaatttatttgataatttgattggttaaacgtaagaagtggccggaccatttaccttgaaagtagttagccttggtcatgcttttaagttgtcaaatactatactaatgcaacacgttatgagagtatcaaaccatactatgtaatatatcttccttacctaaaatagaaagtgagtttaaaaaaagtgagctccaactatataaaaatgattctctaatctctataataaaaaataaatagagagttccttaaattctttttttaatgttttaattttgttttaataggagtattattacctttttattgttttattaaattaatttatatttaataaatttagattataaaatttattaaaataatcaaatactaactaaagtaaaaaatataattaatttgaataagaataacaaaaataactctctcttttaattttttttagctattacgctaagaacacttataatagtgtctctactttatcttttaaaatacctcattaaaatttaattttacttattttagctcacttttacattataccacacaccaacttctccataatttttttacaatattttagtattatttcttaaatactttttattaattaaaataatgatatataaaaagtaagaaagagaaaataataaacaactaattaatgaaataaaaatagaaaaatcaataaaaattgaaaagaaatatttgaagaagcccaaaaactcaaataattatgtgtatatgtaaaacatgaatagtgtgtgaactaaaatgaagaatcatttagttcacttgatgtagcactattatattatttttctttagctaaaagtttaaagatagttattttagttacactaataggagtactctaatatttagttaaaaaataaagagttcttttggaattgttttaaagattagccattttttaaacaaaataaatgggttcgataaaaaattgtagattaaaattaaataggttcagttatctctaagccagtaaaaaaaaactgacacataagtcagaaatttctgtgcagataaatagtaggcatcaaaagcagtaaatatgaatcaccagtccccatgtggagtagttgatacacaaaccggtgttataaatgtttctcctttttctaaacaaaaatttcattaccaagcaatccactcctccctctataaataccatactaacaactctactcaaaatgtaccaaattcaacataaaaagataaaaacaaaaaatggctaagaagttatcctctttggcgtgggtgatggtggtggtagcggctgcagtagtactggtggtgtcggaagcaccagtagcagaggcagtgacttgcagcgtgatggagatgagctcgtgcctgccagccatcaccagtggggcaaatccatcgacccaatgctgcagcaagctcaacgaacagaagccttgcttttgtgggtacctcaaggatccaagcctgggtcagtatgtaaactctgctaatgccaagagagttgcctctcaatgtggcgtgtcctaccccaattgctgatcattgcctcgcctatctactacaggactactagctagtctcatggtatccttacctatttatatatgttatgaataagtactagttcatcttcattaccatctgtctgatgatgtattcatcatttgaatccaagaaaagataagaaatgattactgctgtaactgttacaacttttaagaatatgttatatagagatgaactatgtcaaaaattgagttatatatatatataagttgttgtgttgtgttcctttaatttagatctatcttcggttctctgtatgacatagacatataacaatatgtacttttaaatatctaagcatatatttaagaatgtttttatgggctttctggtactgttattagagctccttaaatacttttaacgattaatgaagggatataaagacagcaacatccctttattttagctaaaataagaattttatatgttgagttttcaaaacatttctaattcctgattgcattttgtattttttttttttaatttaaaatttgtatttttataaatatattttcctcatcaatatttcaactaatagttggagaaaatacatataatgctctgaggaattctgcatactttacaattaatcctctctgcattatgacctgaagaccataaactttgtacgacatttcattaactaatattttcgtcgagccattgaaaaaaatgacatgaaagatctatttgtcaaactaaactattttgggcctatattaacttgttaagatttaagcagggcattaccaaattccgagtacacataactgataagtagttattgggctgcccaagggttagctagtctctggtatattgatttatttttgtaaaagatagccacaccccaaaattcttgaaaattttgtgctatattttttaaaatcattataatattttaacaaatagcctctcaaaattcatatttacaataaagttttccaggtagaaccgtagaagttacaacataactaattccccagtacaaagcattaaacagagtcccctgtccccaaaaccaaaaatttctccttcgatcactaagcacggtgccattgtcaaaacacaatgtctttcaccatatttctaaatcaaataataattataagaaaaatacaaaatacagtgtctaattgagtgaaaattaaattttccaatttgatgtttgccgtgttaacacaatttttaatgagggggaaattatcaaggaattgagatacagctggaaaaataattataattataattataatttgattgcatttcagttattaaatcatagagtggagagttgataaaaaagaaaaatcatggagaggagaatatcacactaatagaggtatgataatgacaatggaagaacttactatatataactttttatcttggccaccaaagaatccattttaactatctctctcattcttatggtaatgacaaataacatcacaccaccagatttctataatgggaaagagcattagacaaggagtgagaggacaccatagattgctttttatgcttttggaaagaaaaggaaaatatctagaggttgtatcaagtatactaataataatacactataaatatagagatattgcctccgcagctggctgattccaaataaaaattgctttataaaactctcaacaatatatcccccacgaatatacttaactaatttacttaacgaatacgacaaaacttttattcttatatactatcaaaaaaataaaagaaaaaaaacttctattcttatacgaattattttattcataaactaaaaatggaatttacaataaataggatttttttttgcggattatgactgtaaattttgctcccttaaaaagttagtttaacaaaattcaattcattgagactgaacatgttattattagttctaaatatcaaaactggtaattgtttgtgcatgtcttttcttcataatgctagaagtagaaaactctgttttggttgttttcatggactttgttattaagattttaaagatacttagcaattccatttaataatgaatgagaaatgtgtctgattttaatttaaactcatatacacagaataataaagtaaagcataatcatctcttgcatactcatcattaatctgatggtggataatagtaccaacaaaggtaagaaattacacacaaaaaacacgataataatattaataatacatgtataaacatgaaattagctaagaaaatttattttatgttgagatgatgatgtggcttaattgataaaatgcacacattcatgaatcaataattagaagacatcggagagagtggggagcttgatctcacctttcctctccagaggaagggtgatgttaccgattacaggaagatcaatggtgagaccaatctcaagctcataatcaatgtcccaatcggcaccaatgtccttagccaagctcaccagtaagctgtgagccaccttcatttgtacttctagtaatgtcctgtcatgtccctttagcgaccctgggtctggaattgtaccagatgctatctctctgttattcatttcaaaattatttaatcaattaaatctatcaaaacaaacaaattaatc

SEQ ID NO: 19883 - DNA, 2487 bp, Cannabis sativa
ctcaaatctgtcatcagcatcgtactcctgggaagtatatggttcacttccctgcaaaaattacgatgaaagtcaagttaaatttatttctttatttcaaagacaaatcaaaagcataaataaatatgtatatagcaggtgaattgtattctattcagggtaaaagtgtaacagaaacctcatggtaatctggaaaagttgaatctgcacaattagggccctcatctaccatggttgtctcgtcatcgtgatcgtaactccaggtcccacagtcctcaattggatcaccatcaaactcagcctcattgtagacatcctctgctgaattctggtcagagtaatgaaaatctgatggcctcttgttatctttgtcaaaacgattgacaatagttccaagggtaggtgagatttcttctttcattcgcatattcagcaccatctgttcaacatgttctgtacatagatcacaaaaacagatttatttgaactgttttataatctgtaactgaaaacgccatatgacaggacttgccgagaacaaaaatatgaaccaattgcaacacacctttagcaaaagaaagatcaattgtgtttgctttatcttgctgattatcacatgttatgcacttccctggtacctccagggaatcaaaaagcaccttgcatccaccataaacgctgagattattcattaaaagacccttagctccaccttcatcaaattgtgctgatgtttgatgataaagtggatccactgcaaatgcaactgaaaaaaaaaatatatttcatcttaagattaaccaatcatttgaaatcaccaaacttaagatgaaacaaacaaagaatgtgtggtcaccatcgaattttttcacattaagagcctcaaaagatgattccagcgttgacaaaggtgagatctgcacaaatgtatctggcttagaatgtatagttcagtcacttaaattaatttaccatgatcaaaggtgactagcaacctttctctctgtctctttctttgatggaacaccaacttgtccactatcaacgattgcagaatcaactgtttcagcatcaaaaagacaacaaccatgatggagcacggataaaattaaagtgtaccgatgccattgaaataagcaactagaatttgacagatatacagccatggtagtgtttaatatgttgtaagttctatatttctacaccttgtacttatgactgattactatgctcaaaagaaatttttctttcaaacatacataaaacctaataagatatcaaaaaaggcagagctctctattagtaatcaaacaaaagtctgaccttcattttcttggcctgctctattcatccccccaaggaccttgtaggcctcagagtgtaccgagtccacccttagcgaataaatcttaaccccagcttcaagagtgcagcttgcctgtaaaaataagatttatagcattacatgcgcacacataagggtatcagaatttcacagccaactgttcaatttcgccccatgacattaaatatttcaagacatttttttcaaataaaaatattgtggccctcctaatatatttgagtacgtatgaacaaacttaatgtgccaaattttaagggtttgacatgactacaacctttataaaacaaaattgtcttacaaaaactatgaaatattaccccgccttcgtgttattgaacaaataagaatttgtatgatcatcacaaaaaacacttacccagtgaacccaaactgcaaatgtgacatctgctattttcaccggaattctacagcagacaagctttttattttaattacggtagaaaaagagagcagcaaaaactttaccttttgaaaatttgtctccatattattctcttcttcgacctttataatctccgttagatgatcaatcagattaagttcccaagtatttttctgattaattttctgcaccaagcaaatcaaggcatgccaaccagaaatcaaaaccatgtaaatgcaatgcaactcttaaaaacgaaaaagaagggttgagaagaaagagcgaaagacaagtacggacattttcactggcaagcttaatgcaattttgaaacaactcgaaaatctgctgcttgccgaggagaggatcagaatctccaagagacggaagcgcgctgacggagatgtttttccggcgaatcgcggctgcacgagcagcgcgtgcctgtgcacgctcgagcttgtcgtcgttggatcccaagaagaaggggctagtgggagactggatgcgagcggacattggaaccctttgcttctgggggttcagatcagggcttagaatctcagccatcctcttcagttctgcaacttggattcgatcagagaattagggtttagaaaggtttgagtttgggagttcgtagcaatggttgggttacctttttccctccatttcttttatgtttcaaatttttcatgatttaagttaaatgggtttt

SEQ ID NO: 19884 - DNA, 3593 bp, Cannabis sativa
caaagtcacttcctactacaatctcaaaaaaattgagacatggtattggaatgcatcatatacaaaatctattagaagtaaccggtaatgttattgtgagggggagtttattcaactgtactctttttcccttactatgatagtttttttcctattgggttttacttagtaaggttttttcggagtacatcaaaggggagtgttatgaatgactacataagatagatatgtaatataagaataatattcaacttgtagcagtaattactcgtatatgtaagaacaaaaactcctttggtaatgtcggatctagagtggtgatatgcacacgtgttgaatgttacggacgcatcagcgtctgatgacagtgttaacatggatcgatcctcttaataaataagatgtattttcggagccgttgaatcaaaattgactcggctagatgaatatagaagaaaatcaagaatggaaaaagcccatttcaactgatacttgacacattcaaagctcaaaagaacactcggacaaagctaaacgacaaaaactcgccgctccaactcagttcgtcggtctctaatggcttctccgcccaggaaactaactctaaacttatttctttgttgtttggtgttgttctacacgcaactttgtatatccacatgtatgcattcgatgctttatattgatagatcatattcataggtattggtatgctcggtgcttttctgatccgattcgcaaatgcttgtagtgttattcgcttttaggtattagtacatttttgggtgaggtttgttgttgtgttttgagtttttctgtctaataatgaaaatgattattcggggattttctaaagtttgcctgtaactttatggttggtaaatctgtttgcaactctaaaagattgagggagaatgtagatttgattagcttcattgtgtttagtgaaaattgctctaggatatttttattttgaatgtctacatcatgttatttatgatgttcttatgtggtttgagttcgtttcatcttacagttttggaaagtcaaggagtgaaagtaacgatacagaacgaaaaaacccacaaagaacagttcttgccgtggcacctcttaatagtatgccatatattggtccaccgttgccacttagttacagtcctccatcaacagcaccatcacctgcaagtgagaataaaaatgtggaaaggattggacctgccattatatttttgtcttctttcacaacaaaggaggactgggagaatattatggccactaacaaaattggggttgcactgacaggaagtgctgctgtcggaaaaattgggccaattatagggttaatggacattggtgaatgtgaggattcttacttgtttcgtgtttcccttcctggagtatcaagggatgagagtgagttcctctgtacttctcttagcaaaaaaaaaaaaagagtttctctgtactgttgcaagtgtcttccattgtttagcaaactgttgtggttgaatacgtgttctcatgtgttctcttacatacatgtatgtgcctttacatctgatagaagtcagttttttcttgtactttttaacccaatagaaatttatttgcttggttttatgaaagtttcagtttagtccatttaacaatttaagtatccgcttgtcaataccattcggtttcatgtcactaacaaaaatattatctttaaattacttgctaagacaaaaacaaatgattaccttgatccaatgctatatgagtagggtttctgagtaatgaagtctgattgttgattttgcaattgcaggagaatttagttgcgacattgaacctgatggtaaagtacaaataaagggagtgaccactactggagagcagatagtgtgcaagaactctcaaatctttcacatgctgacacagaacttgtgcccaccaggacatttctctatctccttccggcttcctggtccagttgatgaggaacaattttctggttcttttgggactgatgggattttggaaggcattgtaaagaaaaggtaaatcaaaatgaaatgattttctttgtggttaacaataagttcagccaacaagctttgcattttatgtagtgaggacttcacatgaacagatagaacacggtttaaagtgttgtggtcaggtagctgactggaagttctgattgcttctgattttgagggaagtagcttgacagctgtgctaattttggagatatggtaggtttagccaagtttattgtgatgttgagggcttgttatattttcttgtatgtgcaaagttggcaaattttggaattatgacgttttactttaccatttctttcttttcatttgtaatcttcttcttgacttgttatttgataaaaaaggaaaagtatattagatggggaaaaattataaaagctgataagttatcatcttcaattatagaggatgacataagattatttaaaagaaatcgttaacaaacattcctatctcttagaatattggaaaaagtcaaagctttaaactcatgtcatgagtcaatacttcgtctttgggatcttattaggaatgaatatataacttattatgtttgctttggtgtaaacctgttctgttcgagatttttgttagcagtgaattttagcactattcagccatttacaataagttgtgctattttgttctcaatgaaaatgtccttttggcagtataattttgtttgtactgacaccttattattgttataatttttcttgttctcttcgacaaaaagccttagaacctattcggttggagggaacggaaaggaatccatttttattccttttttttttttgttttcttagaaactagtgttggaatgccattccagtggtatggactttccaaccattttgagtggctatttcatccaaaaataaaaggaaaagtcattctaatttatgataaaataaataagtatataaatcttcttccattcaatttaattaccatacttattttcatccttagttccctgttttcattaatcccaaccaaacagacccttagtgttgacaaaagtttttcccatgaatattaggctataatatgacaatactacattgtacagtgttttcatatttaaagtaaatgtgtggattggttttttcacatttatatgctgccaagataaatcagctatattacgaattgtggaaaaaagaaagaaaaaatacaagctctccatgcaatttcagtcagaagaacattttcttggttcaattttctaccccctctttgacttttatctagagtcaactatatagtaatttaatgtatgtaatactgatgattaaggaaaatgagtagtattatgactgtgttatagctttctaataaaccaattgaagagatagaggtttggaagagattctaactttacttggatttttggagtaaaaggaagtagtaagttagccttcatatgtagattgctaaccttcatctgttctggctctggctaattagtctttggtagtttatatgcttgggcaagttagcaaggtcacaattcggtctaaatttcaaacaaccaaa

SEQ ID NO: 19885 - DNA, 2223 bp, Cannabis sativa
ggatcactactttcaagactgcaaaatgacactttttgcatacatatcaaaagttccaaacctttttacaagtgttggttttggatgaaaactcctgattctcaacacaatatgagagttatattctctgcgggtatgtaattctatttaatctgcacatattcagatagtgattgtgtttactttaatacagttcaaggttggtgaaaaaaaaaatagccatattttgagagaaattattgtgaacattgtccacagagaataaatagtagaataatgagctatatataaaaacataagctactttacttatagtcaattaatttttagatagaaccacataattctcaacaacaagacacattaattttttatctgcaatgccaataacaacactttctacaatatattctgtaaagggtattttttgtttgttttgttttgttttttaacatggtctcctatccttgaatatatatttgttgtaaaattgagttttcataagctggtattgataataaaggacctaaaatgattcaattttggcctaaggtgggctgttatagcatctcagattccaggaagaacagacaatgaaataaagaactattggaacactcatttgaagaagcgtggcatttgcttggctgaaaacctccaacacagcttgctcttatgtcaatctgataatccaagccataacaaggaccaagtatcccctttacctcgccactctatacaatgggagagtgctagattagaagctgagctgagactttctatggaatcatcacaacttagctcatcgactaataagattgcagatcacttcctactcctgtggaattcagagattggaaaatcgtttcgccagatcaaatcaaaacatgaagacatgtaccgaagccatgtacccgaaataacttccactgcgaaattcgggtcaagttcttgtgtgcctatacaagcaggaaacataaacaacaatcactcaactaaaatgattcaacaagaagaagatggctataaaccaaatactgattccaactcatctagcctttgtgaactgtctgattttactaatacagtttctgatatgctgctagattccccagttggctttgatttggatttctttcaaggaaatgaagatggttttgccatctcccttgacagatcacctgataactctcttatgttttagctcattattaggctatcttcagtgttagatgtttaaacttagaatatatatatgtgtgtgtttagcctttaggttactaaaagtgatacaaggacttctaaacttctaatgtttagaagtcatttcaatggaagttctttcttgctgtgtgttttagtttcaccatgaaatgaatgtaacaaaatctaaatattgaatataataacttcataaattcaataactacaataaagataaaacaaaacttaatctttcacaattaaattacacttttttgtttgccctccaaacgtctatacacacaaatatagaacttatgcacacaaactaatttgaaaccaatatatcatctgttaaaacaaccacatctgaattatccataagaagaagaaatctgagaattaaaaaattagaaacaaccgaggagcttctttggagcagttccagtggcgcggtatttcgctgcggtttcctctgctttgagaagatcttccccgcgctttgcctcaatggttgctcttttctcctctgcatccttgtggatcaaagccatcttgttcttcattttttccacatattctgcctttttcttctctaaatcctcctgtacattattcaaatagaaaaagataaaaggaaaaggttgtttttataatctcaattttgaatgtcaaatgccaatgttctgtataaatgttttcattactctatgatacactttagcactccaagctcttttaaaagagcatttctttaaaattataaagaatcatgtataaaatgaatttaagagctcattcaaatagttctttattttagaaaagcaaaattgttgctctttacttagagaagctttaaagtttctttattttattcatttctctttctctttctttttcttaatttaattatttttttgctttaattaataaaaagtataagaaaataaagtattttaataatttagagaaaagatagagtaggtgttgtattgtatgctgtaaaatttcgatgtaaaa

SEQ ID NO: 19886 - DNA, 3264 bp, Cannabis sativa
gttgcaagataaacatcagtgggcatttggtctagtggtatgattctcgctttgggtgcgagaggtcccgagttcgattctcggaatgcccctttttagcccaaaacattaattttaatatgatgttccaggaatctaccaaccccatataattttcaactcatttcatatggctttggacagggtagatgtgtcaattgagagcctgtaataatgcacaacactaaatctatacgacaataccttcacaaaacctctcaaaaatgaagtgtcgaaaacaacactggcaaataagttcatgctaagagaacaccttaactcttataggtaatagaaaatgctccctggcctgagcaatattattttcattcatgtgttacaagtgtccacatcaacaaacaagctcacttaataagcaatggcataaggcactggctaggcacaccaactgtaattcataagaatattgaatagattttgagatcaagtttatgacaaacaaaagggtcaggttgtggaagaaacaagagttcacaactggagaaactagacaatatgggaaaataattctagatgattacaaagtaagcaccataactctaccagtttcattcttgaaatgtccactatttagtcaaaaacatcgctgttgtttttaatttcaaggtgtccgacaaacagtatcattctcaactaactaatttcataatgctctgggaaaggttatctagacagtgtcattgcaatattgggcaaagctgacttgtgcaaaaaaaaaaacgatgcagacactgacaataaggtcgtgataaaagaagttaaaacaccttcaatcccataagtaccataaaatgcacccgggattgactatacagtctaaaagagcaatatacttctcaattacatgttgcaacatgctgcagacatcacactaacatacaaaactcaatatgtaacagcaatgcaaaggcacatgcaactattgatttttataaaaactttaatgtaaaatccttccttacccgaaaaaagaactttaggtcgaagttgccagctgcaatacttagaactgctgcaacatgaacaaaggattttcagtcttctaccttttcaactatgaaatccagcccaccacatcgatacatgaacacaaaacctgcgaagcacaaattttcagtaagttcaatatctttttaagtacacggaaattacaagtaaattgatatatccaggttaactaatataatgccttaaatatgttaacatatggatacaaaacctagaatacaaggtccatcttagtccaaaatctaaaatctaacgtctagtcttattcccatcatggattagctacagcaactattattgtcaacaagttattttgttgccgaagatacttacaccgtcctcttaactatgtcaaccgataaagctacaatgaactcaaacaaaagtaatagaggcagcatagagcaagattttaatgcatcaatataggtggcgatcaaactaaataagagacttaaccataaactatgttcctaagagtgatcaaaataataaacaaaagacgaaaccagacctcccaaaaccacaaataaccatttactaactgccattaaaaaccttgcaactcaaaccctaactaatccaatttacagtgccaaaaggaaccatgatttcaaccgacacatgaagcttgataataccattagtagctcagttaaacccaccaaaacaaaacaaaacataaataaataaagagaatggtcaatcaagtgagaaaaataaaaatttaaaaaagccaagcattcaaaacatcaaacacctaatagtacagtgatatttgtctagtatcgtttttcgagaacaagcaatttcatttctgaatccctaaatcaaatatggtataaagtggctcataaatactggaaagcatgcaatttgtaaccacaatcatacttgtaaccataaacaaacctatcaaaacaacaaaatatgcagcgaaataagcccaaattgtttgcttaagcttttctaatgaagttgaagacatgcaaaaaagacggaaaaataagggaaggcgtttaataagtgaggcttattaccagaaaaaggtgggtgttggattttcatcaatggaagaaatcagtaaatggaaagaaagagaagaagagaaatagtgtggtgtgaaatggagttgatgaaaaggaaccaaatatctcaaaacaaaaacattctgtcttccattctttcgaattcccgccgcgtggtagctcctcgctgcttttgttattgtcgtttttgttcttacaaaaatgttttattattagattaattaagatttttgccatgtattaaattataatttttaatattgttaaatatttgttttttttttttttttgacatcattaaatatttgttttgaaagtgttgaattaaaatttttttttttgtctaatttgatttaattttattaatataataattattcatatattaaatcgtgcctcctaaattttaatatttataaaatcatatctatttgtgtcacttaaatttttaaatctaacaattttaataattcgataaaaaattttaacaactaaaaaagtttaaatacataatttggtaatattaaagttcgcgagcaaaaatataaattaattttattataatgattatattattatttttttttttgcaaaaaatgtacttttttttttttttatttatttttttttttttttgtgaaacggcaatgcgagaaatgttttattattgttaaataatcatcattaatttttgagtaatttgcggcataaatacctaagttttacgccgagtagcagataaatacctaagttttatttttggcggtaaaaataccttctgttagggtcttggaacttccgtaggtacctggacgttaagtgccaggtcacgatccaggtgtcactcgttcattggtccatatcattaattttttatttattatttaaatgtttaaacattataaaaataaaataaaaaactaaatataattaattttaattttttaacatttatttcttttttcattgttttttctttgaattaaacaataaactcaaattggaaaattgaaatcaattaaacaaaataaattctgatttttaacaaacccaaattcttcaacaaaatattcataaactatacaaaatttatttaacacatacagtaaacataaacaaacctagaatttgacaagaacaaaatttc

SEQ ID NO: 19887 - DNA, 4246 bp, Cannabis sativa
  modified_base (2056)..(2056): a, c, t, g, unknown or other
  modified_base (4212)..(4219): a, c, t, g, unknown or other
aagtggtttcggaccattgtgccattcttgtctctttgatagttatggtggagataggtgtgaagccattcgagttcttcaactactggtgtgagcataaagatttcaagaatgttgtcttggaaagctggtacaaaccagtttagcaatctggtttattatggctttggataaagctcactcgactatcctgaaagctttcaatacttccaggatgggcaatgttgagtttgaccaccagagggctaaagaaaaatttcaagaggctaatttgaaggctcaagctaatccggggatagagaaattcatagaagaagagaagttagctcctgataattttgttactcaagaaaggattcttaaaatttttctggtttagagaagcaaaattaactggctgaaacatggagttgaaaacgtggcgtatttttatgcttgtattcagaagagaagggaggagaacaggataacaagttatgttgataatcaaggcaatttaattgacaatcatcctgatgttgtagagcattttattaaccattttagagctacatggaaagttgcagcttggttattagcaggcttgacagtagctatttggagtttggaaacaagttgagtttatctgagcagctaagattgattcaatcttttataatcaaggaaattaaagaagttttgttcaacatctagagtttgaaaagctcgagtcccgatgggtataactctgacttttttaaggtgcttaggctgaaattagagctgaagtcagtaatgctattaaggagttcttcattactggtaagtccctacccaatttaatgaaactctcatataccttgtccctaaagtggagattcctgtgagggccattgattataggccaattgcttgtttctctacaatttacaaatgcatcactaagctaattagtaaaagacttgctaaagtacttccttggttggttcaccaaaatcaggggatatttatcaagaatagacctattgctcataatatcttaatttttcaagatttgattaagaattatggtaggaagattgtctcttctaggtgtgttatcaaaacagacttaagtaaagcctatgatactgtagattggggatttgttgaggacttacttgtaggtttaaactttccctccaagtttgttaaatggacatgatgtgcttaaggggcacttcttatacaatcatgatgaatgaaagactttaaggtagctttaaggggaataaggggcttcgacaaggggatccgatgtcgactctcttgtttgtgctcattatggagtatctcacaagaagactgatattggagaccattaaaaaatattttagatttcatcctatgtgcaagagtctcaagttggttagcctttgtttagcggatgatttaatccttttaagcaaaggctctcctactgttgttcatcatcttaaagttaccttgcagagcttctcggaggttacaggtttatttcctaataagtctaagtctcaggtttattttggaggtgtcttctaatgataaagctgaaattttgaatatgctacaatttggtgaggggtcattccctctcagataccttggggtctcgttaaggccaaccaagtggagacgagaagattgtgatgctattcttaagaagattaaaatgaggccggttacctgggtcactaggcatctctcttatgctggctgaatgcaactgatccactccgtgctcttgaggcttcgtaattattggatgaacatattcattctttcttagagtataatcaaggaagttgagcggctttgtagggatttcttatgggggattaagggagaaatatgtaagattaatttggcttcttgggacaaagtttgtctccctaaagcttatggaggcctggggttcaaaagtggtcctaattggaatagatctattcttggaaaatttatttgggctatcatggataagcatgacattctttgggttaaatggataaataacatctatatggagggagttgagttttgggagtatgagttgaanggagatgttagttggtattggaggaaaatttgccaacttagaaaaaaattcagcaagtttaatgtagttgtttctgttcagaagaggtaagtttcttgcttctagacttataatgggctaattcaacttgatgctgacatgttctacaaagctgtttggtgtaatgtttctctgcccaagcatagatttgttctttggtaggtggttcatggccatcttcttacaagcgataagttctttagattaagatagagcttgatactataccagttttcctatttgtagtgaagaagaggagagtcttcatcatctcttcttcggctgttttgtttccaaggcagttatgaatgaggtgtttgattgggtgggttatccagcttggccgatagagttcaatagctggttatgttggataacagggaagatttccggtgtgataactttgatctagctgctactgtgtatatgctttggaaaaattaaaacaatagtgtgcataatagtagttgttttactatattgaaaattataaatataaaagatataattaagtactggttgtatagtttaaaaaataggaagattatacaagctgaaagaggcatatttttacgcctagtttagtagaggctgtttggtgtgtggttaggccggttggttgtgtccttcgtgtttgcttgctttgtctttgattaatgaatattctctttggtaaaaaaaaaatagatattaacaatcttattggttacaattatttataatttaaataaaataaactccaaaaaattttcagaggaaattaaatcgaactgaatctagagctttattgaaaatattaacaatctgtttatgtgtttcatatattctaagagaagaactttattttataaaataatgacaaatatctgtatgtttagtacgagaatgttgcactagattttttaaaatatcaattgcacttgtattatcacacaagttatttaaagtttcaagatcaaacaattaatccataacaacttcctgatacaatatattcgttcttagctattgagagagatattgaattctgttttttattgtgcccaacaactatatttccaaagttgaaacaatatctacccaatcagcatgactaaacacacactatattaatgctagtttctttcaaatacaacgttttatgaatatatccaatgattcttttgatagctgcaacatgagattccgtaggataaacttggtacctgagacacactaacactagagctcaagttgggtctaaagtaagatagaaaaacctaccaatcatgctcatatatagtgtaggatcaactttaacactattttcatctttggatagcttcacagttgctccaattcctttttatggcaatctttgaacttttgagtttaaactttaagttcttagtatatttgctttgagaaacaaatgtacctagatctaattgtttgacttgcaatcgtaagtaatagtttaattctcctgtgtccatttcaaattattctttcagttattttaaaaatacttgcacctcaatctcagaagtagaaccaaacaaaatgttatcaacataaatctttagaataattatgttatatttaatattttttgataaataaaattttatcaactacaccctttttatatatccatgagaaataaaaaaattgagtgagtctctcatactaatccagaggagcttgtttcaaaccatagagagttttctccaatttataaacatgatcacgagtatgatgaggatcttcaaatcatttgagtagttcaacgtatatcccttcattcaagatccaattgagaaatacaaatttaacatccatttggtacaacctcaaaaccaattaagcaatagacaataataatctaattaattcaagctttgcatcacgtgcaaatgttttattaaagtcaattccttccacttttgtgtatcattatttgccactaatcttacttttttttcgcaaattataccaaatttatcacatttattcttaaaaatctgctttgtaacgagggattatttcacaaaaacataaaaacaataaaaaaaatacaaaaatacagtttcatggaatttttaaacattcttacgatttttttttattttatttannnnnnnnacggtctttttatgttgtaatcttgtt

SEQ ID NO: 19888 - DNA, 2943 bp, Cannabis sativa
aacaaacaaaaaattataaatcaataaacccgaaaaaaaggttaagacaagcagtaacacaagcttatctcactgcctcaataaaaaaaggaagaaaaacaggcaaaatatagcaaatttaccttgatcttttgagatatccacaatccaacatcttgcagtagtttatttcccgaagcatcttgttggttcatggattgcaaactctccgagagaagctcctgtcctgctccctcagctatcacaataaccatatgcccattttccttgagtcgtttttctatgaactcataaagcccaccacttccttcaagatagaatggggattcgggtatcaaacaacaatccacatctcggctggcaagggtagcatacatggctatgaaacctgcatttgaatttcaaatcaataacataaaactccattaaagtatcgcagactatgaaataaaaatgagcactcaccgctgtaccgtcccatcagctttacaagaccaataccattctcaatactttcagattcaacatgcgctgcattaattgcacgttgagcctcctcaacagcggtatcaaagccgaaggacctgtctataaccttaataaaaagaagaaagtaccgctttaagcacaaaaaaggaatgtaaatcgaggaagatataacagtacagaataaagtattagatgagtaccggaatgtcattatctatggttttagggattcctgcaacagcaactttgaggccgcgtcttctaatttcctgaagaacgacatatttgaataacagctaaaatattaaaaacaatattgattccaacaaaaatcattttattttggcaaattcattgtgaagcaaacatgtcactcaaagaggtcatacagcatttgagctagcattgacacacaacacttccgatcgtgtaaattacagaacgcttcatttaactataaccatgtgagacccacttccaccaactccatgaatataaaatggtggaaacaaaggaaagaaatgtgcaggaaagcatacaaggaaagaagcaagtttggaaatttagtgttactgatcagccaatacattattcttagtttactagctgaattacctcgaatataacagctgctcctctttgagttccatcacctcctattatgtaaacctggatcatcataaggaaatgatcataatatacacaagggctatagtaatcatataagcctaaacataaatttataattcaggccaaacacgagcaccttacctgatttatcccacgatcctgaatgctgtcaacaatcttcgaggtgtcatggcctccccgtgatgtcccaagaatagtaccaccacgtttatggatgtcattgacaaccttcggtgttaaagtaacagtgtttcgggaataaaaacccctgtatcctccctaacaagtcaagcatgaattttctagtcagactacttattcaagcatgtataccaacacactaagcagacgctttttgacttggtacaagaaacaattcactcacatctatcccgagaattctggtgactccatacatgtgataaagaccacaaacaatttccctaatcacagtgttgagtccagggcacagaccaccacatgttactatacatgcgtgcacttcgtcagattcaaaatacacctgagcagcacagatggaagaaacataaatacatcgtaatggaccattttataatcgtacaaacaagaatattttgcataccttctgacgagggcctgctcgccgaaaatgtgtccctcttggactatctttgtgaacaacaatctgtaaaatattggaatgaacatgttaaacaactaatttactagctctacctttctcatacacaataaagtgccattttttctgattcatgaaagaactttccaacagatcatatgagatctacaatcgttaaacaataaaaacaagaatgttaccttttgaggaacagtatcatctacatgaacaaaatattgcctggcaaaaaaacagaattattctactatatcaaaacataaaaccaaactcacttaatgcagaaaagaataaatgacatacttgaccactgaataagcagggttagatcgcaagggattaggataattctgccatgaaatcaaacactaatcagcaactaataaaactaacaaaggatacataatttgtctacttgctttttctttttctttttttatgaatttctaatcaaatgaatacagttcctccaaataactaaaaattaaacgtaaaaagagaagacagcaatagaaaattacaggcagatcagcaatgtaatcgacgagatgagggacatcttcaagtacatatccatagtcgcctttaacaatcttcatctgagtgacaggagaatccgccatttttaaaacagaaccagaggttttcttttgggttgggtggtttaagaaaaagttttataacttttgagatgctttttaataaattaaaaacgaaactaatggtaatttgtatatcacttcacaccactcaaaaattcgatggctcccacatttacaggacacacgcgctcctacacaattagcggaaaatggggaaaaaaaattagagtcaaagttgataaaactaataattagcataaaaccaaacaaatggtgaaaacataaattatgtcattgtaaacaaaagataattgaaactggaaattaagggcaaacatcaaagtacatgacctcagaaactctttaatattttttttcttctattaagtacatttaagaattgcttgaaaaccaagtctctttttgaacatacttttattatcaactcaatcattgattcattatcatctcattaaacattttaaacagattctttgttttgtaaggaaaagaccaatggaatcagtattacattatataggagaattttgtctttttttt

SEQ ID NO: 19889 - DNA, 4667 bp, Cannabis sativa
tatatatagaagtgtaattttctaaaagttaggtaagtcccaacaaaatcagttaattacattatttggtatggtgtaatatttttataagaatgatagtctttgttatttttatgtttagcataaagtttttaagttcgagaaaattattgctccatataaaaggtaacatttattattatttttaattattaataataatataataagaatgaatacctgggcctgatcaccaatgtgaatgacaagggcattagggatgtattggacatcgatccaatggttgtgatggaaaacttgaagaccagggacatcattggggacaagaatggtgagagaggacaagtcagtgtgaggctgaactccaagagcaagatcaggacgagggcatggtgggtaataattaatcttcatcatatattcaatctcttctcctcccactgcttccttcatcctactctcttccaactctaaccctaatgaaagactcttcaatatctcatctcccacttctttcacgtacttcccatactcttcatttacctccctataatatattacaaaattaaataaaaaccctttttaggtaattaaagtgatcacaaaccatatcatttcccttttcttttagtcatcatcactttaatctatcgttattgtctctcaatatctctctataattattagataaaagtaataataacatctctctatttattgctgtcaactttttggtaaataattacaagtaggtaaagtacaaccctattgattaatataggatgtaacgagaaaaaaataaaataaaataacataaccattttcttaattcacctaattaatctatattaaatgctatatttagtgtgattatatatatataaaaagctatattaaacttgcgaatagctagaagttaacatactcttttatggaaactgtttttgttaagttgtatttaattagtatataggtttttaaaatttcatatgtttacaaaagccagaactaaactgttgcattggctaaatccatttttgtagagaaatcttttaccagtgcacccgcacttgatcaattagaatatttggtaaatttcgaaaatattttaaattaaaaatatgattaaaatattttgttaaaagcgtaacttaaagcctcaataaacatatataaataaattagagatacctgtaagagggaggatttttgggccaaaattggtagttaatggtggaaggaggccatatcctatgaaagagatgatcgacccaagatttggcacccttagatatcttggatccatagccttcaatggatgtggccccaagtggcctggcatagacttctttctcttcttgtggaagctcaaagaattcttctccaacattcttcaacttccttatcagctcaacaggcatcttatggttcaccacttggaagaaaccccactcctttgcagcctggacgattgacccgacccgcttctcctgatccggctcactcagatcaacggtggggatttcagggattggccctttgaatgtggtgagaatgggctgatcctccactggcattatgaactcatctgggattgtgtctttcatttcagcattgatggaatgagctatggattgtactctctccttcaccacctccgccatattattattaattaattatatttattattggaaaaagagtactactgagctgaagatgaagaagaaataagaagaaagaaatggtccacggggttttgctgatatatatacctacatatatagagagagagagagagaaaaagttgagaaagttggttaatataaggaccttcacctcctagaggaggtctcagtaattaattagtaagcgagtttagtgtattagtttaattaatgatcaaataggtgtttacgtttgagagaaagagagagagagtaatatagacgtggccactaaaaattgggagagagctaacaaccacgcagactccatgctatgttatatccggagcaatcaaaggcttctttttttttttttttgaaatgaggaattaatggctttattaaatttaattttttttaaacagtttgtatatttattatcggaacagtatctatatttccttttaattttttttttttttgaaacagtatgtatatttattatgataaatgttaaaagacacccgtggtgccaagcactctcttacgtgtcaatataactattggtttaattaaatatcgggttctatatagttaaatataataacttttagggagtatcactagtgaatcgcaagacaacacgtcttaaaggtgttaagcactactggtatccaataacaatgctcatttattaatattgacataggccgaccaagtaactcctaaaaaaatgaaaaaaaaaaattatatataaattttgattagttataatatattttttttaattaaaaataataaatagaaacatataataataattttaacatgttgattaaactataccataccttcaattttaattctgaatccatcactaattattgaaatagtatgtatatttattattagagcatggttatttttttgaaaaatgcttgatggggtaaaaaatttggcaaaatataagaatgttataccattagagataaaaaaaatgttatttttgaaatttacattgatgatacacaatgacattgatgctatgtatttttttataataaaaaaaataatatatataatagtttaataaagaaaaaaaaattatacatatatataaataataatgtatgatattataattataacatttttaaaaactgtcaaaaataatgtagaagaaagaaaaataaaatataatatatttgaatgatatgaagatatatagcacttttaaaagttactatcattaagatactcttggtagcttaaacctatctaacctcgatttttattatttgtgagcataattattataaaagggtaatgatggtatttaagatgttaaataaaaatgaatgcttcatttatgtgacaaactcctatagtctatcaaaataataataataataaaaaaaaattagcttcgttcaaaaaaataaaaataaataaataaataaaaattagctacagtgtcattaatcaatttaattatttatgctgctgttagattatattagttggattacatattagttagctagtgtcgtggcttttaattttactgtagctgagtttttcttttcttttttcttttttttttttaagaaaagcatgaatttatataaggctaattaacgaaccaaattaagtgttatagaagcattaaaaaatctaaaaaaagcatcaatccacatcttaacacctacagtaacagatgtaactagtgcatggactacgctatttgcattatacacgaaatggccttacacgaaccaccactaacaacagctaatagagaaataatttaacaataataaataaactttatttattagctgagtttttctatttgtgggttattgagaatttatttatttatgagtaatttgctgctaaatttcctaaactttgaagtttggtagattgaaattttaggggctaaactccttaatttacataatcattttgctctgtgatttttctgtccattttggtttgttaagtgccagagtagactaccacagtgatgtacacaagtgtacaagtagtgaaattttattggttcacctaatattaatacttaacaaaaattaatttaaaaaattttaaaatccgaaaaaacatataattaaaaatattttttttttcactttttctattttttttttctttcttttttcttcttcctctggaacgcctaccctctctcttcctcttcttccatggacgctcatccgatactctctctgcttgtgcaccactgtcgacggaacaagagcattgtgttccagcctagaacctcgaaaaccttgaccccatgcagacccaaaactaatatgtcatgatggaatgactcagttttttcatctgagtcatatcctgacagtttgccatattctccttcttgataattcctaaatttatcctccaattgtattactcgcaattgaataggatccataggttgttgattcgtgttttaattaagttggttacgcaaattaagtgtatttcgattcaagtgctcgtgaaggtctggctgtcttcaatttaacctctcatggagatcaggttcacgttgcctttgcttgtaattactcacggacctagtccctgagtaactttcagactgaaaaattgtgcgagttacttatactttcctggtcagtaaaataatgtcgagatctgctcccatctcgcgtttgtctatttgttccagtcgacctactatgcccgtaggatcgcgattctcatgtacttgaacttacttcacgcatcccatctcgcattggtcttcttcttcgaaagagattagacacacgtcccctacttaggtaagtgtgcatattttctttgtccgtgcgagaaggcctttgtggatgccttggggggcgaccaccggacctaggttggtttccaagatttcttccagcattacaagggatttccttgttttctagtcgcagttttcttgcctttgcgttcatgcaagataac

SEQ ID NO: 19890 - DNA, 4188 bp, Cannabis sativa
tgtaatgaaatagaaatccatctattacattcctaaattctaaaactattagaaaagaaaaaactcgtttggttatacttttgattgtgcagtgttctccaaatcatcatattcatcgccccaatttagatgctgcctatcacagaatgtcatatcttactttttcgccaacaatataccattatattatataaggcgctcatgccacgtaggcatcattactcttataaattatataagttattgacctaaaatctaccgttctaataatacacatgtagatgtagttgatatatattttatttttgtcctgacattactctcatacataagattctaaaatgcattttcttagtgtatagctacgaagcgagaagaggtatccacaaaatattttacgaggaggaggatgttggaattgttacttgtgcgtccacgtgtgaggaagatgattggatgaatgaaaacaaaaatgatttcgaccctactcaccaacgataccacccacctcttattacaactctgtacttaaaaatatattcaaaatatcttttttccaaaagaaaagaaaaattgatgacattattgattatttctccaaactttacattctcaaaaataaatttaaagttttttcttatcacgggcactaaattagaatatcaactgtgttttcaaaattataacctgttgtatcatattgtaattataataagtactgttataaaaaaaaaatattttaaaaaatgatttccattgcaaaattaactaaaaaattggaatttgcaatcatctaattaatattaatattattttctacgttggtagtgctttaatttaagacaaaccttaatccaagtcctgtggagatctgactcatcgaagctattaacaacttcttcgacaaagtatttagttggactaaacaacttatcctgatgatctttctctttcacttcgaactttgcaatattgttcagcttcccgtcaccctttttccccatatctaagattgcctccaaatacccatttatccattcgtttctcgccatcgaacaccttatatatatttatatacttgaaaatatatctatatatatctgtataatactttcaacagagaaaactatctatatgtatttattcatttatgtatgatagtataatagacagagagaaaagagaagaaagaatggctttgaactttaagactttaacaaggaatggagaacacaataagacttgagcttaaataaatcgttgcaaaaggtgagaagagagagagagagagagatgttagtgtttgaatggagttgacactttgaaatcctttcctgatggaaggatgaggatccccgatcgctaaaaaggcccctgatttcaataagtttattatttttatttttccaaaatgaatttgtcaatatgcatcgggtggctttggttctctctattacaatcttattcttttttagggtatattactctaacatccttatcctttctacactttttattatattctccaccatacaccccaaaactctattctaaatatattactttttctttatcattattcaaagtataccttcatatatatataaatgtaataatcctgcgcgtaagtgttccgtataggcattatattcttatggcatcgatactgtactttttaataaaaaagaaaaaacaaagctcaagaaattaattctttattgaatagattaaaaagagataatctggtattttaggtaaaatttgaaaattacctaggccgttcaagtacaaaaaagagaggaaatatcatgaaagtattatatatctattagtaaagtgtcctgcccttttgtcttttctattcattttcaattaataatttcacgggagttgtggtggagtttttaagggtatcgataccgtgtatataaatatattctaaaaaaaaaaagaagaactagaagcttaaagtgtaatgtgaacagttttaattgttgtaacttgtgataatataggaagttaaagtaggaagtaaaaatgttttgttcgatgcatgcatatgcagtttgggttgatatttttattttgtttgcatgaggatagtatggaagaaccacccactatttaaaatcattttttgtcctaaccccaaaggacacatattcatttgtcatgcatggcgtgttcattctgctctcaaaattaattctcttcaaaattgtttgcagccctacatttcctaaccattttatacctagcattatgattatgatctatcaattattctttttccctttacttatttgctacaaaattgtgatctattgaataaaagtgcatatatatatataaataattaaatatatatcaatgcaatagaaatgcatgtttataaaatacaaaaacaaacttatttttgtcatttatcttttttttttctttttttttggcttttttatataatatttttttagtatataattttttttatactttctattagcaccttaaccttatggtgctttttatcataccaatatggtatttattttagtaaatatttttttttacttgctattagcatcttaaggtactcaatattataccaatatagtatctaataattgattaatacgttttttttttgtcttgtattattagcatttattttatcttttgttttttttttttttatataaatgatctttgtaatactttttttggtaaataatttttgtactatattattgtcatgtgacaccataagttgcttaatactatattattcgaatatacaataattgattaacatgtttctaaatcatttattaaattaaaaattatgggagctaatacttaaatgcaccaataacagtatgatatcttttatggtgcttgataccttaatgtgccctttaatattgtcgttattaatatgtacatatctttattaacttcgattattattttttttttattttttatttgttattaatgatctttgtattattttttttattaaataattttttgtactattattattatgtgataccttaagatgctcaataccatatcgatatatcacttaataattagttagcagttttctaaatcatttattaatttaaaatttttaagagttgatattgaaattcaccaataatagtatgctagtagtgcttggcactttaatgtgtcctttaatatttttcgtaattaatatgtacttatttttattaacctcgattaaaattttaatttttttattattatattaaatttgtaagaatatctcctagatatataaaaattgtattatatttggccaaaaaaaaaatcttgtgacatatttatattaaattttagtaccatgctccaattcacaattgtaaaacttaatgtaatctttttttttttatgagtgattgctaattatgtgtttacagttattttttttttttgtatgttttcttacataaaaatttgtgggtttttttatgtataatgttaggtataatattttttatgataattttttattattattattattattattattagaatattattgtttggcatcttaagatgtccaacactatatagatatgacacttataattagttaacagtttcttatattaaattcacctaattacaatttgtgagacccaatattgaaatacactaataacagtgtgctaccatttatggccactactacaaactaaacatttagatgcggttttttttcttcaggaaattaattaataaaattttaataaaaacacctacggaggcggttattttgtaataattggctccgtaggtaataattttttaaattttaataaaaaaaagccctacggggtcgattattttgtaataaccgactccgcaggtgattttttaattttaatgaaaaatacatatggcgtcagttattttgtaataaccgacattatatgttattatataatctctccagctattgtcttcttcaaaccctaaaataaccagcagcccttcttcctctcaaacccacaaagccctcgcccaaccacccatttcttcccccccttttttttttgttttcatttttcatctgtttttacccattttttttttaaatcttgcatttttcatacccaaaaatatattcttagagtttgatcgttttttgtt

SEQ ID NO: 19891 - DNA, 3948 bp, Cannabis sativa
tatatatatatatttatatagttatatataattaattaattattttgaattataataattaattaatattaatgatggtggtggtggtggtgtacacagtgttagggtggtctgacacagtagcagattatggattgtttatggtgatgacatacttgacagaagcttggaaattcaatttcagacatagtgcagccattgttaacttgttttggggtttcatagccattcttccacttgctcttagatttctcaaaactagaaaaaatatttctcactcttccatgcttttcatttctagttcactctatattcttgtaagtcattaattattattattaagagaattacttttttttttttttgagaaaattaagagaattattttatatattattttttaattttttttttttaaattggcggtttgagttgttctggtagtttctatgtgaattttagttacgatttaagttcatgtgttagttgctatgtgagtttttatgtagattttcttacaaaaaaaattgctttaaaatgtaaaaataaaaaaaaatccattgatattattattctagttttcataatttttaaaagactaattttgataactttcaacccaattttgattaattttttttaactttgactctaaagtttgcttgctcttgctcacatctttcataacaaattcagagtttaacttattatttaacaaataagagaactttgatttgtaacttttgtaagagacgagaaccaaaataatcacatatttttattatatttatacgcaagtaattatttcttaaatatttagtatggcctttaaccccaattagtcccctcttcataatcaataattcactaccttcatattcgatttggttcataattttcgatcatctgcgtatataaattaattttctacagtaacaatgacataataatattatttttcgaaatttatgatagggattaggcctcttgacattctcaagccctaaatcagaatccggaaaaatggacagttggaatgcaacgtatgcaaaatatggagtgaagcaagagacattgttatatgcctcattattactaatagtattggctaaatcaggctatgcagtctcattagaagaactcatcaatgaagaaaaacaaattggtggcatatctgataaaatcatccatttttcattgagcaatggagcttattttctcataaatttgtttggatatgtaatgtcttatgcaataaaagaatggttaacaaggtttggaatcccaacaatttgtatggttgtggcaaccctagttttcttgactggcttttcttcatatggtaaagaaactacacaagagccaagtctctatgctaaactctatgatcaattccatgagctcatcactcaaattatcaagaacataacttccttgcttggactcttcataaagattgctttgtgccctttaaggtatgcatacattaattatgaatattcatatatatagtgataaaatttattatattaagtattttcgctacctaaataagttgtaaatacagtatataatattgtagtgataatagatctctcaagtattctaaataatttagaatatgtcgagattaagattcaaatagtttttttacacctagtataaatattgaaacaatcacaagtgcaaagaagctatttgaatcatgatttcgtcattctaaattatttgaaaatttgtgagagatttgttagcaaatcgatacctaactttttttataaattggtccctcaatttcgttttttttttggtagcgacgatcatcttttgttactatagatggtgccaaaaaattgaagttgtggaccaatttgcaaaaaaataaatatattggcaaccaatttaccaaattatgtatagttagaggacttgacaaaaacaagcctattttttattcacatatttaaagtagaacgagtggtaagctcaactttgtcactctaaggtaataagtagaattttaatttacaagtcttttttattatttatttttttttgtggaaaatgcagattatgttgttgttgtttttttaacaagggtgaagagaaagatcaagatgaagaaccatcactagaggaaaaacccgaaacaataacaagagtggaagaaaccaaattcctcatatcgttatttccaatatgcttgttaggtttggtatcttctttgggaaacacatattttctcaagcaagcatattctatggatcgaaaaatcattggaaatctaaaggttcctctagtcatactcctaagcgtttacaaaatcgccaactatttattcccaaaattatattttgacattgtagattcttggattccttctggctgcacaactttaaaaaaggcactccaccgcattggaattatgttatcattgttatgcgccttgttatgttgtatcattgctgccgaagttgagagtaagagaattggtatccttaacaaacgcaacgatcctagcaaaataaacgagccagttgagatgaatctgctttatctggttccacaattttttcttcttggagggttttatgggatggcatatgaaagcattgaaaggttttttaaggatcatgaaatccctcctagtttggaaccatacatgattgattcagctgttggtgtatttggattagggaacattggaagtgtgttattagtttatttggtatcaaagtttactttcaaagaaggtaaaggttggtttaatgaaagtataaacactagtcgtttggataaatattattggcttctaagtgtttggacatcaatcaacatagtttggtacttatttgtgtcacttctatttcgtcctaaagaaaaacctacaacaccaacaaggtcattacccgaagaagaagaaaaaaatttgtgttcttttcataaattagcgaaaaaatattgtatttttcttaaatgtttgcctgaaaaatttcccgatttttgttgctgctgctgttgttggtgttgctgctcaaactctggtggcgactcaaagcaagatgtatacaatgtgaatcgtatggtagcatagtttgctcttgttactaaaaagaagaaaaaaattgagtccttgtttgtatgattgtgttttatgagtgttactcttagtaatatgataattttgtgataatttaattactactttttttttctaatgaattaaatagcaaaatgttttggactacattattatgtgaaatcattagaataagtctatgattaaataatttacattaattatatataaacatttctatcaaactacatgtcgttttatgataattaacaaaaatgtgatgtatgaatttgatggtgtctatagatagtggcaagtttacaaatttcctaattaatttctcattacttaaaggtgaaaaaaaaacttatcttccataaccaaacatagttagataagaatttaattaagtttattgaaatataatcattatgaaaagggttaattagcaaaatgttttggactacattattaagttttgacctttttctagatgtgaaaccattaaaataagcctataattacataatttacattaattatatataaacatttctatcaaactacatgtggttttatgataattaacaaaaatgtgatgaatgaatttgatggtgtctatagatagtggcaattctacaaatttcctaattaatttttcattgcttaaaggggtaaaaacttatcttccattatcttccataaccaataaccaaatatatataggtagataagaatttaattaagttcattgaaatataatcattatgaaaagggttatttactgtgaatttcacttatgttttaattttttatatttaacccctttagttttttttggcaaaactcttttagtttttttttttttt

SEQ ID NO: 19892 - DNA, 3162 bp, Cannabis sativa
aacactaatcttggggagtcagttcctcaatgcttcatatgcttgttttttactctctttcaaaccatacactctaatgattcttctcatcaatttacacaacttatttattgtcatatgcacgtggcctggctatttgttaatgtcaatcattatgaaaaatatgtacaataatattttagatacaaatttcatataatatgagtctggacatgtacattttgatttttgtaaactctaaccatctatgtctctctcccattttatttctttaactaattacagatgatttattcatgaatgtttgttgtttcaggaaaaaagaagagaaaattaataataggaataatagcaggtaagaaacatgagacatcattctggagataaaaaaatcttacattgattctgtgcattcactctgtacgctaacatttgatgactttcatatttcagggttgagttcgggagttcttttaactacaattgtcttgggaatcattatgtggcgcaggaaacataaacctgctacttcaaggaacatccctgatccatatttgaatgtggatgatccagagggtgcaagtggccatcttggggtccttgtgttttcctataaagatcttactgaagccactaataactttgatgctgaaaaagaacttggagatggaggctttggagctgtataccatggtaacaaacatcatttcattcttcaccaataaaacttcatatactgtgtattaaatttttctaaaataaagtgttacaccttaatattagtctgactacttgattaggattatagatgccagagttgtcaaattcttaacgactgagatagatgttttaagtgaactatgctaatagtcttaaggtgttagttgaagaaacagtttgggatgagttagtataaatagaggctgttaagagtaaaacattgctctagggagatacgaattggatcaatagtgtatcataaagttgatgtatatttttcttttattttgtaatctaggcgtgctcaaagacgggagagaagtagcagtgaagcgattatacgagcacaactacaaaagagtagaacaattcgtaaacgagataaaaatcctcacactcctgcgccacaaaaacttggtatccctctatggttgcacttcacaccgcagcagagaactcctcctagtctacgagtacatccccaatggcacagttgcagaccatctccacggagaccaagccataacaagccctctaacctggccaatccgcctaagcatcgccattgaaacagccagtgcattagcctacctccacgcctcagacatagtccaccgcgatgtcaagaccaacaacattctcttagacaacaatttcagtgtcaaagttgcggatttcggcctatcaaggcttttccccaacgatgtaacacatgtttcaactgcaccacaaggaacccctggctacgttgatccagagtatcatcagtgttatcagctgactagtaagagcgatgtttatagctttggagttgttctagttgagctcttatcatctatgcctgctgttgatataacaagacatagacatgagattaatctctctaacttagctatatccaagattcaaaaaagggcttataatgagttgattgatcaacaacttgggtttgcttcagatattgaagttagaactatgaccattgctgtagcagagttggcttttgagtgtttacaacaagataaggaaatgaggcctacaatggatgaagttttggagagactaaggagaattgaagatgggaaaattgagactcaaccaccaccgccacaaccttccccggaatgtggcgatgaagtggggttgttaaaaaatatgaaacatgatcagcattcgccatcatcgccgaatgctgtcactgaagcttggccaagtactacttctactacgcctaatttcagtgcctaaagagtaaagattctatttttaatattttttttcactcttacttctgctaaaatttgaataggacagtataattaatcataatttgtggtacctaaaaatgtgataagtgagtaagagtagtaaggaaggtagtgtgatgggttcaaatttgtttttgtttttcccatcaacttgttttgttttgtttttgttgtttatgattcatgattaaataattcaaacgcacattaaatttaaatttgtagaaaagatatgagagttgtatgtatatatataaagggattgatttattagggttacttttgttttgaaaatagtttattgctacgaataataatgatatatgtttttggtattattactttgtgtccatactccatagagatataattaatgaacaagaggaaaaaaagaggaccatgcctattcataattacaagtataacagctctatttgaatttgtatttctagaagagctataacgatattgtttcatgggatgaaatttaattttggaggtttaatgatgaataacaagcatgcttcatttaagcactagtaagtgacaagtgtaattaatgaaatgagattgtgtatacaatttcttttgaattgtccacttatttgaagagaaagagtaataataaatagtgaatcttagtggtgagggaaggatgggaaaaaagagaaggcatagattcgaatccaatatttttatattattagtaaattgtaatagtatagatttttcttttaatatctaataaaaaatattgtaaattcaaataataataataacatgaatagttaaataatttaaaagtagaagttgagaaagaaaaagaaaataaaaatgtaaatagtagtcttacctagaatagtaactttggaaagaaaataaatctttgttatttcatcatcaaatgaccaccgtaccaacatttccaataaaaatttaccaaatatacctaaagtaattttgttcattgtgtttattgaacaaaaaatattaaactttggcccaaaaaataaaattaaactaaccaaccaaacacttttcagttagaaattaattaaagtttgtcatttactaaaccttcttccggaaaaatcaaagtagcattgactattcaattttattattgagtattgttatttgtttaaaggtggtgatttataattgattagcatac

SEQ ID NO: 19893 - DNA, 5058 bp, Cannabis sativa
gttttggttttcttgggtgagttgaatcaaattgagaatgttaggattgagaatgtggctaaagaagttcatgctaccgtttgcacgagcaaattaaggtataaggaactgatggaggcgcttgttaaggtggctcaagcattgccttgggggaagaatgttaacattaagaacattgtgaataatgctccttttgtgattcagtatatggagcataagtctatgtcgaaatcggatgagaagaggaacgatttggagcggttgcggtttgaattggaagatgtggttagtgagtgtttgagaaaagatgttgactatgagaatgatatggttaatgtggatgatggtattgattatttcaaggtagacttggatagcaacaagggtttgccaagtattgatgatatggagaagtttcaactttcgtccgaatgcttaatgatgatttatgaaaagttttctaatgaagtgggctgtaaaaaatcttctagagagagcggaagtgtggttcatagaagagaaaacaggaattttgacattggtgtttgcacagagtggtggagtggagagtcagagttgagcaaaaagcttttactcaagcaaatattggagaaagatgttgggttgaatgccttgcctccatcgtttgttaataattgcaaggtttatgagaagaggagagaaaagattaatgctgctaagcgacgcattgatcgaattatgtttccatcgaattcagatgattgtgttaacaattatgttgtggactgtgaacagcttggaaagaagaggaagagagcaaaatttagtgccattgattgggaagatttgattattgagatgctccttcttcatcaagtgaaagaagaggaaatagagaagggtcattataacactttaatggacttgtatgtgtttaactctggaattgttccggatttccctgcttgatgagaagaatgacagacttttttcttgaggctttgttccgattttgtgatccataccaggttttttttattttgttccactttgtatatatacacactgggtttttagagatatagacatttttctgaaaaaacatacagacaggcagtaatgcatcatttttgttcaggtcatataggataaagagagatggttagaggggacagatggggagctttatagggtagtttgttagcttggggaattggaagagcttgttattaaaccattaattgtatggctgagaggttcatgcctcaaagttcttgcttggctggttatcattctttttgtaatgtgttccattttcagtaatacaatcttctatattcttacacctctgtttctcttctgtattgtgtttgagaattagtatagtatttaggcttatattcttttcttgtcgtttgttagtgaattcatgcctcatggtatgtatgattatatcatataggtgatataggggttaaattcttgttctttcttcaataattacagcattcttggtgattaagtactgaaaaaaactatgttaagctttgcaatcctttgtgttggtaaggttgaggtaccaactttgtttggtaagacacaagtgaaaatgcctaatgggagttgagcatgggcagcttgttctagtcttccaaagcctactcttcttgttattaatcgtctttcgtatgaacggaaacgggggaagctggttttattagcagctaagtttctttgaagatttagttggttctagttttgtgcttgaattttctatccatgatgtttgtattgatctccattccatgatgccaatgttcatctcaaactcaaacctttgatcacaacactccttgacattttctcccttcttcttggtctgtcaagtttttcatattggattgtttacttaaatgtgtcttttgtttctatcattacttttttattattattattatttaagcatgtagattagtccccaaagccaattatttgcttctaaaaagatgaaaatgcctgtgggagttgagcatgggcacattttttttttttttttgagaaacgacataaatatagtttattcttaaaattaagttttaattattggaatcatctttttctatatttatttttttgtaaaatattttcgtaatgtatgagacattttaattctattttaatgtactagttgaaaatgcacgagcataactagaagttgaaagtatagcaaataaaatgatcatttgtggttaaattctatgaactttgaagtttcgaacggttaaacttttagacgacaaaaaattatggctaaattctttaatttttacaattgttttgctttgtagtctttttgttagttttttattgttaagtgtcaaagtaaactgtcatggtgtaccgaagttatatgtggtatgatttcattagttcacttaatattaataattaaaaaataatttaaaattttaaaaattagaaattttttttctattttttctttaattgaaaaccctaaaaccaagctcatcttctctctctctctctctgcttgtgtggcactagcgacggacggactaggagtatcgtgctccgaccctcctctcatcctttttcccgaaacccacaaccccgaccctctacggacaaaaatgcctcaacccccaaacgccattgatcccttacgaacccaaacaggtcgacccttggaacccaaatgtcctgcgcccatacaaacttgaacccgtcatgcccttttcctaaccaccttccttcccctttgtctccttcaacttgttctctctttgctcttcgaagccatctcgttatcgacgctccacacattttccttcttgccctttattgtaattgaaccttctttcccactgttgggtttcttctggcacaaggtgacgacctttctagggtttgatttggagaaattggggatgaaatgaaagaaaagaaaaagagtttgtgcggttgaggagaatagagaataatgaaacccaagctgggggtgggttgtgaggacagcgaggctgaggtgaggatggtcgaacagtgacgagatggcaagaaaccaagagagagagagagagaggacgatgaggttggggtttgggttcgtgggtgggggtttgagttttttgggttagggtttgatttctaggttggggtaagagttttttgggttggggtaatttatatgtagattttttgggtttgattttcgggttcgatttttggttggggttcgtgggggtggggggtttgatttctgggaagaacaaacgaagaagaagaagaaagatgaagaaaaaaagaaaatattaattatgttttcaaattatatgtatattttaaatattttaaactatttttttcatatatattattaatattaggtggaccaatgaaatcacaccacatgtacacttgtgtacaccgtggcaatccattttggcacttaacaaccaaaaactgacagaaagactacagagcaaaacgattatggaggttagggagtttagccatcattttttcagtctaggggtttaaccgtgccaaacttcaaagttcagggagtttaaccgcaaattaccccaaataaaaatattttctaaaaataatgtacatttttgtttcccaaagggcattgcaaaagttttcaatagtagtgtgaccaatcttgtggcataactgacattgaggatttgcatttggtgttggaaatatgggatagcctcttccagtacttgaggaacctctagggttaggagcaaagaaacctatgaaaatttcttccaacactagagtaattagcctcgaggaagttaggatcataataagaaacatcaaggctagcattgagatcaaaatttgtcagtttcctcaattctactttcagatgcaagaagtagaaattacaaaagtgacatactctcacttggtaatcctttgaagatagctactacatgatcttcagtgctaagaacttctccaaccgaagcaagaagatcaacatgttacttgactttcaacaggtaattattcatagacatatttcttgagattttgcagtttggtttgaaactccaggatctttgcagagatttgcaaggtgaaatgttttttgagagtagtccagatcttgtaactttgtagcccataatgtggcaaactagatatttactcatcagaggtttggttttattccactatcaaccattcctacaaacttattatgtaatgaccgagaggtctaattctaccaatatattataagtacgcttattatttaaaaaaaataagacaaaactctttaacccatatgctcttcctatttaaaacccatatactaaactaaagggtcaaaattgtttctcttaaatgcccttagtatttaatttatttgaaaccctttaatctcttttcaccttaaaatttctcaatcacaccaaaaattaactagcattcattgaatgtccaccttctttaccttctcactctattttactctttaaaactccataagatagaacgaacaagaaagtagcagatattttttgagacttttctgttctcaatttttcttgttttcctatattgttatttggattcttcttatttttatttatttaagatttttactaatatgaactttgttatctaagtttacatgtaatttagagtagcttattgttttgtgataaatctcttcataattaatcatccataatctttctatcttaaactatattgtaacattttttttagtgcaatatgttgtattatttattggagagaagcaagtttttcataaatgcttattgatttaattctactagtgtatgaatatgtctctatttttttgtttgtttcatggccaagactcaaagagggtttagtttagtttagtgggaaggaatattgaagtaattaagttttagttgttgtggattttatttaagggtaaatactattttgaactttgtgttttgcaaaagttattaattgaattttctgttttgttaaatgacaaaatgaatgctgtattttttaaaatagtacaaa

SEQ ID NO: 19894 - DNA, 3502 bp, Cannabis sativa
ttaccaattcgataaagcaagtgagacagattctaatattagtgttaaaagtcatacaaatattacaagtttacaacacccaaaatgaaacttgttccaatcattctacaaacataattaacaataagtttctaaaagtttctacaaacaaacataccataatataatacaaaacttatatgtcattaactgagggatcttcatcatcttcatcagaagaggaatcacttgaatcaggtgaagggagtttttttctttttgttgtgtaatcaggtgaatcaggtagtggtggaggaggaggaggaagttcaaacttaaatcctggtacaaacttagtaagttgttgcatatgttgatacatagttagagtgaatgagtacatggctttagatctctcacgaagatcctgatatgactcacgagaaccttttaaatcttttactaaatctttttgacctgataaattagtagctctttttttaccatttgcttcatcaccacctttacaagaagcaccagattcagcagtagatactaattggaatgctcgtttgtgactcgccatctcattctaattgaaagaaaattgaataatttaaaataaatgtatcatataattttaaacaataatacggtatttatgacataagtattcaaagttttgagtttgtaaaatagggtaaatatcattttgaaccttatgtttttgcaaaagttaccaattagaccatctattttgttaaatgataaaatagaccctgtatttttcaaaattgtacaaataggaccttggattaattttttgttaaaataaaacgtaataataatctgattttgtgacaaaactgattacataatctgtatatgttcgtattagaaattctctcaaagttgattatattaaaaataaattattaaaaattgagttcagaatcttatttttaccatttaaaaaaatataaaattcatttagtcatataacaaaacagagagagtccaattagtaacttttgcaaaatacaaagtacaatatttaccctaaaataaaaactctaatttcagtgttaataataatccatgtaaataattttattgaaatcgtaccttttgtggttgattagaattgaaaaaatgagtcaagggaatccaatcacccatcataactcccatgtaaggttttctattagctttctcaagacccaactcaacaacatttttcatccaccatactttcatctcatttctcctatcgtgtaatgcctttctcataagtgcctcgatttcatccataacaataggattatcacgtggataaataaatttggtctacaaaacaatatttatgcatcaaatatttatgtaaaagataatttaattttaactaattcaaattcaattaataaattacttacctctaatctatcgagaatggatgtaatatcagtttgaggaacatctttccaaagaagaatggatggagatatagtaattccaacagacacataaagtgtgtaataaaacatcttcttatgtatccttacatattgaggagtagtcttatcaaaggttatagttaacctttgtaccttaaatttttttaattcagctttaactgccttttcaatgaagtcttctctaactgtccatgtcccctgaaaatcgctaccactatctgaatcacttgaactcgaagtagacatactacactcataaaatacccaagttggttaataatcaaacttcattaaggaataacacatttatcattactatttgttacagtgtgttagctcttaacacattcaaaaataaaaataaaaaatatagaaaaatagtaaccagttaccttaccatatttttcttatactttttaaactttttttttttttttttgaaataccccataaattcacttttcactttcagtatacattgctctgaagttttcatcttcaaaagtttatcttcattaacataaggcaaatgtccaaacaaaacctatagaaatcaatacatacattttctaaaaggaaaatgctaaaaggaagctagtagttgttagttagtattttttaatgtataatattattatggtgtagttaagtatagagttcatataatttaatatatgaacttttattgaataatgaacacaactgacattttagaacacaatctatcataatttcaaaaaaaaaatataaccaaataataataatgaactaaaattttcaccacaaaagatattatattgtctccattgttgcaaatctaaaaaatgagtcgaaatgaaaaaccctaaaactatcacaaatgaaaaaaaaaacaaaaaactcacttacgttgttgaacggcggtggtacggaggagctgcggtggcgatcgtcgggggagtggcggccggagtgaaaagagagataagagattgaaggagatgagtgtctctagtgagagaaagagaggaaatttcgatgaacaatgaaggagggaaagaagaagagggaaggagggtcgcctgctctttatatatcgtgaaacctttaacggcgaccggcggaaatgcgccggcaaaagttattaaaaaccctaatcaaaacgacgtcatttcaataaaataaattagttatacttttttttaagaaaaataattttgatatggctatttgttacacctagctactgatttgattaatttgtcttatcccaataagctaaactttgtgttttaagatttttgacaggttcagtttattccattgttttattagttttcttcaagtgattttttttttttttttctagaccatcacagtaattggaatgtcccaaatctaaagcttatctttgttttttggttggcttcactggtttgattccattaatcaaaagcttaaaaaatgtattgttttactttactaaaggttaattactctcttaagacatttccaatggtcaaatttaaatatggtgtcaaaataatattaaaagagtataattttatcattgaatttattttcttttccaaccacaccaataaaatttacactaaaaaaatattttttaattattaatttattaaactatctcccattatagtatttatataaatataaaaatttaatcataaacatattattttaatattaaaaattataaaaaaaaatttagtgtaatctacagagtcccaatatttttagtgtgacactataaactctcacgtgtataggatgagatttagagttccattggagtagttttgtgtttaaacttcactatttttaagattatagtgttccattattggagaaatccttagaacattccatttactacttttaactttcaattttctacatatttgtaattgtaaattagaagacctcaataattagattgttatcacaatttgattttttgaattaatgggtgtttcatcctatgtgctatcaccttcattcaaattacctaagtataaaacacaaatatcaaatgtgtatttact

SEQ ID NO: 19895 - DNA, 4777 bp, Cannabis sativa
attttttaataaaaaaaattaattgacatgttaaacttgaatttgtttaacgcattataaaacactactttttagcagaagattttgtgaaatttttgttcatacaaattagtatttttgtgagagtgtgaaaaaagcagtttaaacttaatttagatattttagataaaagtttcaatttctatatatataaatgaattgttatataataattgtaaattatatatattaaaaggaattgtatggattgggaacaagaagaattggggttataggagcaccaccaattggatgtgtaccatctcaaagaaccatgggaggaggcttagaaaggaattgttatgatgaagagaatcaagttgccataatgtttaactctaaactctcttcatctttggattatcttacaaaacactatgttaatcatgatgcaagacttgcctatattgatatctactatccactccttcatgtcattcaaaaccctactcaatatggtaatacccttttatgcattaatatctcaattagtctttataattatttacttatattctattatatatataacttatatatgttgttttgttttgttttaggatttaagatttcaaaaaaagggtgttgtggaactgggcttatagaggcagcaacaacatgcaattcattggacaaaacatgtgtggatgcaaatgattatgtattttgggatgcttatcatcctactgaaaaggcatacaaaattattgtcaaagatattatcaaatctttgtatgaggttcataatttttaatcttgtaattgttatatatataatataccattagggtatattagtccaagctgtaattttgatcatgtggtttctcatgaacatgctcacatggtagttgtgttcttacttatatatctttatgatttaataataaagaaaagtattggattaaaaatttgttttgttattttatgttttttcatatatagtaaatgagaaattgaagatttaaaattggatttgtttggaggtaattatgtaattttttttatttaaaaaaagaaaaggatcatgtggtgcagattctttccccactccttcggttattttggagatcctggggaccacatgttagcaatagaggccttatacctcggccttttttaattgggtaatcagtagtcacctcaagagtttccatcacacagatggcaccacctccagcaaagactaagcttttcttaaattcctttcaaaagggactggagtgtgtttcgaacccttgacgtaattatgtaattattactaagcaatatattcaacatagtaataagaagaaagtatgtttggatgtgaaataataactatatatatatatgtatttttacttttagcaaatgagttagtaattagataccaaaataatattgtataataatcaattgtcaaaggttcaatttcaaaaataaaaattatatatggtatatctttcttatattaagcaatgtaacattttctaacacaaatatataaattctgtataattacataattaaacaaatatattaaacttaataattactttgaattaataggaactttcaaaacgcaccctaataaattagtactattataactaatgaaatgtgctttagtaattcgtttagttaaaatatgagcccaaattagttcaactatcttttattttattttttgaaggaaggaacgtatcacattaaatcaaatcagctgttacagtagcactaataaatctagaacaagcatctgtctacaaatcaacccctatagaactagtaacagactttgctagtgcataggccacaccatttgcaacacgcggaatggcacaacaagaaccaccaccaatagcagctaagagagaaataatctcctcaacaattggtttatacataaaaatagaattcaaaaaagtaattcaaaaattaacaatagaagaatccgtctccactctcataaaattgtagcccagtatggacgcccatctcaacccaacacgcatagccagaagctttgccaccgccacgaaatagttcaattatcttttaaggtttggaaaaactgttataaacatgttatcaacaaattaattgggttactaatttcaatttaaaattacttttgacaaataagatttagttgtataatatttaggggtgtttgttggtggtgcgggttgtaatattttttcaaatcaaactgcatatataatttttgtaatttttcaaaccgcaaccgcactgcaagatcttaaaatcgctaaaatgcaacgcaatttgaacagtttacactatcataattatcaaacattataataaaaaattaaaaattaatctaataaaattttaacaatataaaaaaaaattattaaagttttaacatgataacatatatactaatcgtctctaaaaaaaattacatatatttatttttatatgaaataaaagaagaaaaaataatattgtaaaaagtgataacttggtaatatatactattacggtgcagtttgaatcgcggttattaaattcaaaaccgcaaactacactacacgatgcggtttggcaaaaatacaaactacaactgcaccgtaaaagatttcaaaccgtatttattacgtggtgcgggcaatttatgcggtgtgggttgtttgatgaacaccctaataatactttattcaaaaacctagaatatgtgatgaatctaaaacatgaatgctaaccaaaaaagataataatcaataatgtgaatgaagaaagaaatcatgaaaggatcattacttacatgaagatgcagagaaaagtgtaacaaagagaaataaaactccaaggaaaaatagcaaattacaacaatcataaaagagctgcaaattagttagaatccaagattttgtcttctctttctcatctcttttttcttgaggagcaaatccaagagtaatgcacatgcatagaaaatgaacaactagtgtgcagcattttcctcatcacataactttgtatattccttaggccccaacaatgattctaactctgagggattgcttggcttcaccttgatcatccatccttcttcatatgggcttgtgttgatctaattcatagattcaagaagaaaaaatgagtgacacaatcaaaacattacaaagagcattgctattaggcaccagtggttagcgatatttaattgtaccaatagcgattatcttgaattgaaaatatgtggtgttttagtagatgtctgctgatgattgaatgggaaaacaaatcatcatttattaaacgagggaacaaagggaatagctgtttggctgcaaggaaaacagaggaaaatggggagtaattaccaagccaggttttcccttaaggctggagttaacttcaacaatctcgccagagattggtgaatttatgtcactgctggctttgacactctccacagctccaaagctgctaccaccagagacagacacaccagtttctggaagatccacaaacactacttctccaagatggtcctgaaatccaaattggataaaacatcattgttaagcactttacacttcaaatttcaacactgtttttctttctttctctcttttcctggccaaactagagcaaaatatactgttttcccatttatgagtggttagaatgaattttagaaaagttaatttccattttgaacaaacaagtggaaaactataatgtttcaattatttgccagccaattcctaactgaacatgtaacattcgagtcaggtttgtgtttgacatttgcttgtaataattaagtctcaacacgacacaaacacgagcacgactcatgaacatgaattacaacccctaagtatcactacataggccaaagatataagaatgaaaaactttgagggatcatagctctagaaaaatgacagaacaaactaaaacaaaaatgaaaaacataaaaaattacattacataaaaggggttttagttgaagttaatactaacctgagcatggtcagtaatgccaattgtagccactgggccttcatgtttgacccactcatgtgaagttgcatatttcaaaccatccaaaactacagaattttccaacaaattagataacccaatttccatttccacttatagaaactaaaacaagacaataaacccacatacaatatcacaaaaatagaataaaaagagcaagaaaccaactaatatgagtcaccattgttttggtaatataaaaaaagaatgtagagaaaacccaatagagtaaaaggttaaaaataccggttgagaaggatttggagagagaaaatgtagaggagagatgaggtttggaagcagaagagagtttgagagcattggctgtagaagaagcccacattctcagtgccattatttctctcttcttcttatttctttctttgtgttttattttagggaaatgttgaagagaagaagatgatgagtttatatgattgagtgggttttatttatcttggatgaatggtgaccaatgaaagcctcatcctaaaagcctctccaatttcagacaccccatttttcatatttaatgtccccctcttttttcttctttttctttaatgtacataaatttagtatttatttattttttttttacaaataaatttatcacatttactccatataaaaataataaaaaataaataaataaaagggaccttatcttttttatattttattttttttttacgaaattttacataga

SEQ ID NO: 19896 - DNA, 3549 bp, Cannabis sativa
ttttttttttattttgttgttgtttgttgctgttgagagaagagaaaatcattggttctacaaatattcagagagaaccaaagaaatgggcaaccatttttcataaaaacgatccaactcattaatcaattggttctgtcagcaaaacctcattctttaactatgagctctctctctgttcaagatatatttaaatatatgtattttaaacttctaattttatatttagttcatttatttgtacaaaacatttcagtatatatttctgtagtacatttttaccaagtcatgcatttcttttacttgtttgaaaattttctacaaacaaataattagtaaggatttcaaaagcataaaaaattaattatacaaagtacatatacaaatacaacaatcagaagcacctggctaacgttgataccaagagtacaatacatatcgagctgtcatgacaataatcagacaaaagaatatgctactacggctcgtttatcacaagaattgagagctctataattatgttgttccatttcttttctaagaaaaatttcaactgatgctacaaaattagcatacacacaaataaattaagatatattaaatagtttcatccccattcaaaatgaaatcaactcattaccactgttcattattaatagttgtctacttatgggttgctatccttttcgtccagtatagcttttcattggattattcttcccatccctcggttgatacgcctggtaattatatatatttattatatatacatacgtttttcactttggttttaatgtgtactttcttaaaaacaaataatgctatgcatccatcaaccgttattaatattcaatttataggcaggggttaggtacatattcataaaaatgaaaatattttaatcgatctttcaacttaaaagactactatatctatggtatcaagttgcacataaaaaaaatgctaaaactaccaacgttatccaataccacttaattagtattacattattattaatataattaagtattaattcatacaatttaatttaataatcatcctgaaatatcgttataataagtcatcacattaaggtcgttctaagcacctcattacataaggcatgcatgtaataattaagatatatctacctgcccaaaaaattatcagtttttcgatctagtcattgtaaaatgattttggcatagaaatgaaaacgaccataattagatatatttactaaatttctcactctatactatatgacattcccttcggctatttttcttttttcattttaaatctgtttctacattctaataagcatatattaaatcttatttatgagtctctacaatttttttcttatttagtagtagcaaaggcgctcaaaagatagggtcttacaaaattataaaatatgtataattccatattattatatatatacagtaccataatatagtgattcccttttacaattctcatattctaatactgtcaggaaaaattaaacacatcaaagctatcattaaaaaaaaaccaaataattaatagcccctttgaaacaagattatacagctagctcgaggtaattatatatatatatgtatatatatattatcatggttcataatccatttgatcgataatgcgggcatacacatgcagggatttgcgtgttgaattttacacaaaatccataccaaccaacgggagaatgcttgaaaaaagaccaagagaggataatgcaatgggacagcatccgcacaaccctttgctgccgtaacacactcacggccttgtctcaggccttagccttgagaacactcatgacgcagccacccgacaccgccacaatcttcatctcccaacccctctggagaaactgcacagctggccctttcacccgccagccctctgtgtcggcagacttatgcggcttcagcggcttgttctacggcgacagcagtagtcactgctccaacttaactcttcaagaagtaaagcaagccaaggcgtatgaaggtgctgtcacagcttgcagcaacacctcttatggcgattttaatggtgtctgtcctaaatgtacggcggccttgacgagtctgagggttgaaataatggctagatttggaaaagtaaagaatgagaatgctgagacggctatctgtaccgtcgcagctgtggtgtctattgtggccgccactttggcaagtagtttgcggactgaggatatcttccagtgcttgcttttgttagacaagttgggtaagataatatatgttaaattaaaaactcaagaattttattattattattattattaattattgaaaaatattaattagatttttgcccctaaactttcacatgtatcaaattatgttccttgaacttttaaggttgttgaaaatacccctgagttattgacattgtttgatttaaggacttttgtctaattttaggaaaaaatccttattaaatccaatgatttcaatagttcacgggtatttttaacgaccttaaaaattcaggggcattatttaatacacgtcaaagttcaggagcaaaaatcctaattagccaattaaaaatgtacacattaaaatttatgaatgaaactaataaaagggatattgatttgttgtatttttagataatattggtaattatttggtttgttatatcttgcagatccagattacctgaagattaaatgtaagtataattaattaaattgcctatatatattatttgagaaatttttttgtttttattgtatgtacatataataagagagaatatttgagatataaatatggtggtatggctgatgatcagatgcgttggcggaagtagtgttggcaatagtaatagccacaatcgcaatagcactgatcatagtactggtaaaatatgtaagcaagaagaagaagggtgtgaagatgaaattgggaaaatcaaacaaagagcagttcccagcttggtcagggctgtatagattctcaacggctgagatagagaaagcgattagctgcggcgggaatgagagcttgggaagagggagtgcaggccacgtgttcaaaggtattttgccaagtggacaacctgtggccatcaagcatatacaccagaacaatgaccatgccgactcttttcgacgcgaagtcgaaggcctttcaaggattcgacaccccaaccttgtttccctctttggtttctgtattcaagatgattgccgctatcttgtctacgagtactgcgccggtggaaatctttctcaccaacttctaagtacgtacctctttttatatcttatttctctatctatctatatctattataacattgttattacatattatttagtacagccccacacatattcagacctttaaccatatctagtgtggtgagcattcaaataaccctgctctatataattataagattgtaattttagaatatttaagatatgaattagtctacgtcaaaaaaaataaagatatgaattagtctacacatgaaaaagaaaaaaaaaaaaaa

SEQ ID NO: 19897 - DNA, 3046 bp, Cannabis sativa
ctttaattggctacataaatacactaccataatttaaggacaaaccagtctctatatcaattggaaagtgtacataatttagtaattccaagaaatatggacacatctccaaaccttattgcaatttggtatgagttcttgtaaggcccgcatcttctcgttaattctatcccttcgtcgctgtttaataaggtcaaaataaagtagcagcttgatgttaaaattcaaaaagaattcaaataagaactgcaaagggaactataaacttctttatagcgaaaactagtattactgaactccttaccctttcagataaattatgcacttctgctgccctgcttctcttggaccccgagcctcgagtatgagcagtctttttaacacccactgattcttcatcaacatcctgaacatgatgacatcttcttggtttatggaggaaacgaaaagagtgaaatgaagactcgaaattactgaaaaggatgtctaaaaatcagtattttgacttacatcactatggcattcagaatcctcagtgtcgcgaaatttcctcttcaaaacatgagttggatcatctgaagctctctccacactattgcctgagcaaacggaagaagaagcaacaacaggctctgtagccttttcaccatcccgtggagctcgagttgcactttcacagggaatttgactgaagtttaaatcattcttagaagcatcttccagggaaacagcttctgtatctttagcagcacatggctcctcaagaggcctagcctctgaaagtttcaagtcaataccagaagccattttttggcaatgtgtactagtttccttccttaaactactacttgaatcaattagtgttggcttaggaggactagtactatttgccgcagaaccattatccttatttggaaaactctccatgttcggtgcattagagtcattggtgttcttatgattagtctttacaagggcaacaggtcgggagaaatgagagaaattaactacattggaactattagtaggtggtataggatctttcttctgcattttttggctaggaaaactaccaggagatggaatgagagctgaatcgccacaaacacagtggcgggcagcactacttgtgttgtcagcaattgcatccactcctcttgatctaaaagatggaaaggatgtttggcaatcctgggatgatgatgattgatacaactgagtagtaccagttttagatcttaaaatattagcaccaaccttagacccctgcctttgatccaaactactaccataacctacagaactagcattcgagtccctatatagcaggttacaactacttttatcatttgatacaaaattattactcttggaaatgtcattaacagtcacaccagataactcaggcaacatatcaggacaatattcatgttgtaaagatccatcaattggataattcaaccatggcatcatatcatcatcatgactcaaacccacttcatcagatggcacagacattggaatttcatttagtacagcatccacagttccaaactttcctgtcttacaagttgttctatttcctacatctttgtctcgagatttttgggtataagatggtaaatagtgagaagttgggtcttttctagttctagtggactgaccttgtgttgaaatctgaccattctcccatacaagctcaaaaacatcatttgggggtctgcatcaaaaaaagaaaaaaaaaacaaagtttaaataggaaactataatgcaattcaatgacatgaatgaaacaaaaaaaaaataccaaaagagaataaaagggcttacggaaaatcttgagttgtatcaaccctccttctagctaagcgatatagctcagataaaggcatgatgaaagctttggaaaaataacttctttgctaactcagaaatgcctccaaagatcaaagcacttgttcattttcaatagcttccaaagaaactactcttgattctgaatgcatagttcaaagaatcagaataaagaaactcatggagaaataaaaagccaggccaaaaccccgctatgagacaatatcagttgaactttatatgaaaaaaaaaataatggtgtttctttttgcagttaaaatttacagaataaaatctttctttttaaataataaagtccttatcagtaagttaaaatagtttaataagtaaagtagtagtcaaaccaattctttatgacaaccaaagatctcaaaaaacctccaaattaagctcctttggcattaaaaattcattcttttcaacttttctaatcattaaataaaaaagtttagaaaacccagattatactttcttcattaattaataatttcaaccaaacaccatctagaaaaagataacggaaaaaaccaagtaatccaaagaaaatagttagaatcctcaagacctaataatctacgtggaaattcttttaaaacctactaaagttcaaaacaagagacactatattttggggaaattaagttccacatgcattaaacgtgtgaaaataaaaataaaaaaattgatacaactttcctgaaagtgcaatctaagagtcagtgactgaaagcgcgaagaaagagaactagtatgaaagagaaaatcttcacacttttttagagagagagagagagaaagaaagggcaagtagacgtggaagatggtgaaatcccagccagagttgcagggtgcagagttgagagtgtatgtgagggtgagccatatcatagaaagaaagtttacaaaagacgacgccactatctttctttttggtaaatatttatttagtaccttatattttattaatatgaaaatttagtatcttatatttttaataataattatttaataccttttatttataaatcctgctcatttagttgtggagtcttttaataatataacttagagtaattttacaatataccctcttaaaatagatgtattgatgcaccatctacttgtttcggcattcaaaaaaaattttgtctaatttttttcatattcatgt

SEQ ID NO: 19898 - DNA, 2928 bp, Cannabis sativa
tggttgctctaggcctcccacttttcccgccgacaaacacgtgctgcgtgtacgcgccggcgaatttggacggcaaggatgagctaaacctccgcaaaatgaagtgttcagcgttcgcctctgtcgtttcgcttggggattacgccaccgaccctgccaggtggcaatacggcgtcactttggggtataataacggcgttttggagagtaacgttgtggaaaccaagtgcaagagctgtgaaataagtgatggggtttgtgggtattctactactaatagtgatcatgatcatgataattcgtttctttgtgtatgtaaaaatggactcaatacgacgacggattgcaataatggcgctgttccttattatgctcaggatgcattttggggttcatcagtttcttctttacccacctgtaagtttatattttattatatatattacatatttaccttatattattgtcatttgaaaaataaattatctcaaccaattaataacggaatgcataaatttgtttttaagtttgatgcttttgggatatgattgaagcgttaatgttacgtacatagatccgcaccatattccatagagcttttgccttaaaaaaaaactaattttgggaataaagcttagcttttcatacgtggataaaaaggcacaaacttaatgtagaagttactatatacaatatatttatttataatataaaagaatggttacatataaatgtataccattatgttcttcagtacttatttttcacattaagcatgttaactttattttatgataaaatttcagggaaattttggtatggtattttggctggcatgactatctgcatggcagtttaaaagattagatggagtctggagatgggcttcctttaaatttgcttgttttcactctgtttcagcttttgtacaaaagtagttgttttggaaatgaaatgtgtgtagttattgattgatcaaattgaaaaagtagaaaataaagtaacgcacaaagcatcttctgctgttcaaatggattttaacgtatatatatatccacttgtaggcttctttttaagccacactcttgtgaacgatgtcatgaaaagagagttagaattggtaattacaatgttattgttttagtcattctttttcttgtatccaaatcgtgttatgtactggcgattagttttgaataagctgttgaaatatataaatatggactctgacgataaatattaaatacgtagaaaagcccatacgtacatttaagtaatttacaaacgccaatatcatcccaatcctctgcttttataataaaaaagagttactctagtctaggcaaattgtatcaagaaccagattctgtggccaacccagcaactttatcgctccacccaaaccagagatgggtcttaattcatactttctctttactaacacactttctagtataataatttaggtatacaccaatatttctaaacttcgaaattaatccatgattgggtgaacgtggatttgtaaaatctagattttgcttcaacttttgaaccttttcagtccaacttgtgaccattgatgttgtttccctttgctggcttagaaggagggagtggaccaatgaggaacgagttaaagtgtttgtacatctcttttggcttctctgcgtttatggcatgccctgcattttttatgaccgctagttgtgcattctcaccaatgtgcctgcaaaaggggtgaattcaaactctgtttatggtcataatgcaaagcatttcaaatataaattataactctttatggtaaaatattaaagtaatagttacattattgttcaattaaaaactcagtgtacctctctaatcggtatgctagctctattgggaatatccggtcgtgttctccccagataatcagagttggctgcataaataataataataaaaaacgactttctgggatttttattgttaagatataaatttccaaagaaggagataaagctgtggtaaatggttataatatagtagaaattaaaacttataataacctgtgtaatcttgggaagatcagacatttttctgtccttgtgtaatgcatggaccagttctttcctctcttgaatgtatgatgtgcacatgtactgccaggcaatcaaattcataagttttagacagagcatgcaataagaagagttaatattattaattatcagatttgacaagccaaagctaatagctctcatattttagttctattttaaaagttagacaggtagtcagtacaagaatacgagaatgcaacttataatgcgctattgctaactcaataaaacaagttgccatcataaaaagcataatgcataattaaagctgtggtccaccgttctagtaaacaatcagcttttttttaaggaaaaaaaaaaaaactaaagcaaaagtaaagtaggaaagactagagaagaggaaatttttatgcctgaaaacgttaatgagttcaattgttcccttgaaataataagatacatgtttaatttccataggttttataggttaaaataagatcataatttaagcaactgctgtagaactctcatgaagcttatctgtatgtgggaccaaaaaaaaatgagaacattatattaaactaagttgtaagtgtatcctatatctatatgcttttgctttaacattgaggccacaatttctgctgtttgaagaaactagggtctttttccgaacaccgaagtgatatgaccccggtattccgcatgcatgaaatctacgatagataatctttggtgggcttcaaagtagtttcactagatttgttagcatattaaaggaattttttcataattaaccaaaaaaagataaaataaaaataaaaaattatatagttgcacagatgtttagttattttta

SEQ ID NO: 19899 - DNA, 5674 bp, Cannabis sativa
atctcaatagttcaagaaaaatttttaatggcaaaaaaaattcagaaaacataatttggtacatgtcaaagttctagtgaaaaaattctaattaaaaatattgaagtcaacatcaatagccaaacagtaggcgagtctatccaaacacaggatccactaagccaacgctgtttggggattcccgttatcgccaaacccaaacacacccttttcttcttcccctttctctccaagtcctctctttcttctcactgatctcatttagatccaatccaatttcctgtcactttcccgggaaaattcccacaacgaaaaccgtaaacattttccgggaaaaagagaaaaagagatgtcacacggcgacacggtaccgcttcacccatcgtctcaatccgacatcgacgagatcgagaatctaatccacgccagcgtccaatcgagttccgccaccgttctcccagccagaccaccaagccctcctagggcttcgatcccggtctcttcatccccattcatacaatccaatcttccgcctacgccagctcctccgtcttcttccaccaataagaagccgccaactgtccccattgcgcctccgcttcccacctcgaccaatgggaaccctagcattgcctctaccgggtttggttcggctcctaacacgctgacagagcctgtttgggatacggtgaagagggatctgtcgaggatcgtgagcaatttgaagttggttgtgtttccgaatccgtatcgcgaggatcccggaaaggcattgagggattgggatctttggggtcctttcttcttcattgtgtttcttggtcttacactttcgtggtctgcatcggttaagaaggtgaggtctcatgaattctgagtttaccccaatttcataatttgtgattgctcaaggttttaaatcttatcattgagatcattttgggtttttgtttctaattgttgttacaaaatttagacttgagtcatgagaggagactataattgtagtgatttagaattcataattctattaagtgatttgtgagaggtaggttgaaggttatagggtttaatgggaaggaaaggaatacaagaaagtgtatctatatatgtatgcatgtatgtatgtatattcatgacttgggtgggatgtgatatggtgttgaattaaacagaaccattgtatgaggttgcttgtattgcatgcatttgtgtttttattaagactcttttccatttcaaattagtgagtagtgtgattcttataatttagggaatttgtagtgagctttcagttagagcctcatgcaactatgcagaagtatatattggagataattaggagattttttttgtaggactgtagtagattcaatctttgccttaaatatagaaacattttgtgatagacttagaagttggtatgactatacaagaatttcttgaaagtctgactaacattcacattgctacaatgttgtaaaatcagtgaactttaggtagttgtttttattcctttgtacaatgacacaaatatagagctttaaactctgatcatacggctataatttgggttgtgaaggagataacggtttggtttttgaactcttagctatatggtcttattttgaaattctaaagtagttggaatgagtttgataattgtgagcttatgaagttgtttcatgataagatgatttgacacaacaaaatacctagaactttagctgctgaaaggactaagattgttttgaagtttgagaatatttgatatgatagttggtaatcaaagggctttgttttcttttacatgttttgcgcattttgcttgaaacacagtggtaattaaaagaatctgttattgccgtcctttttttttctcaaggcacctaatgtattaactgatgtttgtagcgtagagtttgctagacacaaagggtatgagtggcttcttctttttccctttttttttaataatgtagttcgaaggaaactggtcagctatagaatcgtttggtgatctagttatcttgttcttgcctgagtaagtgatttggccattttttttcccggtgaaacaacttaaaaggctcaggttataaatggcttttcaaattttaatttatttgtggaactcattttttgattttatttgtagccttgcctgaaccaaactttgttttttcagtagcttctaattctcaactttgagaaaattatagctccaatccttgtttgtgatagatgtaatattatgaggttgctagagtttgttaatgcaactgtaaggagattatagcaatgcttgttaaaccattttaagagttaagttggtgtgataaacccctctccatatgcattgataatataaaggcccaattaaagttatacgtcccacagtttgtttgtagtgcatattttctgtattagtctcttttagtggatgattgaaaacttagatcattattttattactgaatcagataagactagagttttattgctattaaagactttctccaagtggaaggggtgactgcacatgttgtgttagcctgcattttagtatgggctggggttcaatccccagtgggactaacttcttcttcttcttctttttttagtccaaacaaaaaaataacatcgattttctttagtccagttacaatcacattttttaatgagtcaaaattacgtatgacaaatcttgtaccaatttgtgtttaatattaaacttggcacattattttaaatcctgtaaaataggagtgagctaacactttcaactttattaacttcttaaacgatgtatgaaagcttgagtggttggacacaaattggtacatttttttaaactcttttagttgattttttttttcttttaaacatgtttatttcatattttgaaattttagattttggattttcggtagaagtacttggaggtcctcaaagtgttggttatcacagtttgaaatgatattagccatttgaggtggggttttactgtaaatgggacagtgccttaaatctgaggctaggccaagcctctctctgatcttatggaattgtgggttttagtatgtctcgtgtaaatttctatatgagcattttcatctaaaaaaacaatatgaaaattcaattcggtttatttagtggctaaactaaacttaaacaagcaatattttctagtccttctatatcaactaaaattgcttattgtatatctgtagtttctctgatttcatgttgatcttcaagttcaatattgactgttgtttgttctgaagacttgagaaaatattagagtggggttcaaacttgtttccatttcaaaaatgcaatgcattgggtgtcacgtacgatagttttaaccccactaattaatataggtgcatgcctctgtattccttggcaagtttcaaggatctgtttatgtgttttcctgcaattcctaaacttgaacaatgctgtattattcaaagaatacattctttttggagagcaagtttcaaagataaatcacatttaattggtgcagtaatgtgtttttactttgttctgatgctcacttataattagcaaaaactgcttcacaatttttttttgttgagtattttattcatctattattagctcataatgaatatctttctacccttttgccagtccgaggttttcgccgttgcatttgctctactagctgctggtgctgtaattttgacactgaatgtactactcctggtaattgcttctcactcactcatattcattggcttgatagataatttctacttcattattcaaatgcataaaaaccaattcattggcttgtgtattggtttcatttttagtttgagaaatcttgagaaatgaatgtttgtttttcttgttgggaaactatggtaaccggctgaaaaactagatcaagaactttaaaccttgcattgattcatgatcgaacgactgacttttttaaacatctgattattccagggcgggcatataattttcttccagagtctgagccttttgggttactgcttgttccctttggacgttggggcggtaatctgcatgttgaaggacaatgtgatagtgaaagtaatagtggtatgtgtgacattggcatggagttcttgggcggcataccctttcatgagctcggcagtcaacccgaggagaaaagcccttgcgttatacccagtttttctcatgtatgtatctgttggttttcttatcattgccattgattaatgatgctttgaaaatcagtactgaaatggggtttgaaacaaaaattgttgttacatagaaagttttttttttttttttctttttgtgctgagttaatcttctctttcgtgtcaactgtatttttttgacttcttgatatgtttgggaactcaatttgcctaatagaagaatatactagttttgtatcaaatcttattaaaatctcctctttttgtatgtttcttttgttctttcagcatcatattttgactaattaggattcttctcaaagtatgattaatgtattattatgttcttgaactattcacaatactgtaaagtagtcttaagttttgtcatacgtgtcaaatagaatgataacgtaaatgtttatggcattataatataagtgtccaaaataaaattatgtttttgatttagtgaaaaatcaattaatcattaaaaaacttaagtaaaattaaatgaaaaagtctaattatttttttttcccaaattagttataaatgtagtattgatatgtcagaacatactacatcatcattatgtttgtcacatataacaaaattctattttattaacatattgaaaaattcaagagacataataacatataggttataattcaaaacaaaaatcttaaatagcataataatatttttataaacttagtaaggaaacatgagccataataactactaatttaattttaatcctttagtgagaaaattgtcttaaaagataaaaaaaaaagtgttgctcattcatcttttttctttttttgctatgccttcatatattctataggttgctttgtgtaagattttggtgcacatatgaaatattgaagagaaatttttttaatgaatttccaatagaaaagttactcaaagttaagtaatgccatcaaaacatagctatttaaagtcacaaagtgtaactaataaacatcttttaattagtaataatcatattattaattcagtagcacttttaaagaattaaggataaataaaccacctgcctatacattgtgaatatatttttatgttatacaacaaaatttatccatagatataaacaaaggtccttaatataattaattgcaatgtgtgatttcaaactcgaacttttttgaattttctcgttcggtcatggtttaaaaattctcatgtgtgggatcaaaccaaactgcttaattttttatatgtgcttaatatatttttttttattgaatattgatatttatgaataatcttaggtataatattgatagtaaatgctattttaagattatatattttcattgttatctacatattataaaagtaaaaaatagagtagaacatttacgaattacaaactacaccagtgacagacccagaatttttgatttgtgggggcttaattgttataaaaa

SEQ ID NO: 19900 - DNA, 2702 bp, Cannabis sativa
caatacaatacgacctaatgcggcgttccaaacgagccctaaatatcttattttactttaataaaaattataaaaaacttgctaactttgtaagcaatgccaggcaccttgttaccctatacgaggacttgatgactgaaaagaacacaacaacgttataatggcggtaaagaaaccagcttctcctctctgtctcccgttcatcacttgtataatcgttatcatcagtcacactaacggccaggatttcacattccacgaagcaaccatcgaagatatccaaaaagccttcgccgagaataggctcacatcgagacagctagtggaattctatttgagccaaatcgaaaccctaaacatcattcttcgcagtgtcgtagaggtcaacccggaggctctagatctagcggatgaagctgatcgccgaagagaaaacgatctggaccgttcgtctttgggtttgctgaatggcataccagtactgctcaaggacactatagccactaaagataagctgaacacgacggctgggtcgtatgcgctgcttggatcggtggtgagtcgcgacgccggagtggtggagaggctgagagctgccggagctatcatattagggaaagctagtctgtcagagtggtactctttccgtgctctcggtcacgtgccgaatggctggtgtgcacgagctggacaaggcgtggtcagtcccagtgtcccactccctcctttatttgttaatctcttcattcaaaatatggaaaactaactaatcattttcttattataaatatcacttcaaatcaacgcagaatccttatgtagcatctggggacccatgtggctcaagtagtggatcagcaatttcagtagcttcaaacatggttagtgtgtcaattgggagcgagacccatggatcaattctctgcccagctgaccacaactccgtggtagggttcaaacctactgttggactcaccagccgtgctggggtcattcctgttttgcctccccatgacaccgttgggtaaacacaattctattctatttggcattacaaaacttctaatgtcaatattaagagacccttcactttcagtgtaggttttaaatggtcaggacactaagcaggacagtttctgatgcagtttatgtacttgatgctatagtgggttatgatcaaagagatcatgaagcaacaaaagaagctactaaattcattcctttaggtggttataaacagtttctcaaactagatgggctcaatggaaagattcttggggtcgttaggaagccatttgtggaccccataaaaaatccttcactgtctgaagcttttgaaagtcatttgaacatattaaggtatgaattcacaacatgactaaaccttcttagttttccctagaaaactagttaatttgttgattttgtttggtcaaaatgttttaaaaactagacaagggggtgcaactattgtggacaatcttgaaatagagaacataaaaacagtgatgaatcctggtaaaagtggggagctcacatcaatgttggccgagttcaagctcgccattaatgactatttaaaagaacttgttgtttccccagtaaggtcgcttgctgacattattgcctttaatgaagaacaccctgatttggtaagaatctcatctcaaagtgattctaagaaaagaagattacttcttgtttgagtttggtttctttttcccaattcaggagaagatcaaagaatacggtcaagccacttttattaaatcagaaaagacaaatggaattggtgacaaggaaatgaaggcagctgagttgatgaaaaatctctcacgtgatgggtttgagaaactaatgatagaaaatgaattggatgctctggtaacacctggtactggagctatttctgtattggccttaggtggttatcctggaattacggtaccagctggttacgatgacaaaggcatgccttttggtctctgttttggagggttgaaaggaactgaaagaaagctaattcaggctgcttatgcttttgaacaggcgacattgatccggaggcctccatttcccagatcaaatccgttaccattagtagaaaatgaaggtctttttaaaagttggtagtagtgattgttaccctttattttttttttattaaaaaaaaaactactcattcaaattttaatatttcagaagactgtctttttgttattgttttgcatggttgataattgtttgatctgtttatatttacgtatcttctagcataaattgatcactaacatatcaattatgtatacgacacatatggttatcaaaaaaatgtatatgacacataatgaatagatgtataggtcattatgctgagtgaatgactaatccatacagcaagtaagcaagctagctagcttccagttagcactatttagtaaataacaggcggttaattaacagtctccgagcataattttacattggatttggatatgttaaaaatctaagttgtgttgctttatcacgtgtgataaggaattggatgttggaaaatttaaatctgtatttagtcttaaataattcactataaattaaataatagaacaaaaaaatattagcagaagcgtattagagtccataaaatcgattttagaatgatatgatttttcaattttgcggtgaaatctttctttggaact

SEQ ID NO: 19901 - DNA, 1762 bp, Cannabis sativa
aatcttagctgatgtaaatctgtatatttttcgttacagggtttggcttatcaattgatagatgatattcttgatttcaccggcacatcagcttccctcggaaagggctcgctatctgatatccgtcatgtaagaaatcttttaaagtggtttatctttgtttgatgacattattagagtttgagcttcaaaagaaaaaaaggctggtcatacataatctgttgttttcacattcgaacaatttcactccattgcgaaattctaaatcgaacagttcccatgcagatcataagagaagtaattattaattctgaagaagaaaatattgctttgacaattagaactctcatccgaaatcttgctctacaaaacatgattttttctttaaggcctcatgctaatcttgcttaagaaaaaacttggagaatataataacaaatggtagcaaatagcaatggctttatgtttattgcctgtcccccatgtctttgcataattctattaaaattttgcagggtattgttacagctccattattgtacgccatggaagagtttcctcagttgcgcgccgttgttgagcagggatttgaaaaccccaaaaatgttgacattgtaagtactttaaaatgttgtatgcataatttgtgatgcttgttcatgttataatgtgacatacccctatgaatgggatcatagtgtaaattgtgttcttagcataaccgagtaatgatgcacgtaaaattcaaaaaacacaggcactcgactaccttggaaagagtcgcgggatccaaaaggcgagggaacttgcaataaagcatgcaaacctcgctgctgaggcaatcgagtcacttccagagagcgatgatgaagatgtaaaaagatcgagacgagcactagtagatctcacccaaagagtcgttacaagaacaaagtgacaggttcacacacaataggaacatacttatatattatgaattcgtttcattttttcttgtcgtcggtaccagttagggagagggacaattaccctcttccattttcgttaaaactttatattttttattttttcggttttcatagttttcttttctcgcgcttattatgtacattataagaactgcagagtagggagaagattcgttcaagctttcatgatttaaaagaactatgcagagtcactcttaatctttgaatgacttgcatgatgtataatggcaataaaatgttgttgacactacaatttttttgtttagtggaatggccatattagtagaggtagagctctgttcaaagttgttttgttacaaaaatgagtcttttggacaagtaccatctttttattttaattatatttttcaaccaccgacaacataatattttattggtaccaaaacaaacggttacaaagtcacatttttggacaagctgcatgtgttttttcttcccttgataatatagtcgtgtaattattagagaagtaattatgctagtaattactcttttaaaatatatgaatatatattagtaattacatatgaattcttatattttgtttgacaaattagttagtaattattcagaaaaatgatttttttagtagttaatatttaaaattgaaaatttttagcaattacactcaatttttatggggttataagaattcaagagtataattaaaacctttcaattacttccaaattacattgttgcaatgtaattatatgatcagataaacatattaaattagggatggcgattat

SEQ ID NO: 19902 - DNA, 3235 bp, Cannabis sativa
aattattcaatcaaatatattgtagagctttgattaattattattattaaaattaattacctcttcttatattttgttggagctggttgttttgtattttgaaccatgatgagattcttcttcttattcttctgcgttgttggttcatgattattaagatcggacggtagtaaatcaagatcatggtcgtgagagtcaaccatcggagggtgcaaatcaactgggtagaatggcttgtagagttcttcaagttcatctaaatgcgtcgtcgtttcgaaaagatgagggaatgaattgaaaatagagagatcatcaccttcatcatcattatcatcgttgtcgttgtcgttttgtttagtattatcaaccaaaaacgatgtcgtttggtgatcataattggtcatgtttggagattcataaccaaaattattattggtggtattagtgctccctcctgatctgaccacagctagcaaatcccagtcctcatgatgatccattgaaataatttctataaaacaaagttaatatcgattatatatatacatttatattatatttatatattcaatattcaatacatacgtaccattttaatttatatattttatttttaatatccaaacaaagccctcccaattgcacatataataacgagttgactttaacaaaagtcagagagcgtgactaaactaaattgcgactctactcgcgaaaatgtgacactcgcttgtacgcgctgccagctggcgagtttcttaggttctaagccaatggataagtgagtgtcggttagtgtttaatgagttagagtgtgatttttttggatattttggattgaatctccacgctattgtaaaatcgttggctcagccgcgtgattgattagttttctttggtcaaatgtgtattgggataataatttcattatttttatataaattaataattttttttatttattatttatatgattatttttggttttaaaagtaagctacctctctactttttatattaattaaagtatattattaaatgaaattaaaaattgacgaacgtgaatgaaactcttacttcttatagtaacaattttatcttcattcattattatgtggcggtggctggggtttggattttttgaaatgatattattattattattttattaatttcttgttgtgcatgcatgcacgacgtacgtcataatgagctcatggaattctgatattttcattttcgccaccatatagtttttttcctatatcacatatatgtatgtattatataaattatcaagaataattaatatggaaatgtttattagtgtattatatacataaagatttgtaagtgaaagtataaataccatcctaattaaaatgttttaaatattcctacactaataataacaactctaagtattaattaattttcaccacacgatcgatttcacaatctaattaaaattatatttcggctacctaaattataaattcttttctctcaatagttattggacactctataattcaaattttgatataaaatatagtatatctatatatttcttcttttttctttttaaacaaaaaatagtatctatattattcattatactatacaatactcatttggtatacatgcatttatatatatacttttaatttgttaactaaattttagtttttttaacaatattaactaaattttagttgattatactaatttattataatgattattattattttaaatattaattaaaaattttatcgaattttaacatgtaatactaaaaaaatttccgagattattaaattaattttttttttgtctaattttattatcaaaaatgtaaaaaatttggtaaaacacagtacgttatgtaaataagtatgtattctatatatatattatttttgtttatggccccctaataatatggttccccaccctcaagtataaattaattaattaattaataggatatagcttaggccttagggtagctatatagtacaccgatcttaattactcacccaacatgccttccttctatatatgcatgtggccacacattcattaattttttttctatgtgccaaaagaattttttctaataaaacaatttaactttgcgtaattttaagttggagaagactaagtgacaaaaatacagtagacactacctaaaacaagttgcattaaaaatattaaataattattaattaatctataaatatattcagttataataaataattataatatatatttttcttaatttctcattagtcaatttattccaaaatgcggcacttttcacagagtgaacacgaaaacgctgcgaaaacacacgaaatctctcatagtcaaatgccaagaaaaatgacattttaattatatttataatattaattaattaattaatttataatataatatgatatattttgcaagttgtagtgaacgtgtgcgtgtgtgatgaatttttttattattcctaattagagacaaactaaggatgaggatggaatgacgtcatcatcgagaataattataagaaaattaatgatgatgatcataataataataatatatataaatattgttacgtgaaatgaagggaaataataaagttaattattgggcaacgccataataaattaaataggttcttaggtttatagactttaccacgcggagtggccaagaattttgatatcccctcttttgaagcagtcaaatatatcggttccatcttttgttttcacaaactttttttttttatataattaatattatatataatatcttacacgttatattgtctatttgtgagaaaaaatatataagtttgatgagttatttttttcatcataaatttcaattttgaaataaaattttatgtatcttataattttaatatatattatcagaataaaaataaaaatctccaaagatttgatctaaaaattagcaccaaaagtccaaaagtcaaaaagaatttaaagataatgagccaaaacgagctacaaaaaaaaatctaaacatccatctaaaaagtaaaatcaaaagaatcaattgtgtggaaggaatattgaatatataagatttataatctacgcatctcataagcaattggttttgaaatgaaaacttaattgaagacattcgtaagaatacatgatctcctacctaaaattttacacttctgcgcttcgaatctgca

SEQ ID NO: 19903 - DNA, 2492 bp, Cannabis sativa
attagatttcaatgcttttgatgttgctgtcattaagtttcttatacagtgcatacattttgcagctgggaagttccctttctatttatggatgtcgaaagtatcaaactaaagtcggtgggaatgcaaataattttgacgcagagcgaggcacttatgttgctcctagccttggagagagttcagaggcatcaaatttgtataaaaatctcgatacccgtgaaggaaatgatgctcataaaactgcaggtgcatggggttacatcttccaaatcatttatcaggtagatttttgtatacccgaatcctcctttaatcacccaagtaacttggaaatgattttttgttttggaaattgcagtgcctctctgttttcaattgctatgttttacttatattagcatttcaaagagtcataaaatccctttgctcccctatgaacaggtttctgctggtgctgtggtgctaaccgacagcgtattttggctcattatttatccatttttgacagccaaagattacagcctgaattttgtaagtaaaaagcaacattgtgctgaatctctatctcattttaacaaattgattcaacttctcaaatctcataggggatgtattggttgattgtttgctatttctgagtagtttcatttaaccaacttgtttgtgtattattgcagatgattgtttctatgcactcaatcaatgcttttttcctcattggtgacacaatattgaattgtttggtacgtaaatacattgcttgttggtgttatagacattttcatcttcttcttcctaattatgcaaacaatcttcttttcgcagagatttcctttgtttcgagctgcatattttgtgttatggacaggaatatttgtgatctttcagtggattgtccatgcttgtgtatcaacctggtaaaaataattgactttttcacttcatgccttgaatgaacacattcaaattttatggctcacaatgctaacaccctttgttgcaacaacaggtggccctatccatttcttgacttatcatccccatatgctcctttatggtatgctcttggcttttaatctgatttagaaagaaaatgttctcaaaaccaacaatcacattactgagaaatctattctagaaacttttaacagtattcgtttcgttcatgtgtctcgtcgatgcaaattttacaggtacatcggagttggattgatgcatgttccatgctatggcatttttgttttgattgttaggattaaaaagctcttgctgttgagatcattcccggagtcttatcagtgtgtgaggtgaggacttaggaggagaagcttgttatgataccatagcttttgtcataattatatatatgtaataggagaagaaaatttgtatctctgcaagttttcctatcactcttatggctatactctatggttcaccttcacccaaaacattccagcagaaaaagaagaaaaagaaaaaagagaaaggaaagcattacatattttgcttatagaaaaattcatttatcaattcttgaattagaatctgtactcaactgtaggtgattatgaatacaattacacaagcatatcttaccaataaaatatacacttaattagattactaatctcttgtgagtgtgttttaattattattctttcttttctgaactttgtgagtagaatatccgcttaaccacaaaattcgtactgtattgcatggtgtggtgtagttaattttattcgtggtgtagttatagttaatttttttactattatcgcggtgtcatttgtttagtcatttgctaatatcttttttctttattattaattgtagaaaaaattggaatttaaagcgaatcagatactcataaatctacaagtacaagtacaacaatgaatattaattagaaatacatcataatttataactagttcttatttgtattttttcctttgtatttgtttgagacttggagaattgtattttgttttgcttgttgaagtactaagattctatttagatattgttatgaggaaatttactctttttctaatatattagttaattttctatcatggttaaccacatcattttgcaccacatacgtgaggtgtagttttcggttaatgcaaaacaaattaacatgtagttaagattttcatttaaccactctttttgggttggttaaagaatttatattttatctggtcgtctgtaccactagagaaatttaatccgcaatgatggatacccgtgagtacccacctcgaatggggccgaaaatacctgttttggtgagttatgagggacaattttatttacccaaagcaagttccgaatggggttagggataatattaggaaaatttacatggtatactaatttttatcatttttttacaaaaatactaccagactgtattttttacttttttactgtgttttttataagttttatactgcagtatactgtattaaggtttt

SEQ ID NO: 19904 - DNA, 1989 bp, Cannabis sativa
gttcgacccataagatttctcccctaaacaataaatttatgcaaatttatgaaagaaggagtacttaaaaaaatatatttttttattaaattgacaactagtagccaaaaacaacttcaaatacatatgaatcaaaactgaaaacaccaccattgccatatatttgaacaaagcaagcaatcctaaaatacaacactaccgctgccatatatttatttatatttctctccgtacatttctctctccgtactgtagccctctcgtaggaaatttgaatttgtcccgtactgggcccgtctgggccgtgtgaggtgtgacggaggacgccatgtacgtccggccaccattggccatgggtagtggcccactacctacagacacgaatcaaagtgttttaaggtttaataccctttcctttttggatctggcaaaggatttggtaaaatattgttgtggtcatcttcacctatccagggatcctccttttctctctgtttttcctaatctcattattgcttgtggggtaacttctgagttggtttcaggtcctgtgacaatggcggcggtgactgaaagttctattgttgatgaaatcatccaggagacggagaatgtttgtctggatgacttttcgattgaggtttctcctgataatgatctttctagggagacgattgctaaattggtggtgggaaagttcttctcaaagaaggtgatatccaatggaactcttaggaaagcattctcggggttgtggaaacttagtctgggatggaggtttcaaactgtgaggcctacgacatttatcttccgccttggaagcccgaaggaagtcaagtatgtgcttgagaatggtcagtggaatctgtgctgtggattcttgttggcagctgctctctcggaggacggaaaatgggagtccgcggagctcgcgaatttggatatctgggtcaaggccatgggggttccattaccatacatgacggaggcctgtattcatcagatggttggtcggatggggaagtttatccaggcggataaggttagaaaaaatggtgtgattttgaatgatttcttgcgattccaagtccgattgaagttggatgtgcccctcctggctggagtgtctctcccagcctacggtcaaaaaaagatttggagttactttaaatatgagaaattgcccattttttgctttaaatgtggagtcattggtcatgttgatgctgattattctgcaaagaaatgggtagttactgttcaggatgggaggtctattcccttgttcggttcctggctgagagatggttcgaggttggcgaatggtttgcgttgctagaagtggaaagtatccatgatcgtagtaggttaaaaaatgatgatccggtcctgaaagagatgcctcttatggctagtaatgaggctctcatcccggcgaaaggtgcggaatgtagtggtgtcagacgagagtggagaaagatggaatggaaggggtggtttcgtagagagccgataactctttcaatgttgtgtacaatgattatgtggatacatctaagttccctacccagcatgtggtgcatgtggcaaaattatttaaagaaaaattggggcctattaagttctctaatattctaaatggtcctgattggtatagtttttttgtttatggtccgccttctagatctgcgagaaaagatttttgggaagaaagaaccatagatgctctggccttgaaccatccttggctcttgatgggtgatctaaataccatcacgggtcaatacgataagttcggaggccgcgaggtggaggagagtgatggtagtgaccttaatgatctcttggatgccacggggggtctggatttgggttgtgtggggaatcaatttacatggaccaatgggaggagctttcaagatctcataaaggagaggcttgaccgtgctttgtgtgatccgaagtggatggtgtcttacccgaaggctg

SEQ ID NO: 19905 - DNA, 4051 bp, Cannabis sativa
ggaaaatggaaaagaaaggatcataatagtgactattatgttgatcatagtcatgattggattagaagagaaatttaaaatcacagttggaaattctaacgtaatatatgtagcgatttaaaattttttttgcagctaagtataattttttttttttgaagatttaatttcttttatttattgagaatggtgttaagtatatttcttgattaaataggtgaggaagttttacatgatcatatctcaatacatacacaaatagtaagatccaggtttgctttgtactggttttgttattaaataaaaaacacactctcacaaatagaaatttttctcttttttgttagtttttggtttcatattgtgggtgtaccacgaatagctccctctcgtttttcttatgtgaaaattaaaaaaatgattacttacattttggtttttaagtttaataaaacaaaaaaaatatttttggcataacaaccattagaagttaattaattatgataaaagaaaatataattaaaaagttatttctaaccctctttaaaatatcattagttttttcaaatatatatatatatatatattagtaaatggatatatgaataaaaattaaaattgcttttctataacactttttcaatgagtttttttattttattaattaaaaaataaaaatattttctaaaataatattgtctaaactattattttaactttcaaaatgaaaatgaaatttctttttttttttttcttaaaaaaattattttaaaaatttctttttttcttaattataattttgtattttcttttattaatattttggaccgtgactctgtgatcggacaccggccccaacccaagacatcggctcctggctcccggctactggcttggaccttagacactagccctcggccacgacctgactcggacctcagtccctttctcaatcgcaacctggccctcaaacctggaccccaaactcattcctagacatgaactcagacctcgatcgatcccagttttgcccccgaacttggacccaaacattagccccagacccagaacccaagacacagacataggcatggacccatgcttgtacctgtacctgtacctaaatcccaaccccagacacgaactcaaactctaaacctagatcctagaccccaacccctgtctcagactccagactcgaatcacgatgccgacccactttctcattgcccacttaaaaaaagaaataaaaagagtttttatccatgtacagtaaaactaatataataaaaaaaatgtacaaaattacaaattaatgtacaatttttatagatctataaaataaacacattgtgctcattaaatgaattagtgaataaactattgaccatatatcaaatatcaaaacattacaaaaacaaatcataccataaaatataaatttattattttcaatacaaaaacacatactcaacatatataatacgtatatgcttaattaaccattttcaccataaccaattttacattatatatcaatgactgccataaaattggtgagaaatactaagaactaatactcatttgtacaataggtcttatatatgttcatcacatatatcaattttttgaaaaaaaaaaactaagaaaaagaaacattattgacataaactaattgcgtttaaaataagtaaacaaaactatacataaacaataacaattcatcacggcgaggcctactttggttgcgaccaattcttcactgtcgcgagaagacttatggccgcgacaaaacctgtgcaaaaagggcacaattctatacaataatttcaccacagcgaggcttttagtgaccacggcgagagagtccgtacgactcaagggtaaattcatatttttgtaatattttgagttcaaattaattctatttaagggaacttcgaattagaaagtatggactttaaagttacaacctagaagtagtagaaggacgacaactagagcgagagtggcaacccgaatctattccaccatcagtttctttcttctccttttatttcttttatgttaatttttgtttttaatttatttatggatatgaacatggagatcatgaattaaattctcaatttagggatatgatgaatgttagttgatgtttatctgatttagttaatgtgattgttagtttttttttctagatagtgtgatttgtcttatttgttataattacatgtttaagaatgaccatctttaatgtgatttatgatcctaatatgaaatctgagaagtgaatattaggaatactctaatagaacaaatatatatagattttgaaataaaacgagagtatttacatagtttatgtgacatttggattttgttaatgcaaattatttgttaatttactttagagatgtaagtagataatatatgatttaggaccttaatgatctaagaagagttaaagttactttataatttgtcatcacttaaagagagaaaattattaatttacattaacaattggataactaaaataatatgattcattcctaattatcatcaatagtcaactgcactgtttatcgtttattttactatcttttaattctagttaattaattgctcaattataacttcaatttactaaatagaaacataaatctaatttagtgatactgaatattaattcccgtgaatcgatctcacttgtgtgagtatttaactataatagattgcgtatacttgcgtagactataaaattaagcaataaatttttggcgatgttgccgaggaattgaataaatattgatattataataattagattaaattctacttaggtttttctttctgcttctagctaactggtttccttgcaatttctcttactctatttcaggtattggtgatttatgcgacgtcaaggacaaagtataatagtgtctgttgttcctgaaattgagaagacatgcagaagaaacaaaagaaacaagaggctagaaaggagtgtagtggaggttgaacaagaagtagtcatggctgacaatgctaatattggtaacaatggcaataatagaggtgttgtagaagaccaggctaatggtcgcaatccacctgaccgtagcctgagagattatgtgctaccaaatatgacaggggctagatcctgtataaggctacctgtcatcgaaaccaataattttgagatcaaaccaaccatagtgcagatggttcaattcacattctaatttggcagacttttatcagaagactcaaacatacatcttgctaactttgagaagctgtgtcagacatttaaaattatttatttatttattttgtatcttgtgaaattatttattgtgaattatatgtgtgggtatatatatatatatgtatttgtatgaagtatgtgtgtatatacatgtgaatttggatatatatattaaatgtgtgtattttgtttgagctgattggctcatgtttttttctttcttttatttttttttaatgtatataactatatatatgtaaatttatgttgtttgtttatgtatagtgtaatttgttttttttactcttttttcataaattagttccaatttaaggttttcttcatttttgcatttgaaggttatatttgtctatgtgtttgcaagtcagcatcgatctagaacaaatattattagagcgtgagttggatctaatccgatatctgataagagatctgaacactttggataagccttacggcccatcaaattgggggtctaactcactccgaatgatcagatcttacatgagttaaacaaaagagtacacccataaaaaataagttcatggaatatgaaggtggaatagaattagatagtttagaaagtagaaaaatggaaggttacataatatcaagagggggttcagaaagatatatacatatatatatacatataacaatcatcgacgttttttatacttggtgtagttttctatctaacaagtaactaaaacgagggttcataagtgatccttttaggaacatatcaga

SEQ ID NO: 19906 - DNA, 5286 bp, Cannabis sativa
gcatagggttacataaagtataaacaaaccctatgtcgtttgattccacaccgactttaaatagtataatccaattttatacctacggtttttataaaaaaaatcgcctctaaaaataaatttgcaataggcgggtatttttagaccctttagcttccctttttataaaatgagttgaaaaaaaggaaactaaaaactcattttatggtagtggagagatcaagtaagagtagtgtatgtggattcatagtcaaaaatatgggaataaaaaaatatatcataaataaaaccataaaaatgtaaaattggtaaaagatcataatctaaataaataaaaaaaaaatatatgctataaaaaaaagtaaacttttatactattttcataatttgtgtaatttttacatttgcttatatatggtgggttttgtatatttgtcttccccgatcccttcaacagccacttcaatcaaaattttcacaactctcatgatatagtttccttttatcgtgtgttcattaaaatccctattttaatttagcaagtcattagtgttcatcttataccttacctacaaaaatgacgataaacgacacaaacaacaaggaaaggtcaactgttgaaaagacgattgttaattggtgagcaacaaaagagatattcataaaaagaaactctgcaaaattgcatgaaaggggagacaggtgaccactttaattttatttgtttccatatttttgttttaataatttcctttggattgtgtttaatctaatggttaaaaatggtgtaaaaaatatgtgtccaatgaacccatcgatccctatatttatatataatatagattctaataatgctaataaaattagcaaatattttatgtaattgaccaaccactatgctatattgaaagaaaaaaaaaagataaagagtgttgctaatactctttaaattaaatatactaaaaagatcaaatagagataaattactaataagtttaaaatattaaggtcaaataattaaattccaggaactttcataagagtatacgaattttcttatacagctgtactttgaatatagcttagcttactttgtacatatcgcatgcaaataattataatttataatagggtaaatagcggcataagtactaaagttttaagtttgtaagtggtataatttaatgtttatctttagcggtataagtacccaatatttgtaaaaatgtaatttttctctaatttcgtctgtacaaactctgttattttcttaaacagatcacatataaggtctagattcttgatcattgagtctagacagaaacatgtaatatcggttacttccaaatgttcttttaataaatttaaaacggggtctatactgactaaaactaaagaaaaattacagttttacaaacattgggtacttataccgctaaaaataaacattagatttatgccgcttacaaacttaaaactttaggtacttataccattatttattatttataatattaccattttagctggaaacgaagtcaaagtcaatgtcgtttacaatttcaattacatgcataagtatttgttaactattgaagggggaataataaacagaccaaaagtaaacaaataatatggacgggttctttgtctttacttttaaattgaatattatttatatatatttgttctatgcatatgtttttataattgattagagatatttattatcttaaattatataaaacgcaatatttaattatattaataataatataacacaaataaaaatactaagcatacttttattatttttctaaataaataggaatgatattattaacctaattaatttgattatcttatcttaagggaaaaacatatactttgctgaaatcgccatgtgtaaaagtaatactatatattattaatttattagttaaaaatggaagtcattttcatattttaacgcgctattgactacacatactacacaatacacatatttgaaaacaatgcattgtcatattcaatgattttagttctatcttttaatatacactggatgttgaattttttcaacaaatttgatccaattaatttcagtacaattgcatattttagcccatttttataaaaataaactctaataataatatataaaatagttcaaatttaacacatactaaaagttaattaaatttaatacaaaatatcacatgaattaaattttacatcacaataaatatcatttttttattaactctctcacttaaatatatactctcaatttaataatatttttattgatttttttatacttttctattatttagttaaatttcgctcaaattatacaccatctattgtaaatagtctagtccaattaaatattaaattagatcaattatatcttttaaatatattttatgaaaatttacataaatatacatcaaattaaaataattacaaaacaaattttaaaaaattatcgtgccacatcagcatatatatatacttgattcaaacttaataataaaaactagaaaaatttcaattcctaattttttttattagtggatattttaccgtaaattttttaattaccaatataatactaataatatattacttttttatataatatatatatatttttcgataaatttatacattaattaattttatatataatataccgaaatgtatattcataagaaaaattatttaagtaacttttttttataaaaaatttacaattaaaatgtattatcatttttttattaactcttttgtcatttattaatgtacctttgtttaaaagaattgggacctattgttgcacaaagagggctgcaccagggtgatccttcatcaccatacttgttcattctcggtgtcgagagcttctccagtttgttgcgtagttatgagtagaatggtttaattatgggttgcaaaattgctagaagagctctagttatttcacatatgttgtttgcagacgatagttacatctattgtaaagctacagaggaagaagctcataatgtaaaagagttactgtatacttatgagattgcttctggccaaaaaattaatttctctaagtcgtcagtattttacagcaataacactagcacctctcaaagggatatcatttgtgagctattagatatttatgaggcggatgaaaatgggtcttacttggcacttccttattcggtggggaagaataagaatgctatccttggattccttaaagacaaaataaagaagaaaattcagggatgggaaggtcgatattgtctcgtgcagggaaggaagtgttgctgaaatctattgcgcaagcaattcctagctatgcaatgagtgtctttttgctccctatggatacttgcaaggatttggagcaacttatggcaaagttttggtggcaaacagactctgtttaaaaattggtgttagttggatgagttgggatcgtttgagtcaccgtaaacatgctagaggttttgattttcgaagttcacgtgattttaatatggctctgttggggaagcaatgctaacgtttgttggtcaatgacagttccttggtgagtaaagtttttaaaccaaaatattatgatcatggagctttcctttcaactgagttgggagacaacctgagcttcatatggaggagtatttttgaagcaaaaggactgatacaagcaggggctacccgaactataggtacaggtgaacaaacctccattttaagaggtccttggcttccacatagcactaatggttatgttacttcttcacatcctgcactcgaaaatcaaaatgttagcagcctcttcaagctagattctcgtgagtgggatgaggagataattaaagatctctttgatgatagagatcaagagctaatcttctcaattcagcttagttctactgctatttgcgactactggaactagaggtatgaaaaattgggacactatttggttaagagtgcgtacaagtatttacaagaggagaaaggagcctggcctactgatggtttttggaaggagctttggagtctataagttcctcctaaagtcaataattttttatggagggttgcttcggggtcattaccaacttatgctcagttgaagagaagacatgtcccttgtgccttacctcagatgaaaccatcatccatgcattagtagggtgcgaatatgcttgtgcttgttggcatagaactattgtggatattggcagtgaattggatgacaatttctacaactggctgctggtgttactgagtcgaggcagacatggtgagatagaggaggcggctatggtcaactagtctatttggtgtgcccgaaatgactttgtttggcaacaaaaaagctggactgcagcaaatgtggttaattcagcaagtatactacttgatcaattcaaatctgctcaagtaaaaacgggtctttctttgtctccgttgatcgatggagaccgtttagttgagcgttggagtgcaccttctttaaacaagatcaaggttaatgttgatggcgccttatttgagcatgaatgcaggtttggttttggttgcgtggctcgtgacttccatggtcatgtggtggaagcttttaataggggacagatggggcaggtacaacctgaaattgctgaaattattggcataaaagaagctttaagttggatcgatcgtcactcgtggggacaggtgattttggaatcagatagcttggtctgtatacaagctattcaaagaaaaatcactatgtcatcttcttttggccttttagtgcaagatgtttgtgctcttcttatatctttaaaaaatgttgagttgtgttttgtcaaacgatctgcaaataagttggctcactacttagccagagattcttatttctctacaggtcgtgtgctttagatgaatgattatttctctgaagtgcgttctattgttattaacgattttattagttaataaagctactaaactttattaaaaaaaataactttttacattttatttatatgtttaataggatttttatatactttcaatttaataatgtttttattgatttttttacatttttctattaaacaaatgtacattggagcactattgtaaaatttagataaaatagaatattgactcatatattcagggaaatttacatggtatactaacttttgtcattattttacaaaaatactgtcagacggtattttttgcttttttactgtgttttttttataagtt

SEQ ID NO: 19907 - DNA, 4234 bp, Cannabis sativa
atcggcctgtttaagaaatacgagcctgtacgagcaaaacacagcacgaaaataccgggcctaccctttaaaatgttggcacgacacgacacacgacccatatttttttgtggcatggcatggcacgacccgttttttgaaaagcacggataaatacaggtcgggctagcacggcacgcacaaacttacaacactactcctaatatcttctctattctattctttgaaatatctcactaaaactctacttttttattttgcttcacacatttacattacactatacatcaggttctttataactttctctattatttaaatattatatctttattaatatatatttaataaaacacacaaatgattaaaaataagaattgcactatttattgagctaaagagaatagttttttggagtttgaaataagatataataagggtttaaagcatttgatggagttcaattttgaattcttaactattttatttaatttttttactattataaatcacttattgtatgtattcttaaacttgcatctctcgaaactaattcaaagaatttagatgagcaattaataaattttacttaaaatttaaatttcaatcttgtacaaaattaaatacaaactaaaaaacaaattgaaatagtcttgtcgtttgacatgtatgttgtgtgagtttggagttgttgagtgtcgttctttgtgatctttggttcaatggcgtctaggagtcgggtggtggatgatttgggtaacaggtgggcgaatttgactgtggaagaggaagaggaggaaggttttctttaagatcaggaggaaggattggccgatgattttgatggtaggtggtgtttggtggggagatttctatcggataggccggcggattttgatacagtttgaaacgtgatggcgtctctttggcgcccagggaaaggaatgtacgttaaggaattggaaactaataagtatatattttaattctttcatgaaatggatatcagtagggcgttggaaggaacaccatggacgttcaataaaattcctctgattatcgaaagattgaaagaaggtgataatccaagatcatgtgctttgaatacaatggagatatgggttcaggtatacaatcttcaaacggggtttaggagtgaacatgttttgagggctgttggggcgtatataggcaagttcgtgtcttcatgtccaaagaattttgctgggatttggagagattatttccgagttcgggttttgataaacatcgatagacctctgaaaagaaggatgaagatattcaagaataaaggagaatgatactgggctaattttaagtatgagagagtgccaactttttatttcatttgtggtattattggacactctgagaagttttatcatagactgtttgatgaaccattggagtccattgttaagccatatgggttgttcatgaaagccccaaatcgtagacaaggaaggcaaataggagcaaggtggcttcgtgacagtatgggaaaacctgttgaggggctctccgatgactcttcggcggctggaaattcacaaatgagtcggcgtacaaatccgagaatcatggaaatggatgtgggaagcagcggaaatcaaggggtaataaatttgatgtagaagagaatctgccatggagaaaaatcagggagagaataatggtgttacaattatagcagctaattttggtaggagttttgaatttcaaaaagaaggaatatatatatgactctaagaggagacgtacgtaagaaattgagagggagagccagctggaaggtttggaagtgggccaaaatggagggagtgagttggtgggccgatccattaataataatcataaagtaatttatgacaatgatattgttatagacccaaaggaagttaatgaggagaaacaagggggtgaggagggggacatgaacgaagctagtgaggaagttggtagttttaaaaaaaacttgttattggcggattcttgtgctggggcccgccaagaacaatgagtttgttaagttggaattgccgtgggcttgagaacccgcggactgttcaattccgaaaagaaattatttttcaaaagagacccaatttgctttttttttgtgtgagacaatttgtaagaaagaaagagtggagtatgtaagagttatgtttggctttgaaggtagttttgttgttgaagctcagggtcatagtgggggtcttgctatgttgtggaaaaggtaagaggatggtaaaattcttagtttcagcaataaccatatcgacttggaggtgcagttggaaggttatccactattttgtgcgacaggcttctatggtgaacctcaaaggaatttgtgggggaactcctggaaacttattagacagttggctggaatcggttttaccatggtgcttattgggaggtttgaataatgtccttcaccttagtgataaaagaggaggttgtccctatcctagatggtcactttagggatttcaagatgtggtggcggactgtaatctaattgatatggagttagtgggatatccgtacacatgggagaaggggaagggtacttcggcgtgggttgaagttaggttggacagagcacttatcaaccaggattagaacatgttattccctgatgcaaggttagaaaatttagaaatcttagagtctgatcattgtccaatatggttgaatcttaatttgtttaaaagagtgttcactaccaaaaagtttcggtttgaaaatgcttgggtgcgtgagcctatgtgtaggaaacttgtccaagataattgggaaacacctggttcaaactctttgtctttaaagattaagtgttgtagcactgctttggccgaatggggaaaggagattacaggaaattttaaagagagaataagcaactgtaatagagtaatgaagctgttaaaaaatcgaagagatgtcgactcagtaaagagatataaggaagcccaagatcggttatttgaagttcttgctcaaaaggaggttttctggaaacaacgctcaaaacaaatgtggttgcaagcgggtgaccagaataccaaatattttcatgcttgtgcgagtagtagacggaaaactaatcagatttaatgtttaaaaaataacaatggagcttgggtggattcggatagtgggctggctggtgttgtggaagattacttcagggagttatttgctgccaccaacatagattggagtagggttacggactgtgtgcacaaccaggtttaacatagtatgaatgaggatcttactactcccgtggaagccaagaaagtttgaaaagctctatttcaaatgcaccctgacaaatcgccttggcatgatggtttcaatcctggattttatcgaaaattatgggacattgtgggcaaggatgttattcggttagtacaacatttctttacttttggtgaatttcctattcatttaaaggaaacaaatattgtgcttattttgatgaaatccaaacttgaaagcatgagtgagcttagacccatagcattgtgtaatgttgtttataaggttgtttccaaagtgctggcaaatagattaaaagttgttctccccaatgtgatttttgaaacccaaactgcttttttacctggaagactaatcactgataatattttagtctcctttgaagttatgcattatctaaaaagaaagcaggttgggaaagatggttttatgacactaaagttggatatgagtaaggcatatcatcgggttgaatggggtttcttacaggccatgctgaggagattggggtttgatgagcatttgattaagctcattatgcagtgtgttagctctgtttcttatatgattactgccgggggtcatgagattgggcctattattcctaccagaggattaagacagggtgaccctttttcaccctatttgttcattctgtgtgcagaaggattcccagctttgataaaagactatgagaggctagggaggattagggggtgcaagattgcaagagggggccatatgatatcacatatgttttttttgctgatgattgctatgtattttgtaaggcctctaaagatagtgctactaatgtgttagatatgcttcatacttttcagatggcttcgggtcaacaagtaaatctgcaaaaatcttctgttttctttagtgctaacacagataatggagttag

SEQ ID NO: 19908 - DNA, 5031 bp, Cannabis sativa
  modified_base (1600)..(1601): a, c, t, g, unknown or other
aattttctgatttttctcttttctctttttttcatttcttttgcaaaataaactgctacacgtttgagccatgcatgggaaactatagaggtgaattaattaaagtgtagattagtagtttgaagggattttttttttctttttctaaaataaaaagaaattgtgtttatgaaatttctatttgtcttagctttactaataatacaattctttttctttttttttttcctatcaaaaaaaaaaaataatataattctttttccaaaaaatgatattaatttggtatatgcatttaaaaataatgaaaaagataaaagataaaagagttaagctgcagagaagattccctgctttcctttttatcaccaatgatgacagttcttcctgtagccttttatttttgcttccacatcttctcctacatttctgtgaaaaaggttaaactttgtcactatctgacatcattttttaaccacacttcccattcttacatcacacttctatttattatttctgcctatttttatttcaatatctctgtatgtatctatctccctccctctctctctttctctctatactaattatgtaggcaatccaatgcaatgtactatttagataattgtgattagcttcataaattcattacatattatttgaaaaacaatggccaaggtaaaaaataaaaattaaaaaaaaaaagtaaaatttaattctcaatgatgtatttttttttcttttgtgaggatgattattctttaatttaattagcacaattgctagctaaattgcacttactgccacttgtatgtgatcatgtttctccaagtaagtatatatgaaaattatatatatattcagtgttttttctttttagaattaataatcctaattgattttttatgttgttgtttggacttatgaacttggcaaagaaatggagaaacagatggtataaattatggtgcttgattcaattatgattaggttggattggatgttgagagattccagtacaattttccatttttgagtactagaactttaaatttttgtatcactgaattttgagctatagtaaatcgaaatataaaaaccatacttaattgtgtgttcattaattaattaattaatcagtttccactgatcaataataataataataataataataataattaataaagagtacgtatctcactgatccaacaattattcgtatttttctctgttctatttattgtcacgttgatttttttttttttttttgaatggaacaatatattaaatatatatatatatatacaccccttgtcttttttttggtcaatcaaataccttttattacccaaacaaacaatcaataataattcaacttgatcttttatatgtctctgttgaattattatacaggtgaaattaattgtcacaattctacaactatagaaatatatatatatatataacatagattattatatataattcatatgatatatatatatatgccaaggaaaaagaaatgaatgatgatatacattggactattggagcaatatactcagatcctatattattcatcaaaataataataataatnntaataataataataataatattccgatccttttaattgggcaattttcacaagtactaccgtacaacgttaagtttttgcagctggctcttcatggacaacttttcttttcttttttatttttttataatgtttattttcatttggcttttcaagtgaacaatgttttcaataagagcatttagttttcaagctcaacaattaatgtctagcaccacctgagattgtatatggtattattttataataattattaaatataaataaattacttttcacctaataattaattacactaataatttgtataaaatgtgtattagacatattaattactcgtaaggacaaatgagaaattagtatatatatttatatgaataatacgtatgcataattatattgttaccaaatatcattataggtctatttagggtgtagaatatgtatatcatatacaagtgcgtacttagaagaaaaaattaataaaaacctatgttacaattaatgtacataccccgtaaatggagtagactgatcaatcaggcaataatacacatatattacatatagaaagttcattatatatatatatatatatatacccagtaattaaatggagaataaatattaaatagagaggtatatagatagatcatcatcatcataaataggtccaattaggtccaattatataagtttaaagttagaccagacaaggtggcatggagggttctgttgttgcaaaaaatagaaaataaagaagaaaatgttccatgtttatatatatttgtgtgtgtctctctctatgtatatatgtatagatatatagccaacacaagctagagacctttctttctctacctagttatcagggcttgaagggtcacctaagctgtgttctgcaaaaagttatgcaagagagaacttgatgcaagaatcattgaatattgtatttgtgtatttttattaatattaattggaatgcttccaaaaacaagaaattatatagtacgtggtatacggtgtatgtatatactatatagcactagcgcagtgtatattgttatattattgatctgttattaccacaattattgatatcattataagcattgttattcattatcagtggtagctaatatttttcaagctgtcattttagaccattagttaataatattccttaaaaattattacaaaattttatgtacatgagacttgatacaattaatagcaatattatagcataagagaatactaacccgtacacattatttttattaattaatttaacatgatattgttgggacttgagattatgggggagacttggtcaaaactcgatagattgattatcaagatctatgactattgactttttttgctttctttctatcgataaaatgttaatcatctcaacttcaaatcgtgaattttcacaattatatataaagatttagaagaggcaaacatagggttttgatcttttttttcttggtaatgttaattaattagtaaaaccgtatatgtttatatatgtatataatatatctacatatactcataaaatacattcacacaaaatgagcaattcatttctatgttagccaaaagacagaatgaaactaatattgatctcatctccctaccataactgtacaaatataaactctaatattacaatcaacaatggctaagacaacatgtatgcattaattatacctaaatatatacatgcatgatcattacatttcaaaaataaaaaataaaaaaattcatcatcatgatttcgattgtgcaggatatgcaggcagtcgatggcgatgattataatgagttagcagtttagtacaatgtatcatctttctttcacttatacacaactgatcatatccatttcttgaagatgttgacacatgaaggtaaatattatatgtacgacatttttcaaaaaatcagtcgaatatatatatatatattattcatatctatatatacataccaaattatttactatcaaatttaattaaaagaaaatattgtttgtgtaataaagagattaatattagtaccctatagaaatttttttattaaatggccaactgacaaagaaatggcatggagagatgcaataatgttgcccccatgtgttggggcacaacagtggaacagtcacgtcacaccaattggcttaaatttatataacaattagctcaaccaatatatatatatatatatatatacatatgtgtgtgcaaatgccagctaataatccagaaatttagctgctctagcttcaagtggattgttacaaagctaattatttggacaacaatttgagtatctctaaattctataagacatgatatgtaaattatgatgaaaaattcaaagttaattctgtttcatatatttgtcgagtatagtagtaatttcagtatacgatagtgcttataaatgatggaaggacaaacaaatactatagctgatataaattgaattggtccacaaacaattgcatagtaaacctaacatttttttctgattgatcgtcaaagtagagttttcacatatagataaatatttattatgcaacatactcctcaaagaatgtaaaattatttcacatttcaaaatgcacacactgtaagacttattggtaatagcactaactgttgtccccttctccagaaaagacgacaagaaaaagataacaatattcccggagagaaaaatggatttatcaatgttgtttaagcagtaagccaaaacagtaccgacaaagacaaatttatccatattctcttagatagctagttattattagaacattttctatagtttcaatacattaattaatttatagatttattggtatagctggtcctcgattatatagattttgacaagttgttctctgatttatttttgataaatttgtcccaaatatgtgtgttttgttaagtttgttagggaacatttatgttttagtaaattggtccttaaactcttagatatcgtttagttggaggtaatataaaatgaaatagaatagaatttttgttcgattatattttaaagtattgaaatatcattcccataaaatatcttttctatcattttggtaaaataattattatattttgaattagaaggaaaaatcatacgaatataacatgagaaaaaatttaataactttttatcaattttttttatgcattttaaattttttttcactcaattcttattcctattcctaaattttcattcatcccaaccaaaagtcacctaattagtttcttgataattttataagtccccatattaaaaggttgtaattttgatttggttctgtaataatatcatgctttccataataataaaaaaaaaaaaaagttgtaatttttttacttttatattttactagatga

SEQ ID NO: 19909 - DNA, 3551 bp, Cannabis sativa
  modified_base (1532)..(1539): a, c, t, g, unknown or other
cacctgttccctgacgttgactttcccactttcctgcctgttaattaattactcataatttctcacctttttcttttgagggattcgatcgtaatattttatttggcttatatattacctagcctaaccaagcctagcctttctttcaaaatacagatttaccctttccttttatacatatattccatatatagcaccactagtagtgctcttgttgtgatacataaatgctatacaaaatagaattaaaatgatgatcttaattatgacccagttttaattttaatttcggctaatcaatagacgttcatatataatatatgtgtgcatactattacaatatctcataaacagctagtcaaatttgatttgattataaaacatataattattatttgataataaattataaatattctaattaaggtcaacaacataacaaaagatgagcccttgaactgccaggcaaagacggagacctgagattgagcataagaatctgtcaaccaaggccttcgttctcaaacactcctttatttaagaatcagcggattatgatttaccaagtattttattatctatttttatttttaaattaattgttaaaatattcagacaattaatatgttatatagatactaatggaagtcccaaactcattactcattccgagtaaatctatctaagagtttaaaagaaagtttggaagtttgaacacttagctcacttttgatttatttgtagatctaaagctcgagaactaaaaattaataactctaattatttgaatattattctatgatactatttatatgttggattattatttattctactttatatagtcattcttatactttatattatatatttttataaatttctaacacgtacatactactcatattcaaatatatattatgattttgatactgtaattgatgactaatgttgtagcattaaaaaatcaaaaaaaaaaaaaaaaactgcataatccaaaaaacggtaaagcaataatttgatggcaatatatataatttcccacaaaaaaaaacaacaaaatgaaagagccgccgtatgcacttagacatgatgaagatctatagagactacatatttactaaaccatatataatattaatgcccctcaaaataacctgctcatttgacattttccaacttctggcctaacactatcacaataaatatatatgtaattaaattgacaatactgagaaaaaaaaaatattaatatatttaatatctaatatatcatgggtgatgatgatgagtaatattcaagattagtagttttcgtcgtaatatgtttctgtagagacaattgactaaataagcacaaaaaacaaaggtccacttattattaataattcaaaggccacacataccacaccacatttatagatgtaaagaaaagagaaaaaaaaaaagaaagaaagaaaataatagcacatatataaaataaaaatatatataccgggctcgcagctagacaaataataataataataatnnnnnnnntaataataataataatgagaaaatgagtgtagattttagagagagatatgaattaataataatgaattaaatagaaaaaggggtagtagttatggaagcaaatgagaaactagcacgtcagtcagcctcaatgagattggggagacaaagaccttgattcgtatataaatataaacctcttctttcttatatggttggatttgggggaggcacctatacatatatacatacatacatatatagcactctactacatgagccaaatcttcttcttcattattaatttggaaaaataatatatataaccatgggaagatctccttgttgtgatgagagtggtcttaagaaaggcccttggacccctgaagaggatcagaagcttgttaagtttattcaaaagaatggtcatggaagctggagagctctccctagacttgcaggtacatatatattgcaattttaattattggatgaaattgggtgtaatcttatacattaatagaattatacatatgttattttatgttcgtaaaacagggctaaacagatgtgggaagagttgtagattgaggtggacaaactacttgaggccagatatcaaaagggggaaattttctcaagaagaagaagaaaccatactcaatcttcactccatccttggaaacaagtaataatttttaattaataatatattggtcattttcttcttctcatttttctctgttttcacaatgagtgaataaatgaattaatgatcattgtatttgttattttctttttttttcaaaaaaaaaaaaagatggtcagcaatagctagccacctaccagggcgtacggacaatgaaataaagaacttttggaacacccacctgaagaaaaagctgatccaaatggggattgatccaatgactcaccgtcctcgtactgacatattttcaagtttgcctcatctcatagctttagccaatctcaaggagcttatggatcatccttgggaagaacatgctgtcagaatccaagccgaagctgttcaaaacatggccaagcttcactacttacagtaccttcttcaaccacctaataataacaacaacaacaatctcaacacttctgacatcgaaaccatcaaccttctcaactccttatcttcttcattcaaagacaacaacaacaacaacagtacccaaactgtttttgattctcctcatgatctattccaaaacccaattactactaccaccactcatcataatgaccttattcttcaatctctccatgattcatcactctcttttgctcacttgcctgacttgaaaatcccatgtagtaatgatcataacaacaacaacaaccaggatgatgagaggtcaccactacacaacaaacaaatggctaataacgatcaagtactttcagtagacacggcaatgttcagccttaataataataataatattaataacaaccaattattggtatgccaagatgagatgatcttctcatcatcatcatcatcaactgcttggcttcctccttctgcttgtactactccctctccaccttccggggcggcggctgctgggatcactaccacccccaatactacagtactagagaataatcagagtacctatggttgcattattaattcaagctatggagatcatgaagtgacccattctgtttggcctgatcacctccttgatgactctttatttcaggacttcgcctagctttatataatattataaattaagtagagttcttttgtttgtttcatataagcacccctttttttgttcttttctttatttgccctgagaaactgctatcactattacttactattgtgtattattatgtcatatagtattgttcatattatatatgtgtacaatatatatatccttcaggatgcataagatatagatttgttgatgagttttttatgcatgagtttgtttgaatgctatttagctatggataaagctaaatatatagaaaaaaacttt

SEQ ID NO: 19910 - DNA, 5055 bp, Cannabis sativa
aaataaaagatcataagttaggtcaaatgttctgtaatggaagccatataggctagacatgaagatacatatagtggcaagtttcaaagtatccattttaagagtcatgtcaaatgtggtgtttagccttttaaaatgttcaattccagataaatagcaaggcaatgtagcctaaataatgtctaggctgtaatagatggtaaatatcatgtagattgacagttatctctagctatttgttgtaagaaaaccagtcttaccacagctaaaggattaccaccaacatgtgattcatgaaaatagtattatcatggatcaatatgccaaagtaatattgttttgcccaacccaagttatcattagaatatctaaaaaccactaccgatatctctttcttatataagtccatatcatttgctgtagtagtctgtaagagataaaggaaggaagtactcaccttctctacaacaaattggcctaatataagcacttcaaggatcttcctccagtcccaagacatctacaataaccgaactagattaataacttctcttgtgtgaggaggtttacataataatctacaccatggaatacctttacaaggacactgatagtgaataagccaaaaacagcccctgaggctccaattgaaactgcattccgtggaagaataagccatgaaacaaggtttgctccaacgccggtaagaatataagaaagccacaatgcaaaatttccttcctcttcttcaacaagctttcctgcaggtggaagagcttgacattaataccaattattgtcaaccaaaaaaaaaatacagtaactagagagaagaatgagatcctcaccaaaaatatacaagaagaagaggttgctagaaagatggttcctgaaaatgattacagaaacaaagttaaaacccaaagttgggaaactatgtacaaaataaggggtgttctgcaccacaaggtaactaaaatgaacttttatccaaccttaaagaacatatgtatcttaccaactaccatgacagaaggttgctgtgagaaactggtaccactcaggaaaactatgataaagatacagacttttcattgcaggaacctaacagaaaatgcagaaattattgtatcaacatgacagcccttatataaaaataaaaatacaataatagaagatgagtaagtaaacatgtatcatgcacaaatctcatttacagacattgtttccatttggcccaaagagtaagacatcatcctctaattctaccaatatctatccccctttgaaccaattatgatttctagggcttttctctttttgtttcagctcaggaaagagataaggtgagggtaaggcaggcaggttgtgaagcccttccctcattatccatctcatctactgaaaagggggccgagcatagcgcattcttttctgggatacacaggctattacaaaacgcatcattaaagattttgcaaagcacaaaaccccagaatgaaatcattgcagaataaaggtataacagttcaagccctttcctcattatccaaactttcatgtttgtccaatgaacatgataaacagttgaatcaaactatcaccatcaccataaattaatgactacctgaaacacatgatcagcagcatacactcccaaattcagaagtaaaatccaaaatattccattcactcgtttatgtggtttccttctgtcttcaggtttcccaagctccagttgtgacataatatctaaaaccatatctcattaattttacaattacagtcattctcgattgatggaattaaacttttcaaaaggaaaattaaaccataaaaatacataatcacatgctttaacttaattgctcaaaaacctcaccacattgaaaacataacatgcacagtaagtgtttgtgaaaagacctagcagtaataatagagtacctgattcgctcatcttgcaaattgttggaggtggagaaagagagggaaaaggaaggcggaaaagattgaaagtgaggttggtgttggtgggttttggagaaatgaaggagtgtgtgagggagaggggtttgggtttgccattggagaaaccaaacttggatttggaggtgcaactgcaactgtagcttgtagggggaaaggcagatatggaggccatgagcagaggagttttagtaggttgaagttgtgggaagtggagctgaaactgaaagtgtgccatgttaatgttagtgcccatatcatcaaaatgccaccaacaatttcttattactctcaatttacatcaaccattctagtttgattacattgaatcataccatttgatttgggttataaattgttgagaatgattacgttaaagtagtttggccgcttacattacaagggttgaaattgttaagaatggttaccttagttgattagtaataaaagaggattgctatttagtggttatcaaattaaaatgtgtgctatccgatattaaaatatagagaattactaaaagtattattttattagtgcttagtattattcttggtgtcatgctattaaaaaaatactactaatcaatcatgaaacgtcacttataaaaagtataggcaccactggtgcccaataataatgctctaaagtatattatagtcatatgtcatttcttgtggtacttcatactttaaagtgtcgtttaacatttctcttactttaatttcttggagcacttctattctattactttttctacttcgtcttttaaaatatctcattaaaatactatttttttttatttaccttaaattttcaaataatatcatacatatttttttagaaagacataatatgcatttaatttagtttatgtatttattaatatagataacgtgaaagaaaaaagaaaaaaaataataataaaatgcctaacatcttggatggttacatcaatgaaaagagatacaaactaatctagaaagaataaaaaaaagaaatagaagaggcacaaaaattattagcacattcccaatttcccattcccatattcaaaacaagttactttgccttcttcagcagattcatggttctaaatgcagcatcatctcggacaaaactccaccaaatgtaagttagtgggactgtggtggcatgccatagcgcatgggcgtcaacatatccttcatatggaggaaaatcacagattttcagaagcattgatagaccacctgccaccaccaccagccacaacttccaccgagatggatggcgagtgacacggccaaaaattgcccaaataagtagctgcagcacggccatgaagacacaaacaatcatattccaccctgcaagttgaacacgttttaagactcaatatttcaggatggttcaaagcattaactttaaatgtacagcatttcatactagctctgaaactcaaaggcattcaatacaaatatcttgaagaagatttaaggaataagagctcttctctcctcaaatataatccaattcacaagaaagttactgcctttgtccacaatgaaaagctctttagcagagtcacttgtaattcttgagtacattgatgaggagaattgatatgtgcatacacatatcacacacaaacttgacacatacttatgtggcaagtaaattcatccaatcatttttatttaaggtggctcccacttattaaaacatcttaccacataggtgtgtgtcaagtttgtgtgtgatcatttatgtgtacacatattactccatcgatgagacatggaaaactcaccccatttcgctcaacacccttgtctcatacttagtttcaaattttggactgtataacatactagaacaagagaaaagtagttcaaactgttcacttattattttggtatatgtttatgtttcgaatgtaattgttgttgtatcatacatctaattgtagtgtacagttatcaaaaatctgattgcaaccaaagaacaaaaatcttaagctaaaatatgtttgatttcctctttaccattatgaaatagagaacaaggagaagaataataccatagtttaatttgtagaaattctgaaacattatatgggtggttacaaatgcaaggactggggctgtaaccatgactctggcagcatcatccctcaagttacaacttcttagtatggccacaataagagagtaaccaagtaataccactgttgatgagtagtctagcttctccattagttccacatctctgcattgaaaattaatctcacaaggaaaaaaggagtagcacatctatgctatgatgcagtttcacaagagaatactattattaatctcagaagcaaaagaaaaaaggaatagcaaaaccagattacgtgtttagtttctgatttagaacatagataaagaaaggcatttaaaagcttaccgacaatgggaaacagcactccagagccaagagttcattgtcaagagcccatagatatgccataaactggcaaattcatagtatgccttcttatctcccttcaaaggcaatttatagtttacaagaatgaaaaaggatagccagccatgaaaattcattgcaaggttcagaagagagaaaataacagaagcaggttcctgaataagaataccgccgttacaaaccataaactctttgctaacatcaaatttccaaaggttaattaggatttttctcccaaaattttgacatgtaccaaatagtgtctctagaaattttcccgaactattaagattgttggatttaaggatttcagttcaattttactaatgggcatctgacgtgaacggaagtttaggggacacgatttaatacatggataatcgtcacattagacgtctgttagtaaaattgaacagaattggacaaaagtccttgaattcaacaatttcaatagtcttgagagaaatttttaacgacctaaaaaacttaggggtacaatttggttcatgtcaaagttcgggtgaaaatatcttaattagccaatttcaaataagaaaaatatactgcacggtagttaagaatcctacctgaatc

SEQ ID NO: 19911 - DNA, 6495 bp, Cannabis sativa
  modified_base (6469)..(6469): a, c, t, g, unknown or other
ttgtcatttaacaaaacacagggttaaatagtatttaccctttttttttccgaaaaattatatattgtaacataacattatctttgtcttactaatttggcacgtacggtatagttaaactattactataaagtgtataaaattaatctcgataatgaaaaaccttgagacctaaacaaaatttacgaattaacgtattaattatcagatacatagctaaacttagtctagctagcttttatagtaaaccaggtacaaaattgcagattgttatttacattataaaatacaaagtttacatttctgtcatgataacattattgttacattagatggcagatctaggcactcatgaggcactaataaagaaagtgatcaaagtgtcgttgtgccccaataatatgagagtaatgtgaagaagaaaatgacactatagtctatacaacttatagatcttgaaagagcaagtaatgcaatttattaattgattggtcgataaataaagttgaacattatggttctggaattatagttataaacacacacacaatatagattttttttttttaaaagaaaccaatacaggcattgaatgattcttttttaaccaaagcctaacctgattagtaaattatgtatagtaaatgttttttaaagatttgtttttctgtaatatgcatcataacattgactattattcagttgttaatttagcaagttaatctaaattaggatcattttatacttgtgatatatatataaattcaaaactgtcgatgttgacaagttgggaaagagttactgcaaaaaactaaatctgaagaattcccacatgataattattagttaattaagtttcatataatattacatatttatatattaattattatacgtataagattaaacaatatataacacatcatttgtgataatgtatgttttgtagtagattaactatagcacatgaaattcaaagatggaagcggacccgaggtttgactcatatgtaattgtacaactctactaattaataccataaaatagtgaatactataatatttcatactccaaggagacatctcccatgagaggaagtgtaatatatgtattccaattcccaaaacacacctcttttcacaaaaacaagaataaatccaacagagtaagcacagagagataaaaccatattttttgagcatgcagaggagaatgtcctccaaaaacccaatttcaatatttcatcatataattaatacagaatataaaaactaaacaaataaaaatcttttaataatactagtactactagctaaactagctactactactagccctaaacttttcagttatacaactttcaacttaaaatttctatccaattagtccctctcccatttttttttcttggttatttatttatttatttttgtttagtttgcctagtaattaagaagtgaaaaaacttaagcacaaatccagtggtggatgattcatctctgtctgaaatgtgtagggaaaagatgctgctgtttctttgcattgatgatcatgatcatatgatctcagcttattattgttctctgatgattctgagtcgtctgattccccaaatggatttattggaaaaagctgcagtgtttcaatcactctctccggctggtcatccgaaacacgatcatcatcatcatcataatcatcgcgatgacgatggtggtgatgatggtgatgatatatttctgcataacctgcatttatacatatacagaatttaataaaaaagaaaagaaaaaaaaatacaatttaaaaggaaaaaagaaaaagaaagcatatacgttttggagatgatgaaatcatttcctctcgaagaatgaggaaatcgttgtggtgatgatgatgatggtcaatagaaaccttacgacgcttctgtctttctctagctttgtggttctgaaaccagtaaaagacgttcttactctcaatcttgccataaaagctgagctgagtagagatcttctgaatctgatcagtggtcggggttctgagtccagacctaaacagatcggtcaaaactttgacttgttcattagtagggttccaacgaccacatttagtaccagtaccagtactattagtattagtagtaatagaagtagtactactacgaacacttgatgcttttatgcaaaagcctgacagaccctcttccatttttttattttgttcagctctaaatcctagctatttctgtgcctctctctctctctctgaagtttcctaattctgatcacctttcacaactcaaaacgatgtagacccgtgtgcatatttatatttataatactaccttaaaaagcactcaagaagaacactactttcattttaattaattaatttatattatataaacttatatatttatatatagatataaatgttggaattatctatttatttgttaatttatagggaatgtgaagattgattatatgtggatttgttcatttcatctttattgccttgtttttttgtgctgatctgagacaaagatatatttctatatacataaatatatatatatatacatatatttttatggagagagaaagagagagatataacatgcgccaaagctgccaccgttcaacgttttggtctgcgagcagacaaagatgcatgtaagtttcaccaatgatagaataataaattaattatatataattgtcttgaaactcattgcttaataaactatatattacattatttgattaattaaaattattttccttgagttcatcttcaaggtatgtatatatatgaatatatagggagtgttgtgtttcgctgctttttagtaaagtgtgaaaattgttgccaatattaatcttagttgagtccaacacccaccacgacatgtgataaagccaaaataatatatatgtattcttctttttaatatacatatataagtaggccttgtctgctaaaaaaacttctatatagcataattaaactatgtgaagtgggttttcggcaaaaaagaaagtagagactgaagtgaagaaagtagtgaaataagtcaaagttacacatcgtctgatctgaggtggacggttgtgatcataacagactgacagagatactcatttgggttgaccaaagctacatatatagctcagtcaaaatattaatgtgtagtaataaggttaaatcttaaaaccttcttttgagggtgtggggacataaacaaagagacaaaaatccactaagttggtattgggtagagacaactcatgaccagccaaaaggggagcacacattggattttcttatgtcatgtggctcctgtcctacccaactacatcccctaagtttgcctcaaataatcttaaatcctattttggttcatatataactatatattatacatggggaacctataaagacacttcttatttgattgtagggtggccttttctgtggagtgatctaaagtggtggtataaagattttggagtttagagcttgtccctctacaacgttatattaatgcatgcatgccttatagaaattgagtatctctataaaattgttgaatttgaagctgaaatttgccaagattgtggcattattatttcaaattgtcttgtcttaattagctagtttatttgttaatttaattggattcaaattgatataatgatgaagttaatatagtgacattagtctctggaccactactgattctgaatatatttggtccaccttttcggcatagaataagtttaaattaacattaatatatatcgaaacgttaataacttttactttttctatttttatttttctcatatatataaacaagtacaaagtatcaaaaaagtagaagaagcaagtacaagaacttcaaaagtttataacagaagcaaaaaaactacaaataaagtacacactatacatatatatccgatcgtaattgaataaaatgtatgtattgcttgctttctgtaatggaaaacaattatttcaaacaacggaacatgtgtcaaagaagaagaaaacgatacatgtgattttctcatgtatatatctcaatactgatcacatataatggagttttttcaagcaaaagaatatttttgtatacctagttttctgatgaagagtttgatatatagaaactaaattaattatagtgtgagagaaaggaaatgaagtagtagtactagccaagttgtgtctagctaggtagctctattattttccacaattaccaagaatgttaaactcacgaccaaaaacatatttgtccttttctgtttggcacaaatggttttgagctgtgaaatgtgatctgaactcctaggagtttgatctaaactaattttttattactataaactactttttttttaccctctttaatgtaatataatatattatttgttagtttattaattacttgttattcagatctacgttgttattatctacactacgtaccaaatcccatatcacagtgttataccattccagatcgtcacctgtgttatcttgatcaataccattaatttaaattcagaaatagaccaataataaatagctaaacttgttttaggctagagtatatgttgcaaaaatgtaacttttattattttttaaagcaaagagttatatactatgttttaggttcttaaatactttttaaatatatatgttttgtttggacccttaatttcaaacaattgcgtacaaataagattttatctttttagctaaagaggaagagaacaaagagaacaaaaagttcaaattgttaaaaaaaaaaatcaaaacaaatggttcgatctgtttgtaagaactgagtgtccaaataatacttaaaagaactcgtgagaaaatataagtttacgatagaaaggatgaaagtgaagaggtgagtttgataaaagtgcccatgtggttgtttggcctagtcactttttttttttttttttctagtcttgataagtggacttgtcactttgttgattgtccacctacatatctcacaccccaccacaccaccaagtctttgatatcttttttccaggataagacagtattgaaatccgacacaaacaagagatgaaaatgttattcagtgagattcgagaagtgttcaaacgctagatttatggcacgcgtgaaatccaggccgcaccatcttctcttcttctgttttcttttttttttcttataatatatttagtgtttactttccttgtcttcagccacgtttgtcagtgctttatgcaaataaaaggatcagtggaaggttcacttccactattaccattgagacaaaaatggggtgcaaattgcccactaaaaccgtttcttccggagtagacaagacatttctatacatatatatatacaccttttcttcccttaattaatcaataatcatatatactaaggctgttgatgagtgctacaattatgtccatttttgcaatgtggggtctctctcaaatgacatccaactcttgccctagtttcatatagttcattaataaatgttcacttttccatgagttagtttttgattgtttgttcttaattgtacttctagcaatagaaaatgattagcataacgaaaaagaatatttagaaaattagacatatatatatttgaaaagttgcagcttatatattttatataatgctaaaatacacctagagctgctaagtaccacaaaaaaaaaaaaaaagataagtaaaacatagttcttctatttagtgtctttactatttaagaaatctacaatgcatatggccagcaacaaatattttgttagaaattgaagaagttaagaccagtttaaaatttggaaataaaagtctcaaaatattttggtataagcatcataattgtgacactaaattcttccatgcattaactattattgtcaaaaatagtggagtttccacattcgcctacattctagaattatctagaattctgtaatttttaatctttagggagccaatcatattgtaagagaatattttctgttacagatatttttattccctttttactatatatatgtaccataatatacgctattatataaatcaattaaggaaatcaatacaatcttcaatctttccatatatgtctctatttcttgttttctctgctttttattttggtatcagagcaaaaatggcatcccaaggagattcttcaatcagcggtgcatgacctatagctgtcgatgctcagcctccagctccggctccactcgcaccagctctggccatcccagcacctctacttcaacctctagcgcccattatgattctccgttcacagagacaactatgcttactggcattcttaggtcatccataccgttcgtgcgcatgaccttgatggtttcctctttggaacacggttgttgttggatattattttacnaggatcttagatctacttacaagtat

SEQ ID NO: 19912 - DNA, 4517 bp, Cannabis sativa
tttgtgtcatacaactataaaagtaggataactgagttgaattgtactttggagtagatgtttcacctattgaatctgcaagagcaagatttttacaaattattgtcgatcattttatcctcgatcatgtaattgaagttgctgattcggagggtgattatactggtcaatctaatcaagaaaaactcaataagaggaaagggagggagattcagtatgaaggtgatccaaggtttgctttgcccttgatgtatgtggcaaacgtatacgaaactttagtcaatgatgtaaatgttagactagcttccataaatggtattcgtgacaaaactattggggtagcgcttgaagcagctggtggtttgtatagaaggctagctaagaaatatcccaaaaaaggtactttttattatttttttgtttcaaaaaagattgtttttaataatctgactcctcctcctaacatgttcttaaatatttgtagtagagtataaaattgggggttactaatttaatgttgttttattgaatgacacctcaattttgttttagagttttttgacacgacttctaaattttgtatctctggtcacatcaatcaggatcatgcacgtttaaaagaagagaactggcaacttccctagagactaggacaaggtttccagaattagtgatacaagaagagaagcgtgttcgatttgtagtagtcaatggtttggatattattgaaaaaccaaatagcatttctgtggatgatgctgagtggtaagctggagagcattctgtgcattgtacgtaaattattgaaaacttcctcaatctgtgacttcatggttgctttttggcaacacgtactgcttctcattttttttttcacttgtcaagtctgacaaaaaaccaaagagagaatggggtggcatgattcataacaagataaatgaacttggatgattttaagaccttgatgcttgaataaagttttgatttagagaatgggatggcatgattcataacaatataatttcatgcactacggcctattatatattttaaaagagaaagggatcacttgtcttagactgacccccacttgaatttattcgtaagcctcagtagaggaatatcgggataactgatagattatagcgcaagtacaatcagagtaaagacgaatattttctctatgatataggcacaatctattattctcaatctttctatggcgttccttgtttggattgcttattggggaagttaaacaagtaaatttatctatattgatatttggtattgttcctatgaatcttttttataaaatgttgaagtcatgaatagaaataataaaaaaattatatatgatcgtgaaagatcttttaggattgacaatttaagaatgctcagtttttcttttgtattttttcttcttagtttgacttcagtaaattgctcttgttgcaggtttaaacgattgacgggtcgaaatgaagtagctgtgtctgctcaagactacaagttttattctccgagacataaatttaggcgtgtttcttcaagttcagtgccaaacattcctggtttacctgtaagcatgaaatgccaaatttatgaatttgtgatatgatcgtgggaaattaaagtcactaatttagttcacttatgcatatgtatatgtgtgtgtgtatttcttaattgaatttgatggttagtttctgccattatttgttttcattcttatgatcgtatgaaattacaaacccctttgaagataagataccacctacaatagaatgggttcacacacatctttttatctttatgttcagctataatgaattaacctcgctaaataatcttttcagagttttcctggtagtgataattcttctgtgttgactactgctcaaggattccgtacagtaagtgaagtaagatatgctttaatatcattttacttcttcgaaattagtactctatatatcttgaactggacaagctaagtttgcatttcatcatgttttttttaacaagatagaagttaaagatggtgacaacattatgtttatctgaattctgatgcaatatatattattgaggttgtcaatgtaaattgccaggggtcctttttggttcttttatggatctgcatttatgttttctattttaggaatactatagttgaaatttattattttgtaaagtttaacacataattttttattttcttgatgttgttttctgaattacgtgatagctaggggatttactgatatttagctacacacttgtccataaattatttttgtagtgtgataagccaccagattaaactagactttaggcttagttgttagttctctttgttttaattaaaagttgatgtgtattagtggctgagttgtattagttttaggggcgatgtggcaattattttagggcatcgtaaagtatataaggagagggggtctcttagaaagggagggagaaaatcgataagagttgagattcattgtggagagccccagtcctctccaacagattggaataggagagaacaagcctctcgaaggcttgtgatttgtaattttgcccatcaattcaataaagtttctgcaagaatttcagctatcttattgtgtaagaacaagggataattctatccaagaaagaacttatcatatagtgaagtgaaatgtaattatgttatctcacaagtaagagtctgatatcctctttccaaaattcgatatgctattttgtttacaaaggaataatgttaaataatgtgagagtgatattatgacctcgtcggggtgataggctttttcataggatcctgataattagtcactatattgtcttcttgcttttgaagtatttgtgttcacctaaggtcaaacatgaatataggaatatgtaaagttttctgattatgctcgaggtacaagtttgctagtttgtttattcttgatttattaatatatttgttagattagggaattactacatactaatattttggttgtttttctggcagccacaaacacagcagcagactccctgcaagcatcatttacaaccattgttgcagcaacctcaatttcaccctgttcaccatcacaatcaatcaatgcaccaaagtcaacatactccccaatattctcaaaaccatcagtgtggtccaaccccacacctgcctgaaatcggtgctcaccattcgccaaccttgtcacaacacattgcgtgtttacaacctctcacaggccatgttggagggcgtttgcatgtattggtaaggttattaattgttgatttggttttttcgtttcatattatcaatttgcttaaacaccatattgggagagtttcaatgacttgtgtgcgtaatttcatgctgactgttatagatgataagaatatagagttactagaaattgattgcaaaaaagtctggcaaggttattaattattgatttgccttttttttgttcctcaattattttcttttaacaatgtattgggagttacaatgatttgtactataatttcatgctgactattaaagtgggtcaatttttggcatgaatctgttagctgctgtaactcaaatgcttagtagcgacctaacctaactatcattaggttaaagattctgatttaaatgatgaatccattaggtatatgattatatgagtaattaaagatctgcaaactaagccgttaggtatattttaatcgacaataaacaacagcgcaacacaacacagcttggtgcttctcttttgttctgtgatcacttaaataaactttactaaattattatctgaaacaaagtagaaaactgtaacttgtcttgtaaccaattttcctctattttgcttggcttttataaccataattttggtttcctttggctcttgtcataatccttgagatttactagctagtgaacttgcatttcaggcatccagcccagcaaaattttgtgatgaatgtggtgctccatacttgagagaaacctctaagttctgctcagaatgtggtgctaagagattgggaatatgatatttgtttatttagtctttgttttcataatgcatgtttcctttttaagttctatgtttgttttatgtatatcttcactttgagttagaaaatgtaaataatcattgttgattgttgtaaaagtaaactctataacattgttccataaaaagaaaaataaaaaaactctatagcattagcaatttttttgttttatataattattagttagttgtggataaatgaatatcttattattaaattaaaaataatggatatagttgatgcatttttatcggaagttttcatagatatagttatggtgtaattatttttaaaaatatagatatggtgtataatctttgatatatatatcttagatattataagtctcttaatcacgtcctgcttgattctcttatataccctcagtttttttaatttttcattacccttaattgtctttttaagtttct

SEQ ID NO: 19913 - DNA, 3725 bp, Cannabis sativa
  modified_base (126)..(133): a, c, t, g, unknown or other
  modified_base (2658)..(2660): a, c, t, g, unknown or other
gcaaaattctaataataccataccaacataacattgatttgtcttgtcaatccccttttgccaacacatcataggtaataactattttaccagcacaataccaacttttgccagcacaaaaatgtnnnnnnnnaagtgacatttcttgtagtgtcttgtccctttaaataagtattaataatttatccacttgatccaaagaaagtattgcttattgcttattgccctaacatatttggcaatcatataactttgttccacttggctctttctccatagccaaacctcccaaaatctttaggaaaggaaaaccttatcctacgaagtgaggtgtaacttactcctcgatcattgtgaccccaaaggaaccaaatatacaatttattcacctccttattaattatgctctgcaaaaaaaaatattcatccaaaaatttcttagtcttaaaagagtcaaattgatgagttgagatctaccttacataagagaggtgatgtcttgcccaagtgtgaagcctcaatttgatcttcttgaggatgccacaattctctgttttccaattagttggcatcaaaggaagcccaaggtacttaagcggaaacaaaccctcttcaaatttaattttacaataaatgttgttttttcgaaggagaaacttctctaaagtaaacttgggatttgtttttattatccccaagactagtgttaccacaaaactctttgaacacatccttgacacattgcactaagccctacttagctttgcaggagataatttttggtttagggtttatattagagacgcggcgaaagtgaaaataggattcaggttttaaaaaaaaatattttgttgaatacgatatgaaccttaaactccagttctcaacacaaaattacataaagtaaatctaactagttagattaggaaattacctcttgttgtgtactaaggtttctttgaatttttccgtattatatatcaatcatccaatccagtaatgagcttgatgaagaatccacaccagatcttccagatcagcctcaacactcagaataagagtgggcttacaaattttacaggatgaacaaattttctcatcacaatgtattctcaactcatgagacactatgatggagattggaaaaatactaattcttcttggagagagagaggcgtgaggtagaagagagagattaaaattcgatttcaactatgttctatttcttagttacgaaaccgtactatattctatttatcaatatatataaatattattttaaaattataaatattataatatttaaaattcttttaatcttttaaaataatatcatataactgaataacgagattcagttatatctttttatttatactatcttttaatttaaatacattatctgacaatatatttcatcaaaataatataaggtaattatcaattttaatttaatttatttataaataatataatataacaaaacttaaatgggactttacatgtcacctacaaccatattttaaaacccaaaattaatatatcaattttgctacaaataagatttattatttattttaccaatttataataattgagtattctctttaatcttttatttcattaggattaaaatacatatatttacactaaaataatattttctctctctctctctttaatattatctaagaataatattatatttaattaattagtatagtttcatcaaataaaattaaatagttaaataccactttaattattcaattcataatttatataattatttaaaataataatttatattgaatttctattttgcccttaaaaattattttcataaattaattctttctcaatttattcatcaagtcaaacatttgcctgtacaatgttgtatagagatgatttggggaccatgaccctatagtttgaagctccaataaacacttgattattatcgaactcttcaatagaataatctagttcattaattctattattactctactataaatatgaaatcgcactatttaacaactatatttacagaattcttacttatctctttattagttcataattagagttggtaaaaatatcattttacccttctaattatctctttattccttatgtaccattaactcgatatgaacaattaatctataatctaattattgatttggatccaactgctaacacttccagaattaacactataaaagaactaatattcgatcttttttagaaagtttagattccattattatataacatgttctcagctactcatgttattaagctccgaaaataaaaattgtaagaattatcttctctgagaaactttaatgagttaatcaaaaaactcaatgttcatgtatactaaggatttagatttctctactaatgattatcgttgtgatatgaataactcttttatggtaaacaacatgttgatgagagatgtttttacatattaattcagtcatgtgtgatcaaattatatataatatattcactacatgtctatctacatatgtgatctgaatcaaaatcacgcgcactagagtatagtgcataataaattgtacttggtaaggccatattaaaaatttcttactttaatacactaccgacttgttttattcatannntataatcttaattctcttgtacaaccttacaagattataccatctttctatgaagaaagaatttttagatatttattaattatacttctataattaatgtattcacttatcttataattgtatttcatatattttataaaattttatttgttaaatactttctttttgtacataaatcctaacaataattagatcatctgcaaagtacaagttaattattttcaaacttttgcacattggtggaatttgaagctatagtctcttagttttgtactgtaacaacctcgtaaaatactccatgataaggacaaaaagtaggggagacatagggtgaccttatcttaaccctttagcgccaccaccttgcaatcttccattcatcaccatcgtgtaagaggtacctttgagacagatcatgatctattgaatgaatcgagttggaaatattagacagttcaacagcctttctagaaaaaattaatcaacaacagtattatatgctttgctcaaatcgatcttcacggaatacctagaggaaacatttcttctattgtagttcttgataagatcttgaaaaataaagatattatgaactagggatttattttttataaaagctctttaaatctgattaataagatgaggtagaacctataactctgttacaaattagcttaactccatcttaaatatgttagttgtacaaagcgttacaacacgtgctattgcttgtaatcaattgtcggagaaagcatgtcattcattttttatactctcatgatgatttatattttgctatagctttatattatgtctatgctaaaatatatatgggttaattaaggtacgcttccgctatttgagtttttctttttgaatcaacaaatgtattctttagatctatggttatacacttataattatatgtgatatatttatctatatgaaattgaatattgttattgcatattttatgagtgataaaaaattctaacatattttatctatattttttaccattttttttttatttaagtgtttatatattacaacatattttacttg

SEQ ID NO: 19914 - DNA, 3437 bp, Cannabis sativa
tcatactctcaggatttagagggtagtggtttgatatgttcatctgttgacatacttcctactgaatttgcaaaagaggtgcagtgtttcaacataatcaaattcagtgttatttcaaggaaattatgtggtgataagttttgatgatttaaaataacactgaatttgattgtttgcaggcttctcaacacttcggagatatattatctgaatttgtgggatatttggcttcaacaatagacattaaacagttaccttcacatttaagaagagcttgcatagcccatagaggagtgcttacttccttgtatgaatatattcctcgtatgctaaaatccgatacagagtaagcttcaaaatccctcttcattaaaataagctcagttctgataattttggtttctagtcattccaagtatatatatacacacattacaaggttctgccttttcaaaaaatgcagggaaatatcagagaatcttgaaagttcccaatctaacaagaagaaatacaacatactggttagtttcccctatttaaattacagctttcactatttttatcttacccagttaggaaaataataatctttgtaaaaatactgacaggtgtccttgagtggtcatctatttgacaaatttctgataaatgaggccttagatattattgaagctgcaggtggctccttccacttggtcaagtgtcaagtgggtcagagttcaaaagctatgtcatactcagaacttgaagttagtagacctttcataagattgattatttgatatgtattatctttttgttgtggtttgttgataagtctttttcaattttttgtcttgtattcacaggttggtgccgatgataaggctgtactggatcagattattgattctttaacttcaatagctaagccaaatgaaaacaatggatttttagataatcaaacaaataagctctctctgataattggtaaagtccaggagatggaaactgaaaaggaaaatagaacaactgaaaggaaaactggggttctaattcttggagcaggtcgggtctgtcaacctgctgcaaagttattagcatccattggaagcacttcatcacctcaatggtataaaacatttcttcaagatgattctgatgagctaaatgatgttcatgtaattgttgcttctctttatctcaaggatgctgaagaggtaaaaatacaaacctattttctgttcatttctaattctacactatttgagttcaaatgagtgtaaatgactgaaattgaagtaaatggatgcagaccattgaaggtattccaaatgcaacagcagttcagcttgatgtgcaggaccatgttagtcttttcaattatatttctcaggtaagaaagaatcacaaagaccattaaccttaaatgatgtgaatcaccaattttaatctgagtggttcctcttgtttttgttttctcatgcaggtcgaagttgtcataagtcttttgcctcctagttgccacatcattgtagcaaatgcatgccttgaggtactaaggcatctcattattgttttcagtgagaaatatatgttgaaaacattgaagaaaaaatagtagcatgataattttcagtatgagttttcataaacagctgactgcattgtttttctgtcaatggacacagcttaaaagacatgttgtcactgctagctatgttgataattctgtgtcaatgctagatgaaaaggcaaaggatgctggtataacaattctgggtgagatgggcttagatcctgggataggtaaatactcttctgctatgttctaatagatcaattcattagctgaatatctaaataaagaaagagaaattggatgtttcagatcatatgatggcaatgaaaatgattaaccaagcacacgttcataaggggaaaatccggtcatttaattcttactgcgggggactcccttcaccagcagctgcaaataatccattagcatacaaattcaggtatatcaagctatttccatgtattaatctgtagtgacattctacttccacctttagctttcctttctatggaagttactaacttagaaactatttagttggaatcctgcaggagctattcgagctgggcgaaacccggctacctataaatctaatggaaaaatcatacatgttgatggtaagttttagaaaatcacagctgagatatgaacaaaacaccaagataattctttctttcccagtggaaatatacaaaatgcgattccatattcaaatttgcagtacatgtttgcaggagaagatttatatgattcagctgagagactgcggatacctgatcttccagcttttgcattggagtgtcttccaaaccgtaattctttagtttatggagacttgtatggaatagccaatgaagcatcgaccatatttcgtggaacactccgctatgaaggcaagattttatgagtttgttactcttaatctatagaagattaacttaagcatttggtatgtatgtttatatgttatggaacttatgaagtgttactttgttttagggtttggtgagataatggggacacttgcaagaattggtcttttcaacacagaacaccacccccttcttaaagatggaaagagacctacattcagagctcttctggtagagcttctcaagattgatgatgatggttgtttaaaaagagaagaggacattgctgaaaggattttcaggcttggatattgcaaagaaaaactaactgcagtaaaggcagccaaaactatcatgtaagggtctctcatagagagattaaagagttctacactcaataaagacaatttaagtgatcgtaatcattgttatcttttggtttagattcttgggactcaacgaggaaacagaagttcatgtctcttgccaaagtgcattcgatgtttcttgtcttcgcatggaggaaagattagcctattccagcacagaacaggtaaaaatgaaccttataagccaaaccaaaactacatactttactcatcccactttttaagctcatagtctcattcattttcccaaaactgagaaagctaagtctaatctatggtcaggatatggtgctattacatcatgaagtggaagtagattttccaggtgatcaacagcacactgaaaaacacatagccactttattggaattcggaaagactgagaatggaaacaccattactgctatggccctcactgttggtatccctgcagccattggagcattggtaccttgtttaaaactcttccaatctctcttgtctacatactcaaaagctgagagattttcttaaaaattaacccaaattttttgcagctcattcttggaaataagataaagacaagaggggttttacggcctattttacctgaagtatatgtaccaggtaatgaca

SEQ ID NO: 19915 - DNA, 5266 bp, Cannabis sativa
  modified_base (96)..(117): a, c, t, g, unknown or other
  modified_base (3001)..(3012): a, c, t, g, unknown or other
  modified_base (3064)..(3077): a, c, t, g, unknown or other
atagaatttatacattaaacattatcatgacataaatcatgtgaaccatgcaacataaaatgtaatttctgatcttttttaattagtaaatctgannnnnnnnnnnnnnnnnnnnnntagggcacaaaacccaacataacaagcctattttcattcgttgccctgacttaattctcatcttgtctcctaccttttgtagatgaatcttggtgagttttggggaggcgaacaccatatctaccacaatctgcttcaatattgtacgaggatcatcctcgcctctgtgccagtctgtcctcgtctagtgataatctttccaattctagttttgaagactgggaagtaagtagtgaacacacaccttccctagaactcgagttgcagcacaatttttatcccggtcagatccaaggtcaaggttacagacggttcatttggaaactcaaaaagggctggagacattatcttccttctaactagacgtacatagtccctccaaaaatttctgatactttgcccgaaggctgtccaagccctgcagttgcaagtaaacctattgccacctttgatgtgactattgctaggcacacaaataaaattctgtccaagtatagaatgatggcgcaaaccaagtaaactatgcgaaagtcttcattgtctaacccatcgcccgtctcacaactttgccaaatgttgaacaggcccgacctgccactgaagaggaagacacagctagggacgttgaagtccaagagatggaggaccagggcgaggtccgtcctgctactcctcctgaggccgaaggagatgaagaagaaggagtagcctgggtgctgccattcggtggcctcaatgaagaaggaaaacctatgtttgaggccgggaggttcttgaggccggtgaagactacgttacggaagagtacaccaaggccattcctttgacgaagcaaggtgcactaggaaatcgatgggtttctccaccatttgtggtgaccatggcaaagataaagaatttactcaactgtggttacttagggagtgtcgaatgcttccttccctcccccgaccagttggcgactagcctagggaaggttattatacttggtcggcgttcataccaagtaaggtgctatgttgccctttctctcatacttcaggaggattgcggacaattaccatataagtctgacctagttccctcccaagggcatcaagtacttatccaccctattcattctctacacctcacaaggatagggtgtgccatccccgcatgataccaactagctctttgatccaaagtcaagtcccaagaagaataggtctgtatacttctatttttctcagattgagaagaaatggttgacaggccccacggccaccgaggtgactaagatagggtactttgtggatgagtattacttcgtcaaagggacgagtagcgttcatagcagcttccatcagataccgtcttactaccgccctccgttcacattagagctcaggaagagggcacaaaatattctccaactacctcctgctgcacggaacatctccctcttgacttcagtggccaactttgtcaaatataaactttttctagccgattttgtaccaaaggctgtgaagaaggaaaaaaacgctgagcccaaataggagattatgcccggacaggagactccgagaaaaaagaagaagaagacccctccaagcagccaagcacctattaaacggtctatcatgatcagggaggatcatgaaagacctgtttggcgatccacccaagttgcagggaagggtaaagtccctctgacagagtaggagctagaagactctttagatgacgagcctccatctttggttattcaggaaaatgcttttgcctatgtgtaggatatttttactcatatttaattttcatcttacttggcttatatcacacttgtttctaaccttcttaattttttcatatgcagctatgtctcagaaagtgttctaggctctaaagaagaggttaggtgacagctcgaccacaccccttcgcccaaacgaccaaagggtaatgaggtaccgcctaaggagataccgaccaaggataagagctcagtcaagcttcctatcgaggtttctgaggagacggtgttcgacgtggaggcacctcccaagaaggcttccaagtctaaaggtgccaagggaggtagcacggatgggtttggtctacccaggccctcaaacactcctatcgtgttgaaccctgagaccaagaagggtaaggagatgcttcaacactactaggatcagttacttcttgaggtgaatgaccagctattcagaggggacgagatttctacggagcttttgatgggcgggctcttgaaggaagcaactcgagtatctctccttcgatttttatctcgtctttttacctgtggaagttttaaccttttcctgtgtagctcaatttgaagatggcttacacctatgtccgagccaagtctactgctcttaaaaacatccccactaccacgaacttgtagaaggaggtggatgcgggcaagaaggaggtcaaggttgtaaggatcaagctgggtgaggtgaacaaaaagcttctagccgccgaaaattgagtcaaggagttgacgaaggtgatctaggagatgccatatatttcccagctcgaggcagataacgaggctttatccaaggaagttaatggtctgaaggatgagagggagggtttccgtactcttctcgcacttttaactatagtgttatcccaatttttgcactctgacgtggcatcacatgatggtgacatgtggaaacgacttcgagtatctattcggagaatatagtccaaacaggatgcctcgtatgcatgcctaaagcaaagcgatcagcaatccgcgcagagcgaccaacacatagcgaatttagctttcgcatcgtgattcatcaaagaaatccctataacttggggatcagattacagagatatnnnnnnnnnnnnaaatcccacgatcagtgtattctttatttattatgcaatctttctgcttatnnnnnnnnnnnnnngaagggaaatacttcctctccaagatcaaagccctataaatagtgatgcatgttcattgggcaaagggttgagagattttacctaagagatattgttaagaaatgatttttaccatattttaccactgtaatatttcactgtgacttactgtgctgaggtgtatatttgcttttcctaggctaactaatttcggttagaatttgattttgtaattgtaaaacgtgtagatattgtacaatcattgttctggaatattcttgtacggtacaatcattggttataaaagtttgggcaagcctcaaagttcattgagctgagcatttcacattctacacttttctgcatttatctttcattctctgtttcctctattttcaaacttggtatcagagctgtacctgcaccggtggtgcctacttcgtctcagctccatggaagatcaaaccccagctcgttcaggttgacagagcatctccagcgtcatggctcagtcctccgttccttcagcaagtgctgtaggttcttaggttgtcaccactttgaattaaccatttgccttgaagcttgatagaaacaactatacgttgtggaagaccatggtgtctgccatcgttcgaggtcacagattggatggatacctaaaaggtaccaaagttagaccagtggagtttcttcctacagatctttcgacaggagaagaaggtgttactgtcaatccagagtttgaaatatggatcgtgaatgaccagttgttgcttgggtggctttacggatcgatgacggaaagcattgctacggaggttatgggctgtgaatcgtcttcgagcttgtggcaggccttcgagacgttgtttggtgcccattctcgcgtgaaaatggatgactatcgaactaagatccaaacagcaaggaaaggagctatgtccatggctgattatcttcgacaaaagcgtcaatgggctgatgtgcttgctttggctggtgatccttacccagaaaagcaattagtatctaatattctctcaggactcgacattgagtacctacctattgtgcttcaagttgaagcaaggaactttacaacttggcaagagttacaagatattttgctaagctttgatagcaaacttgacaggttaaccacactttcaggagctaccaagaacttgaatctgtcttctccttctgcaaacttggctgctactaaacctcccaactatcctggaaataaagggagtcactctggacacacgggtactggaagccgtggcaatcctagccatcaaagaggaagaagaggcccaggcaggttcagaggaagaggtggtggtaggagtaacaactcgaaaccgacatgctaggtgtgtggtcgctatggacactctgcagcttactgctacaaccgatacgatgaaagttacatgggttcggatccatctgttgggaattctggttcgaatggcaaagggtctcaaagtggaaataacaatggtgcttcggcctttgttgcaacacctgagatggtggaggatggagcttggtatgttgattcgggtgctagcagccacatcactgcagataccagcaacatgactcaaaagaatgaatacaatggtgaggaaactcttactgttggcaatggtaatcatttaaaaattgctcatgttggtactagctctcttgtttctgttgataacaaatgcttagttctaaataatgttttacatgttcccaacatcactaagaacttgctgagcatatctcaattaacatctgaaaataatgtgtttgttgaattttttgccaaacactgttttgtgaaggatctggacacaaagagagtgcttctccaagggacaattagagatggtttgtatcgagttgctggtcagcaagggagttcagtcaccaattcgcatgagtctttaagttttcagtctactaaaccttttactggtgtagtctttcaatcaaaagatcagcatgttgctggatctaagtctgttgtcttgagggataagtggcacaagagattgggccacccctctagtcgtgtcttgagtcttctgttgagtacacttaatgtaaaaccagttattaatggaaaagataccttctgtgaagcttgccaatatggcaaatcgcatgccttaccatttaataacaatcccagtcgagccaaaggtcc

SEQ ID NO: 19916 - DNA, 3979 bp, Cannabis sativa
agaagcacgggaagaattacatcctatggatgctgcttctgatatccctgtagcgtcacaatcttttaatccaaataatccagaatcagatttgagtccttgtgatagtcctcatctagataatggagaggatattgtatctttacctacctgtccccttccagagacaaaaatttcttcagaaaagtcagcaaagttgcaagctgaccaggctggtatggacgatttgctacggtatgaagcaggtattcatccagagactctttatgaaaagttcctgaagttgcaagctgatcaagatagtgaagaatgtgtggaaacagaggaagccgatcctcatccagaaattccttcagaaaattcgcaaatatgcagcgatggggaatggttgcaagtagacagagaaagtataaagacttcaagtctttcttcagaacagatcaaatctccaaaacacgtaaataaagaaacttcggttgatgcttctgtagagtcaagtctagaagaccctccaaggcaatcttcaaccgcagaattctcgtcaaaatcaacaagccctgaagttgatgtcataaagcaagcatcaagttcatctgagtttgctccaagtgtcgtcttgctcccagaagcaactcaagttgatctggaggagatgccaccattgcctcccctacctcctatgcagtggaggatggggaaacttggccagggcttatttccatcaatgcatccgtttggaggcaatgacaacgctcaagttagttttccagcatttcagagtgggatgctgccgcctcaacatccgtttggtggtaatgataatgctcaagttaattttccagcatttcagagtgggatgctgccgcctcaacatacgtttggtggtaatgataatgctcaagttaattttccagtatttcagagtgggatgcagccacctcaaaatccgtttttgcctctcaacattgaagagaatgagaaatctctgcatgttgctaaacctttgtcggtacagcctcctacatattcaatgcagttaccgacaatcgttaatgatgccaatggtcaatacaatccttttgctttagggggaacacaatccctcaacccattcgtaaggctaccagaagtttctagcaagagagatgagcacagtgatctgtcaccgacaccacccgctgaaagtacaagcagacaaaatcatgttgactcaacagatgcgagccagcctatggaccaagtaggtcctcctgaaacaggtgttgataccatggaaaataagcaatcattgaagaattcagaagaggaacaaggaaattcattgccacctccaaccatggtagatgaacagtctcggcttagtttactgatgtcagaggaagaaaaagcctggttgtcgactagttctgctatgatgccagactctgaggtcgaaaggccaaatggaaatctagtgaacaagctccctcgtcctaggaatccccttattgatgaagttaacgcacatggcaaaagcaaggtaataatagtcaaaacagttctgtcatgcaccttcgtttaaggtttgattcctgagatatacttgatttctaacatgttgaataatattcagttgagaaaggtagccgaaagagttcggcctcaaaatggaccaaagacagatgaaagagattcattacttgaacagatacgagctaaggttagtgctctctgtcaaaatcaaaagttggtcgatttggatttcttacaacatttgatcacactctttttttaacctcaaaactaattttagttggggaaaatgttacataattttgtactttttgttgcttcagtccttcaatttgaagccggctacatcgacaacaaggccaagcatgcctggtcccactcctaagacaaacttgagggttgctgcaatattagagaaagcaaatgcgattcgccaggttcccctctctctctctggctcgataatctacatatacatacatactttattttatgtgcttgtgtgatataaatctgagtcagattctgatgtataactatcgtggatttcggttcaggcattggcaggaagtgatgatgaagatgatgataattggagtgattcttgaaaagaaaagaactaatcttacaactaagaaaggtaactgggttaggggacaccattattctctgttctttagtgcaattaggaattctatatatactctctctctctctctggtcaactcttcttttcttattttatgttgatgtaatatacaccacaacccaccttgtctctcacttctcctttctataatatcttgtctccccaacaattaccctgttatttacctactctgttctgtccccaccgaaatttgtgtgggtaaaaaagaaaagaaaaaaaatcagaatcttttatactacgagaaggctcagcgtgtaagcgtcggagcaattgaaattatggcgttgatcttcaacatttgaagattatagtccagtgtaaattgtgttggagtgtgtaaattttgacatgtaaaatgcgcttttgaatgaaatttttgtaatgttgtatgtaacatgttttctatgcattttatgtatgtatatgtaatgtatgcactcatttattgggtcctttttcttttttaattcctcaattcttttgataccattcccatgtatgaaagaggtagttatgtcatatgtgttctgtttatggctggtttaattcaagtatttgagtctctcttttggttttgtatactctgttttctctctcactccactagcactttttcaattttgcagaaatgcccttcattttcttaagttttagttggacttcacttttgtttgtatcaaggaggagttaaccaaacctaattataacttaaaataattaggtttatagtcacttaagttttagtgaagtcgaacacttttgttttagtgttcgaatttttcccgtgggccgctttatagtcacggagatatgcaccagcaaaatgaaccacagcagcagaaatttttgcaaggttgccatggaattcagcattacgttagtgccaaatacaccagcataggatgataaaatattcaaacgcagcagctgaaagtgtggcagagaggaaaagcaagaaatcctcacaggttttatgatcagccaatgtgaaatccattggcaattgcaccatactccaaacttctcgtgctttgttacagccaaataaagcatgagctaccatttcatcttgtgatttgcagagagagcatcggaggctggaagtaatatatatgccttctgtgaagttcagctgctactggtaatacgccatggaaggttttccatacaaaaatacgaaccttagatggtaatttccatacaattctgttttttttttttttaaataaacaattataattccattgtaccacacttggtccctagattatgaagtgaatcatataaaagcaaagagaaaaaaacaaagatcagtttatgtgttcatatgtatatatatttgttatctacaaatctctccaacataagattgtaattattttttattcaccaatcttacttgactcaattacaagtgatttttttagttcacgactttatttaatttattatctttgaattattagcgattcttttggtttgttacaatgtgaaagtgtatggtggaggaattaaaaataagtgaataaagaatcaattaacaataaaaaaaataactcatacaatttatatatagtatccaattttcacataagattttctaattcataaattagcaaagattagttcatgcaacgactcataaatattagccattgccagctgtatttttcatcagcctaaggacaattcatttatattataatataataatatagggaaattttataataatgcactcccttaaaaggaatacaccgatatatctctatctattttagtatccgaaataatttt

SEQ ID NO: 19917 - DNA, 4435 bp, Cannabis sativa
tttttttttttttttttaagaatcttacaaaaattcctttttttttattattattcttgcatttttaccatcactttttttttttttttacattatgatgtaccaagttttcaaaatacagtagtgttaaagttttaaaattccaaaaatactatctttcagtaaaataaaaaaacaacttaacaaacaacattaaaaacttaaaacaactataaaacaacaaaaagataactacaaagcaacaaaaaaaataacaaaatattaatctaattttaatatgcaaaacaatatcaactcctcaatatatttttgtattattgattttttcacttagttttgacaatttaatttatctttttgtactactatattattattttttcatagaatttgttattacaacttcaatctttcattttttttttcatttcttttttgagttagtaacaattaaaatgataatttatttttttaaaaaattaaataaataattatattaataatagaaataataaaatcttatgatttcaaaattggatacataatataatgggtaatatataattaatatgttaatatctattactgcacattgtgtcaattagtaacaactatcaacggtgactatttgatccatcttttcacacttttattccaagactgagatggaacaactcttttgtactctttgggctatttggactgagagaaataaagttgtacatggtaaacacgcaagacccctcaaagaccttgccaccttcgctgatgtgaacctgcagaactttcgggcagcataacaaacatatcatgtgtctaccattgctgcacctgcagctgcttcccatgacgaaaatactgctacagctccggttccttggttttcgcctactgcaggagcttttaagctcagtgtggatgcgacagtcaactcttcgaaaaacacaactggtgtaggggctgtaattagggatgctaagggttacgttcttgctgctctctcaatgccaattaaaggaaactttctgacacatgaaatggaggccaaaacactctttctcagcctcaactggggacctacaacaacaactgacggttatgaatatagaaacaaatgcactgatggtttctaatgctttgaatgctcctttcaattcaaactcatctttctcagatttgattgttgatattactagtcttttatccttttttcctaatataattatttcacatgttaaatgttcagcaaataaagtcgctatggtctagttaattgaatttgcattaggggtagatgagacttgttcttggttggaggttatccctctacctatttactatgttattgtaaacgattatatgtttgtttcataataacaagtatttttttctaaaaaaaaatacagaggtcttgtgaaatgacctaaactaagccgacgtatgtgacgttaatgtgttacattgattgaaaaatgcaaaagacattttttataaatggattttggttagctaaccacaaatatagtctaataaattaatgtgttacaagattttttgaatatgcaagttttcatagttttgggtacttgcatttcaatttcatgtattagaatagtgatgttgacttagtcaaccttcactttctcacttacaaaaacacagattttgaatctgcaattttttttaaaaaaaaaaattaaatgtcactttataaattcaaagcagcacattagtggataatcactgcctttcataagaagagtatggaattaataattatataaaaagaaaaggggggtttaagaattagacaaagccaacttttttgcagtaagatgttgaaactatgtagtgtagatctacttactaaaagtatttaggactgattgtaaagaagtaattgaagaaactattcttttacaagatccaagacagtttgtcagacatgggttcttcatttgtaaagtgaagagaagagtacatttattgattaattaattggttaatcttatatgtaatagtaatttatcataataattatttattattattatgtttttggcattggatgctgaagcagtgaaagacaggtaaggagtgaagtctttgaggtggttttgtgggtgtagtcaacttaggttatagaaactagatcattctgttcttaagctaagtgacttatttgaactaggtttttgtcctgtgccatcaaacaacctaacaaattcccttaatattattttttaattagtattcattgttaacgaggtcatgaagaacattttatttcaagtcaaggctagtaaattgaattagtacatatattgaagagaaaaagtttgtccaggacgtaattgccagaatgtactctactcccaatttgtgatatatattgaattatttcattaattaaacttatatattttaattaaatatgagtttatttatagctggattacaggcaactctggcaatcaattcaagagcatgtcagggaggaaataagggcagccttagttaggtggttggttggttggtttgaggatatattttaactgtcactctttttccattttcactttagggtttatcaaaattaaaacgatttaattttaatttgaaaaaaataaggtacttaatttataatataactaatatttattagaaagtgtttggattgcatattacatcattgattcttttatttaactttatttatttattttaaaaaagaagattgataaggaatggttgtctggatacaaggcccatatgtagccgtcaatcacgttctcatgggtccaaatatgggctcggcaaaaagggccaactggaatgttaaaagcaaattacggctctcattattgatacttatgattaaggacataggaaaacactcatttctttgcttaaaacatacttatgctgctccacaactgctaacattaaaaaaaaacactaataaacactattaattatagcttgggtttaggaattgaattaaactaaaatagttaataagttgactttgtgatcatgtgtcaactaagtggactggaaaaataatttatatcatattctgttttttttctttgagtaaaagcatcgtttcttagcctaaaaggtaaaacctttccaagtgtagtgaaaacagtattttgatcaaaggcaatacttgcttcggctctaagggagtttaatttttacaaattaacaatgctttctatcttttatatttctttgagtggataaacttgagttttacaggtgtaactacatgttgcattcagtttttttttgtttgaaattaattattttttttgttaaaaaaactcaagaggtccacggtggctcgtgttaatgtgcctatgatgtttcccccattatattaggcgtgctcacaggcaataatcatgttgttgttgtcttcagtgactctatagtttagattgattttttttggactaggggactgatttgttgcgataaattactatttctatcctacacaatcaatatatcataatggaaaaagaaaatatatgtaaaatttataattagtctacggtagttgtggtgaactagatagtagataacatcaactaggtagcattttgaatttttcaacacaaacaaaatcataaatataaatttcactctaaaatgttaaagaattgtttaattttttttttatcatatatcttttccaatagagtcctcaccttattatacatagatgattaaacatggttgttgaattattgagtatagtgtagactataagttttatgtatacctttcatcactcacctattttagctcctattagtagagggttgactgattataaactttaaggaaaaggtgaagattagaggtgtttatccgatagagatccaatacttataacatcatccaattaattgtgtgtaacatgtaatgcaatccaataaatcttattacaagatcacacacacctatgacccacctaaaaatgaaacaaaaccatattcacttctcattctcacaacagaaattatttttctcatttaggttgtagctactgccttcaagtctcaacattctctgttagccagccttgtctcaagttaattaagggtcttagaccaaaaatattattaagctttttttttttttatatatatatatataatggtaaaacttaaaaacataattggttgacacttttatcttaataaaatattaatatagtatcttaaaaaaaaaatagggattttatttgaaaataattatatttttaataaataatagttaaaagtataaaatataatatttttgaaaaataaaggaagccttaggctgctgccccactcttgagccggcgctggtgctagcctcggcgcctaatctcaaccatcacgcctcgttgtcttggtgttgctcgagtccatcg

SEQ ID NO: 19918 - DNA, 4471 bp, Cannabis sativa
  modified_base (1675)..(1685): a, c, t, g, unknown or other
ttttgttatttttgtgcatttgtgaaattaaccctaaactaaaactaaagtattgatggtaaaaaaattatcagagcattaaaacaataatatactcaatgcagtattattagaagaaaaaaaatacttgaatgtgagataatatatcatatatattatgtattgattttcttttttcagtattttctacgtgtatgaacacatgttaaaaatctagatgttaaataaaaaaaattagtattcataaaaaaaaatagtatatttgtaaaaaataacatatgatatatttatgtaatgattaataaaaattaaaaaagcataagttttccacttgtgtatagtaccaactcttacttttgcacttttagtttcatagcggccacaaatttatcttttacactttacaataagatggaaaataatttttttaagtaattattttctaactgttagtgtattttgaaaaaaaaaactgccgaaaaaattagcatatatttattacttatagatgactttcttgatatgcaagagtgacactatctatttaaattttaattatcaatttaatgatatattttaaaatatttattacttaactattatagtttagtcctctctaacttttatttctgactccgccaatagttacaaaaataattcttttaaggacctacgggaaaacaattaagtcactattttaaactgacaactataatttagaattaccaccagtttataatactcgcaaagaattcttgtcaattaaaagcagttacatgtaaaaactaaaatagtgtgttttgttagttatacgtgtcaatagatcccagtatgctaaggaatagctgtcggtttatgacaatcgaccattctttagcgactattataaaccatcgtgaatagctttgcattttatatacaccgttcaaaaaatttcaaactcattcttgctctcgtctatctatttctctcaaaatatttaacgacactactacaaaaaggagtttttgcatcgatccatctagtcaaattcgttaccaatgcaaaagtcaacacttactttttggctttggttgttaaccgatgctaatgataattaatttttgtcggttgataaattgacactaaaacaaaattgatgctaaagatgattttttttttttttaaaattagaagttacaggggtcaaattttgcatcagttttgctcacacgcagcttttagcgtcagtttattaattggtttttccatcgattatgcaccgacgcaaattttgcgtttgtacaaaaccaacgctaatttacatttagaaaaatacttacagaaacactaatgggcttcaagcccagttaacccatttaataaacactacctactaatatcgaaccctaataaactcttcaaccacacatcaccttcttcctctctcacatctcactctctctatcagctcctccctcttcaccatcattctcggtgttacacgcgtaccttggtaactctctcgcatctctctatctctcatgtcactctgtatatctctctctctctctcttttgctcgttgcatcaatctctcgattcaaaggtgggttagttgcggtggacacttcttggggcgatgttcggtggttagtgattacattggtcatttgggctctctctctctctctctnnnnnnnnnnntctctctctctctctctatttttacaagcagtggtggtggtcggatgggatggtgagagtatttgtgatttttgttgttaggttgtagtaatgtggtggtggtggaggtggtgtgacattggttcaatttttttaaaaaaattattttgcttcggttcttaaccaaagtaaaaaaccaattagcagcggtgcactactattcgctttagttatgaactgaagcaaaaactttttttttgcttcaattcttaaccgaaaaaaaaacattttacatcagttataaaatgaagaaaaaaaatataactatttgcgtctacggttattgcgtcggttacctccaaccgataatttttgtgtcacttcaaaaccgaagcaaaaatccctttttctagtagtgcgattccaagagcactcaaccacctctctcggccgatgacccgacgacgcacccaacctactttctgactgacagtccaatggcacaccaccaccgctcacttattggtcccaaaaaaactcagcaagccttgtctagcccttcacgagacctatggaaatgcatctcctcttctgttgacgagcccagcgagcaagaaatcattatcctcctccatgggtgagccgcaccgagaaactcactatcctcttccttagtcatcgtgagtcgtgagctcctaaccaccactgagagaccgtcgagcaccaaagctactaccggcaagtatataatatatacgttatttaattatttattaattttagatttacgaattttttatagttattttttttagatttaagtttatatatttgtgaatatttttattttaaattagaggtatatttgttagtttaattgaatatgttaagtatttgaattttattatgataaagttgaatattgtttatgtttgtgaagatataagctatgtatattttggttctttttattatttattttttctatgtatattttggatttttttattatttattttttgtgatatagttattgttgacggtgagaactcatcaactaacttgttggctagaaaatcaaactatgattctaagacgaaaagaaagatgaaatataaattcaatttactatctccaaatggagagaaagtgataagctttctactgctctcaaggtcaagttacgagaatgatttttcaatcccttcccacatctaagaaagaggtatttatatgctctaagggcttaaagtacaaggttgtcctaagggaataatgtgtcactttcaggctaccgtcgcaagtgtaggaggtggccttgcgcttcgtacctttgtctaggtgatctctagtcataatggtggtccccagttggaggaatgatgcctgcaatctcccttggtcaggtccttagaccttgctggtgtgttgattccactactcgtacctcctcgctctcagagctagcaggaggcgtggttgtacgcttttcccttacatgtcttgtcctttgattcctcctccaacgtcatccttgttgatatgcattcatctctcaccttacactccctttcacggaaacaacacatttggcaatacacgacactttcacgcttatgggcttgcatgcacgcacgtacacacgtgatcacatgcatgctcatagatacgtgcatgcaggcatgattgtatgcgaggctctcgtagcctcgcacgtgagccctcacagcctcgcacacaagccctcgtagcctcgtacgtgagccctcacagcctcgcacatgagcccttacagcctcgcacacgagctcctcatagccttgcacacaagccattgcagccttgcacgtgagccccttatacggacgttagcatggctcacagggatgctccaccacaacttgcacatatgctccaccacttgtgtaaagtctccacggctcacataaatgctccacgactcacccaaatgctcactggcttgcccagtggctcatgggctcgcacagtgtctcatgggctcccacacttgcacatgggctcgcacaccagttgtcacatttcaatgatcttaagatttcggccataactctctcgatatatatcagaattcaacgattcaaaatttgtgggatagatgagatagagatctatggattctatgcttatggcaagatctaattttgaacggaccattataaaaatcctccaacaatttaacttagtaagttgatcttaattactctactcatgagttgttatagggttgacctccaatttgcaaggatatactccgagatttgcaagcattgattattgagattaacgagcccagagccatacgtgttgattcagtcattccccaaatgactcttacagtctatgtctctcgaccatcgagacttattgttgactaatctcgaaaatcaactctatcaattttaagggttaacacttgcccccagtctacaataattattttaagtgttcttattgactagatgaattgggggttttctcgaatggagtgtgagccttaccttctccatgttttttgaggatgtgcccactatacataatgggcctcccttacttgggtttcacttcacaatctgcaccttggagtatcgaaaaattcttctcaccttgtctaagaggtctcaggtttgaacctcgtctaactttcttctcttttctcttgttggttagcgagtgacctaagtcaccatgaagtcgagtgaccttggttatcatgaggccgagtgactttgtgtgacagtcagtagtctcgtgatccgtaaggggaa

SEQ ID NO: 19919 - DNA, 1834 bp, Cannabis sativa
gtggtagagcggtcggctgttaaccgattggtcgtaggttcgaatcctacttggggagatttgattcattctgtgctttctttttgatttgtctaacgcaatatttttactgagcactactaaatatttatttgcactttttgaatcagaacagaatgaagtcctgtgtgtgttttctaaaaatacagaatataaagaggcatacatgtgcactggttgctaatgaagtaagtttgctaggatttatattttgaaatttggttttattttttcacggagaaaaagttggagatatgaaactcttttactttgatgtcagattgtagcactcgtgaatttgatatgcatgtataacaatgggtttgacagggaagagctggagcagagaactaagtttaatgatctagaacctgatgccatttgggctctttgaattggtatttttagttgatcattaaaaactgctgattatggtgaatttgtgcaatctgaatcaacatgcagttctgctgttagtgctgaagttgaaggtaagatgctatgaagactatttccacgaaagtgtcttgccatggtggtgaatctattaccaatctattttttgtacacaactcaagtcttgtgtacagctactctttttttttttaaaaaaaatattacacttcaaatctacgaggtcttgggttggattcctcatggagacctatttggagttatatttttctgcatctcaaagattgtagagttcagtgagaggacaaatatgaaatagtattgtacctcaaggtgtcattttcattaattgatcccatataattaaagtgggatagtttgggacacagtgaagaaaggttttgttttgtttactactcagcaatgttaaacgaatgcggaaagttggcagtattttcttttggctgccgatgccatttggggaatttaattctggtgaagtaaagttatgttctggagttctttgtcttcttctattttgtatttttgttcttttaatggttgtggggttaactgtttggaccaagactactatgttaaaaattaacatgcctatacttctgatacaatcagagtataggtttctggaaccgttgcgtagaaaggggatccctggttcaactcttcagtaataaaagtaagttcagattattgaactatagagaggctggagtcctgatttgctgtaaatttagtttttcatcatgagcaagttcatcttttttatttcttgaacatctcttaagtatttacttcttttttccacacagcattttgagaattctagagtctctaacacttcactttcaccaacagcagcagtagaagtccctgcaggttaatttgacgagattgattagctgaccaccgaggaagattggtgaatgctagttttcataatcatacgaaaatttctccccaacttagtgacaataaaaagacatacctttgctttcggtttaatggtcatcgtttcaaaaccaaattataccagattctctatgaccagtttgctgcaatggatgctattctaaatgggaaagattcatttgcgctccaggtaataaatgatgttcgcttcatgcagcttgtatttttatattatctgtgactaaaatcatccctttgtttcaaagcttcaacaaatataacactccaatttcatgctggagattgtaattgcaggcttgttgagtctctaaatacactgccatcagatttcataatataattgtacattttttacctgtttttgatagtttaattagtatatttaatatctttcattacatagagatgttgtaggctataagtgtcttat

SEQ ID NO: 19920 - DNA, 4533 bp, Cannabis sativa
gcgggcaaaccagttggttggatcacgttggcttcggtcaggaagggcggaggagacgatggatactggtgcgtttaatgctggagcagtaaatggtgggattgacccacatgttatggcagttaacaataatagtgagccgaatttttagagatctttgtattggaatgtgcctcagattgtgggaaccacaaatcaagctgttcaggggtcaaaagaaagatatgggacaactggtaccttaaatatcacatctccaattaccttggagaatgatacgttgacaattagtgatttgaagaggagaagaatagagttgggcctggataatgggccaagaggggatggttcaatggttaatatggactctgaaattgctgatggggataatgagtcacttgagcttatggatcaggtttctaatgggccaaaaaatgggttgacggtgggttctgcttcgcagacccaccaggcattatgagtaccgtaagttggaatcgttgtgggcttgggaacccatgggcctctcaattccttgaagaccttgtgcttcaaaagaaacccaagttcgtttttgtttgtgaaatcatttgtaaaaaagatgttattgagagattgaagaatcggttgggctttgaggcttgttttagtgtggatccagtgggtagaaaaggtggattggccttattttggaaagtcaaggaagaagcttctctgttgggttattcgaataaccacattgatgtggagatttctaaggaggaaacgactaaatggagacttactggtttgtatggggaacccaattgttctcttcgtcatcaaacatggactttgattcgcactcttcatagaaattccccacttccttggtgtgtcattggtgatatcaacaatattggaagtttaactgaacaaaaaggtggaagaccttatcccaattctttgatcaatgggttccaagagatgttgagtgagtgcggtttggtggacatggaacttactggttatccttatacgtgggaaagaagctgaggccctagtcgttgggtggagatccgattggataaagctttactgtcttctcaatggattgatatttttaatgatgctactcttactaatctggagttctcttcttctgatcacacaccgatccttttggagcctactatatttcagcgtagtcgtagccgtgttcaatttcggtttgagaattcctggactcatgaacctatgtgttatgagattgttaatgattgctggcgtaataatccttcgctgtcgattcaggataaaataagggcttgtgcttccacacttgccacttgggggaaggattacacgggtggttttaaaaaaaagattgcagcgagtaaaagaagaatgaagttgtttaaaggcaaggttgatgatcaatccattagtctgttttaggaagctcatgaagaatactttggggtgttatctcagcaagatactttctggcgtcaacgagctaaacaatttcggttgcgggatggaggtaagaatagtaagtattttcatgccatggctagttctagaaagagaaataataaaattcaaaaactgctaaactcggatggtgtttgggttgattgggatgggggtttggatcaattaattactgcttattttgaatctcttaacactgctggttcagccaattacaatcagtttgtgagtggtattgtgccatcggtttcaccaattcaaaatgctgacttacttgctgatccgacggatgatgagataagaagtgccctgtttcatatgcaccaagataagtcttcgggacctgatggcatggggccgggtttttttcaaaaacattgggacattgttggttgtgatgttatccaattagtgaggaattttttcgaaaccagtgttcttcccagaggattaaacgccaccaatctggttctaattcctaagaagaaaaatccttcggccatgggagagcttagaccgattgccttatgtaatgttctttacaagattgtttcaaaagtattggcaaaccgaatgaaaggtatccttgatcatgttgtttctgagactcagagtgctttcattcctggaaggctcatttcggataacattatggtggcctttgaggtcatgcattttttgaaaagaaagacaaccggaaggaaaggatttatggctattaaattggacatgagtaaagcgtacgatcgtgttgagtggtcttacttgagagctattatgatcagaatggggtttgatgatcgatgggttgagatgattcttcattgtgtatctacggttcaatattcggttgttcatggtgagcatgttatgggccctataactcccacccgtggcttgagacaaggggatccgttatccccatctctttttattttgtgtgcagaaggtctttctaatttaatcggtcagtttgtgaggaacaatctacttcaaggtattcgggtggctagaggtgcacctgttgtttctcatatgtttttcgccgatgatagttatcttttttgccaagcaacacaagatgcagctgatcatgttcgaaatttattagctgtctttgaagaggtctctggtcagaaagttaataccagtaagtcttcaatcttttttagtcctaatactactggtagtgatcgtgagcagatttgtggtactcttgggatggttgaggctagtgaggaaagtaaatatttggggctgcccaatataatcggtagcaataaatcgtctatcttgggattcttaaaggaaaaagttaagaatcgtattaatagttgggatggcaagttgttgtctcgtgtgggtaaggaaattcttttgaagacaattgttcaatctcttccaacctatgcaatgagcgtcttccttttgcctctcaagacatgcgatgaactccaaaagatgatggccaaatattggtggaagacttcgtccagtaaggggaggggtataacttggatgagttgggagcgcatggctagggataagaagtttggaggtatggggtttcggcttcttcatgagtttaatattgcaatgcttgctaaataggggtggcatttgttggtacaaccaaattcccttgttggccgaatctataaggctagatattttccaaatggtgattttctatctgctgatcttggggccaattcgagttttgtttggcgtagtgtttagactttgcaatccctaattcggctaggggtcaggcgtattgtgggtactggtttgcaagttgatattcttactcatccttggcttcctaataatgagaatccttatgttacttcaattaatcctggccttattaatcaacccgtggcctcacttttcatgggtgatagtaggagttgggatgttgatgtcatacaggatatgtttaaccaaagggatgtcaatttgattttaagcatacctattagtttcactgctgatggtgatttttggtcttggagaggtgaaagttcaggtgagttttcagtaagtagtgcctacaagctccttgaggatcaaagagaagtgtggtctggtgcaagcaactctggtttttgagttaaattgtggcagttaaaaataccacagaaagttaaaaatttcttgtggagagtttgttctgcgtgtcttcctactcgggttcaattacacattaagcatgttcctctctctttggactgtccattatgtggtgaagctcaagaaactgaatatcatctttttatttcgtgtgtttttgctactgcctgctggtctagagtcggactgcctgctacagagttggataatgccaatattgtttcctggtttatgaagcaatttgaggagctagatgaggagttgatttgtagagtggctatgatctcttgggccatttggaaggctcaaaacagttgtatttggaaggacaaaaggctttcgattgtggaagtgttaacagtagcaaacactactttacaccattggagaaaagctcaacataaggatagtattccatcctatgatctgcagcagcaaggggatggtaatgagctttggattaagccggatgttagtgtggttaaagtaaatgtggatgcagctttctttgaagatgaaagtcggtttggttttggtatggttgctagagattatacgggaaggcttcttgatgcttgctgtcagtcgtttcatggacaacagaatgttgcagcagttgaagtgctaggagtcaaagaggccctctgttggattaaaggaaaacaatggtatcacgctgtcatagaaactgatagtaaattgactgtgcaagcagtccgtagttcaatagatatgaaatcagtttttggactccttgttgaagattgtcattgtttgttccaagctatgcctaatgccagtttatgttttgttaaccgatctgctaatcgagttgctcactatgttgctaggcaatctcgtttttatgctgatcgtagaatgcttagctcaaatgtttctgttattatgcagaatttattg

SEQ ID NO: 19921 - DNA, 6203 bp, Cannabis sativa
tatatatatatatattatattaatcattgttgatgtttcaatgacctaatggggttggattttcgtggcactaacattttattttatttataaattaacaggtataataatcatatttgtctccaccaaccaactgcatcttttttaaacactttttaattgattcgatcgccctttttagactgactgactatacatggatctacaccaaaattctattgcaatacatttcacatgattaataaattttactatactacatcagaatcttgattcacatgcatgcatagtgatatcttttttaatcaaaatcaaaataaaacactgtaaaaaaaaaagtagtggaatgagttatgaagacgtggtccatagaaaatgcacatcatggtatcatctcactcactcaatttcaaatggggttgagttgagagtaaatgattggtagatggtgatatggagacaaaaggtgtttggtttttatttgagtgatgatcaacttgtcaaacaaagtatagtaataatttgatttgaagtagttataaagaaagacatatatgtatgtatgtatatacagaggtggtttggtttggtagttggttgttgttgtgattgggagtagtgtttgttggtagttatgttatgtattgggttttgtgttttgttttgattcttttcaattggtttgtgtgagaggtggctatgtatgttattgcctctttttatgtgctttgtactttctattctgttctttctgaattctgttgcctattctattctaccaacaccaaacttctttctaagatttaccttaaataattggtcatctgagtgtaaaaatttggtgacagtaacatacgtttgtaagttgtcagatacattaaatagtctcaaaaaattggtttagttagttttcaacaaaggcccattttgttccatgggctaagcataattttgatgcaggcccaatggcccatatatatatatatctatgggcctaaattgagtttttgtttgatacgatttactttgagttcgacttaaaacattattatagattttttttttcattcattttagtgtttaatacgttctataattttgtaacataagtatatgaaaaccaaaagattatctagttcaatccaatattatcctactctctcaaaagggaccaaatggtattccaaaacaatgtatttttgtaagagaattacagaatttaatttaaggttaattaagatttttccccctaaaattttaacatataccaaatcatgcttactgaacttttttgttcgttaaaaattctcggtgaactattgagatagttatatttaaagacttttgtccaattttattcaattttactaattcagtaattgtttatgtactaaatcatacttcccagactttgatgtctactaaatcatgtctctcgaactttaacatgtactaaatcatgccctttaaactttcattcatgttaaacttttcttattaaaattgaacaaaagtccacaatctcaatagttcagagagatttttaacgaccttaaaagttgaaagggcatcatttgatacatgtcaaaattcggaagacaaaaatcctaattagctttaatttaaaaatcaatataccatattgatatctcataatgacgttgataaaaccaagttatgatttgataaatcatgttagatggtttgatattccaaaatgtgataaccatatagacaaaagtaaattgaaaaattaaagtccccaaatgaattctacaagagaaacagagaaaagtttgcatattctgggaacaaaatgttacttgaattcctttaccaatcacagaaaaagcagataccactacatgaagacttatatacaagtcccattacacacaaatatgtatcaaataatcataattgtgtgggaaaaagaaaagtgtaaaccggtttgaaaaaatctctggactttcagcagtcagtgaaagacacatctttgaagcgtgttatcatctaaagctcggtgtcgcataaacggaccatcagttcagacaccattctccgagcaaaaggaatatagcttatgctatacctgaaacagatgacaaattacaaagctttgtaatcagttttgatttgatggtgtacattattgatcacaagttatagaaagtttccttaatagacaagaaggtggtcactctttctcatctccattatagtagtgaagaagagatatgcttttaatgtgaggggagaaactcaccaaaaaagggctaagatctcaattatgatagcaagtattgttaaaatcttgctatgtatctgtaagatgaaaaagagatgtgaaaagttatgtaatgtacttgactttatccattttgttaaagaatatagattgcttactcaccaggagagcacaaatgagtgccaaaacaacacacccaagataaatagctgttgcgaaaactcggacagaatcaaacatcattcccaattgttgcacagggccaagaaggaaggctgtgctgccagtccagggaacaacaaaggaaggaagaatgttaatgtttgtggcagtgttgtctcgagtgaaaactaaaatattatatttgatcctatggaaatgtattcctgtatatttcattagttagagcaggtaagcatgtagttttccaacaaggactaaaaattagaactaatatattgaccaaatggggtgaaataaacatagccttatattcgaactgaaatatcgaaacctaaaatacttcacacacaattctaactctctctcactgactgcaaatacaggaccaactaagcactcaagaactagagaaaatatgcagacctaccttccaacagcagccacattgccaatagtgaataacaatgcaaacttgattggttttgcaaagacgatcagcgactgcagaaaacaaaaagtaacttattaaggaaatgtagcaacaccaccaatcaatcatagcattacattccaaaggattaacaataaaattatacgaaattaagttttataacccttgttcctacttttatgctaaactttgaagcctggttttgctcaaaccaactgagctacttgaaccacttttctaaagtctgttttcttccttgaatagcaccctatatcttaccactctaattcaaatccgaaaatttgatgtaaagtagttcttttttttttctcttgattcatcacagcttaacgccatacaagaatttctcatatagaaatttataccaacagtacactttgttacaacttaaagggttattcatatggttaactgaatcaactgacataaatcatttgaaaaaaggaaattctgcaaactacatcaaaagcaagtaaatttttttaaattcatacaattacaaacataaagtcaaagatttcaatttacataagaagctacaattttcagattgttaagatggaaattgattactaaacacacttgcccaatttctggaataaagaaaaagaaagttgactgagtagatgggcatcataccaggaacataagggccaatccagcgatcaaacaggccgcgaatccgtacattctctgataagatcaaaacccagaaaagcaaaagcgttctaaatgctcagaattgaattgaatgaaaaggaaaatgtgtgagtttgaatttttgggttttggagagaagttaaaagcatacaaacaaacctgagtgggagagagagaacacaagccatcagattgttcatcgtcgaagaaggcgtctcctcctgctcctcgatcgtattcgtcacctgatatggattgattgagctttgcccacattttagaaagctctcttaattagtgtttcaatggctgcctacagcaatgaataatgattcagtactaagtactaaaactatgacccaaaataaagaaaattaagcttcaaatcagtttttttttattaaggaaatccacaaagtaacaaacaataatttaaattacaactaaaatttatataacaactcaaatagaaattaaggtagaaactcaatagtaaattaaaaaaaattaaaaaataatacatgaaataatttttattataattattaaaaaaaattagtcatttactcaagtgaaaaaaatagtccgacaatattcaataatagttattaaattaaattagaagaattattataaatatttcaaataatattactatttatgtaaatgtcttcattttaaaatttaaagaaaaatagctttttatacttttttttttgttaaacatcaaacttcattaaatactaaaactaggccaaactaaaaaatgttctagttagaaacaagaagtgccaactcctcaacattaaaaaaaccaaacagtaaaaaattaaaagcaagtttcgacagtcgatgagccatctcatttctcaactgagggatccaagtaaccgacaactcaggaagaagagccagccccgccaaaacatgaccgaaaacagaagctaacttccagtcaggagccttttgagagttgattccaagcactaaggtttgacaatcagaagcaaaatttacattagactagttgtgcaatatgcagcgttgcactgcgtggaggagagcccatgtctcagcttccagggggacttagcctcgaggcacaccgagaaagcctccacaaccttaccttccaaattggtgatcacaataccaacatcagaattcaagccttttactagtcgcatcgataaacaccacatgatcaccctatagcagaaaatcattagagacattagagctaaggtcaacacctgactgagaatcccatgctacagcaagatcagcggccatagacttaatttgatcaagaaccactgctgaagatggccaaatctggtcgtggtaggcctagtttcttgtggaccagaggacaaaacaaaggcagataccaaattgcctgaaagcctccaaatcgttccagtttctggcctccaaaaaataaggctccagcatccatttgaccagctgcagggggctgttaaaacacagagcttcacttcttattctccattggctagctaaccaaagcgatttggcaagcgggcatttacagaacaaatgttcaactgaatcctctaaattaccacatattgaacaactaacatcattgccaaatatcctttgaagtcgttcctcaaaagggaggatttccctcccaagtttccagaggaaaagtttcatctgctgtgggatattaagcttctaaattctttcccgaattggatcattatcccccaatctactcttgataatagacttataagccacacgaggggaaaactcaccattagtcgcgtccttccaaattaaatgatcttcctgagtatgagggagtagagagatcatatggagggaactcgccacactcggtactaaccaggtactggtttgttgggaatcccaactcctatcatcattcaataataagaaaacatggactgatttagggaccaccataggattgaaggcagcgctaaattagttccaatccaaccagagaatccacggggcatgctagagatcaatgttttgaccattagcaatgaggaagcacgactccttgcgtatgaaatcccgagtagcaaagatacttctagcaccaaaagacaacgatttaggagtatccatagaccaaaataagctggcgtcatttccccaatacttggccttaaagacactaatccataacgaatcctcacccttcgccatcatccaaccaagcttgaccacaagagccaatttaacatcttcaaactttttaaagttgagcacactcccatccaacggtaagcaaagagaattccaattagtaagggacaaatatcgctccttatcggggctacctgtccaccaaaatttcatgatggcttgatccatctcttgacacaaggtcttagggaggagaaatgtggacatcgaatacattgagatactagtcgccaccgcccgaataagggtaaaccaaccagcttgggagagaagcttacaacaccaaccctcaattttagcacaaagacgatccttgataagcgtaaaatccatcaccttgctctttgactacaggatcgggtttcccaggaatttatcatcactattcatgctgtgaaagccaaggatattcacaatctcgaccttctt

SEQ ID NO: 19922 - DNA, 3433 bp, Cannabis sativa
aatagacttatcaagatcccagattctacatacaaagccaaaaatactcttagaaatagaaataatacccgcctatttgttccaaagtaagcaaaaccacccgcacgcccaatcaaaagaatgaattcaccattatcaaaattcagagcacgactgatcgttatcatttgttctatccccagttttgtttccatcagaaaaacgcgtaccttaaatctcttcacccaagccactagagcttggattgtcgagggtcttccaaaaccctgacaattctaagaaagggctctcattggggaggaggggacttgacaagggccgcctcctcgcccacttgaaaattttgatccacttgaatctcaataaccatacttgtttgtgatgtactaggattatccccaacttgaacaacatcacagctacccaggacaccagagttgcattgaagaagatatcctatcctagccagtcgttattgacttgatttggagagggagttggacttcttagatcctcttcttcccctcacccccttagaagaccaagagatcttatcatttttgcctttagagaaggaaatttgcccaacatcgggactcagaaaaaactggtcgaaggactatcagtagatgtgaaaataacaggtgtcacacttccacaagccttttttttttgaaagcttgactttcctcgtctgactgttaagggatgaaaggccccctttaaccactgaaggggagatgagtccagtcaaaatagaggagcccaataatttcttagccaacagggccaccttatcagtattgggcgtcggtaaaaaaaattggttcggggtgatggtgaggtgttctagatttatagatgcatggcttcgtgggggtaattacaacatttgctcagcagtagagcccacattggacatgatactaaggatgatatgactatcattagggttcttatctaattgagtaatagggtgatttgaaattagctcaaggggattgaaatacaccttagagagaattttggcaatggaatctccgtaataattgccaggtgtcgcttttttattcctccctgtacgaaaatcatgtgacgagccactactcgtacttgggatcgtattcgtactacgagtggcaccacaactcacgtcctctagtactgcatacctttcctgcccatcgtacctttttctttcatcaattttgacggtctctcctcaatcgcaagtttcttgccatggtccttgagaagcggcgggggagggaatgcatatgccctttgcttcgtgcatctactcctttcgtggcccaggtagccacagttgaagcaaaaggtgggaagtttcctatatacttaaattgaatccattcccatctgcctctggtaattatactgagaaaaaaaccagctggaagttgttggtcaataagaatatcgaccttgagtttcaaataacctcttaaagcaataactccattcgctgcaccatctgatttaataaaagtgcccaccttatctccgatggcaaaggaattctgggcagccagatatgaagtcggaagaccatgtatctccacccaaaaggctactccagacatattaacacttttccaatgaccatcctcttgccagtctcaaacgttcagtaactgcttagaaattatccacgacgttttcttcaaaacttccaatttatattcattaaactcaaagaaaatctgcaaagaccattccatagttttcatacgtcattttccttccaaagaccagatacctcccaaaatctatttgactcttcctttaggaatctgaggcacccaaagcttttagcgagaaccccacttctggcaacttcatcgttgatctcaaaatcagcttccagctcgagggtgacttcatccaaaaactgttgtcataatagttctatgttttcttctgaaacaaggtttccatctccattaaccagcccctgatttaggtccatgatctccaacctcacaaacacaaaagaaaggccgagaaaggaaaataggggagaaatagagaaaaagcacccgactacaaacgcaaccagtaacacaccggaagaaagaataaaaccaacaactcacacacgggagcacaaaaagaagatattacttgaattgatggcatatccagaatttaagtcgagggatagtacttaatcatgcaaaaaaaaaatattataatttaaaatatttacaatattaataaattaaaataactatataaatattttaattcttattttaataattttttcattctaaaaatttatagttgcaaaaataaagtttaaatagttttgcttatcacgtgtataaaaaaaatacagtactcatgtgtgtaattaaatatttgaacctttttttaggcactataaattatttgaaaattttgcaggtaatctaaaataagtacaacgtacacatttatgaaaaaaaattggaacaaaaacttttttgaatacaaaaacagataaaagtctaccgaaacaagattttagagagtgtactactatagacttatacccaaaagtttcttaaaagtttcgcaacaaaaagaaaaacgaacaataatatcacaaacatactatcctttgccttttatctaaacgttgtttcttaacatgtcgttgatttggttgaagtgtggaatagagagcttctccttaatttcgcaatcaaataaaaaatgattagagatgcataagaggaaaatgaaaatgcaagtcaaataataatttttttctaatttattttgtctacaaatgaagttaagttgtacacttccttagatatatataattgaatttactgttaattacaactgaaatttagaaatggaaatgagaatcttgaattaagctattacgtacaatcccattaaaagtataagtgtagatattttttttgatgaattaagtgtagatattgttaattattacgtacattcccattaaaactataagtgtagatatataatgtcacttttaccagcacagttgttactgagctggtaacttttaccaacgcattttgcaaactgtgctgacaaaaaaatcaaagttttaccagcgcaaatttgcagtggctaaaatctaacttttactgaaaagtcatttctgccagtacttttcattttgtattggcaaaagttctaataccaacgttgatttaccaacccgttttgccaacacatcagaagtaaattttattttaccaatgcaatatcaaacttttgccagtacaaaattgtgctggcaaaagtgacatttcttgtagtatatattgattggttttgggctttaaagctttgtaagtttatttgttgttttggtagtgcaagtgtggatacttgattattgtgatagttttttccacagttttgtattgtttgttcgtgt

SEQ ID NO: 19923 - DNA, 1613 bp, Cannabis sativa
  modified_base (750)..(760): a, c, t, g, unknown or other
atttattatttaatataatacgacccttatacggcgtaccaaacgagccctaagtctcagttacaaagtgaaaacaactagaatcagttggaaccataaccattccatactacctcctctattgttcctctaaactacctacctttattttctaaactacacccaacaagaaggatttactccaccatttatgcctaagtttatcaactaaaactttacaatcaaattcaaaagtaggaattggcagtttaacagcatcacaccaagtcaaagcgtcgtgcagggctagagcttcagcaagtaaaggggatagtgtattttaccttgaggagtaacaaccagctaccagtcttccattttaggagttaacaactgtcccaaatcgaatcctcttactaaattgatctacagaggcatccacattcaacttgaaagttcttgatttgggtaggacaaactcatcagcaatagaatcatttgtggaattttggtagaaacatcatcaccatcctgagccaacaacggaagacttagcgatagcaatcaaatagtcctgcaaataagaaaagaccaactttctacaacttcatagttaagcttgtcagaattattaaataaaacaaattttttactattccatatcatccaaatgataccaaaaaataaagggatatatttcttatcatatttaccaaaaccttctaacaaaaaatttgtaatatcaagatacttattttttttttttttttnnnnnnnnnnnaactttttattcaaaagaacaaacaagatacaaaacaaaggccggaggcagcaaccaaccgccacacaaggagaagggcagctaccaactattcactaccctccatatataactatcttttcctttagcattgatacaatgaaacccaacaactctagccttaaccatacatttaatctctttgctaagaaagaaagctgagtgacaaatagcattaaagagacaatcattcttgtttctccacaactggtatagagtagctgaatagatagcattcaaaatcaactcagccagattgggtttggctgggcactttctctcctgcaactccctaaagctcttcgaccaactcaaacagccagcccaattttccacacaatcaacaagttttctggtataaatgcagtccacaaacaaatggttatgagttcctaaatctctctcacaaaccacacaaaaatctgaaggaatggtcataattctgctcaaatgatcacgagtgagcagttgttcattgatgatttgccagaaaatgaacctgtgtttagggataataaacttgtgccaaacagtagcagcatagtcaatcttcgctgccccaatcagttcaatataaaatctgtaaactttgaacttacccccttttatcgcctggttcatcatgcccatgcttgtcatgtttcggatcttcaaaagtttcttgaaataccagttgaagtttgtttttataggataagaccaaatatcctgggtctttaagtaaatggagttgatccatttaacccaaaggttatcttgtttgctcgagagtgcccataagtgtttagctaccatggccaagttccacttcttc

SEQ ID NO: 19924 - DNA, 2198 bp, Cannabis sativa
atatattttcttctacacagaacagaggccacaccaagtttcaccatgactgattcaattctcaatatgtgtaaggagtgaagttcaccattgaaagagagcttcttggaagaatgaagttgtgtgatgatttaattaccttttatgtcaaaaactgtgttttctactactttttttctatgcaggaaaagaaaaaaaaaacagctttgttataagaatatatacagagagacaatacaatagaacagatacaattttagtcatcttttaattttttttcccttattttaattagccaacttaataatttatcataatagataatatgaatatgtattttgcaaatcaatggcttccaaactatgttgaagataaatgtagcataatagtttttttactgtcaaaaaaagtttcagtttggctattttttctattacagcacactaaaacacacacaactcactagcttaagcaacaacaaaggaaaaatcatacaaagagacatgttcaatgttacttaaaggataactataaattttgaattttgagaatctgggcagtttaataatttccattctattcgacctcagaagttggttctggtgttttgaattaaatttcattgcgggatgcctcacatgtgaacttttgtttacgtactataaactttgtttgtttgatatacttaaattctatgaatccagacaaatcatacacaaacaaacagaacaaaatctactgagataataattatttatgtatataagagtttgagagaaatggaagggcagccccaaaaacaaaatgaggaaaagaaagaaaggccaatgaattactctgtaataattggtccaaaaaggttttacaattgggaagggattcaatacaaaattttgaatcaatacctaactgtgataataattatttatgtaatgtaatcactctgaatcaaatgttgtattgtaatttatataaaatgaagatgaatttttgtttaagtagtaggaggattttggctcaaatttcttcttctaatgacttgtggttgatttgaatcgtcttcttcttcatcactactctcatcatcactgctttcatcgttactgtcatcatcatcatcatcatcactgcttccatcttcatcatcattatcatcatcttcactttcatcttcttcatcactatcatcagaatcatctgagttaggttcttcatcagaatcaacctcattgtcttcatcttcttcactatcatcatcatcctcatcgctagagtaataatcattttcaatagcatccttgttttcaggaacaataacttgtttctccttactaacttcagccattggagacctgcaaacttactcaattagttcatatacattaatttcttaatcatcaataaagaaaaattatttcttttctttattatatgatcacttggaagtgacccactatacccaaaaacaattagtcaaaacaaattaagagaaaattaaatcatgaaaccataaaagccatggttaaataagaaggaaaaaccctaaaccagataaaaatctagggcattttcaaaaatttaaaacaaatacaaaacactacttgtataattccaaatgccataattacgaaatcccagatggatgatccctcaactgggaagaacaagtataattttaaaaaataaattgaaagcagtaatagaaacccaaatacatcaatcaatttaaacctaaaacaaaaggatagaagagatttctgatgaaatgtaccttcaaagatttgatttttttttctttctttttgctgtgaattgaattgagaaagaaagtgaatgatggagtagggttgaggagttaggctcagagaatgtttgactttttctatggttttgattctgtataggtatctctcggtgggtgggtcagtatgtgggccgggcgcccgatgacgtttctgaaagttcgtggcccatccaaaataaagatgggctgagacgaattgggccgcgacccatcttaatttttttttaaaaaaatgttaccacattcataaatgtgtaattactaattattagggtaataattatatagtctagtaattacattatagtgtgttttgatattagatggtaattatacatgaatttctaatattttatttggcaaaaaaattagtaattttataagaaaataatat

SEQ ID NO: 19925 - DNA, 2895 bp, Cannabis sativa
  modified_base (2249)..(2258): a, c, t, g, unknown or other
acataatttactttaatataaaacgtatatatatatgtcgctttccaaaaacaaaagttatacatgtctgtaaatagtatttgaatttttgttttattttcagaaaaaggttgtttaaaatttaatttgaattagtgtagcagataatgctaagaatataatatcttattaaaaataataaaagaaagagagaaagagaatgatgaatgatgaataacgaataattaattattggtaaggggtagcgacataacgtcaataagcaattgcataaataaataaatagaatagtataacataattactacttttataacaaaaagaattaatacaactttgattgcagcataacataactacaacagtttttattgattacaaacaaaagcaaaacgaccactttcaacttttgaacacatcaagacttggagtatcgaaagctattttaactacacaaaacaccaagcctccttattctttctctctctaatgaacaaataatttgaccatccatgtacacatggtgatagaaggagtcgtcgtctatcactatcttctgcaaaaacgttcccagtaccagaaaatcttactttacaaccacaagggtagtcctacaactgatggtgaatcttgactcgttaaaataatttttgcctaccaacttcaactctaacccataatttccatggaagaaggattagctgtatctttataaccatctttgtctactatttcattgtctccttcatgattttgactgagattctcactttcacaattctcagtagcaggttcagcaggctgttgttgctgttcctgcccacccatcatgtgcattaggagctcctcaggtctcatatcgtacccagtattctccgggtcatcgacttttttagtcttcttattgtataaagcatcgagttggtggaaataaggacaagtctttgaatcttcaacccttctcttattgctgtctttcaccctcttgaagtatttgtttatgttttcccatttctctttacacctctttgaactccggttgtaaccaagctttctcatggctgccgaaatatcctcccatagtggtcctttaggtccattatcttgatactgtgtatcgagattagttctcagcctaatcaaagcatcaacttcatctttaggccaccgagacgaactaacctgtacaaacttcttattattgttgaacttttcttgattgtccaaacatgtctgttcatcatttccactatgattcttttcctgcttatccacatctttctccacactcacaattgggtactcaggaaattgaaatggttcagtttgttctgaaaacttcttcaagaatgcaagcacagcagcatcctttgcagctgcaatggacctttcttgaaccagcaaatcgctttctcttttaattctctccaattcttgcttcttccacacctcttcccttgctaaccgatcctgctcgcacttctctaatgtttcaatgaacttcctttgtagcttctcttgactatctgtcacttccttcattagcctctcaaaaaactgagtcaatctcttcttctccttacgcatacctttagattcttcgctcgaagaagaaatgttagaaggcgaactatcatccaaatttgaagctggcttatgaacagaacatgggatagcattgataacaacattactaggactcgttcttgttgtccccgcagttgttttagattctcctaatgaagtgttaacttggtccccggaaggaggaaaaggatgatcaaatgagtggtgatctaaagcctctaattgctcaaaaaaccgataagcctttccattggatttcccagacctaccatctctagttcttttatggtacttatagatgttctcaaacttctccttacatttcttggcacttcgattgaatccatgctcactcattttcctacataagaaaaaccaaaaatcccatcttccacttcaacaatctaaattcaaaattatcaatcaaaatagcaatttggtttcacttttatgaaacccttttacataaaattaagttcaaccaatttactcgtcggaaattttgtttgaatgcaagaaaagctcaagtccaaaaatttcttgttctggtaatataaagtacacaagtaaagaaaacaatatcttaacaaaagtagaaaagaaaatcacatcactatctatacaactttcccgagaaaacaataaagagagagagagagagnnnnnnnnnnagagagagagagagagagagctctaaaaagcacagagaataaagaattacctggaaacctcttcccaaagtggagctttgatgcttgagtctctaaacttggcatccatatcagaccttatgtctaacaaagccaaagtctcttggcgaggccaccggttacctaaccagttccggtcaccatcttcagctcccactctctcttcctctcctagcccaactggggccagctcacttgagccaccaacctccccattttccgggttggtggcagttagattttccggcaaagttgaattttccagcataagtgaaaacccaagtaaatttacagtcacgggcaagagtaattggctggtaaagaaggtgaaaaaaggaaattgtgggttctgtttgctaagtggagagaagaaatgggtaaagggtaaatcttgatattgtttccaaagcggttgagaacaaattgggtgggtatttttgtgtgtaaatgacttttgtgacaaaaagaggcggtgaattagggtttcttttttatgctaataaaaataaaattaaaagattggatcaaaaataaataaataaatgaaataaaaagaaggtgtggtgtggtgatcagctgggacctatacttttatcaa

SEQ ID NO: 19926 - DNA, 5090 bp, Cannabis sativa
ttgatatttaccaaatcatacccccgaacttttttatgtacacaatcatgtattctgaacttttattcatgttagacttttcttactaaaattgaacaaaaatctttaaattcaataatcctaatagttaagaaagaatttttaacgaccttaaaagttaaggaagcatatataaaaattcggaggtaaatcttaattaacttatattttacaatattatttagcttagttttatcaaaatattttaaaaagtttaacgatacacaacttttatagcagtctattatagatgtcttaaaccaaagtaacattctcatctcggaataaatttcatagagataatttttaaaaattacaaaaatacaatttgtatggaatttttaatattttttataattttttagattttatttacataaaatacgatcttttagtattttttttattatattcttgaattttgttgttaagtttttattatttatatattattttttatgttattttttttttattttttataaaataccttaaaaaaaaatttgttgtgttccatatttgttgaggtagtcttaagttaataagtaaacttttttccattcaaaaagtagattagactagaatcggatcaacttgcattttctttactaattttcatatttttgtgcctaattttggtgtgtttaatttttaatcaaagctatttctttcggcaatgtgaggagttgtactcgtagttcttcttcaatgaccactgtaatggtgatcctccgtcgagggacgacgcttagtacaattccatacggcgtcgtttccagattcatcactgtttactacctacgttctctcgccatttccattgccatgcccaagttttactctgcatcatcttcttcgaaccccaacagattaagcctgaacccatttcccgaattgatttctttgaacaaaaggatctcccaattgatccgtactggtcggattggtgaagccagggaggtttttgatggtttgaagatccgaaatgttgtaacttggaattcaatgataagtgggtatgtgaaacgaagggaaatggcgaaagcacgtaaggtgtttgatgaaatgcctgaaagagatgttgtttcctggaatttgatgatatctggctatgtatcttatcatgggggtaaggctattgaggaagcacgaaagctgtttgatgaaatgcctgagagggattgtgtttcttggaataccatgattagtgggtatgccaagaataaggagatttctctagctttgcaactttttaatagcatgccagagcggaatgttgtctcttggaatgcattgatcactgggtttttaaggaatggtgatgttgttaatgctgttgatttctttgacagaatgcctgagcgtgatgcggcttcggttaatgcgcttgtttcgggtcttattcagaatggtaagttggatgaagctgctaagattctgcttgaatgtgggaacaaggatggcctgagggaagaattggttcatggttataatacactcattgctggctatggtcagagaggtgaaatcgaagaagctcggagactgtttgatgagatacccttttatgatgataaggggaaagaagggaataagaggtttgagagaaatgtggtatcttggaattccatgattatgtgctatttgaaagctaaagatattgtctctgccaggaaactttttgaccaaatgacagaacgagataccttctcttggaataccatgatcactggctatgttcatgtgttggatatggaaaaggcctctaacctctttggtaaaatgccttatcctgattcactaacatggaattcaatggtctcggggtttgcagaaattggcagtttaaaacttgctatggactattttgagaggatgccccaaaagaacttggtctcttggaactccattatagctggatatgagaaaaacgaaaactacaaagattcgattaagcttttcactcggatgcaacatgaaggagagaaacatgatcgccacactttgtcttcaattctcagcgcgtctagcgggttggtggatctgcaccttggtagacaggttcatcaattggttacaaagactgttatggcagatgcaccagtgaacaactccctcataaccatgtattcaagatgtggggcaataaaagaggcaaggatcatcttcaatgagatgaaacaacaaaaagatgtaatttcttggaatgcaatgattggaggttatgcagctcatggtgttgctgtagatgctttagaactttttcaactgatgaaggaactcaatgttcaacccactcacataacatttattgcagtgttgaatgcttgtgctcatgcaggcttagttaaagaaggccgaaagcatttcgaatcgatgattcgtgaatttggaatcaggccacaagttgaacactatgcatccctagtcgatatcattagccggcaagggcagcttgaggaagccttggatttgatcaacaacatgccattcaaaccagacaaggcagtttggggagcttttctaggtggatgtaaagtgcataacaatgttcatttggctcaacttgctgctgagtctttgatgagactagaaccagaaagctcagcaccctatgtgttgttgcacaatatgtatgctgatttagggcaatgggataatgcaggcaagataagactggtaatggatgacaataacatcatcaagaaacgaggatatagtagaatagatttttaaatggttaaccaattttactatcagatgttgaaacccaaaaagggaaaacaaaaaaaggtgtcatctgtttacgtctgagttaaacttggatatggaagtcttctttcgtttctcgaaggtaaagcaaacattgccaaggcctcatgttacagtccaaaagaagcccatcatgctattagagaagcaagttctaatgctgagcttcaaccaaggtattatcagtctttaccaatctctttattaaaaagcatatgccttttcttttctcgtattcatagtttttcttcattttttactattttagtgcacttgagcatggcaaaggacaaattatatgactgccctttaatgggtaggaagtttagagccatgtttcaatcaacagaagacaatgtgaatgcacaaagaaagaaaagtgcattcttcatcgatgatactaacattgaaaagcttgcacattactacaagaggaaggacacgacttcattgaggtacttgattagttccacattgctttttgcattgagttggccccaaggggtacccactttgtggagagagagtcacaaattaatgagtaaaacgtcactaatgtaatgatattaactaattaaggattaatacgtgccaattgatttgatatttactataagtttcaaaaatataacttaaatattatttctgttaaaaattaaacttaaatatttatctgttagtatttatactataattttttttcatatcagtttttaatttcttcaattgttttcatttgagtattttgggcatgtataaccattctaataatctttattagttacattaatgacctacaaacgagatgaactaaatttcaatattcttgtaatttatcaagaaatgcttgcccaaacatcattagttcaatcgagcaatctcacaaatgaaaaatgaaaaatattattggaaaagtaagtgcaacgtaaactagatgataatgacatatcatcattacaaatatataagtagtacttatcatcattaggaatgtttcggtaaggcctttatattttgatatgtgaaaataattttttttatgttatagttatttaagattttataaatttttaaaaagtattgagtaattcacaatgttgaaaacaagatttatatattttatggtatacatgattatttttttcttaagtaattgtgtaaattttattttcggcattgtaaactattcagaattttttaaaaatttacgtgtagtcataagtaatttacgcgaacatacaaaacaattaaactaaaaaagtttaataaatattgaaaagataaataatctaccggaacaactattaaattagtaaaattttcaaatttatttaatagaatctgataaagttgcatatcaaaatcaatttaaaagcatttgtattgagaaagaacattgactacttggaaaaataaaccaatcagaattaacattaaaagagaaaatattaacatttctcttattgtgccaaaaaaaaaaaaagaccttgttaagtttggcagtccatatgagtttctgaaaaaatagggtgccaaatactattttggtatcttcactcatttcttcaaaaaaaaacttttttaatttgaaaaaatgctaaaagatatttagagtatttaacactcttgctaagtataatttattattggtgcaatttaatatcaaatttcagttaaattattttattgcatattataaaaaatcgttaactaattataagtcgtgatttcaataaatagatacctttacaatactcgtttaacttagtgataatatcttttaggcattttatcaaacagattatgggcaaagtatcattcttctttttcctactttttattttaagaaaataatcagctcctataagttgacgggagagaataaaatgttgaaagcaatccatgaatattctattttttatttcttttattatttatagctatgaaatagcaaattatttggtaaaagatcacaatctaattcattttcatgttattaaaatttgtaaaatatatatatatataatttaataatactatgcgaggaagtgtcattataaaatctaacaaaaaggttagagaaagtgacacaataatagattaaattagagcattgctattaggcaccatgcttaacaccttctcgacatgtcacgttgtgattgactagcgatattcctttttttctttctgaaagaagattctttattaatcaactgtccttcaaaatcaaggacattaacatagtaggaatggaatccctactaataatacaatca

SEQ ID NO: 19927 - DNA, 4386 bp, Cannabis sativa
attagaattcaatttttagcatccaatctaatccaattgtaattggatatctaactttttataattaaattgaattggttcggttcaattggattggattggaggttggctaccctacctaatatgatagctcatatagcaatacaataattaattatttttatatataagaggaggaagtgggtgtaaaaagatatctatatctaactagtacctaattaaacaaacactgttgcaatcgactatggagggtgcgattcggtgctctgccaactatgttcctctatcgccgatcagcttcttgaagcgttctgccatagtttacagtgacagaccttcggtggtctacggaaatgtgcaatacacttggtcccaaacctttgaaagatgcaaaagactggcctctgctatttctcatttgggaatatcttcaggacatgtggtgagagatttttattctaactaatcattaatcactttccaacttttgattctggatcagtttttgtttgacaattaaattgattacaggtttttgattttctcttgtttttctacagttgttgttgttgtttagaattgtaaaaggttagaatttaggattaaggtgatcaatcgaccagaataattcatggttactttgcctttggaaaagtagcattgaataaaatttaatcaaataaataatttagtcaagaaatttagataattccgtctcaaatctatatgtatgtatattgacaaaaaaaaattatacaaactcgtttattattattgtttctctttctcatattcaatccaatactatttaattgggttagactgcagtctactactaaaactagttttgtgtggattgtatagttcgcttttgatgtttaatacttacttgattttgattgattgtttgcttaccattcatgattcatgaaatcaaaatgtttgaattcatcaagtttttcactttttcgcttggccagatggatagaatggtttgtagtactttgtagcaccaatggattttaatataatacactagactttaacttccaattgctgaaatgatcagcactagaaatgcaattcaagattaattcttaattgaactctctatattgaaaggacatataagagttcttcatcgaaaagcaatcgtatagaatttaaaaatgtatcgtgccttacattcttgtgaggtttgaggttgaaggtttgagctgttcacacacacttttagttcctgcaaagtgcaaactctatccttatatggttcttgataattgttattcacttgagcaggttgctgttctggctcctaatattccagcaatgtatgagctgcattttggagtaccaatggcaggagccattctctgtacacttaacatacgccatgattctgcaatggtgtcagtattattaagacattcggaggccaaagtcttctttgttgattaccaattcctccatattgctcagggagccattgacatgttatcaaaaaaaggttccaagccaccccttctagtcttaattccagagtgtgatgatgatcaactatccactgacattagtagtagcagcaatgccatttccgcttctgtgaagttagaatacgagcaactactatcaacggggaatcttgattttgaggtcataataccaaaagatgaatgggatcccatctcactcaactatacttcaggcacaacatctagccccaagggtgtcatttacagccacagaggtgcatatctcaattcattggcaggggttcttctgaatgaaatgcactcaatggttgtctatttgtggtgtgttcccatgttccactgcaatggttggtgtctcccctggggaatcgctgctcaaggcggtacaaacgtctgcctaaggaatgtcactgcaaagggaatttttgactctatagctaagcacaaagtaacccacatgggaggagcacctactgttttgaatatgatcataaatgcatcagccacagagcggaaaccacttccatccaaggtatcgatcatgaccggtgctgctccaccgcccccgtcactactttttaagatggaagaaatggggttcaatgtgactcattcttatggtttgactgaaacatatggccctggaactgtttgtacttggaaacccgaatgggattctttgcctagagatgcacaggcaaaactaaagtcacgacagggtgttcaacatcttggcattgaagaactagatgtgaaagatcctgtaacactgaagagtgtaccagctaatgcaaagataataggtgaggttatgtttagaggaaacactgtcatgaatggatatttgaaaaatgtcaaagcaacacaagaggcttttgatggtggttggtttcgaactggggacttaggagtgaaacatccagatggctatgtcgagctaaaggatcggtccaaagatatcatcatttctgggggtgaaaatataagcacaattgaggttgaatctgtactttatagccatccagcggtttttgaggccgcggttgtagcaagacctgatgaccactggggagagacaccttgtgcgtttgttaatgtgaagagtggttgtaatgtgagtggtgatgagattattaacttttgtagaagtcgtttgcctcattacatggctccacgaactgttgtttttcaagatttgccaaaaacttctactggaaaggtgcaaaagtttgttcttagagacaaggctaagtccatgggaagcctcacaaagaagaatatcagtaaattgtaaggcaacttttattaaaaatcaacaaccatttttcatttaaatttattgaaaaaaccatagtttggacaattatgttggaatgtataataatgtgaaaactatcttctcaaaataaataaataaattatgtgaaaactaagtaatagccttattatctatgtgtaaacataaaaagagatcaagcttctatttaaaactgtgtgggtggactattgaataaaatccacccttttcaatcttccttaggggaaaaagtatgtatggaaattgttttatgtgtcagtgtcacaacttactaagggtgtgggacaaagtcaaatatgttattttgagccacttttagagtggctgtggcttgcattggtgatgctctatcaccatgagcaatagctcctttaaaactagttttctttaatataaagaagagaagatgtgaaaaaaggtaaaaactatagtccatcaaataatgtattttaaagaactatataaaaaagagttttttgcggcataaatatctaagtttaactctcatttgtaaataaatacctaagtttaatttttgacggtaataatacataagttataattctaaaactaagtatttgattgttaagtgttaagtaaattgccacgtgccgatttctgattggtccaagtcattaaaaagttttatgtaaaagaataatttaaatattccaataagaaaataacatgtggataatgacttaatatttagagtaatttgcggcataaatacttaagttttatgccgagtagcagataaatacctaagtcctattttttgcggtaaaaataccttccgtcactactctggaacttccgtaggtacctccccattttttgcattgtaatgtgtcaggtgtcgtgccatgtcataaatatatatgccacatcactcacacctcttaaaactaacccatgccacaactttaattaaaccctcctaaaatcaaaattaatttttttacaaaaatagccaataatatcaatttaaattataaaaaaaaaaataacttttaattaaaattgatatataatctaaatcaggatagaaaaaaaaatgaaagaattaaaattaaattttacatttaaattaaaaacaaaacaaaatataacattggttctgaaaaaagaacatttaccatttttgcaaaaaaatccgaaacttttttgagagagttgagagaaaaattagggttcgacagtcgaaggttgaagacgatcgaaggttgaactgtaaaacgcaacagtcgaaggttgaagacgatcgaaggttgaagcttaaaacgggacagtgtcgagggtatggctttttttcagggacgatggtggtgatccccctgactacggtatgtttcctttttgtaatttcttttgtcagttttggaatatggaattgatgggttctctcctacttttagtcttgttgtgtgatttagggtttagaaaatgatggggattacgaagtgtgtgttttctgttataaaaaggtattttttttttggagtattattcagttaatagtgatgggttttgttttcttctgttccatttgacataaagaaatgctatttttgg

SEQ ID NO: 19928 - DNA, 3145 bp, Cannabis sativa
tgattaaattctctattttgttaactttatatttttcaaaaggtataaaataatactctaaactaattttttatcaaaataaaatctaatataataattaacttgacctagatgtgttatgaacgaactggttgtatttttttgtctgtgatcatgtaaaaaactgtaaaaaaaatgatgaaaattgaggttaaagtattattttgtaccatgttttattatataaggttcaatattatcatttaacaacataagtgatctgatcaataatttttataaaaaataatatttaaaatagtattattgtgttttaagaaaatttggtcccacaaaatgtaaattagtatgtatctatatttttatatttatataatttgtgtatgtgcatgtaaaaaaataataattaattaagtagtcgcacatatcctcgatttaaaaattgtatatttctatatgtgattagcttattatttttagtataaagtgtgaattaagatttttatttaattaattttcttttgggaaatgaaaatatattagcatctccatcatcacatgggtcatgtgctacatgataaaactattaagccttaaatacatgaccactttttcatgtaatatataatatgacaataaagaatttattactggctatatttgccatgaaaaaaaaatcatgaatttattatttttatgcttttagagctagtaaacaaagattagatgtgataaaattattatatcatattttgtttaacatatatatctagggggtccctattatatatattatatttatatcctgaatttgttatatgtagttgactctaacatgttttaatatatttgttgttattattatattaaaatattaaacaataaaattataacaataaacaaaatgagagtgataaaattatggtaaccaaactatgaactacaaaaatttagaaatacattttaaaaaaaatggtcagtgaaatccaccaataatatttaaataattgtgtgtatttatagtaatatttatagccaattattataattttgattgatatagttttacacttagtataattattataaaaatattattaatttttgacataaaattatcatatatttttatttttattattttgcagaataattatcatacattatacaatttacactaaatataagaaagaattacatatcatatttcatatacatagttgatgcacttaattcaacttgaagaacataagataagacttcaaagaaaaatgaagtatgatacagtatatgattacttaatatttgtagaaaaataattttgagactgagaatatgttgtttttggagagatatattttcactaatggagtttaaattctctggatatattcttaatattttttttcacaaaatagtaacaagaggtatactttgtacaaatttttttatatccatttatttatataactattacataatattgtagatatttttggaacactttattttatggccctcaaatctaagtacatcaaatcaagtttagagtatataaaaactcaatttaagtacataaataaactcacaaacaatacataatgaaatgcattttttaaaataaaaagagacaaaattttatttacttatatatagaatattttgcagtgctctttcattacaaaaaataatcttatttttagttacaaggaaatttgtaattaaaagtaaaaaagttgtaactaaacataaattatcatttttatattattaataaaaagttcgttgctaaaagtattagtcacaaaatttacaatttattatcaataaataaatttttagtcacaacactttttgtgattataattaaattagtgataatttatatttaaatactactttttaatgacaagtaattttgattgtgactaaagtattttggtagtgttacattgtttatcttaaatattttttctttttgttattcgagtttttctacaatttcttgtttaattatttttcagagagatataattacgatattttttattgtaaaaacacctcatgtttattagtagtggaatacaaacaaaacatattaattatatgtataagtaacatcattatttattatgatgagtaaccatttggtattggtactagaaagaagataggtcttccaatacaacaagaaatttccactttagcttttttccaaatctaagtcaaacaaagagtattcacatggagggtaattgtaattgcattgctttctcaaagtcacttttaaattgtttgtatttgcatcaaaaagtacattttaatataatagtgctatataggtggttttagcctttagggtaatttgctagtttacaaacaaaattaaacttattatttggtgtgaactattattttacactacaaattaatcattagctattttataaatgagtttcacatggtcttcactctattttttcctaacaaactaatatcaaagtatattgaaattaaacattccctcatcctattttcaagcaattaatcaaaaggaatcactaaggtgaagaaaaagaaaatagaatactatactaatgcagtaaaagtacttttagagaaaatctacagttaatccttttaagtaattttcagatatattttctattttgtttcgatatttaaaagtctgtcaattttttttttttttatagttatgtaaattataattatttaagagtatttgtaattttttttttttaattttaaatagtttataatatcgaaataatcttcacaaatattttattgcatgcatgactattttttcttatacgaatggtaagtaactatttgaactttatttttcacacaaaaagctattaaaaaaataaaaaaatttactgatggtcctaaataactactacgtatactttcatggttttttttttatatatatataaaaaaaaaactaccaaaattttagttagagtattttcaatcatgctatctaaagacacttcttaactaaaatatagagtggaattttaaaaaaatgagcttcaactatataagaactggttctctataatagagaatagatagggagcttcctacgtttttcaataatttttaatcaaaagtacta

SEQ ID NO: 19929 - DNA, 1858 bp, Cannabis sativa
tgcaccccaggctgtacttgttgaaacattccaggagtgggaatcatcgtgccagttccagatgagacaacagatgaaccaagaccattcatcatgttctgattcatacccattccactttgtaccatttgtgctcctgagagatttccttggctcatcgcaggtacagactgacccatactaacacctccttgaagattattcagtggttgagagaccccaatgtttgagtttccagacacattagaagtagctgctgtgaactgaccatggcttgggttttgtgtaacctgtgtaagaccttggttttgagggacctgtgtaagacttccaggccctgatattgaggtgataactgattgaccagttggcaatatgttctgagcaggtgtagaagatgtcattccacttgagatcatgtttgacatatgcatttggataggagtttgacccataggtaaggctgaagaatgcatagcttgacgtgcttgtgacagattatttaggatgttcacatttgcaggagcaggaccaacaggacgcatgggttgtggcacactactcactattgaaggttttaaatctggcccagtgtcagtatttgaaagcatgtcctgagaagcagaagatggtgaagaagtctgcaacgggactccttgggaagcagcacgggcaacagatggaaggtgcgaatgtgtgtaggtaggcccagaaatcatggaacttactgtacttggctcctgaagatacatttataatgtcatggctatttacacaccaattaaatataaagaacacaaacttcatcctttggaaaaataacaaaataaaaaaaagagtgcatgaatcatacaacttttacggtagcaggaggcatgtttgcagcagaaataggccggctcataacagatccgttcactatgttcaagaaaaataatgtaagtcttccaccaattaaaaaaaaaaagaaaatctaattaccttactacttatgatctttagttcattgacttggtaaacatccggtccatttcacttatcatacatagcaactcaattaacactatagaagccttcaataaaaaaaaattctcggaggtgaatgaaaaaagaaaattaaaagaaaaatagaggggcacatacttaaaactacattgaaattttttaaagcttttaagtaaacaaaaatacttgttattatttaatatcgggttaattgtggcataagtatccaaaattttgaatttgtaagcaacataaactcaatgagtttttttagcggcataagtacacaatcttagtaaaactgtaattttcttctagtttcgtcaatacaagctctgttttgaatttcttaaaagaatatttggaagtaattgatactacatgttttcatcccgacctaatgatttagaatgtgggtcttatatgtgttctgtttaagacactaatggagtctgtactgacaaaactagacaatactaatattgggtacttatgccactaaaaaataattagtaaattaatgccgcttacaaactcaaaactttggatacttatgcctctatttaccttttaatatatctgagaggaatgaaagcttctaagtaaaatgctgaatatattcaatgatgcaaactgaaatatccaataataggaaaaggataaccaaattgactggaataaacaacctgatggcatagatgtcggaggtgtcactataacagaagtaacaggagccgtgtccatttttacaggactttgattagaaggcaaacttggaactccagcccgacttaaagcagcacgggcctccaaaaaattctctgaaagtagaacaagaaaatgaggatgcttc

SEQ ID NO: 19930 - DNA, 3271 bp, Cannabis sativa
accatcctgcagaggagattttacaaggtaaggtaaacataattgatgggttatagattaagactattataattaatgagaaaatatatcaaaatataaaatgaaaaccgacgaaacaatgagcagctctcgcaagaattgttgtaccactaccagattgtggagcgcaaacaaaagcagtccgtatattcatatgaaatgctaacataatttctacccccaaagaaccaaataataataataataattaaatgcattggtacagaaagagatggattgatggcatagtggtaatttcatactcgaaatagaacaaattaataataacagagtaaacatttttcattagcataaacaaagaacacagacacaaacactattatttgctatctaagtgatctcaatagtgcatcagagagcagaaactaggacaagcaacacatccagcgtacaaattaatcgtgtataatacataccaaccgtatcaagacttgatgagacaggtacaattcccatctgagaaacagctccatgggagggtcggaatcctaaaacaccgcaaaatccagcaggtactctgacatccccaacagtgtcaatacctgaaaaccaccgtattagtaagaaatacaattttttattcgaagacgctcaccataatacaattaaacaggaatattgttccaaacatatatacacacaaattcgaacttaacaaaatttaataagctgaggcagacaagtgggataacttaattagctaccgaaagagcatgtaaaagaagaagacaagaagagagggaaaaacaagactcacccaaagcaaaatcaacaagcttggcagctacagcaacagaagctccactagaagctccacccggtactctttcaggcacagcgggatttgtgggggcaccataatgcttattctccccacttatactgccccaaaacaaaggaaccattgtttagcttttggttaaaatatgagagaatcagaaaacaaatatataaaatgtatagaaagacaaactagagcatacatgatctctttgaaccaaaaatcacattcattttctcaaccaatgctggaaacgaaaccgaaacagcaaggcatttgcattaaaaggaaaaaaaaatggttcaaattcttcagcatattaagaataaaatacatacccgtaggctaattcatctacaacagttttaccaatgcaagtggctcctccttcaacaagagtggaaaccacagagcatgttccagaagctgcttcatgtgttctggcccagtctggatgaccaaaccccgtaacgtgtccttcgatgtcaaatctatcaattttaaattaagaaatattacctcagaatcagaacaaatattcccacacaaaaaaaaatgtaaactttatatattaacaacctattcacacagataaacatttacacaaacagtttgataactgcaaatataattcatttctattattacaatataacaacaaatttgagattttcattatctgggttctaacacaatttagtttaaacactaaaataagccaatctattcaaaaaaaacttatcatagtaaactcaatccaaactctcaaatagcatgatataaatatatatatattaactcaatacacactcatagacatttacacaaaaagtttcataactgcaaatataattcatttcaattatacaacacatttgatattttcaattaaattcaagtttactccttaaaccctaaagttagccaatcaatttaaaaaacttatccaaaatctcaaatagcattatatatataaatatattaactcaatacacacttataaagatttacacaaacagtttcatatctgaatatataattcatttctattattcacaatataaacacatttaagattttcattatctgtgttctaacacaaatcaatttttaacactaaaattagccaagcaattcaaaaaatacttatcatagtaaactcaatccaaaatctcaaatatatatatatatattaactcagtacacactcatagacatttacacaaacagtttcaaaacagcaatataattcatttcaactattcacaatacaacacatttgatattttcaattcaattaaagtttactccctcaacactaaaattagccaaccaaattcaaaaaacttatcaaatatcattaacaaccaaattcatgatgaactcatcgattacataacaataaatgcagatacaccctttatatatatatatttatatatagaacagagtaaggatagagaaaatacacgtcggatacggcaaaggtgagagcagtaagaggatgaggagctttaggaggagcaggttgaggaggaggaaggagttgaagcttttcgataaaagctccaaaatcttgcttgataactttcttgagttttctggtcatgaaaagaatcccagccaaacccaaaccgagcaaaacccataaattagatgagtgagaagccatgaatggggaaaaccctaatggaaaaatgtgttcttgagaagaaagagaaaggaaagagataatggagagagtagtgataacttcgccactctaacgaaacctaagctataagctcttttctttggtatatacagaaaatgactttgaggctaagacgcaacctttattatttattatttattatttaaaaaaaataaataaataaataaaattattacattgattgattcatagatatttaccattttgccatttactcaaaaagcattggtattaagtactattggtgcccaacacgttttataggggtaggttgaaatatacttatttttcagttaactaaaaatagttttatttcaaattcaattgaaatgtgcccacttttataactgcattaccgattatactctcacagctacacaagttagagttgaatggagagtcagagtatccttaaatgatagagtcacaattggtagagttgttgaaaaaaagggtagaaatgaaaaatatagaaaaagagggtaaaaattaaacacgacaacttaaaagaggtataccatctaattttctcccttctataggtggtgtctcatgattagttagtgatattccctaaaaaaatattttctcaagttatgtggaactcgatacttaattacactaatagtagtataaactcgaaactcggtcaacccacccccatattcacccttaggtaccttggtgcccaatatcaatgcttattatttaatgta

SEQ ID NO: 19931 - DNA, 7815 bp, Cannabis sativa
actgtagcacacacggcaatttagtgtaatatttgcagctacgttggagggctaattccacggcatcaccaaatttgaagcctcgttggtgatgctttgagtacattgaagcttagatgatatggtatatggaaccgaaacatgaggtttaattatttttaattatttaaaatcaaagctctacactgatattaaaaacaaaaaagaaaaacccaaaattgtatgaaaacccactcataccatgatgaaaaaaacaaataaaagaaagaaaaaaaaaatcattaaaattattgcaaagtgcactcgaaattcgaatgcaacttcataagaaagtgtagaataaaagaatcttgagacaagactgccaactagtgttgtaccagcataaaacatcatttagagatactgaagtgagatttttttggtaggtaaaagtctctttaatacatacaaattcatgattgtgattagtaaagtaaatgctaaaatgtcttggacatggatttggaggtattcagaagcctaacacttcacttctaccaaaaaaaaccaagtgttgtattattcttaccagttatgaaaatgaccacagctaattaattccaaaccaaaatgatattctcttcattctttttctgttattgaattgtatggactgaagttgctcaagagtgaaagtttaaatgggaacatgtaacacagcaatgagactatgacactttctaaacaaaagggtgtggaatagccattgcgttcgtctttttctcgtcttgaaatttagagaatttactcaaagaatcttgaacaggagtttttaagaatggccacaacagaaaaggaagataagaaatgagaggttgatatgtctatggatcaataattgaagcatttgaatgagaggattacttagaattgaagtttacagcgagaatctcataatattaagattggacactatatcatgtcatgcaaatatacaaacaaaaataccatattaatgccatatacaaacaaccatttctgtctccctctctctcctttaaaacaaacttatgtgttgtcttttttgttgatacaagtaaaactaaaataatactccatgatatatatatatatatatatatatatcatctgaagtatttctccttcaattttagtataatatcattaaaccagagaagttttgagttagttttcctagcaagacagcctaatagtcatcaattaattattagagaggaaaaagaaagtgaattgaacacaaaaagaaaaccccaataaagaagtgttttttataatataattaacgcaaatgaaataaactgatatgacttcaatatatctaccatttataggtgcatatatagtataatgatgtatagaccttgaagtacgaccttttgtagttcaagagcaggaggaaaaaataatgtgtccaaactaaaacatcattttcatttgtcctttcacttttcctgcctggaaaattttcaaaagagaaaatttcctacagttctgctgcatcaagtaacaaagacatccattacaaaaatatttagctaaaaaataaatccaagtcctttggtgacataatacagtttcctccaataaaaattgttagagcactagccgttgtgtagacagatgaacgagcctcacactcttctgcattatatgatttcatacactagaacatatagtttcctgctcgtttccgcaattacaatttacaagaactttcttaacttgttagtgaaacaaaatgaataattagaatgagaaattaggatccatgaacaacattgtttaatcataattgcagataagccagaactagattatgtcatctgaaagttaaaatgttattagtatcggatgcgagtgtacaaagagcaaaccggtgccatgctttactgtaaagctgatcagaatattactaccggttacagaaataatgtctcaaatttctagtgtacacaaacatattgcaaactagttatttagccttcaaaagcagatgacaaacagcttgaatttggtgcatttacacaaagtactaagcaaatgctaaggtctacgatcttatggacatagcttcactaatttacaatagtggtgacaactccaatctcttgaagatgaaaaagaaatactttcatggggaatgttaatctttgaatgaccatttaactgtctcagcatgaacccatatccattatgcattttcaaatcttctgttattatgtctctgctgattcttctctatttttccttgtggtacacctttcacatccagtctccaacaaggtaatgtaaatgtaccttgttatttcttttgtgacagtgtaaaaagcgcaatgcagagattctttttcacatgaatttttcttttaccaaagcctacttaacagagattgggtaaaatccagtaaccctttttttctcattcatcaatataaccatagagaaacttgatcatgttaagtcacaaagtttcatcacttgacgtgtccaagtgttttcttaaacaatatagaacttcatagatatcctttctttcttcatgccttgtatctctagctagaaactcatgaattacattccctatttggattgaactgcaaccgggaactttttcaactccttgttggctcattgccattctatatgtcaacgcatctttccaccgtccaactgatgcgctcaaatttgaaattagagttaagtaactcgggtttgaaggctcctgttcaataatcttttttgttacagagtctaacaagttttcattgccatgaatcttacacgaacctaatagagtagcccaaataacagcatttggctccaagggcatgctctctacaaacccgactgcttcttccaacttccctgctcgacccagaagatcaaccatgcaaccataatgctcgatccgaggttttacaccaaactccgataccatctggcaaaatatccttttaccatcttctacaaatcctccatgagtgcaagcagatagaactgcaatgaagatgacatcatctggtttgacccctgcaccacacattgagtcaaagaggtttaatgcttccttgcactttccattaacagatagacctgaaaccattgttgtccacgtgatgatacatcttttaggcatcttatggaagattacttttgcattttcaacatcaccacactttgcaaacatatccattaaagcattgcccaagggtatggacaagctaaaattacttctcttaatataagagtctacccatctaccatgttcaagagaccccaagtgagaacaagccgacagtacactgaccaaagtagtttcgtcgggcctgcagtttctgtctatcaacatctgactgaacatctgaagagcttgatcaaacatgtggttatgaacataacctgcaatcatagcattccatgatacaacattcttaactggcatttgatcaaatatactcctagccgactttagatcaccaaccatggtgtatcccgaaaccatggctgtccaagaaaccacagttttctctggcatgtcatcaaagacacaccttgccgatttgacatcacccaatcgaacataaccagatattattgagttccaggagacctcatttctttctgtcattttctcgaaaactatacaagccaattccatatttccagccttggaaagaccagaaataacagagttccatgtcacaatgttcctctctggcatcgaattaaacaattttactgcagattctatctcgccacgggccatataagaagtaataatactattccaagaaacgacatctctttcaggcatttcatcaaacacttggcaagcgttctccaaattttcacagcatttagcatagaaatccaagagagtattctgaacaaagacactagaacaaaaacccaatttcacaatctcacagtgaataacttcaccatatttaagagcttcaaaagattcaaaacacctaagaatgagagtgaatgtgaaactattaggagcaacaccaaagactttcatttgatcataaacatggaaagcataatcacaaccataagagtccttgcctacaaagcattttattagtgtgttgtaaacaacaacattgggaaaatgacaatttcgaaataccctgaaagcataatcgataaaaccaagttgagaggagacagtgaggagcttgggtactgtaaagctgctatcttggaagccatggatgagaatctgaagatgggtctgcttcatctctctcaggctcttgcaactctgacatattttgagtagtttgtgctccatttggatcattgcctcatttcgaatcaaaatttagctatgaaaggtaatgtcattaacgttccaatacataacaataacaaacactattcatatatgattttttatcttgatccaacaacatatatgaatttttcttaaaatatattcacttacataattatgttaattgttgtcttcactctctacatattataatttcatttgaagattaaaattaaaattccattatattcttaatccaataactgggactggataaaattttaaaaacacaatagtaactataagaattttattagagtattttaggcataaatacttttttgaagtttatattatgattttttctttttaattcagctcttaaatgcaaacaaaattacgagtttttcagtataaaattttgaatatcactacacaccatgaacccgtacaatttcaaaaaaaaaaaaaacaaagtttttttttcaattttaaaatacgtgcactcagtgttcttagcaaaatcacttatttgtctagtgagattaagtgatcataagtacataaaattatactcaactacatatcccctctctcttaaaatcacaatcaattttattcaaggcctgcaaaatcccatctaagttagatgtattttgatcaataatctaattacaattcaaaaagtttcatatttttggtatacaaatttacaagtatctgaaaagtcagacaactctgaaggaattagcaatcttctttaaatctttgtagtgtctcttccattgaagacctacaaattgaaaagaaaaattaaattgaaattgtgtatgtgtttacttgcaattaaaaactactaatccaacaaaaaaaaatgcataccatttccagttatgttgaacaagtaaagtctatttccagctgcagttgctgtaatgagaacatgaggtggttccaattcaaattggtaatattttcttcctgagtgttcagttacagacatactcacaacttttccttccacattttcccctatcacttctggcccaaatgcatttatcactttctctggtggccctatttgctcaatctttgcatcctcacctaaatctaaacacacaagaataaacacaatatgcgcgtctaagaaacatgaatttcatttaaaaactaattggtgataagtcgagtaagaagacaaaattgtttcaagcaccaacagaaacgtcccttgattcaaagagacgagaacaggtcattcacattttcaataactaagaaaattaagctgaaaagtaaaaattgtgccaactgtcaaacaagtccattgaaatgccaatttgctgtttaattagagaaactcactatctgcaaatctgagaacaggagcaacaataacgaacaatcggccttgtttggggtttgcaaatctcaaatcaatttctgtgcctcctagatctgctattgatactggtacctttttatacacaacataaaaatgtattaacaaatagtgtgagagagaaactagaaactaacaaatgttgttataaagtgtcattgtgtttacctcatcccattcttgaggtacagaaaaggaataagggattataggactccatccaactccatggcctcctgatttttcatctggtctttggtatgtcctccaacctgtctaacgatatgctttctttactaagtaataacacacacaatttccagtcatgaaaattcatcactttcaattttcttttacggggttttattgtaggagcactactgtttttgacacaaataataactcaattttttttatgtatgcatccggttacaaaaaaacataagcaccaagaaactctttatacaataatttaaattattttcaatatgcactatattaaatatagtgcatatttaaaaagttactatctaattataattgaatgtaatttagagtaattataaaatttaataattacacaataattagtaatttgaaataaataaagagtttcaattgaattctccaattctcataaccttataagaattggatgtattacaaaatattaattacagttacactttgtaaattatattttaaaatagagtgtaattattattttaataattacacattataaacatttaaattataatttcttaatttaccaaaaagagatttttttataattggttaaatcacatctaacacaacatttactcaattttcaaaatcctattatgaagtaagcctaatgctactaattgctagaattgtggcaaaagtgacaccctattgtagaagagaaatttacaaaaaatattataatttgggttaatttttactaaaatatagtcacacggaaaagttttcaaaaatactgtatttttataaaacaccagtaaaaataaaacagaacaactcaaaacaacagtagaacaactacaaaacaccagtagaacaccagtgaaaacttaacacaatactgtagcatgaaacttaaaaaaaaacacagtaaaaaagtaaaaaataccgtctagcagtatttttataaaaaattagcaaaaattaatatactatgtaaatttcccttgtagaattcctctatatatttttgtataagataggtaataaagtttccatcaagaaataaaagataagtaataaagtaggccaaccttcttcatttggttcagacaaaccaggaactcttccagctaaaaggccttgtttgaccacacccaggctttcatttgggtaacccatcactgctgctgatgaaattaaagaaaacccagataataaaacggatcttctcttcaaaactccacagaatttctcagtttctttatcaacacaactggaatttgctcttgaaccaacagccccttttgttcttgaaagctcattttctattgaggattgagctattaaggtgtgtgagggaataatctgatgatgatactggtgatagttgcaagaaaagctacagcttggaatcaaggtcatcactcccatatttgattgtatatagtaaaattacaaaatggcctgtaaagaaaaataaacaacaatttaataacagagaaattaaccaacatttaacttactcattctcaacttaactactcattaatatgtacttttagtgcattcaaaaacaatcacaaaaaatgagaagacaaagtatcagaattatatattaagcaataattataaggtgagctatgaaacgatttcaaatatatacacctgttgaaaataatatgttgagtgggagagaccaagtattgtggcgaagggtaatagggagagcagtggttgcagtggcgaagtgtgtgtggttagaattaggtggtatgtatgtgtgtacgggaaacccaattatcatatgagccttctttttatgttttttttaattaaataataataatatcacttagagggttctaaattttggatttttttcatagttattagaaaaagaaaaaaaaaaaaa

SEQ ID NO: 19932 - DNA, 1714 bp, Cannabis sativa
ataacacgatcttcatcttgttctccaccatgataagatgttaatggcatccccaagcagcaggtgaagcagcatctcagtctcttccacaactttcccttatccaagtatcctcggagcccaaaaaggcgccgagactcggatgaggaggtgaccacaggtgatggtgacactgtttctgccttggagtactgtctatgtgtggagatgatgtgaattggctctagaatccagcaatcattgtcggacttccactcattagtacccattattttgttctctcttctaattctttcatatagtgattgtaaggtgttttggataggtgatgattttgttcattttatacagactgatgggactcaaaatttggtaagaaatctcatacgaatcaatttagtcaacacaagtttctttatttgccaaagaggtgaaattatttggcaactgggagagatttttagcattcattgattgggagttttttatagtataattcatcacaaccaccttattttcgggaacattattttgattggacttcattgagaaaaggcaaattatacgagttttgctttgtaattgactggctcctttactcaccctattcttattaggagaaatgtctaatataaacaatctttcttgaatatgacatttttttttcctttttcaaaaaccgttgagaatggggccttaattttgcaaaagggtcactcttaaatagttgttctagctttggaaaaaataaaagattgaatttgtctagaaaaagaagtggtgattagccttgtgaaagagtagtacttgatgaggaagaaggggttgatgacagagtatccttgcagtaacggatcacaaccttgatattctcttctcgctcttgtaaactgctatatttgtttgtatttatagtaacacaactcaagttcttattctcctccctttttttctttttactcttctttgagccaactcttcttcttactgatttttttgcatggtcttcatcttgatctccatgatcatgatcagatgttaatggcatccccaagcagatggggaaacaacatctcagtctcttccaacactttggattaaacaagaatcgttggagcccaaaatggtgcttagactcggccaagaccacaggtggcgatgatgatgatgaagacactgtttcagccattgagttcttctactctatagtactagcaattataaatacttgttctgctatgctctttctttttctaattctctcctatatatagttgttttggatagtgatggttttttttttgtttattttataaagtgatgggattcaaaatttggtaaggaatcaccaaagtcaacaggtttctttatgtgggaaagaggtgaagccgtgaaattatttgggaattgggagagattatagtataattcttcacaaccaccttattttttgggaaacattattttgattttgattggacgagttgtgcttggtttatggttcgttgataggtaatagtgttcacggattggtttgatctttttttatattttttgaaccaaattttttaaactaaatcaaaccatttaagtaaaatttagaaaatatactcgtttagtacctgtttttgtatgaaaaatacatttatacatttagtaccttatgttttcaataatatttatttggtactttatattttgaaattatacatat

SEQ ID NO: 19933 - DNA, 3889 bp, Cannabis sativa
  modified_base (3173)..(3176): a, c, t, g, unknown or other
tagtaagcatttcggggacagtcattaagcgggtcgagcggcatggcttctaacccgaacccatattcgcctgcatccatataagtcttgaaataccatgcatcagtcgggtccatgtaaggcacaaatagctccgaagctaaccctttgtacatcacgttccttaattcacccgaatccgggtctcggatcttggccctagaaattatcacacccgctctcgcatcgggtttgaggtgaaattcccaatttgcccatttcactaaatgatcatcttctatcacgaaactcggacctttgggttgctcgagagatatagggttcagtatatccatgacccggttctgctccatggttgaaaaccggtaatctgtattggaggcctttggtatgggtatggtcttgcccttatcggatattttaaccacttgtttggtgtcaaggtcaacggttacggtcaacccttcgattggtctcatataaaagttcaccgtatctttcatggagtagcactgtaccttaatcaacctccttccttcctcggccttgccaaaccaccccagcgaaatcggcaagcacgccaggtccgtcagatcaactccgcgatcgacgatcgtacggttgaactcggcgctcgttaatgggaccaccgtggccgtggtcatatcctccacggtcatcatcgggtaaccagaatgcttaccagtttgttgtacggtcacctcttccgtactgagatcgacggtcagcacgtgcgaggctcctctcgcacgtgcgatcacagtggccttcctcggcggaagtgggtcgcccttcttccaaccaatgacgagtgacttctccggctcttcgagctcgacggtgtggagcgagtagggagacgcgcggaagagcgcgtgggaagaaaggagcgtacggatttttctgatttcttggactgttagagggtctagcgggtggtggggagtgtcgagagtatggtcacggaggcgcgtggattttgggggctgatgttggatgcgattcttggaagtgcaccagggagagttggtggcacagtcgagaagctccactgtagagggtggcgcgtgagtgaaggtgagccaggtgaagaataagactagtattccaagtgtgagaggaaagaagagaaagcggaggaagtttcttggttccatggccggagaaatgagaggagggagtaccgaacgagtgaatgataaaataacagtatcaaattcagagtgaaatagagtagtactgtagtgatagagagtgagagagatagtgataaaagttacgtaaggaatctaaagtaatacgtacaaaagtgatatttaaagctgtggacgagtcgaggagtttcgctctaatacgaatctatactaatatggaagtacgtctctaatacgaatctatctatataccgaattgcaaactacgtacaagccacgtttattattttttttttagtaaactttgattgaataatataatttaggtgaattgcccatatatatatatttttttttttatttatggtttggtttgctactgtggtgtctcgatttaggttgctggcttagttactatataagactttttgtgtgtaatttcgtaaaaatatattaaaaaaaaatgtacaaaaataaaaaacttctataatctaaaatagaaatattatttataatttttattatatacctagatgaagttagtataataatgtaggtatatttaatttatttttataatatatattatgtttttttatttgagttttaaatttgctcattccaggtaaatatattcaaactctccctttatataagggacactatttttgtaactaaagcagataaaaaatgtgtgatcataaatagaaaattaaaaaataaagaaagtgtagggttttttcaccaaaaatgacaatagaggagtttggagttatcatttgcaatatggaatacatgaactccttcgactccttaagtgatgtttatatcaaaacttacaaagtatataactaaattgtaatagaaaattatcattttagcaaaattatttggcaatttacttttcacttttttactattttcacttaatgacagtgaaaagtcattgacttaccctacatagacttatcctatttaatgatcataacttttatgataattacattttaatttgataaaggagcatgagcaagaaaaacttagaaatactaaaaatgtattgatcaacgtgtttcaacaaaacactagaaaagaaaaatgccagagctatataaggaatttagataaataataagtacatataaagttgtggaagacttattatgaagaaaaaaatttacaagttattgacttatataatataaatgcagattttcgtgaaccaaaattaaatagtctttcagtaacaaacattctacaaaaattgataaataataaaatacataataactccaaatatttttacgtaattttgtagttaaaatctacatactacacgactccttcttattaagaatatttttagagtacagaatacaatatttttttatataattacaaaatacaatatctatattgaataataatgattctttctcaaatttaccatcccatttcccatggaatatgtccatatttataggagtataggttgacaattattctttttcggatagatttaaatataaatgtaaatgaaacgtggacaatccccacagtttatttaaatcacatgtgagataatactaaataattacccaactgttctttagttttctcctttacatggttattgctgacgtggaaggttacatcttttctgattcgagttatcttccttatccatcttgacaagaaaaaacactaagtcttgggaaagtttccatatctcgctatgtcctctttgtggtttttgtaatgcaaggtgatcttctcgatcgctatatgtaatgcgaggcagtttatgttgatacttttattctgctcgggtagatacatatccccttcttgtttgtatattctgaggcatgtgcatgtgtctcgttaatctcatatcaatagttattattcttgtctcgtttttgactataaagccaacaagttttgaatattatctatttatccatataataataacgagttattcaatatgcattnnnnatatcgttatatcatttagaattgattcatattccatatattggacacgtgtcaacttctgaatagtgtagccaaattttaggtataacaattgccccttaaaaagtactttttaattattaagaactttttaaatgatatgagggtatttttgtcttaatccaattttttttaaaaaaatacatgccttgggttttggtggttcagaacttcaaggcacatcattagcattaaatgtcccgtcttttccaatttgaagtattcccatccgttagatctaatttctttagatccaacggttattagtgattaggtataaaaagtagaagtgatagctcatttcgctatttttgcttttcaaaccttcaaatttttctgcaaaaggttttttcgattgcttttctcctccatattagcatgccctcattatctttgacttacttcctgcgtagttcaacggatttcaccttcaatcttaaagattatcggaacacattaattcactcatcacaatctcaatcacgaagttcttctttgtctaaaaatcttcatcagaacagtgagtggttcatctccttctcctttatacctttttttatatttgcaatctgatttttgtagttgattgtcttcttttatctactttgtttggttatttctcttttaggtaatttttattctgttagtttaaagactcagtcaattgattttaa

SEQ ID NO: 19934 - DNA, 5846 bp, Cannabis sativa
aatctaaagctaattagtaatttttcgacatgtaataaatcgaacccttaaatttttttagtcgttaaaataatgtcatgtactaaatcatgctaaaagttcgagagaatttttacggcgaaaaaaatttaaaggacacaatttagaaaaattagcctaaatctaatgtaacttacaaaaataatttttaaaaaatagattaataaacattgtatatatcataaaaggtaaacacatggaaatttgaaatgacattcggattcctttcaaacacatccaataacaaaccgacacgtaagtaaacattccgcgtacaacagaacagaatagaataatttgaggataataataataataataaaaaaaaatactaaaatcgaaaatcccaatgaccattccatttccatttcattccaattgtatgttttaaggaatagaatattttataacactgattcatctctgaatcttactgactctgtcggactcactgttaaaaaaaacaactcactaaaaaacacaatattcaaaattaaaaaaaaaaaattaattactaatccaattaataaggaagctacattacattaattataagcttaactacttggaaactgttggtagttgacaagttctgaccaatccgcgtttgccacgtcatcattgatagttgccgctctctgtacatgaatgaactaaatgaagttaaattttaaactctgttaagaaaaatctacaatggaggctaattattattataataatttgaaaaataattgtatttgtagaataagaagaagaattagtagtacaaattacagataataattcaaagtcaaatacaattacaaacccacttccctcttcttcttcaactttttagatatagagagctttctctctttgactttttttttttttctctttactttattttttatttttttcttcttttcatagagagagaaagaggttagagagagaaagaaagagaggggagatgaatgcggcgccacgccagcaacagcagcctcctcctggggcttcggacttggctaccggagctgcagagggaactgtaatgcttagaacttacaaggcttggaaaggaagcaatgtaagtatcatcaacatcttcttcttcttttagttttgatttgtttgagaaaaaattgagcttttttgtcttttgtttaaaggggaaagtggaaggggatcaaaagtttggggctttttgtttctttctcatctgggtttggaaaattctgatgttggttgtctgaaattatgtggatctttaactcagttttgcttagatttcaaaagggtctttgtggttttactttttgggacttgggtttttgttctagatttcaaatattggaaaggggggttaactgtagttgtgtagttgattagatgttttgagtgtaaaactagttgatttgagcttatgattgtttcagcatatttggtattagttcacaccattttgatgtgtccagtatgttttgcagaataggattttggggctttactgttttgggtaatttgcgtggtattttagctttaattatttgttccaaaaactgtaacaagttaactttgagcaattttatgtttatattttaaggaagtttcttcattaggtttgtaagttgtattttccagttcttgaagattttctgattgttcatatttgcagatatttctttgtggtggaaggcttgtatttggaccagatgtaagatcaatcgcgctaactgtgtttctcatttccgcccctgtcgccatcttttgtgtctttgtagccaggaaactcattgatgaatttgaagatcactggggtgtatccattatggttgctgttattgtactggcagtgcttgtaagcttctttcattttctattataagtttcaaaagcattttccttctttctgcaatagaatatgttacaatatttgcattggcttgaaaagaagcacctgaaaactcctgtcaattaacatagaattcttctgagtttttcctacattacaagatgaaaatgacttccatatttcctaatatcagttgtgtttatgttacaggatttgtttcttctgttgttaacctctggaagagatcctggtataatacctcgcaatgctcacccaccagaacccgaagattttgaagggagcattgagacaggagcaggccaaacaccgcagctgcgaatgccacgggttaaggatgtaattgtcaatgggataactgtgaagattaagtactgtgatacctgcatgctttacagaccgcctcgttgttctcactgctcgatatgcaataattgtgttgagaaattcgatcatcactgcccctgggttggtcagtgtattggactggtaattgacatagtctctcctggtattatgctatctaaaaattccatattagtagccttgtataaagtgattagaaatgtggggtatattgcaattttcacctgcatgaaacacaatcaactataactaaacttggtatgcaaatgttgtgatctgtaatgaaaatttgtggttagtaagcatactgaaatttcttgctttctatatattctcccttccttttggagcttgtgcatattatggtgcatctgaattgagttttcttgaatgtgtctgaccttaaaattttcttttgatcttggtgcagcggaattaccgtttcttcttcatgttcatcctctgtgctactcttctttgtttatatgtacaaggattttgttgggtttacatcaagaagattatgactgatgatgatgatgatgatatgacaatctggaaagctttgatcaagactcctgcgtcgattgcgctaataatttactctttcattgctttctggtttgttggtggccttaccttctttcatttgtatctcattagtacaaaccaggtaaccatctcatattttcaacttgttttcatgctcatcatgtcaattcttgggattccatctttttcatgaaaaagtttatagttttcttctgctataaacgttattgttctggttttcaatgtggttttgcagtcaacttatgagaacttcagatatcgatacgagaggcgagtcaacccctttaacaaaggaatctttaaaaatttcttagagacattctgcagcagcattccttcatccaaaaacaatttcaggaaaaagattcccaaggacccttctattctacctcgaattgttgggggctatgaaaatcccataatggggaaagccattaatgacatagaaatgggaagaaaaccagtctgggatgaaggtgcagttcataatggtgattatgaagaagaacatgtcagcaacgatgacggcccagacaaggatcaagcgctgcacgacgcagatgtgtcaccagatttaagtagaaaccttccaacagaaagcacagagcgacgagatgtttcatactcaaggcgttctagttggggaaggagaagtggaagcttgaacatatcacctgagattcttgctttggctgctgctggagttggcgactcgaggcgtgtcactgaaggaaggaatggaactagttttccatcagagactggacaatctcggcctaattcttagatgtacagataaactgagagaagaggggaaaagagttggctacttataatgccagtgatgtaaagtttgggagttggtgttgatttttaactgctgtgctgctgagacaatcaaaaatgtacaaggctttgctctttatttttttaagacatgttcttggccttgtgcagttaattctttcgcaagcattggtgtgccattgtaattgttttatttgataagctcaagtgttatggtatcatattacctgcatgtcttaatgaaattgggattagtagcccaaataagattttgcttgaattaagaagaaaaaaatcaaaagaagctaataaacatagaaatggactttatttgaatatggaaaatcttaaaaaattataaggcactgccaaatttgaagaggtctaatattagttggtttctaagaaaaataaaattataacacttcaaaaattacaaatattttcatctcatttggctatgacaaggcccaaaagaagagggatcttccaattgaaaatagcatatcaaaactcttccttcaacttcattacatgttctggaaacgtttcatgatgatgacactcaaatccatatagcgccgagcacagtttgataggcaggtttgttcactgttgctgaatttgctccccggtgtaccggtgacacacttgtcccagcatacatttgtaagcttcgccaccatctcgttgagcatcgctctttccttctcttgctgtagtaaaaaccagacattcatttatgatatatatatatatatatatacaatggacacaaaaaagttgctaagcctcagaaaataagattgacaataagaacagtaggacagagaaagatcacaaagagcctggctcttgtccaaaacaaatttaaggttaatagaagacaacatatcggttagacaaacttccactgcatattcctaaaatatagcttaattcattggtaattaatttgaatatagttcaacaacacaagttatacctccactaattaaatatccaaagttctgctatcatcatttaaaagaacatagataatttgaattatgtatattaaaccatcatagagcaaccaactgtgagactacaaaattctgaagcagtgaaatcatggatacaaaatggattttttcagatactccatgtaatgtttttcgaaagaaagcaataaaaattcaatttcactatcacaagcacaaagaaaagtggatctatttatctccatatctacattgttttacaaataaatatctcttaaagaaatgagataaaatgtctaaaacttccattattgtctcttatattagataactttcatcaattttttttgaatgagtatgaagctaattgacaataggaaatataaaaatgggataatctatatgaaaaaaaaaataattaaaaaaagggagactggggcttgtaagaacacatagttgactgccaaatatttgaattgaccacattgaatctacataaatttttaagcattctccaagaaatgtcattccaaatatcatatacatacagattattcattacctaaaattaaccaaaaaaaaaatacaaacagtgagagagaggaaaaaaacttcatctcatgaaacgacagctaatgtaaaaaacgatccattgaataaattttggagaaacccgattatgattccgcataagtaagtaaaaccccacaaaaagagagaaatttttcaatgcattatataaaagagcttcttctctctaccacaaatatgcagaattcaagttcatatcagatgttttcaattagcaaaagtactatataatatcttacgttgatgaactggagtagttcggggctgttaagagctgaaggatccatggcgattcgattaatgattagtaaaaccctacaatttttgttgagattttggagacgctcttaaaaccctaggcaaagagaagacgtttcatacttcggagccatgagcgacccgaacatcaaataagagactattgggtgggcccaaattctagatttgggcaggcccattatggtgtgtatttttgggagggattatttcaaaaaaaatacaaaaatatagaaatatagtggtatagaattttaagtatttaatattttatttatataaaataagattttttgatgtatttttatatgggaaatttgattttatatacttaaaaaattaaaaaaatttat

SEQ ID NO: 19935 - DNA, 5927 bp, Cannabis sativa
atatatttttcttgggttttgaaggaaatctggaaaagagaacctctttaagtgtacgtatgtgctcccggatggaattgagcataccaagggtttcgttaaagatccagatgaagcgcagagatatatgtctttgattgatgtagaccagtctcagaagtttggagtggacatggatttggatttgcctcaagttacagaaaagcttgaggaccgaaagaaaactgacttgaataaaaatgtagctttcttctttttacgttgagccaagttcatattttaggcactggatttacttgttttcttctggttattttgtgcaggaatttgacttgactaatgaaaggttccttgtccctgaaatgatcttccatccagctgatttgggtcagtttgttaactcctatttttggaaaaaacatgtttaatggcactttctgttgaatgaaaaatgttaaacttgacttgggcttgtttttgcaggaatgaatcaagctgggttggcagagtgcatagttcgagctgtcagttcttgtcatcctcatcttcaacctttgctatatgaaaggttatatatatggtttatagctttaaagaattttttttttttcaaaatggatagctttaaagatttgactgtgaggtttcgtttatgctttctttgggcagcattgttttaactggtggaagtacattgttccctcgatttgctcagagactgtatgttctgttctcatttcttctaagttatactatgtcagagttgttaatactgaagcaaaagaaattttactttttgactttgttttaatgctttagtgagagggagctacggccgcttgttcctgataattatcaagtcaagataatccctcaagaagagtaatgatttttcgttttcttttgtcttgtcaagctaataatatatcaaagatcttcttgtttttgtcgcattgacaagttttcacgtttgtccagtcctattcttggtgtttggcgaggagggtcacttctagcgtctagtcctgattttgaaggaatgtgtgtaaccaaggctgagtatgaggagctcggatctgctcgatgccgtcggagattcttccattgattacttgtgaacgaagtggtactattacttgtggacagagagctactacctgaacatgccatctcggaccttctcacagataggacacaattaaagtttgagagggaatttcattatttcagtctcctgagattgaagaagttcaaaagaacaagtacaactgatgccatctcacagagaaaacattgtagaactgagaccaaatatcagggaggaaaatgtgccatgtttattggttctaccttgttatgttcatataaagatagacagaaattttagttgattaggttactttactatgataaagtacagtttagagattggcaacaaaagaaacaacggtatcatgtttggtcccaagtacatggtagttcatctggggagaatgtgcatcccatggaaagaaaagaatagattattaacaattcaattgagatggaataatgctgatattgtaaatttcaattggtccacacgttttgtgatatgtcacaagaagccgatgggaaaaaatattattgtgattctgatcagtcaacctgtgaaactatgaataaacaaatcactctttcctacactcaaaatatatgttgataatatttcttgtgacaaaacttgatgtattagcttgtataacactgcttacagcacagcctttgacgacctacttttatcagcagctgttttgcaaacaagcagatacaatactaagattatgctttatagcacattttgcatctctttttcaatattagttgtcgaaaaaacactctttagtcttctcaaccatcccttatatgattttctctcgtgcccatgaggcaaacagtaaagccttttagtgtagaaaaagctccttcaaatgctgttttgatttgagcaagaggttgcgaaattccattgtgaaagcacgataacacacacgagtgaccaaaccaagcccatctcctctatgctcaatctgagaatggctgtgagtccatgcatagatgcactaattttctttgatattgtccataatattcacaaactgcaataacatcttcattctctgggtccaaaccaggcaacttaagcagtttctcattggtagaggaactagtttcatcatccaagtccaaactggagatgatttctgagtgtatttcacggcaagcaaggacaaacatggcagctgtgtctggttgttgtgcttcacgaagagctgccaatgcctctggcagtgctccagccgcaacatacaaaatcagagccctgcatgggaccttgatcggctcagaacacgttgaaagaagaatctagcgtgaaaacaaaattgaaaaatagtgatacctccacaagttgtgttctatatgaaggacatggtcagcccatctttgcaataccctacaagtacataacgggtaaagatgaaacaaatgttcatgataattgagttggtacaatataaatactaaaagcgtaatggaaggaaattgttttgaatttgaccaaaacaacaaaataccttgcataatcagatccccttagatgagtagcagctaaagtcgcagcatcagtccagcaaccagcatcttgaagctgcacatgagatgatgttataactagtcgcacaaaatcagtgttcacagttctaggaagagaagcactcaaacaattatttaaccatcaatttaagtttttaaagccagcatccagatctatatgaagtagccaaatactaagaaaggaattccagatcagaaatggcacgccctaattacagaaacttcatatcatctaacaaccattaaagcattatagaacagcatatacaacgaaaatcttacaaaagattttatttgggcgacaaactgagtatataatagatcgcaaaagatacatgaagaataaaaatagatataaaaatatgcacctattgatactagtcatgtagcaaatgatatctatggactacatgtgtcctccagaaaatgcagtaagataaatagcgcagtgtcaaagtttatacaacgtgaagatatatattataatattttattcatattttttttccttcataaatgatactgtttgcctctttttttagaatatgtcatactttttaagaaaatgtcttactcgatgtatattatataattttcaaaaataatttacatatgggaaaaaaaatgtatttaatgcaaaatatatatatatatgttggcaattgccacatcattaatttttaaccatcaatgggttaaaataatttaatatataaatatatatatgaacataacagagctgacctgagaacaagcttcttgataccttccaacagcacagagaagatgagtgccagacagtgacctgtcagtctggaccatgttggctgcaacaacctaaattggagaccataaggattctatacaaatttgaatagatacaaacacaagcaactcacctttactgcaagttcaagaagagagcctgacacagcagaagaaagagcaactgcacggagagcgttcacataaaagtatttgctctcaggattagttgaaagcaataagctaactgcagattctaaattcccaacggacacaagcctagagcattaagccatacaacataaataatattaaagaaatatcagaaaatgcagtctctagctggctcaccaaaacaaccacttaagattaaatgaaaaaaaccgatagcattaacaagcaattaatcaacaacaaataaaaaaagacactcgatccacttactcgtgtacgcgattttgaacagcctcttctccctccagtttctcatgccaaagaatacgctcattagcatttgcccacaactcttcttgttcaaaagccatcaagctgaggctaccttgactctgctaacgcaaaatcataaatgcagacaatgttacctcattcaaatggaggaaaaattacccagaataacaagcctaaaagcatttgacattactaataattatgggatttaccaatggatccttcttttttgtcccgggcattgatttccctttcgatgatatcctactcagaatagatgtatcatcaagctcaggattggacattgatgctggagccttttggggaggcttatttactaacttcctcatcaaatggttgagagcacgcggtagttgtatccagaaaagtgcttcagaggattcaccaaaaacagcagcagcaaatgcaaacctcataacacaacctctattgaccattttagcatataattttgccctctcatcatcaagaatgcagccttgaaaaggaaaaatccataagaggcaacagacaaacatggatcaaacactcaatctgagcagaaaatatcgtcttacaccataacaagaaagtactgaccttctttccgataaggttctaatattttaagtagcaactctggcactacagggtcaccaataggtggtaaatcaatcaagtacttccgaaggtctcctgtggatgaaggagttccgggaattaagtgaggtctcttttctaaagttgtactgcaggtattaaaccatgatggtcttacacctagttgcaagatcatccgtaatgcctgcaagaaaagagatgcattagcaaaaattatgcaaattatctcaatatattaatggatctccacacattattgtctgagcaatcaaaagactaaatggaactaattgatcaatagtccagcagtttctatctgtgctgagaatcggagatgatgagcaagtcatctatctcataattggacacacaattttgttatttgcatattccttggccaataaaatcacttacttatttctttgcaccaaagaaattaactttcctattcattgatgccataaaaactcttgcatataccttggcaacaaagaatgttacatagcagcataatcaacaatcaacacccacccagaatggcattacgtgtaacagactagcatatgcattatgacattaaattgacaagaaaattcaagtcaaggttaccagggcatgcggtgtaggcagtagtatgggagaacacaaaggcattggccggaatcgttcttttgtagacctcatttggggcacataaccaagtcttttgtcaattctgcaagcatcgacaaacaaagtttcaaaggcatggatatgataattgtgaacaaagacccaaattgaatgttaatttatatctgagttccaataacacatccaagtacaagatttaatcagttggtacaattacgccaggctagcataactagttgagttggtgagtgtgtgagtgatcagggtttaaatcccataatctaaaagaggacaaaaaaaaaagaaaaaagaagaatttggtgcagttatgaagtatcaaagactagtttgagaccacaaagaaaacaataaatagttttcttttttaaaaaagagacaaaggtcttatgtctgagactgacctctcctcccaagtaaattagggaatctcatttatggtggaggaaaaccgtggtgataaacaagcataatgataggaaagttacagcctaaagcataaaatagggttctaaattgctaataatttatcaacactgtccttgggctctattcaagtaaaacttccacagcatctgaataattttttattagcaataacagaaggtatcacattacaccaccatttgatcatgcctaaccccaaaaggcctcataattattttgccaccgcagtacttttactattcaagattaattaaagtggcgttagttggatgtaatgaaatggaatgagaacaatttttattccattcctttatttagtt

SEQ ID NO: 19936 - DNA, 7836 bp, Cannabis sativa
agatgggaggagacaacaaatccaaagagggattggaggagggaagaaatagttgggtggagagtaaattcttctaaatcctcaattttaaatccttccataaatgaaaggattcacactcttcctctttagttatgtaaaattacaaatataccctcaaaatatattattaaaaaataacatttaaggacaatataataatttcataaataaatactctctatccttctatcatttcatcctctccaccaaacaacttaaaaagattgctactctcctctcccttcctcttattctatatcctccaccaactctccatcctccatattctccatcattcctaacaaacatagcctaaagtgtacctgtggtgtttagtattctctgatgtgttaatatcgctattagtctaattagtctaactaagtatcaggttccaaactaagtatcaggttccatatatatcaggttccatataatttaatataataatttttagagagtattgttagccaattgtaagatgatatgttgagaggtgttagacactactggtattcaataacaatgcttttcactttaagatttataaggtactaattgtgtctagcaccatttaaaaatgacattttacaattaattaacgctattccaataataatataataaattggaaaatccaaggcaacgctatacctctttagcaaatttcttaatatatatatatggttggtgttgcatgggaaattgtaatgtatataaatatataattagggcatcccattccattccatgcggcttctctgactttttatttacaccaacccaccatataaatataaatatgtgcacttacaaaggaatcttatactcatgctctcatacacattttaattattgtatatatattaaaattaaatgaaagagaatagcatcaaatttgacttacctcatatttaggatcttatatattattatggattgtatcaaaaaccatatatgtataagtggatagcatgtggcctccaaactcaaacatagtatacaaatgtatatctctaaagaataccatgatgtgtatatcaatcaagtgtatgcatagctataaaataaaatataaactattttatagtatttaaaagaaattaattataacattatttagagtctgattggtacagtttttaaaaaaattaaactgttttttttttttttgaaaaaattgtgttatcaacagtgatagactcagaatttttattttgtgggagcttatttatcattaaaaaatatttatacttatattataatcactcttactaaatttatttaattttgtagaagttttttcatcattttggtctataattatcaaattaaaaaaaattatatttaattttttaaaaaacaatatttttgttagtaggggctatagcccccacattaagagtagtgagtctgtccctggttatcaagtgttcgtaaaccgttaataaacttcgtattgaagaacttttgaaagttacagttaaaatttaaagttggcacaatacctagtttttggaaaaatattagactataatacatttatttatataaaaatatatttatttatttattatattacaaaaaaatatatgaaataaataaattataatagaataattaatattaatctttaattttttattttattttaaaatatattttatgttttattttttatattaacgaatcacatcaacttaaagtttctcgtatatgagtttctatttttttttaaaaaaattcagatcattgtattacttcaaactttttacaacctaacaacatttttaacaaaaaatcctgaaacacctatatacaaaactataattagaaatgttcaaatcaatctttatcttttttttttcatttttttcggtaaaattgcttcaattctcattttgatttcttgttgaatttgataacctctgctggaatcatattgagttttttacaccaaagaatctcgttacttccaaatatgataaatcacagcaacaaatgttgtagcaaagacctacggttgaaatttagacattttaactctttttattaaaaattgaaataaagagtttgctgcaattttccagccaagccaagttttaatggcttcaatacattccttgctaaaatgacaatcaaataataaatgaaaaatagtctcatcctctagattacaaagaaaaaatctgtcatcagtaattatattgaacctcatcaatctggtatttatgtgtaaacgatttaggacagtaagccatgtaaggaaatgatgcttgggaataagaaatctcccctatacttcaccataccagttttgagactcatattggaataggaagattgactttctttttaacctcctctttcacttgtacaatttaaggcgaataccaactattttgaatggaacttctatattcccacaagttacttcctttaatataaacattatggatccacttgacccaaaaattatcttgtttcgttgctagcacccaaatatacttgctaagagtagccttatttcaaagtagatgattacagaatcctaaacctccttcttttcgagccttgcataactctttccaggctacataccccacctattgtactcagtcttgcccttccaaaggaaagctctacaaatatagctatgatctccttcaaagttctctttggaagaaacataatttgaccctaataaaagtgaattgcaattaacactgagttaattagagttgctctccctgcaaatgaaatatgtcttaaactccagattcttatcttggaaagtcatcttttcgaagagcaccgaacattaagcttgagaaagcttccttgaacatattggaacaccaagataacaaaatggaatttggctctagcaaaaccagatgaatctaaaactcgttgtacctcgatttgatgccatgcccgagcaatatacaacagattttatcttgtttggctacaatcctgaagtttggaaaaaaaaaacttaaaatcttgacaaagcatataaatggacttaaagtctttattacaaagaagaagcacatcatctccaaaacaaaggtgattaagcttggaatttctgcatctctcgtgatacttaaaatcttttttcatggccacattatccataattctcgataagtacttcatgtcaagtaaaaacataagtggaaacatcatatctccttgacgaagccccatttttgcttcaaagaaactatggagctctccatttatcataaaactaaatcgatgagtcttaataatgtaaatcatgactagttaaataaatgcttgaggcaattcaaaagcttgtaatacttcttcgataaagtctcatccattgtatcgtaaatattctttaaatctaattttatcatacaattaggccttgaattagttcttctgtaatgccttacaagatcttggcaaaccataatatttcaggcaatgtaacgaccttgcacaaaactactttggtcctgcgatattagatctggcaatatattcctcaagcaactgcaaataagttttgtaacaatttttgtaaacaacattaaaatatggtattggacggaatttacttgcatatgttgggtaattactcttcggcacaagagtgagcattgtagtattcaattccttcaacaactttcttgtttgtagaaagtctatcactactcagggttggccttgagttgaaatgggtcataggcaaaaaaaaattgggcccttactataaagataaatggtgttttaatttttttttatttgagccctaggcgtggacctagcctgcctatgcctagggccggccctgtcactacttcactaaccttcttccccactaactcccagttctcttggaagaaagagctgctatatctgtgaggccccggaacttttatcccaagaattgcaaagaccatttgtttcacttcagactgtgtaaaatcaaatacatataaatatatactttgagaaaaaaatatataaataaaaattttgtataacataaatattttatttgtaaattataatgaattaaattataaaattattatcattgaagtagaatcttaacaatttataatgctttctatgctacatgtatatatgcttataatgatagggaaggcatgaaggaattgtggaggcatttacaagagatagcaacacaagagtcgtggttagtgcttggtgatttcaacgaaaatttaacaagagaagagaggatcgagcataaagctagaatagaattggctactgcatttctgatttgtgtggagaatcgtaagcttgaggatgtcaaatacagtggcaatttctacacatggaacaataaagaacatggagatgcaaggatctattccaaaatagatcagatacttgcaaacccaagctggattcaaaagtgcacaagggcagaagctttgtttctaaacgaagaactctttgatcatactccaggaatactgttaattcatcctgaaatcaaaagtggtaaaagaccatttaagtatttcaggatgtggagttctcatccaaattatggaaagaaagttagaggagtttgggagtccaatgtgaaaggcactaagatgtttcagctggtatcaagactgaaaatgatgaaaacagaatttaaagagataaataagcaaggttattcagacctccatgttgtagaagctaaagctagagaagtattgaagggctgtcaagatcaacttcagctggatcctttgaatccttttctgcacaaagaagaattggaagcacggtaaaaactaattagagtaaaaacagacttgcattctatgttgcagcagaaagctaaagttacttgggtaaagaatggggatgaaaatactactatttttcacactagtatcaaaatgagaagactacagaatcgagtttggtcaattgacaacaagatggcactgaaatcagccaacctgagcagataaatgaagcttttcttgcttattataagtcactgttggggagcacaatgaacaacagaagaaaggtgttgtcaaaagtgatcaaactagggccactagttacacaacaacatgctgatttattaatgggtaaggttacattggaggaaattaggaatgcattattctctatacctggtatcaaggcaccaggaccggatggctactcgagttatttctttcaagataattgggatcaggttggaaatacagtttttgaagcagttgagtctttcctgtcctcagggaaaattttgaaggagataaactcgacaattttaaccttgatacctaaggtaaaatgtcctaacactgttaaagactttagatcaataacatgctgcaatgtcatctacaaagtagcaacggaggtgatttgttaaaggctgaagcatgtcctcccgaacttgataacatagaattaaggaggtttcgtaaaggatagatacatcgctcacaacatcatgatatgttaggatctcatcagacattatggtaggaagatgacaaagccgaattgtatgattaagctggatcattaaaaagcttatgatacaattgagtgggacttcattgaagaggtaatgatagctttcaaatttcctatgcatttcattactttgattatgacttacatcaggacacctagattctctcttatgctcaatggctcttgctacggattctttgaatcaaatagagggttaaggcaaggggatcccatgtcccccttgctttttgttctaggaatggagtatctatccagtattttgaagaaaattggttctatgcaagactttcaattccatgacaagtgtggggagcttaagcttaatcatttaagctttgctgatgatgtactactgttttgcaaaggagattttaaaagtgtatactatctcctcaaagggctgaagctattctcctgtaccttgggtcttcatcctaacccatcaaaatcagccatatattgtagtggtatgcaggatggtgaaatacaatgtatcctagatgtttctggtttctcaaagcatgaagttcctttaagatatatgggaatgcccatttgtgcaaagagaatttcaacaaaggaatgcaaaattctagctgagaaaatgacagccaaagtcaatatatggagctcacgaaacttgtcttttgcttgaagagcagtgttgattaactctgttttgatggccattcattcttactggagccagataatgattttgcccaagaaaatcatacaagaaattgaagcaatctgcagagcctacttgtgaaaaggtcaacacagttcacaaggttccaacccgattgcttgggattttttttgtcagtcaaaagtagatggtggactgggattaaaaagattaccgagtggaacaaagctgcaatctttaagtacgtttgggttgttgcaaacaaagaagagaacttatgggtgaaatggattcatagtgtatatctcaaacatgaagattggtggagctatgaagcttcaccacaagggagctggtattggaagcaagtggtggctaccaaaacccagatccaagagctgatggacactcaacaattcactcgaggtaaaatatcaaattttctatggctataacttactctgtccttcaaataacaaagtcaattggagtaataaggtgtgggggcattttaataccccaaagcatagctttataatgtagattgcaattcaaaaaagattgagaacaagagatagattgctcaggtttggaatcattgatgattcttcttgtcttctttgccacggtcaagaggaatctaatgcacacttgttctttgaatgctctttttcaagggcttgtttgttaaaaatcaaggaatggttgcagtggccagccatcaccaattcagctcccaaattggttcgttgaattggtcagtctaagatcagtaaattcaagaagaaagtcattacagcggcattagcaagtttgatataccatgtttagaagaatagaaacaacaaagtatggaatgataaatgtgatgatgtagataatgttgtgaatagagtcaaggagattaggagattatacatgttgtgtggcccaaagaagttagtgtaaatggttcaacatggttccatacattgtaaatagtttagagaatttgaggtcttctctttgaagatgctctttggttgtaaattagtataatgaatgaaatatacttgctgatttcccaaaaaaaaaaaatgtaaatgttattttcacggtatagttacaattattttttctcacaacacaattacactaaactggcccttaaagcatgtgaaaggagacgatatattttcatatatgccgtgaatatattggtccaaggaggctgcatttcacgcagcattttgaagttttgtctacagtgcacagcatatgtgcactgtagacactgcatatatatatatattatatatataatttaattaatatttatatatatatttatattactatatttataaagttaagaattacttttgggaaaattttacaatgcatatttttaaaagtgatgtataaatttattcatatttatttcagcacccgacaaatttttttagtctatttttatatagtcctgtatattatagttatttaagaaattttacaaaattttgaaaaatttagaaaaatttaacatgtcgaaaacaatgcacttctttaaaagtagcgtactgatatactccaacttgttttgacattcgagagacttttttagt

SEQ ID NO: 19937 - DNA, 4307 bp, Cannabis sativa
atcgtaaagtttaggtggtttagcagccaatatctccttttgtaattattttgtattttaagtatatttttgaaaaaattccaaaaaataataataaataaataaagaaattggaaaggcaatggagcgcaattcaattcaaataccatctgcttcagtgtcgccactgtatcgtcgtcaccaccactgagcttgattgttgaacatcaatggcggacaataaagacctattcgcttccgttgtctcagacataaagacctacactggcaaagaccctcttcttccttggattcggtcctgctcaaacttactccattttctgctactctatctctctcttcctctcggtatatatgcttaatcttctttgctttattcttgcagagggatccgaaagttgaaggatttacttccaactgaacgtctaaacgagaaacttcctcgttttcttcagaaatgcactcagaccttcgagtccgatcgccgttaccggaacgacatacgttaccttcgcgtttggttgcagttggtaacttaaatatcccaaccctccttttattttgatgattttgatttctgtgtcgatcttatttcgtttaatttcttagatgttatttggatgatgagaaaacagatggaattttatggaaatgaaatttggggaaaatagttgtattatgtttatactcatgcacggtatttcatttgggttagttctggagagcgtttctttaatttcacactgcataggggataatgaagattgaatagtaatttttttttttcgtggctttatctgtaacccgtcgaccagatggattttgtggatgatccaagaacgcttttgggggccatggagtcgaagcatattgggacaaagcattctctgttctaccaagcatatgctctttactatgagaagagcaagaattttgaggaggctgagaagatgtaccatgtaggagttcagaagtaagttttctacttcttaaagcattttgttggtttgtttatctcaggcaggcaccaagggcgtcattattttgtgttacatttatgctttactgatttttctgagtgagctatttaagttccattgattctatgtccgcttcttatatttgttctttgctataacatcaagctggtttttcagttgtctcataacttttctgttcaagtatgttcatggagcattggtcaactctacacatgttttacaactgctattagttaagaactaaattacgttaacttttaaacccaaagaaagatgttacatttatctaatactgcttttctttaatggaagtgattcgaattttttaactttcacatttccttccacgagattatgtatctgaattgtctttgatgaatagtctcttccccattaacaaaaactaatagttaaatgacggttagactttgagcgatatggacttctttataaagcttacgaagctgtgattttcatcgaaagttaactctcaattgttgacagccttgcagagcctgttgatgagttacaaaaatcttatgagcaattcctttgtcgcctgaagagacacaacaacaaaataaccaaggtagttctttagtgttacatgttgcgagtttggtttgtgttcttttgttagagagagtaacctgtcatcttactacatctgtaatctgaatgtctggaaatgtctggcagcgcaaggaaaaatctacaaaagagtacttgtctgggaggggtgcccctctcagtggcaatgagactgaagtaaagaatcaaatgcctcatgagaatgatggtagaacaaagaaaataacagagggaagttctcagcaactgaagacattaactgatgctgatagtaaggatctccatggacctagaaataagcagcaagcacctgctgaaaaagagttgggtaaatccaatatgttttgtggtgatgatacaattgtggcgaagtttgtaggtactgcaattgttggaaaatctgaagcagaagatgtttgtcatcatgggttggttgagcctacaataaatatgaaagaagcaatgaatgccataaacagtatgtttagtgaacctctggagactgctccagttggtagatcacgcaaaagactaccgaataatgatgtcaatcgaaacaatgaattccctatatttattgatgaaagcttggataatggagtcaaattagcagaccaaagggaagaaaacagtagtagaaatgaaaatttcaatcttcatcaggaacctttcagtatttttattgatgatgatgatgatgaaaatcccgcggaagataatttggatcggaataatttttgcaattctagagaagataatggatctgcttcatgtgcaaatgtatttgtgtttccaactccaaaggatcaccaatcagaaggttctgatgatatggatgtagaagactcacatcgaccaaggtttagagaggatacagttgtttgtcggtttgttggttctgctattttggatgaaccagaggtggaaaatgcctgtcaccatggcttggttgaccccacaatcaacttgaaggaggccatggatgatatcaataacatgtttgggaagcccatggattttgtgaggacaaggagatcaataaaacaggacaaaactcctaaatcaatgaatgactttggtggcttttcaattcttcctgatgaagacttgaaaaatgaacccccaattaagcaaatgcctaagttatcgggaaagccaagaggttttgacttgtttgagcctactatggttaccaaggaggctctggatgatattaacaagatgtttggaatgcctttggactagtaaggtctatgaattatgaaatctgttgttgtaagaatttgatagcgtgtaatggcgcagtctttaaatgtgaaaacttgagtgatttttttgtctactctgtttttacatgtaatacaattataggagtgtaattttattttccaatacatgtttaaagagtaaaaaacttaaccaacatgaacataagaaatcaaggagcaagtgagatattgtaatgtaaatgtataggtatagcagctgcatagtttatttatatatttctcaaaaagtcgtatggaaacaaaatgttgatacatgagtcaacatgaacaaaacagaaaaggaagaaaagaaaagaaaaagaatgtagatattaatagagaattcagtcatggttcaattatcagtaatgagtggtaggaggagggcaatcattagggcggaaagccaaaggtcccgcggcgtatatcacagcctcataatgtttgccgcctctcaaaaccttgtcctcaaaacgaagaggagcaccgtacattccatagttgatattggaaagaaggttacatttctcatctggagacgaaacaagtttgactttgcacgattggagtggatgatcaagcaaatcatggctcgtttggaatccaacaagctgagcatagaaatacccttcattgtcagcttcaaaagacttgtagtagctcacttgacccctgtagttcttgcagacaacgctgactttagccgatggaattggcttggcaccagtcaaagaccagcttccgaactgatcacagctctggcagtagaccactccttccactacaacggagacttccttctccatcggtttggcggggacatattcgctggctgcaatggaagggaaggccaagggaaggagaagaagtgttgagatgaggattatgaattggtggcttgccatttcttctgatggttgttggaactgactaaagcttgttagagagaagggaaactctagttttaatggtgagtgattctgatttgattggtatttataggaagcctagctttgtttggataatgagaaaatattgatagatttagaaggtatttgatcaacgtgagagcaactaagcttgcattgcatgttttgtcaacggcttccattccatgtcatggttcgtaccacataatacgtgaagcccacctttccttttgtttaatgcaaaaataatataatacacatcagttaacaatctaaggatatattataacattttattaacgataatatgatctttcccgggtgctatctgatttaaacttttttattagtcttaaagaagtgagcattcgatcatttggagagtaatgatatttcgttttaacaagttttagtttgctcttaagtataatatcattcagttgctataacaagcgtttttctcctttggtaacggaactacatacaatctggaatggaataatttggtgtccattaga

SEQ ID NO: 19938 - DNA, 5717 bp, Cannabis sativa
ttgtaatggttgaatcttcttattaataaagttaccatttccctaaaaaaaaaaaaaagaaaagaaattttatgtgaccaaatttatagctttgactttgagtatgtacaaaagttaataaaatgatatgttacattcacaaaacaaaattgcaatttgagcattcacaactataatcatttactaaattaaaaatcaaaatttgacaaatttgtaatttaccattcacaataatttactattaaaaatcaaattttgagtcaaactttaaagtgctttatgtctttgaggattacttctatcattaatttttttgtaaataaaaaaaaaagtgagctattttctgaaccaattttatataaatattataactttcttgaaacagggcctatctgggcccatattttctgagcttagtttgtgttgaaacagatatgggccttgtggtccaaaaatatcatgggcttacggcccaaatctcagatgaggagtgagaagtggtgggaagcttcttcatcttcattcttcagttttcagtttcagagcagaaaaagcatcgaaagccatggacatttcttcctggtttcgacgcagtcttacaaggaacagtaaaagcactaaaaattcagatctttctgaccaaccaaagcaaccacacaaatttgacgatcaaattctcggagtcactgacaaattgatcgatttcgtcaaatccttcaccttagacacctttaagaattttcctcgttcaggtacttgtttggttgctgagaaagtgaaagaaaacgataataaattcttggtattacttacttctttgattttttttttcatcaatttaatgttatgtttttgttttgagtattgggaaaatcgtaacctaattgataataaaaatcgaaactttatccattgtattagttcctctaaatttttttcacactttgttgcaattacttggaatttaggttatgggattatcttaatttagcttacaacactcaaaaggaatctgaattagaataaaaattgataatggtgttacgtagatgacgaggaagagaaaaatggtggagatttcccaacaacatcgggcagtgttcgaagtgatctttctgaatggcaggaacggcatgcaactcttgttctctctaaagtgaaggtgtgagggttctctctagctatgtatgtgtatatatattatatacaatcacacatataaatatatatatatatatatttgtatcatacactaatcacgtgaagttgtgctttttacaagaagaagtttctgaaacttaaatttcctagacaataatctttgacacattgcaagtatgcacgtttcagcttctgcattactgtaagtctgatatgggtttctcatgtttcaggaaatttcacaacttaggtataagctatgcccaggttacatgaaggaacatcaattttggggaatatattttgctcttgtaaagactcacgtggctgagtaagttcaattattttttgtatactgttaactctaggtgagttgagttgagttgagctgagctgagtctgcaccaagtaccaaccgggtccttttgataagaaatgcctgaccctgctgctagaaaaaaggacatatttaattgcttgtgtcttcttctgtttatacaataacttgtgtttcagaacaaagtattgtcagttttgattgttcataacatgcctaaacaattttattaaaaaattgacctttttcccaaactagaaaaagcctgcattttgttaagcttataacttatatctagtgcatctatagcattataggtaactaattttgctagggttaaacttcaacactgtgtttggtgagagggaaggaaattatgaaggtgggagagtttaggaaagatggagaggataacaagtctcctcatgttgtttggtattagaagtagaattggaaggatagaaagatagttatttattaaaattactatattgtcctcttcaaatatatattatttacttttttatgaagtgtatttaggatatttaataaactttattttgtcctttcctctcttccttccacctttggtaggattggattttgtacatttggagggagaagatatccttccatctttcctctccctccttctttcctacctaccaaacacaggatttattctctcttctaactctttccttccaccctaaaatccttcataatcatgccaaacatactgtaactctcctccagataaagtgttagtattctacttattgacttgagcactgctttgaggcaacaaggtgcctagcaccactatgagattggcgccctataaatagttagcggttttatataatctttaaagtaaaaataagcgagtcccgatattgaattgtactaatagcgatattacacttcacaatggtgctaggcacatgggtgtcttttagcatttctctatggacggacttagggaagaagattagaaagcataaatagagttgttagatgattggtggaagatatagttgattgaattgtttttaaacttgatttagctaattaaagtagtttgtggtggtgtgtgagtaattattgtttttaaaaggaattgagtatgtaggatgtgtgaggcactaccaagtggttccatgtgtgaatggtacgatttcagggtaacttattgaaagaagaaagaaaaaagtttatgaggatgtttggactttggagtgaatagtataatagtgaatagttgctattgttttagtactttctgaaaactgggatttgattttcttgttttgtatttattatcagatacgagcttcatgcaaaaagactagctaaaaggagagagattgcattggagaatggaaaaccaacggataggagtgcatgtgaagttgaaatgtcagagacaaattcagcaaatttacccccttcaacaccatagccacacatcataattgtctttactgtgaggtagaatagcattattttttaacaagttttctgtaatttttctctatggcaactgagcaagtacaaaagaaaattaaaaacaacaacaataataataataataattctccatgcatgtcatctgtagtctgtacatgttgatgctctctttcttaatacagtttctcaatagttactttacattgttagcatatatgttttttttttctttttatttcaacaccatagccagataatattatgattgtctttattgtaaggtagaaaattactatttaacaagttctgttattttgctctatgtcaacagagctagtacgaaagaagattaaaaaaatagtgataatatttcttcatgcatgtcatctgtgttgatgcttttttagtatatattattattttatgtatatttggatttctgcatgattttttttacatgcacataacagggtacaaactttatttatttgtatgtatttcagtgaaaatccactcattccaagaagtgcactacacacatgatataaaatcaaaacctcaaatcagttaacctaacttgaaaaccacccccattgtgctcattcattcattctaatctttgtatttagacacacacccaaaactcaagttttgtttttttgctttttatggagaatgcaaattatacaaaagatgaaaaatttgaaaagaaagattttgatttagatttggggggtctcaagttggtgttgaagattttgctaatttacttctttgtcttcattacatgtaaattttctctgggtttgtttggtataagacactgaacaacttgccctctctctctagaataatgtgaataagtaaatggtgaatagtgtaccctactgtaccaatgaacacagccaaggttaagattttaaaagatatgttcaaagtcacatcatatattgttgttgttgatgttctgtgtttctaaaaaacactaatttgatctactcaccgacactagtcaaatctcactcatgagatttgtgtatatattattatacatttcattctgtcgttttgttcattaagtaaaatacgtgtaataatagaattcaaaagcaatcaaaactttaaaaacaaaaaataagtatatttcaaccaactgccaacatgggtttgcatggtccatgtttgaagctggcatttattgctttctcatcaaattttttgggatcatatttgcacatgtatcgctattgatgtcgactaatcagagctggttcaatgcgtttagtctataattatttggaataagaagaaaaaaagcaaacaaaatgtggcaaccaaacaagaagagaagacccataaccaatttcatgtctgacattactgattaagtaaaaacttatatgggattcataaacattaaaggctttgattgagtgagaaagagagagaggaagatggtgaggatttcaaagccataaaagctgtaaaactcaatcagtgtgatccgtacaaaaattggggctttaagtttcaacaatttaaaccctacaatttgatgcaaagcaagcatggttgggttggacaaaaagatctggcaaaggaaagggatggaagagaaataaaagacatcatcaaatctaagttgaacaatacttgtctcaacctgtagtgaaatgaaatgaaatgtaacagagcacagaaccgtacataacccacatgtgaattaatagcttttacaatccccacatatggccactactttgctatgtatatgtatatatatatatataaaataaaggatcctataataaattaccctagagcaaaactgcagcagcttttaccaccacgacttcagtaaataaaataaaaaaaaataaggacctaattttcaacaaactaacaatcaactctgacaaaaataaaaggacattcacagaagagcctgagtcttcagtagtacgactcctataaacaatccaaaactgctcttcaaacctacaacatcaccttccattctttcttcccaaatttttattttttacataaataaatatggctcttctgtttcatttaccatatcctatttttattacagtttaggtgaaaataaagaggagttctagactaaaaagagtaattttttgatagattcaaacatcaacttcaaagacttgaaataataaccaagttatgtttcatttgagggtgaaaaatactacaataaaaaagacaattgaaaaacaaaaaacaaaacattaatatgagaaaggaaattggttgtttgcatttatttctgaagagatgagtcattctacctaaatatggacaacggtttaaactgaaaatctagtgatagatacatcaacagaataatcaaagcctaaattacttttttcttttttccaatctcttctcaaatggttcctttctctcaagtaaaaaaactaaacctacttttgtacttgagcaaataccaaatggttcagtcaagttcacaatgttattaatagttaatccaacttctcttagcactaattatggactcagaacttgcagtctcaaattcaacttccaattaaatgttcctcgtctagggaacgacttgcacccattcgtaccttccggggagtggcgaatcaatagtgatgtcaaaattgtacctgaaaaaataatattaaagggttcatcagttatttgtatatttgtgtgctgtggtcccaaattgtgcaccactagcagtcaaaac

SEQ ID NO: 19939 - DNA, 4990 bp, Cannabis sativa
  modified_base (256)..(259): a, c, t, g, unknown or other
gagagagagagagagagttacagtgggagaaggaggggtttgagaagcgttgtggaatagctgtgagatgagaagaaggagaagccatggcctctttctgtgtttgtgagacaaacacaactcaactctctgtctgaagaagaagataattttcaggtgctcaattgtcccaatttccttgctggcatctatcctcttttcctattggctgcccggatttgttataatatgtattttatattattattattattannnntattattattattattacattttttcactactaaaacattacattttatttataaggaactaaaccattatatttaattaagatttactgttttattaaataataatttggacgaatttttcaaaatagtatactaaattaattttgtattaaaataaatttgataatataactgagagatattataatcaaactgaatatattttttatatgagaattgccaaaaaaacatcactagtatttagtcctatttttagtgtcatactagtattggtgttattaaatatcaaatctcaaatactttaaaaaataccgcaaaccaatcacaaaatgctacctataaaaattgttgagcactactcgtaccaacaacattctctttttacatttattcgcattgaacactgattttggattaattatattaaaaaaataataaaaattaaactcaatttacgattttgtactatttaaaaaattacaaaatacagtcatccatttaacgtccaattgtcatttgtttcttaaatgaacccaaatgcttatatttaatatttaattttaaattgtaaaaagaaaaaaaaacaataaatattaaatatatttaataattagctatacatgaccacaacctaaaagaaaaagaaaaaaatagactaatcagatctaatagcaactcttagataaaaaagaaaaataaaaatgcccatgaccaatgattactatgtttagaaagcacatcaaaaacatattagttaagcaaaagttagctgcattttcatcaaaattcagaatttgactgttcatatcaataaatatatatatatatgtgtgtatatatataatagaatatacttcttaacatgcaatgcatatatgtaggaagtaattcagaactaattagatttaagaccatacaaatcattttaacataaacatgtcagtgagtgtggctgctgcagctagagaaccccaacaaacaatttttaatctgctgctgcagctaaatttttacaggctacacaacaacccctttttacagatactatgagaatggcacccaactaatgggaggggagggatttacgcaaaaatttagaataaccgcccgatggggactctaagatacagttcgcccgtagcatagagatgccaggtatagattcttcgcccacttctcctgcaaataaaaccaaaacacggttgataagattgtgttaatttctacaagttttgacttgaaataaggtttttttgggacggtaccttaacatgtgtgcttggaaattgagaagtacgcaatgtttcctgagtttcatccccaggtttacgcctgggaatgctaagaataagggcggattggtcccaagttgcggcaattgatgttatgcggtaaccattatcccaacgtctgtggattccctcgctagggtagagaaaatcaagctccacaacctatatgagacataagacgttagatcgtgaacattggagaagttccccaggtttacagcatgcaatgaaatgtgttcagaatttgggaaccgatacacgaaagagagcatttaaaacctgggcaaggaaatataaataaacataatagtggaaatggcaagaaccgagatgaatgggtagagcttcacctgatcactgtagccagcattgcgagacataacaaccccccatcgactcccagcagttgccatagaggtcacgtgaaagccttctctccattttttattgatccatttgaagggaaatgaatcacttactttgtaagattgttgagaaaattgagttcctgcaacattaaagtgcagaattgagtacaaccacatcttagaaacacataaatttgtatatgtgtctgcatgtgtcttaaaagtttcggggttttcaatatcaactggcaatgacaacaaagctaaaataataattgaagggggaaaaaaactaccttttgacatcacaacaagtgagcttccattgttggaacctgcaatagaactaatgtaatagttcttctcccattgttccataatccattcctgtgtatttgaaaagaaagtcaatttaatagtcccagacagtatccaagcaatgacaatgtgactataagcaattaaaagtacacagacagaaatataccttatgtaaaaagaagggtgatagttcataaacttggcttgtaaagccagtcccagcgtccataataagtgcccagagattggaacaagatgacacacaacttatcagtaggccatctgcaacacctttttcaacgtgttgagccaatcttgcatcagccacattataatggtaccttaattacacaataataaacggtgatcaggcaaaacacaaatggataataatataccttgcctacacagcgcggcataacttacagcggacattaatccaagaattcattttagtattaccaacagaacaaaataacataacctaaaattcagaaattgcacctctgtttcattggcggccgagcattgtaaactgaaatccattgtgtcgctggaactcctagacggaccttcttccttggttgcccatcatcatcttcctcaatattcaatctacctcgtttttgtccaacttggctaataatctagcaacaattacattgagatagtgcataaatacgttatacttaataagcatgagttgaaatgagaaaaaaatcacccatgtgttcacactactttaccttttgagcaccgtcaattttaagtggcctaccggcgggatttgaacctatcaaaccctcgaataaagatattaattttgaatagttgggctcttcatcaaatttcatgttaaccacaatctccagaaactgcttcagaggtgcagggcagaagcagcacaacatttcaggagaagttgccatctttttcttgcaaactagaaatgatttgttatcaccctgaggaatgaaaaagtcgtagagaacgtgaataaacaaatatgtggaaaaatcagaaaaaggaccaaaacaaatatataatatcaagatatggtgtacctgataaccctgccatggtaacctccctcgtaaaagaaaaattagggtatatgctagagattccagatcatctcttctgctggcagttcttcccaagtgagcatgaacactagcatatcgaacagttcctctaggaattgaacagaaagaaaattcttagtcgaagttaaaagagctatatgaaaactaactactgccaaaaaactgcaattcttaattcacctaaacatgtcaggacgctgatcatattcaacatgctggccattagagctgtctttccactttgttgctgaaatatcatccaattacaaagaaacacaggagattataaactaaacaagagaattgaaaacaaacacaaattcaaaagatgaaatgaatttacttacctaatccaagatcaacaagaaataacttcttctcttgtgccgttgatggctgaccgagtaaaaagttttctggcttaacatctccatgcacataactgacgaaaagaatataagttgaatcaaattttataagttacaagatgagaaaaaaggcaatttcggatatagattggcataccctcttgaatgcatcttctctaagattgatagggactctacggcaatacaggccaccatttctgcagacatcctgtatatatgcgccagtgcaataaatttgagtcagtacatttagaagtagtcatcccaactggaagcataataattataactcccaattttctaccaaacacaatcagtttaacacaacaaaatgagccttgaacaatctctatcacaaagaacaccccttttcagtttatgattcacattgattacattatacatccaatgcactttagcttgaatgcacttaatcgattaagcaaatcaataatacttgtggtcatataaaatatttggttccccatgactacatattaaatttattggtaaagcctgatgtgtaaaaagaataaacaataaaatgcttgataatcctgaatacttacgcctgccctgaagtgttccatacatcccataagctcggacctagcatgtccataacctacagtgacgtattacacaatatagtttcataagtaaatcacattggaaaaaaatacgataaaggaacacatgatagacacgaagaaggaaaaaaacagcataccataacatagtaatctccctgtcttcctttatagtgcactttaggcactccgtgactaccaccaagggtgctgttcaaagaaaaccaacattaagaaacgaccattcactgaagatgtgtagatactatatgttatcataaagaaagaaaatgaaatagaatacccacttgtagacttgccactcataaggaggaccataattacaacctttgctgttcctatgctcaaatttaagagcaacctgataaaaattaaaaacaaaacattaattccaaaaaaaattaaaagatacaaggttcttctataaaataaaaacaaaaaactgaaatttaggctggacgaacctccgttgctccaggaccgctcaagcgatcacttcccccagtaacacgacgaccaacaaaaacctgcccaaacccacctttacccaacttcctatctaccttgtagagcggtgaacctcctacttgaaccttaaaaagagaaaagatacaaaaagtttcaatgcaaaaccaacaatagc

SEQ ID NO: 19940 - DNA, 2937 bp, Cannabis sativa
gattatattgaaatgggtttttttagggcacaaaacccaacaacccaaacactagaccctacaataaacataaacatttgttccttgtgtttatgtccccaatgataccacctctgtgatacctcttgctgggtaagcatctcacccacctataccagcaccaactcatcagccacctcctacaccaatcaacaccacaaatgctgcttctacatccagacactaatagcagcatggtttttctcaaccagcaccacaacagaaattgtctatttctcatccatcaacacaacaacaacagcaacatgctgacactcaaagtgttatccaatagcagcctcctactccaattcactcacaacagcagtatactattcctcaaaatgttgctcttgtgcccacacaacatcctactgcaactgagaatgatcaggtttctccaccagccatctccactgctgctcaagtgcaagaaatccctgcaaatgtacatcaggcttaaccatccttagtcaacaacaagcatcctatggtcactcgtgctaaggttggcacatacaaacccaaagccctgatggcttccataactcctttcactgtggcttcagagtctcctcaatggaatgctatcatgaacattgaaatacatgctttaaaaagaaacaagacttgggttatggttcctctttccccagggaaacaagccattggttgtaagtgggtgttcagggaaaaagaaaacacatatggttcaacaactcagttcaaagtaaggttagttgcaaaaggtttttcgcaacaatatggccatgactttactgaaactttcagtcctgtcattaagcctaccactatctgagtcatactaacaaattctctatctgaaggatggtcaatcaagcaattggatatcaatagtgctttcttgaatggggaattagctaaagaggtttatatgactcaaccccctaatttaattgacaaagattttcctgatcttgtgtgtaaacttaataaagccatctatggactcaaacaggcaccaagggtctagtttgataaactcaaaagtgctctaaaatattttgctttacttctgcaagggcagatcactctttatttaccagagttacagattgtcataccacatttctcttggtttatgtggatgatatcatcatcacaggtagtcaataacagttataaattcacttattaaagatttatatgctcaattcatcctaaaagaccttggttctcttgactacttctttggcattcaagtacatcaactctccactggattacatttgtgtcaaaagaagtacatcacagatctgttgtgaaaagccaagatatgcaatgaaaattatttgccaacacctatgattggaggagaaaaactgtctacattcaacagtgaccccattgctgaccctaagtaatatagaagcattgttggagcattacaatatgttgtcataactaggcctaaaatttcatatgctttgaacaaggtctctcagtatatgcataaccctcttgagtctcatttaaaggtggtgaaaaagatatttcagtatctaaaagggactcttgactatggcctcctattaaaatcctgtcctgcattgtcccttatagggttttgtgatgcagattgggcctcgaatcttgaagataggaggtccacattctgcttttgcatctacttaggctcaaatttgatatcttggagctctaagtaacagaaaacagtatcaagaattagcacggaggctaaagatcaaaaccttgccaatgccactaccgaggttgtttggttacagtcattacttgcagaaattgtcttggctaaactacctgttcctacaatatggtgtgataatcaaagtacagttttcatgtctgctaaccctgtccttcactcatgaaccaaacacatctaattggatctttattttgttcgtgaaagaattctgcagcagcaacttcatgtgaagcatacccctgctcaagaccaagttgcagacatactaactaaggctctttctggacctcgattcaaactattgtgtgacaaactaagcctggcttccttatccatgcttaatttgacgggtgtgttaagtagttaattaaagttagttattttggttaattaactgtcatgttagttaagcttttctctaactaacttccaatattgtacttgtatataaagagctctgctcttctaaattaatgcaatgaattcttttctttcactattctatattcaatatcgtggatcttcatatacgactccttatggctttggtcgtggatctgcatatacgaccctctatgacttcaattattagctaaataactccagtcataaagtctgttttgcctttgatttttttcgacccatttagttatacctgtaacgcttacgattacgaatttctcgaaaattgaagctaaagggccgaaaaaatcataactaaaggaatattaaacttttgttaaaaattgaagtaatatatgttttaaattaaaaaaaacaaggaaaaaataaaaagaaaagaagatgtcgatgttccaaaagatgatcgttgttagctaggttgatattttttttgtatgtttgattttaatgatctaattaaatattgttatagatattagtgaaaaccaaaggtttgaaatagaataatccttgagatatgaataagtttagttcatattataaattcttacaaatactttgaatgatgaacaaataaagaaaaaaaaatttattaaattcggttttctgaaaacaaacaaggattcagaaagcaataataaattaaaaagaataggatagatgcagagacttaatggaagttgttctaacaaatggagtttggccgcattaatctggatttcttcgatttttcatgaaaaatc

SEQ ID NO: 19941 - DNA, 9753 bp, Cannabis sativa
  modified_base (9619)..(9621): a, c, t, g, unknown or other
  modified_base (9721)..(9728): a, c, t, g, unknown or other
aaaagttaagaaaatagtatatgaggtaattccccttatttatttctaccatataaaagtaaattctattatttttttctcatataaaaaaccccaacttaaaagcctcaagtccaaaattacttctgctactatatttgagattaactagttactacattagagtttcattttttttgttcttttgaaactagattctttttaatattactttgaaaattaatataataatataaattataattttttaaaatatatataattaagtgcagatatttgcttgatatctgtattttacgaaattgattagattgtattgaatcacatactctatgaacaacatatgtatcaaccacaggatatcaaaaatacacattttgcatcaaattgaggtttgacatccctcaaatattgtgagattttacataattagcatataaaaaccctttttttctaatttatacgctaagcaaggagaaggcccaattttttttctttgcaaagacctcaaaacaaagtgcaaacaattgggcaccttaataggccggcccagttcctctggaccttgtacagagaaaaccatcagttgaacaaactagaataaaagtttacagcaacctacaatatatatgactaatcgataccatatccatagtcaacacgataagtatatacagcctttacaattgagatggatgacaatcatgttggagcattttgatgggcttctccttgggaataaatgtagacaatataacaagtcattttttcatattgggcttctttcttcattcttttcaatcacttaaaattttatcatttataatccaaataaaaaaaaaaactaaaatcaaaataaattacatattttcaatcaaaataattttacaattaaagtcatgaaaataaatatttgaattgattttttttttatacaaaattaaagacttaaaatgtacaaatttgagtcgtaatcatttgtcgatatggactcccttgtaagattgtgtcggacaacgggaagaagttcgacagtgaatattttaccaacttctgtgtccagcacagaattgtgaaaagtttttccgttgtagcccggccacaagccaatggacaagtagaggccgtcaacaaaatcctcaagaccacgttgaagaagaagctgaaagcttgtaaagctcagtggctagagaaactcccttgagttctttgggcttgtaaaatgacagaaagaacttcaatggggcatacgtcgtatgcaatgacctatgggtgtgaggcagtaatcctggtagagaccacaatcccatcccatcgacgagatacttccgacccttcccgcaaccactctctgctccaggagtcactagacttgatagaagagctacgagaatggtcgcaagtccagctcaaaatgttctaagaaaagatcgcctgacacttcaactcaaaggtgaaaagtcgtaccttcgatattagtgatcttgttctgcgaagagtattcctagctttttaggaaccgagagtgggggtgcttgggcaaaattgggaaggcccctacgagatactcgagaaagtagtataaggtactttttggctaaaacagatggacagatcaagggtccccaatgcctggaatgcggatcatctgcgttgatattaccaataggtggcgaacacaaggcagtgacactatttggagcgcctttttgtaaacagtctatgtaattaacttttgagtaaatggcctttaggcatcgtgcaatgagaacaaaagtactttatgtttacactttacactttacattttttaagccataagctatgttttaaacaagtgaccaaaaacgtggagacatccacacttctcagctcacttgggggtatcatgcctaactgactgtgcccccaaataacgtattgtgtgctgcattttgttgtttcgtttactttattttttttttttttttgttttttttttttctgatggttctttgcttaaaataagatgcatttcaaccaaattccttagaaaaagaaaaccgcttcaattccttcttaaaacttaaataatacactcaatatgaaatgagaagcattttcagccacaactccctaaaatgggaggtacttgcttgaattccttcttgaaaacttaaaaaaaaaaaagagtcgtaactcctatagattttgatgttatcctgaccaggaaaataccatctgaagtctatatcgtttgaaaccagccttcttagataaaaaggcccaaacggtcgaaaaatattagagctccgtgatcataaagaatccaggaacaacttgaaaaactgtccatgctttcagcagtttcagtcaagaaattctcaaagggtcaagaccaagaccatcctgcctggcaaaaggaagcagataattataaaacttgatacaaaatttaatatttaattaacatttttattaaaaatatacacaaaaattatttttatcattaattttattattatactaaatgtaaaaggtttataatttaatataataattaaatttaataataaaatattaaaaatattataaaagtaattataaaaccgtgtatttattgtgatgcaaatttacatcatgccatatgatttaaatttggatcaacttttgatacattattagagcaaactttttacaagatgtgttgattgttttctaaatagaagctttcttctttaatagagcaccaatttgtatttttattaaagatgttcttagacaataagttgagcatataaggcttaaaataatccttaaaagtattgttagagtttttctaaatatttaggcgaggaaggaaatgacttttaggataaatgtctttaatcatgtttaagtctttgagaatttttcttctcttctttattcatatataatattatgtagggtaaatagcggcataagtacccaaagttttatgtttgtaaacggcataaactcaatgtttatttttagtgacataagtacccaatgtttgtaaaactgtaattttcttctagttttgtcagtacagactctgttttgaatttattaaaagaacattggaagtaactgatactatatatttctatctatagatccgatgataaaaaatttaggccttatacgtgccctgtttaagataatatcaaagacatgtactgacaaaattagagagaaattatagttttacaaacattgggtacttatgccgctaaaagtaaatattaggtttatgccgcttacaacataaaattttgggtacttataccactatttaccctattatgtattattattgcaataagttgtaatctcttcgtctattatacatttctatatatttttagagtattgttattagacattagtagtgtataacaccttttataagtgacactctacgatttgttatagcgatattatccaaaaactttttttttaaattatatgagacctaatatataattgtactaataacaatatgacaataataaaaaaaaaatgttagacaactgatatctttttatatttctctatttctttgtatgtatttgattgtaatcctttcctattcccatttgtaatgagaaattctccgacagagacaaacaaatataacctcgtttatttaacctacgtacttttaatgttccagttttacaaaatggtaactttgtcccccatttgcttagcaaggagcatgaaagtagtattatatatagaactaaaattcaaaagacattgaaaccgcgttctcctttttactgtttcaacaaaatattgtaaaaaattattttacataaagttgatgatatatggtcaatgtaccaatatggaagtataattttaattggagcttaaattggtatacaagttaatcatttgtaatgtgtcatcattgctgttgagtaaattatgtaaagaatatgcactagtttttggagcactgcaaaatgtattattaaaggacaaggatttttaataaatttattgattggtttatgatttaaatatgacataacttctttcttttaatgtgaaatttaattaacactagttacttgattagagacaaagtaatataagtgcaaagattcaaagggaatttggccgaccatatatgtcaatccaacttatcaataacaccatcatttagtcagagagagtgttagagaatctctctaataaataattaacataattaaataaacgaaaattgaggttttttgttggatttgccaagtccatctccaatgagagtgcctcctatgcttttggtactatgataacttaaatctataatgaagtttattatgtatttggtatgagtttagtatagttataatgaagagatttttttagagagggggacaagagttctttcatgaccattagacagcgaaggtacatcattgacccatgtggactccacattgattagatacataattgaatggtatctatctagctagctgtattatgtataaaggtacagagttatgccactattcaatggtatatatagcaggtatatactcatactatttcatactatatctttaatataactaggaataagataggatgtagcactcgacgtactatcattgcactatttagagtgcatttgaaaagctgttatataattagaattgtgtgtaatctatatatataccattaagaatatatataaataaagaaaaccataaaagtaattagaggtggtattatacaaaattttatttttataattacaagtaaaagtattaaacaagttgaataatgcggtactgtaataaattgtttgaacagaatttatctctgttctatcagacacaaaatatgacaaaacagaaatatactgtaaaaagtaaaaatgcaaaaaataaaatgacacaacaatttataagtaatatcaacaataattctttcaaattactcttagtccacgaggccacgcccagagaatgaaatttattagatgaatctcaagtgattacaaaaccaaattaacttatacaaataaaaattccctctttgaatttgctgtaatcgttgtaatctattcttctaatcaaatttctgaagtgtcgagaccttgaactctcttcaaatcgtagcacttgcacacttcatcccgaagagtgactcacatgcaatctttctcccgaagagtgtttaacttacaatcttcctcttgaagagtgactcacttgcaatctttctcccgaagagtgactaacttgcaatcttcctcccgaagagtgactcacttgcactttttctcccaaaaagtaactcacgaacaagacttctcccgaagcttgatgaacaatatccaagatgtccaacctgcacattttcaacaagaaacaatacaaaataacacaataataaaacactaagaacttgttggactcaagttcttcacacaacaaagaaaacactctctaatttagaaagtaatttaggaaatgatataccaagtgagctaaccaataccagcaacatgagggtgtatttatacactttaaaaactctctaggtcgtggtcaaacaaccaagaaacaatcaggtaaataaatgaaaatcttcccaaataggaaagtcaaaatttgtttaaacagacagtcagtctgttcaaacaggtgcattgaacctggacagtttttcaacaaagttttcataaataaacatggcagctttgacaaccattacacacacagctgtacacaataggaggcgggaagggaggaacaatcctaatgcgatgagatgaagagccttaggacaaatgagagagatgatacggttctaatttttccttttatatatacaaaagtattagcggtgggccttattcttccccactgctaatactcaaacaataataataaaaaatataattaattgtattagcaacgtaaggcccgctattaatacttttcaagtccgccgctaataatttttaaaattaaactcacaaattttctcgatcatttatatttataggtttttagtagcagaattcgcctctagtcggtttgctgctaatactttaatatacttttttttttaatttaaactttagtactgtcagatctcgtattttgctgctaataactatagtattagaggcggatttggtctgccgctaattatttcgcctctaataatcaattttcttatagtgataaaggatattttgttctgctatgccccttctatttttatgtctttgtaattgtattgaatattgaaacaagtttacaaatgaggagaataaagtccaagccttcgggagaaggtttctcaagcctttgagagaagatagttcaagtcttgcttcgagacgtacacagacctcaagaagattgaaggggtttgtattcttgaaaggttagcaaaaaaaagagtatttttatgcattataagtcaaaatttttgtatttttgaaatcttactaataattttatctctggacgtgagctcatggattagtagtaatatacaaagattgctaatatcatgcataaaaaacttgtgtatttttattttctgcaatgtagttgttttttgattttttggacggtagttaatttgtattcaatgaaatgattaaataaataataagttaataattgtaaaatactgaatttcaatgttaataataaggggtgtatataaaaaaattaataggcattaataactgtataaattattccaattcacatatttcaatttggtgtaagctactttgtgtagtgtggctatggtttgatggaaacctaacaacaagctaatctcagctacctttgaaaaaagttagaatttgcagtctccattttgatatctgttctacttctcatgtttttcaatttaattaatacatttatattgtagtttgattggttgacttgacactaaatgggcacatgcaaatagaaatttagatatatatatttatacttgcaaaaaactaatttattattgtaaatacatctagtatactataattactattgtagatagatacatgtttttcttctttcatgcatgttccatgaatatctagccagcaagcactattaccaacaaagagatgagaactcatttaatttagtaggtaccaaatccatatgccaaacttttactttcggctaataaaatcactcacattatcttttatttatttattttcggagaattttattggttaaaccaaaaatttatacacaatgctactagcaaagttaggcaagaactcaatcatccacattatttttacttaaaatccatatgtatatatactaggcgcgtggagtacatgccacaggcacgtaattcccatcaaaatttgtgagttataattatgtatcttacttttataaattgtttaaacaaatattaaaagaattatatttaaaaaataacatagtatagtatagtataagttcacatattgaagctaaaattatcagtcatcctatctaattaaatataagcttatatgatttactctactattatttactaataaacaaagtttataagaaaaataaaataataattaacaaaaaattagaaaaaaaaataacaatacaaaaaaataatataacatcgtatagtcttctacactattatatatttactaataaataaatatgaaaaaagcattaataaataagaagcaaaaaaattaaaaaaatgagaaaaaatggtaaaaaatgttaaaaagattaaaaaaaaagtttaaaagaaaaaatggagtaaaaaaatgagagagatttattgagaaaaaggaaaaaaaaaaaagtaaggttaaaaaaatgacaaaaatattaataattggtacaaacaaaacaaaatacacaactccaaacataacaaaaaaactacaaattactaagaatcttatttagtttgaaaaaatataaagagcacactatagaaaaaccttacctaagcggtgcgcaacaagtaaaaaaaaaataaatattatatttttatttattattttgccacttattaatatagttaattattttaaacattttatttatatatctaatagaattttatatacttttaataaaaattcaatgctttgattgacatttttgtacctatctatcaaaaaattgattaattttgccctaatgtattggtgcactattacagaattttggccaaatataatgttgacttatttttttaactcaaattatacatcatctattgaaaatgataagaaaaacaccaagggagctgttaaacatcataaatggtggaatatcgttattagtgcatttcaatactaggtctcacaaattttattttagtgaataatatgtgaaactactaacgaattattaagtgtcatatctagtattggacatcttaaggtgccaaatattaatattctattaataataaaaaaaataattcacaaaaaaaattataatacaacaaaaacccacagaaattgtaaaaaaaattgtagaaaagatatacaaaaaaataatttgtaagaaaaaaattgtaaaaaagtaattactaatcattcataacaaataaaaacaacaaaaaaacttacattaagttttacaattgtgcattggaatataatactaaaaattaatgtaaatatatcaaaaaatcttttttttccgccatatataatacaatttttacatttggaaatattcttacaaacttatatataataataaaaaaatttaaaattctagaattcgaaattaataaaaatatgtacattttaattacgaaaatattaagggacacataaaggtgtcaagcactacaaaaggtagcataccgatattaatgcatttcaatatcaactcatgcaaattttaatttaataaataatttaaaaaactgctaactaattattgggtactacatagatatatagtattgagcaccttaaagtgccacttaacaataatagtacaaaaaaatatttactaaaaagaattaaacaaagatcattcataagaaaaaaaaaaaaagaaaaagcaaaaacaaaatgataattagaagctaataaaaatatgtaatattaataacagcaatattaaaaggcacattaaattgccaagtaccacaaaagatagcataatgttattggtgcactttaatatcacttcccacaaattttaatttaataaatgatttagaaaactattaatcaattattgtgtatgtgaattagtatggtattaaaatttttaaggtgtcacattgtgggaattttatgtcttaaataaaactcattttaatataatcttattcgttatcaataaaatattagaagtcatttatgttaacatgtattattcatgtttatgatttaatatacaatttctgttaaatccagaatatatagttattcacaagtacagtggtgtcaatatagtggaaagtaattgtgactatatgctttaaaagtttatgtcccatgatacatcagtgcactgaatttacactgatgtgatagtcagcaataaagtttacttacaccttgaataagtgttatgttctttccagaatattggcaaagtatgctagnnncggatgtatggagtatacattgatcttgaataagtgtatggagtatcactagttaatcttagatcaaaagatcttaatcctaatatggttaggttcgatnnnnnnnntgttatttatgttcttagagttgtt

SEQ ID NO: 19942 - DNA, 1412 bp, Cannabis sativa
  modified_base (716)..(735): a, c, t, g, unknown or other
tatatatatatatatagattacgttcgaagaaaaacaaattccacacataaaatttgttatatttgttttgtccgaatatttatttctatttttttattatacattgataataacttagtcaagtacatgttcttaatagattctcaaaaaaaaaagtacatgttcttaataaataaatatattttcatacaaaaataaaataaataaaaaataaatatattttggtgtttgtaatgtttattattacatatcggttcaaacaattttacgaatatttgttgcttaatataatctgtgaaacacctctagagatcagaatgagattttaattttacaaagctgttaaaatatataacaaatgtataggatgatttttgaatctttgggtataaggattgaaacactttatgttatatataattgcgttaatgaatctgtcaaaacaactctaaataaaaataatatgagatttttacaaattaaggctggtaaaaataacataaaaatataacaaatgtataaaaggattgaatctttggaattgccctctctcatattcaactaccactttatcctaataaattaaattttgcttaatacaaacaatggttaaataccgttttggatcttgtgttttactaaaattactaattggactctctgttttgttaaatgacaaaattatggactatatattttctaaaatagtacaaannnnnnnnnnnnnnnnnnnnttgtcaaaataaaacttaataattgatctagagatattatgacaaaacttgttacgttttattatttatttgttcgcattagaaattatcttaaagttagttatattaaaaaaataaaaatattgaaaattgagctcaagattttatatttttaccattttgaaagatatagaatcaattttgtcatttaacaaaacaaatgatccaattaataatttttgcaaaacatatagtccaaaataattgtgagagacaaacaataaactagttattaaacaatgaggaatttcttctaaccaagaaacctcgtcttccatctgtaatgcatatgcaactcatatgtaatgttgcggttttaccattttgaattacatgcaaaaggcatatacaactgaaaagacagataacaaatacctaataaatctaaaaaaaaaatcagtcgccgtataaaaattgcacccgcaaatcgttaatctaatatatatcttcgtttactggccccactaatagctagaaaattaagaagttaagtcatagaaagctataataacatgagttaatgatattaagggttcaaaaatctaatcaaactacagcttagaataagtcactttttccttttccaatccaatgatggagtctagagtagttaagtcactttacaatgagattatctt

SEQ ID NO: 19943 - DNA, 2979 bp, Cannabis sativa
ttaaatttaacagaatatttttttatttttaaggtatattctgttaaaccaaaaaaatatcgttagataaacacttttaatatataaagatatatattgacacataacgagttcatgtcgtcgtggtgtagagtgcgatcctcatccttttggccttggcaattagttggatttccacattcatgttttgacaattaatatgtcaagttcaagggttatacgactcttatggtattattccttaaacttttaactaagatctggttagttagttagttatccattaactaacttaactgtcaaatatgatagcaaacatattggatcttttggtctatataaagaggacttcacaagagaataaaatgaataacaaaaaagacacaacacactaaagagacgtcagaattacagaagttaattcatatatatcagagttaaatttcctacaactctttatcaaggaattgaaccaatcaagagcataagtgagagttgttgatttttgtctaattttcttaggcattctttattagggtggcacattcgtactcaaaaacccacccacctaggaaactcgcctaactcgaaaccttaaaaactcaaataaacgggtttaaaaaattataggatgggttcaggatacacccagttacccaccgagccaagtttgggttctaaaattgtgacacccaaaaatctggacccacccaaaaaatcattttatatatgtagatacctaacccctttaaaaacaaaaaaaaaaaatgtaaagaaaatgtgatatttaaaaaaatgtgaaaaaaagtgatcttttctttaattgtaaaaaaagtgaaattatgtgtacttttatgaaaaatgtagagagagagaagagagagttcgaaaaaaaaaaagtagccagcccaacccgaaacctgatcttgtcccaactcgcacttgatccacgcgagcctgacacccaaaaacctagtccctcacacaagcaagtttagttccaataaaatacaaactcaaaatccgaaaaaactcactcaatgtgcactcttattctttattattattggtccttttcttattaagttgttctttttgattaactttttatcaagttgctcatgaatagtttgcacctcctttggctaaataatattgtaatttctttttattttggataaatttaaccatactaaatacaatatctatctaatatctgaaattctattgaagttaaaatttggtagcaacaattgtccatttatttttctatttcctagaatttaaagggattatttcatagatatactaaaatgacaaaactttatatttttaccgatctattgtttttatatatataaatgcggagtgttaattttccattatttttcaaaaaaaaaaaaatattgttttagcgttgttgctacgggaaagtaatttttttgtctgaaaaaaaacctaacgaaaacctgtaaaaacaataatcagtaaaaatataattttcgtaaaagtataaataaaaaagtccataaaaatattaaaaaaattattttaaatgtattgtgtgtaaattttctaaatttaaaatgatacaaaaaatactatttgtgctaccactattaagttaagcctagtagtaatagctatgcttcataacaaagtggtgataggtttagttaaaaaatttgacacataatattaaaaattttgcagcataaatacttattttatttaatttgttactaacaaatacttaaaattaaaacttacaaataaaaaatttatgttatttctatcagtatacattttgacactcaattaattgttttaaaaataacacatgtcaataactagttgacttgataatttataattaaaaaaatatattttcttaaacatattttttttttctttcttcttctttcttgctccaatcgaaagaaagacccatggcctctgggttgaggaaatgagaacatatgctgacaacatgaaaaaatgagagctaaataaaagagagaagatcgcgcaagagggtacaggctccagaggttctcaggttggttaagagttttgatggaagaatccatccaatctaggcataagcgaatatatatcgtcgaaactagtttcttcatttagagactaaaaaagtgaaatagaggataaagttgtggggtattgaatttagagggccatagaatttcgtggtagtactggtttcttcattgccatgtggggaagaaaaaggaagaaaaacaatatatttttttctaaaattatcaaactaattagaaatcaacacgtgatatttttaaaataattaatgaatatttaaacatcgacgaaaaataatagtaacttgtgatatttttgctgcacattttcttatattatatttcatcataatcggtatagtgttagacaccttatattaagcgtctaaatacactagttgtgctaaaaatatttatttatgatatctcaaattcccactacaactaatgcttatataatttgagtggttttattttagagtagattctgtcaaatgtctctatgtgtgattatcccactacattataacaaataactatttatgtgtcattgttaatatcattattaaattacttaattttagtggcacttttttattttctttgctgcatattgctatagtgtataaaacacttttataatagaatatcatttatttgatgacattctctaatatcatctaatcaaattatttgagtcatttgtgttattaatctatacaaaatcactatatatatatattcaattaagaacatttttttctactaaatttgattatatatggaagtggatatatggatccattttaatccttgatgtgagtttgtgtattagaaaaatgatgatcacattcatggtgccatgtaagggtgtttatggattggtttggtccggatttttatagtttttattaaactaaac

SEQ ID NO: 19944 - DNA, 2901 bp, Cannabis sativa
agcgagccagcatttgagctattctagacgctaaatcactggaaggagaatgataaaagcctgagctcggctgccatagaactgcattgtcggctcacatttctctctctctcattatatctctacatatgcctcaagtcttggatttggggttttaacaatttttatttatttattcaacttttaagacaaaataataaaaagggtatttgggatttttgtatcatttttttcttctcataaccccatatatgctgctgatgtctttgctcaaaaatcacacccaaatagctttgttattcccaaagcaacaaattaaaaacaaactaaacaagagaaagaaagactgcatgtgttacttactgctagtccacttctctctacctatctttaacatgatctataatttttttttattatttaataattatatatttatttttctctcaactgtcttgtctgactgtctttatctcaagtgccctaggcttctccactggctataaacaaactttgcaggcttttttatgtcagaatgtgaggtatctgccaaagagagaacccacaaacacacacaagttcaattcactacttaaaaagcttcctttttttcttcttctttggttgctcaccaaacagaaaaatagtgtttataaactcccaagtcccaaccaaatataaaagacactgtcttaaaactcaaatcttattattattcctttgttattgtttttttttttcttttaggcacttttttctttatttctctctctctctttctatggacttccatctgaagcaatggagaaatcagcaacatgagtcagaacatcaccaacaacattctgcaaagataccaaaacttgttatcgaaacccatcacatgaaacaagacctctcttctacttgttctgaacctcttcctctgtttgtacctgagccaccaaacatcactaaaatgatcacaactggtactctgtctactgattcaactacttctcccactactagaatcccaagtatggctttctttctttatctaaactgttttttctagtttcttggtatggaaagtttctacctttatttatttattttattggggttgtgtttttccttgatggggttttcattattaccatcattatatctttaaatggtgatttttctcttttcttttgtcaggaggaggaatgggtagttactttagtttggcccaatggcaagaactagagttacaagctttgatatttaggtacatgttagctggtgctactgttccttctgagcttcttcaacatattaagaaaagctttaatcttcttcatacgacaccgtatttcttgcatcattctcttcaaccttatccccattttcaaccttcccctacttgtaagtatcatctcccataattactattacattatatgatctaatgtactttccagtattaaatgtatgtgtatattataatggtgtattatgatgtagtgttacagtcgggttattggggaaaagcatccatggatccggaacctggtcggtgccggagaacagacgggaagaaatggcggtgttcaagagatgtggtggttggtcaaaagtactgtgagcgccacatgcaccgtggaagaaatcgttcaagaaagcctgtggaaatccccacacccaccaccaccaccaccaccggcggcggaaggctcgccggggacggcgtcggaagagggactcttgcttctaacaatggtccatctcctttgtcaacgtcatctaatgcagcccatttctcactttcaatgccaacatcctccatagatctcctccatctcaacaaccggaggtaatttttgtttttgtttttttatttcttgttatggaaaatggcctatttctcttggtctattaagaaacttggaaagaataataatgttaaatcttacttaatctgatttgggtttccagctttgataaatggtacttgttattctagtggtaagaatctatttggggtattttattttattttattttttgatttaaaatatactttattttaaggacagaaactcacatgggggacaaataaataagagtatcaaatcttttaaaaaataactataaaatctcaaattttcttagtaactaagctccaagttccaaccgttgcttttcataacaatcctttgtttttttttaatagtaacgcttcagatgttaaaaatgaaaataaggacttgtttaaaccccataatgaggtctccggcgacggcaaatcggacggtcacatactccggcacttctttgatgactggccgagatcacttcaagaatcaggaaatgtagaaattaataataataataatactaataataataacaataacaataataggatgaggacgagtccaatgagctcagcttcaagcttatcaatttccataacgggaaacaactcatcatcaacttctgatatttcgttgaagttgtcaactggtggaaatggagaggaaatgggccacccagaagcccattctgatcgtcagcagcagtctcagttgggttgggcctcgagtggatgggcttcaaacccaatggcctctatgggtgggccgctggctgaggccctgcgatcctccaactccaattcatcatctcctactagtgttctccatcagttgcctcctcgttcttctgcctctgacacttgcattgtcagcacttaagtttttttttttttttttggataatatatttactttgggcctaaattctaacttgatgctcaaatgtataaattgcatgtttttttaatttttctttaatttaatggtttgtttccactaaaacaaaaagtattgctttgtaacggagtggagtggtaataggatcatttctattgct

SEQ ID NO: 19945 - DNA, 4004 bp, Cannabis sativa
  modified_base (34)..(39): a, c, t, g, unknown or other
tgcaacataaaatgatttctaatcttttattaannnnnnaatctgattatattgaaattggttatatttagggcacaaaatccaacaggttataggttatctttatgcttttcttactgagtctgttgactcacggatcatatgttatgtgcagctaaaggaaaagttgttgttgaatggcactgagtttggagctggatgaagattatacatatcaagatagttcgacttggaatgtttgatctttgggacaactagggctctaagttttgtagtcgctgtgcaacatcttttgattatgtacagttgaaaaatatagatacgagatcttaaattttataaatttaatacaatatatgtttatttattaaagtttgaattttatcacttttgataaactctttgattagcaaaggttacacagtaattatgaaaagcactatagcacgcctaaactagtagggtgttacaattttggtatcagagccgccaggttgtctaccaaagaccgtcaagatatgtacaatcatcatcaaagataaacttgacttacgatttagtaagcctttacttattttagtagcttattataattataaaagcatgatggaaatatgtttgtgatatattgattgattatgtgcatgtctaagatcccatgtatgcggtcttaagtttattatgttgaccattgcctaattaagctagcttatgggtttttaagctagtattgtatggataccagtgtgatgtacatagtaagggtaatgcggtcgaaactagtggcggtcaaggccaccaggaaccccctcatcttcgaggccgaggtagagaccgtgtacaggctcgtggtgtgggtaatgttaatccaccacaagctccacaagattcggagcaaaggtttgctgagttacatgccagattacagcaacaagatgaggagattgttagtctaaggcagcaaggtcctcaagttactcttcttccttagattggtattggtccagtaccaacgttgccagcggaatatcatgtggctgcaaataggttggtatcactgtatgagaggttcacgaaatagggacctccaatcttttgaggaagccttgatgttatgaaagctgagcaatagctaaccaatatgatctagatattgaattttatgggagttactggtagtgacagactggcctgttccatatttcagttctaagaagatgccctggaatggtgggagttagtgtccttcacacaagatgtcgtcgttatgaccagggatgaattccaagatatgtttaactccaagtattataatgaggctgtctgtagtgcaaaacagaaggagtttatagaattggttcaaaaagcatcaatgtcagtgacgaagtatatgaccatgtttgaacgactgcccagattagcctcaagtatagtacttagggattacactaagaaggaaaagtacctatcattcatgatctgacaattacgatcgatgatggtatcccatatgctctgatggtacagaaggatcttcgagctgaacgtgcaatgttgcttttgcatgagccctgagggacttagggttctagtgaagtcactgctttgcctccttctagtttggttaggagtagtagtgatttagtcgcccacgaaaatcaaggaagtacaaagccaaacaggacgcattgctacactaagtaaatttgtgtccaagtctatagacaaatgtgtacccttcttcaacattctcaaaggcaacaaaatattcaagtggacaaaggaatgggaaaccgcattccaaaaggtgaagaaacaaattttcttaaccacctatgctgtgagtgttgccctcacaagtgaagaagatggtgtactacaccctatatactacaccagcaagagactaatcgacactaaaagttagttcccactcatggagaagctgacccacaacttgctcttggcttcctaaaatctaaggacatacttcaagatacaccctataaaggtgtacaccgatcaacagttacgacaagttctacagaaactaaaagcatcaagccgaccactcaagtgaacaactaagacccggccaacattgttcagtaaaggctaagatctcaccacttcattgctaaccatagaaacatatctccccaaatctcccaaatttcgagagaaaagcatgagccaaggaagaagcaagagcaagaactgaagaggtgcattgaccacctgcccgatgcatccatagcccccaaggcacaaaagggcaattgatgcacgaggcaacaaggtcaatttcaaagcttctaacaatgatggtgaacatggaacttcgaatgctggcgtcaggctagcacacgaagcgtaggttaaccacctagacatgcaacacaactctcaactagtcgcaggttatgtcctaggtgactatcagcttaatacaaaaagatgatggcctactgaagctattaagatagctcaaaggctatactaaaaggtaagcccccaaagatggcacaacagctgacacactcgctcaactagcaagttgcgccttgacaaccaaggaaaacttggtacctgctcagttcttcaaagaactatgtccttctttttcaaaaggaatagacatgctagacaaccaacatggatacaccaatagcaacatacctccaaacaaagaccttgcgagagagtatggactagaagaacagttacatggtgtccaatgctacacaacataacacacaaaagtcatatcccaacaccaccaaggagtgtttccaagaaagaagctgtttagctattgacaaaagtgtacaaaggctctacggaaattatgcctaggggcaaagccaattggatgcagatgagatcaaactacagcatcaactgggcctttagaaggctggccaaccatgtcctcagcaagctggccgaccatagaatctaaaatttttcctactacctctacatgttggtcagccatggcctcatccaactgcccaggcaatgctccctcaatatggtgtggcaactggtcttgccctgaccagctcgatccaccaacatcctgctctcatacatttggtctatagtgaccaagaggtaaacaacatcttgctagtaggatcccttaacaaaagggaaagaagaagagaccaagcgaactcaaagcagcatggttgcccttaaatagttactaggcccttcaacaaatagatcgaggaaagaaattcttctcaagagaattactcccaaaacaatattccttgataacaaagatcctacaacaagtatattcaactaaactgagaaggtccgcaccatgttacaagataacagtaaaggtgcatacaagtctggcgagtacaatgagaatttgaagtcaaaacttctatgcatacgctaaaatagggaacatctcgataagtactctcaccagccaacttatcaactagttcctctagcatttcatcgtccaggaacccataaaagagatagtacccattgcttttcagcatggccacccatcactcttcagtgatactcgttgcgcggtaagctgcgtaggggtagccactacgtgatttcaaaagtagatacaaagctctaagcttttgttacacgtgagaccagctgtgtctaaaccacttgctcacaagactaactttttaaagttactcttttagttccacatgcgtactatggatagcaccccaaggaagaacctaggcaaagtctatggaagttggtgaatagcaaatgaccaagatacttgcctgcatggccgcttgagcggcacccatactatataatgcatcgaactagcacaaagaactcatatagagaaattttaatgcttagaataagctactaaacctgcctgtaagtcgtgtaggcatactttgacttgacatagtaaatttagacccttacgtgtcaaggccattagaagatagcgatgatgatctgtttggaattattttaccagg

SEQ ID NO: 19946 - DNA, 2421 bp, Cannabis sativa
ttgttcctggagcttaatatcattggaccacgatttaactcctttcatatgattttcaattccgcagggctagtaagatgtggttagattaatctttcttgtttttatattgtcacatctttgtttgcatataatcactcacatcattgtttgcatataaagtccagtgtcataagcagtattaaatatcttttgggtactagttatgtattctcctattttcactccttcctcttcattcttctaccttcacttaaaacaagaatttataggtgacgagcacatttgtgcaaagatttattggttttctttataatatttttgaatcttgaaatcggaattttataaaaaacgatggtcctatgaaaatgtaatttttttagacgcaaaaaataatgctaaaaggatggtctcataattaattatagggagcaaaataatgatttgcatactatcaaaactcaactttaaaagtgaaaattatccattcatattcaattttttttaaaatgtggcatttttggagatctgtatggaaagaacgcgttgttgcatccatttgaacattcacaatcaacttttgatagataaagctatagtaaaatgtcaatttgcacctttataacccatagtctaataaaaagttttgatgaaactcccaagaagatcatcattgagcatcatttttgcctcttaaagcgaagttctaatggaaccatcatgccagatcattgtgcatcgttacaacattgttattggtctcctagaatcaaattttgatggaaacatcttagggttgcatatatccattagggctggcaatataggtcaaggcatgatgacacaacgcaaaaatgacacaaaataaataggtttggataccatgtttagtaatcgtatcgtttcgtgtcgtatcatagtcgtgtcagcaaatttaataattatattgacatgataacaaagaaataatttccataggattcataatttcgtgtttatctttataatcatttcataatcgtcttatcgtatagtgtgacctcttaattaatcgtggcatgtttgtattttaatttttgacgcgtttaataaacgttgtgtattgtgtcataaacgtattaacataaatacgacatcataatatgaattgtcagccttaacatccataggttttgttatcttactctttctcaaaataaataaataaataaataacttgtttttgcttctaaagtcaagtttttttttcgatgtattcaaaatgaacttttgatagatagaaccatcgtaatgtatcattctgcattgtgttatagcatagcctttttaccttctaaatcacgtttcaatggaactatcgcaagaatattgttgtccattgttttcggcccttaaatctagttttggtgaagcatcatgacactatctttatgcatcattatctgaaattgagttttgatggaaacaccatactattattgtgcatcatcatagcataatttttttccactataataaagttttgatggaatcatcgtgacaagaatcatagggtttcatctcaaaatcaattggtaataagtagagtagtccatattcttatatatggctaaatatttttacatttaatctatgtgaggcaatgctatccaataacccccttaagatggtggctatttttcttgctcaccaatcttgaatcaccttatcacaagtggtgccatttgcttgtttattattatttttttttttcagatctcaagtgtctttgcactatcttaatctcgtgtggctaggagtaccatttgcttgcctatttttgtttgtggctaggaatgccatttaatcgcttattttttgtttagatctcaagtgtctttgtgctatctgaatctcatgtgactgactgtattacttggataggtgtggatcaaaagcccgctagcgatgtcgctctgataccatgacaagaatcatggggttccatctcaaaatcaattgggaatgagccatgttatatggtttaatatttttacatttaatctatgcgggacaatattgttcaatacatcgtgactaaaaattgagtagttttttgtttataaaataaccttttgatggaaccattgtagcacattgatttattcaaaattctgcatattttaaattttcaaatctcaaaaaaagaagaaaaaacccaacaaaacaaaaaaaaattgcaaggtgcttggatagtgaggaaggtggttgcagctttggcagtaggaacattaacagtaatggctcttgtgttgaggtatccaattgttgtgggatagtagtgctatggcaccatgggtataaagagagatcgtgattgagagagaaatagttgtttgaatggaaggggtgcttttgtgttatttattattattattatta

SEQ ID NO: 19947 - DNA, 2155 bp, Cannabis sativa
gcatcaacgctcacgcatctcatggttacaatcaggggattccaacacaaaatttttccatcagcatgctacatctcgaaggaaaaataatcagattcgaaaattaattgatgtcaatggaaatacacaaacaaatcctccggctgtattacatatcatctcagattattacaatgatttgtttaccagtcgtggtgttaatcaagaatctcttgacataattcttgattcaattccttcaactttagatgatacagcaagatctttcatctcagcccctttcactgcagcagatgtttatgatgctctcaaaacaatgagtgatgataaaagccccggtatagatggcatgtccgttatgttctacactaattattggcaaattgttggaccattggtaacggcagctgttctgaatgtactaaacaatggtgcagatccaagctcttttaattcaactttgatcacactcattcccaaagtgaagaaaccgagccaaatttcacaatatcggcctattagtctttgcaatgtattatacaagcttgtttccaaggccattgtaatgagactaaagcctttcctttcacaggtgatctctgaataccaaagtgctttcctatcccaacgacttatcacagataatattcttgtggcttttgagttattacactccctaaagaatcggaaacgaggctccaaggggtttgcagctatcaagcttgacatgagtaaagcatttgaccgagttgagtggcactttgtggctcaagtaatgatcaagatgggttttggaactgttatggtagaacttattctccgctgtttgcaatcggtgtcctactcctttttgttgaatggtacaatccaaggtcaagtgattccctctcgaggtctcagacaaggtgatccattatcgccatatttatttcttatatgtgctgagggtctctctcgtctcttgcaatatgaagaattggctggtcgtttagaagggctcaaaatttcacgatctgctccttcggtatcacacttattttttgctgatgatagtgtcctcttctgtcgtgctaatcaacaatctgctcgagcaatacatcgatgcctcattacttacagcaaagcttcaggacaggttattaatcctgaaaaatgtgtactgtctttctctgagaacacacggcaaaatgagcagattttcttcaaagatttacttggtatgcctatacaaccttgtcatgagcaatacttggggttaccttccttttctggtaaaaataagaagcaactttttggaggtattactgataagatttggaaacttttaagctcttggaaggagcatctcttttctgctggtggcaaagaagttttactcaaagcggtggtccaagctattccaacttatgcaatgagctgttttcgattgcatgtaactttgtgtcaccaaattgaaagtatgatggcaaggttttggtggggatctactgctacaggtaaaaccattcattggaagaattggaatttcctttgcaaggctaaggttcaaggaggactaggatttcgaaatttcattcattttaaccaagctctattggcaaaacaagcttggcgtattcttgagtttcctaattctctgttaagtaaccttctacgacatcgatatttctccaatggtaattatctcattgctggtttgggatctaatccatcattaacatggagaagtttggtttggggaaaggaattattgttgaaaggattgagatggagggttggctctggtgaaagaatcaattgtaaaactgactcatggttacctggccatacaacctttaaaccatatttttttaaaggtccagaccccaatctgttggttgctgatctgattacagaacataggacttgggatatgatttcacttgagacaaacttcaaccaagctgatatcgatcgtgtcctctccattccattaagcctgtatccgcatgatgatgttctgatttggaatcaatccttcacaggtgtctataatgtaaaatcgggataccactttgctgtttcattagccgagcaagatgactcaacttgtagcaattcaattgagcattggtggtcaaacttttggaaattgaaactccctcccaaagtgaga

SEQ ID NO: 19948 - DNA, 3841 bp, Cannabis sativa
aattaaccccgtttgggccgactcttgaagaccaagtggtcattgctcgggatggactctcttctcactttgctagttctaaccgtgagtcaatggttcccccaaatgaggaggtggctttggctcaatttttcaaggctcaagaggatttgatgcatgatcttagacattttgggaagcttgacctttatgaaattaggaggatcggaggtgatattggagttccggtttcttcggaagtcaatgagaggacgactcctttcaaaaaaagaaaatttgaatcctcggcttctctttgctctaggcctcataaaattcaccgcaagtatcccggtgttgtgcgtgattttccctgggacccgaagcgtgatgaaaatgatgctgatattgtcgttgaggatccttctgaggatagctgcaattccccgagccggtctggtatcttgaagaaccctctggttggttcgtttatgatcgatgatgctgtgtcaagtgggtctgcttactctcatacccctgtggaggagaatgatgaatctcctccacaggagccatgagaggcctagcctggaactgtagagggttagggcagacctctacagttcgggaactgaagtccctgctctggtcgcgctcaccggattttgtttttctgaccgagcttaaagtaaacgccaattctctggtacgtactctaaagtcccttcacttttattataatatttgtgtcccatctattggaaatgcgggtggtattatcctggcatggaaagaaggatttagctttgagtgtatctctagttcgtgcaaccaaatctcggggatagtatactctgaccccccttctcatccgtggctcctttcgtgtgtttacgggcctccctacatgcatgcaaagaaaaagttctggtctgagtttctgaacctgggggatagatttggagggccctggctgattctgggagattctaattttgtccttagtgcctctgaaagagaaggatcctcgggtagggaccctttcatcccgataatttctaacctgttggacgccaaaggtctaatctctttgcctatccaaggggataacctgacttgggataaccataggtccgggaggcatcacgtgaaatccgctttggataaaggtttagtgaacggagcttggattaatttgtttcctagggccatcctctgttcgtcccagacctgcaactctgatcataggcctctctgcctcctgtcggatggccaagttgccagggttaaaagaagtttcaaatttgaggaaggatggacccgtgatggtagaagcaatctggttgtgaatactgcctggaattcagtaagtcaccattgggccccagctagtatcttcaaaaaggtcggggccaccagagtggccctattaaactggagtagatctcaattcggaaaacttgatgtaaccataaaggagcttgagaacaagctaaactctcttcagtgtctcccggtgggatcccgtgactggaaccaagaacgtgttattcgacaggcactgaatgagtcattagaaagaaaggcgatttactggaaacaaagggccagaatttcttggctcaaagatggggacaagtgctcaaagtttttcttcctctcggcaaccattaggggtcgtcgtaatgccatcgaaagtatcttaaataaggataatgtctggatctctggtcgggaagcagttgggcgtgaattcctggaccacttcaagggtatctttacggagagtgtgaattgtcagggttataactgctcccatctgttccccgagcaaagccctcgggaggagttggaggctattatctgttccccgagctcggatgagattaaaaaaactttgttcgctatgaacaaccataaagctccgggtccggatgggatgtctgttttgttttataaacattattgggaatcggtgggtgaagatttctgtgcagctgttcatgatttcttcgttaatggcaggatgcatagagggattaacgctactaatgttgtgctcatcccaaaggtccaaaatcccaaacgcacaaaccacttcaggccgatttctttgtgtaacgtggtgtacaaggttatagctaagatattagcgaataggctaaaacctattcttccttcgattatttgccctacccaagctgcttttgtccctgggaggaatatccatgacaataatgtgattatccaagaagtcattcactcctttaatcggaagaagggcaaggaggggttttttgctatcaaaattgatcttgtcaaggcttatgacaggctgagctggaagtttattgatcatgtcctggagtgctcgggcatcccctcggatttccgtcttaaaatctcgcagtgtatctcaacgacgaccctcaatgtgtgtctcaatggggggcaggtggggagcattaacccttcttgtgggctccgccaaggagaccctctctccccctatcttttcatctgggccgctgaagtcctttcaaggttgatctcccaatcccttcaccgagacctcattaagggtataaaacttagcaggggtggcccggtgctctcccatattttctttgctgatgatttaattttggtggggagagctaatctaattgaggcaaataatttctggagctgccttgagagtttttgctcatggtcgggtcagcaggtaaataagctcaaaacaaccattttctttagcaagaacaccccaatggaaatgaggcgtggtatcaaggaggctttgggtattgactatcctgagggttgtattaagtacttgggtttgcccctttttagatcaaggcaaaaggacgctgacttcaactttatcttagacaatctcactgcaaagcttcaaggttggaaggccaaaactttgtcaaaggctgggcgtgcaactctaataaaatctgtgggcttgtcgatgccaatgtatgctatgcaaaccactaaactatcttcccgaatggtcaatcgaattgatggtttggttcgagatttctggtggggctttgagaaaggaaaccatggcattcatctgagggcgtgggataaactatgccttccgaaatctttaggcgggctgggtttcaggaaaactaaagaaatgaaccttgcattcttatcaaaatgggggtggaatatcctaaacggaagccaatctttatgctgcaaagtgttggaggccaagtacctcaggggcaaagattttctctcgtgcaaatacaaaaattctgattcctggttctggaagaatgttgtgaaagctaactctatattaaggaaaggggcttgtagactagtggctaatggagagactactagtatctggcaggacccctggattcctcacttaaaaggtttccgtccgaaaccaagagggggcgccccctccaacctcaaccatgtggctaatcttgttcttggcaatggccaatgggataaccaaaagctgaacgactattttgaccatgacacggtaactgccatcctcaaaggagggcaaccctctggtgtcggggatgatagatggatctggactctggagagaaatggacaattctcgaccaagtctgcttaccttgctcaagccttggacagagctccccattgtgttgtcgcccccaagctgtggaacaagctctggaacagcaaaattctcgagagacataaggtcttatggtggtgcatcctatctaatgccctcccggtaagagctgtgctaggcactagattccttgtggaagatcaaagctgtcccctctgtggtagggggggcgaatccatcgaacacctgtttctt

SEQ ID NO: 19949 - DNA, 4840 bp, Cannabis sativa
ttttttttttaaaagacatattttatgccatattcaactttgcagaatacatgcataatatttacgattattttgtaggggtgtgattgtctgaaaatgtacatcatcacctaactttgttttactatttttaagatcaaattcggtcatgatttatcttacttttgaacacagttattttgattgaaaaaaaacacatgatctaacacaatttttcttttttcatgatataatattagacttaaattatgtcattaaattgtattagagaaagagtgtaggtctatagatcttattttattttatatatcgtatgaaatcatgtgtgagtatattcttactttaaaaagtcaaatttattttgttagttatcgaaaaaaagaatttttttttggtatttcaaaacaatatacactacaagtagtaagtatactatccactcgagaaagaaagattaaaaaaaaaagcaatagaaaaatgaacaaaaacaaaaacacacacacataaaccactacaatgccacgtgaatgaaataagagcatattattatttgacgtgctcaacattgtaatactttactcagcagttctaaaaattatttattatattaaattgtgaaatttgatattaaaatacattaataataatttgtgtattattttttttttttggttttaagcaccttaaagtccttaaagcattctcaatagttactctactctactacatcttttaaaatactttataaaaaaattattttttatattttacctcaactcacacatttacattgctccaaaaattagattttctttatttttttaaaaaattatttaagtattatatctttaaaatttttttattaattaaatattatgaaaaataataaattaaaatattaatttttgtaaagaaaagacaaaacaacaaggtatacaaataatataaaatatttgactcatgaatagtttgtagctacatttaactaaacaaatagctcaacaattcttgagttaaaatacttatttattagagaaaaaaatatcgccttatagtatagttttaccaaccccatataaatatcagattgtaaatatttaattgtaatctgcccaactaaaaattagaaaaaattcaacctgccaaataattttgtcagtttggtcggattaacccgtccaaaccaatgattacttttttttttttataattattattcttagtttctaattcaaaaaattagatttaaaaaaatatatatatatattatttatatttcaagttaaaaaatgctatagtctaaattaattttaaaaatttaatataggataaatataattgaataaacatgaaataattgaataaaataataaaaaaagtaataatattgtataaatttaattaaacttcaacttcaaaatccaaatacaacaaaaattattaacaatatagtctacattttaagttaaactctaaaatgtctaaactttaaatacaaaatagcttgactaataaatataatttatgtaatactgtatatcatatacacttttattaaaaaaatatattaatcggtttattcgagttaattgggcggtttaaaataatttgtaaaccacttaatatgttcattggacagtttggattttcattatattatttcgggttgtattttttgtcgatttattcagtttgattaagacggtttattctgagcggtttgtaaatttgttgaacacccctacaactaacccaatccaaagtttttatgctacttattaatgtgcttctttttgataaaaaaaaacagttgtatgtaatttctatttcttgtgaccacatctcaaccaagagaggcatgcttttgctggaactcttctctcatatcatatgtcactttcacagcaatagaaaacaaaaacaactaaattgttctacagagatttacttattacacaccaaatcattgttctctgaatatatcagatcaaggtagataagcttccctttaaaagagttattatgatctttcaaatcgaatagtcaaagtttgaacctacaattgattttgaaaaacaaaaaaataattccattccctaacaagaataagccttaattattaaattaatgcaacaccaatgtggtaaaccctccaaataataataaactccaaattaatctaattattttactttgttttcaaataaacgaagactttactaatttttaccaaacgattatatatgcatattgcataacaactactttatagtttagatgacattaaaacgtgcattttacctaatttattctgaaaagcatcatatttattaagaaaaaaaaaaaaagaaagcagaagcaccaaatttaaagtaagtagataactaaagagtttctcagagtcataaaaactcttacacaccaaataccacaacttatacaatactatataaatatattatattgtatgatattacatatatgatctactaaaaactgcattagattatactgtatactatactatagtatagaaaccaaccatattaccgtctaccggctgacactgtcacaccgaagcctcagccaatatccttctaacaataagcaatacactttttcttgcagtccatggtgcacccgccaccaccgccacctccaccgtaccccttccctgaccggctataggaggtgaaacacttagctggacacgtcagcttcttttggtaacagggtcccttttccttgcacaccacagtgggcctcactactccatttctggaatggcccccactcggaccaccatacccggatccgtacccgccacctacgatcccgttgccgaaaccgtttccgaatccgggtatgttgaaagcgggtccgggtccgaaaaacccgcctggaataccggggttgccactaccacctttgttgttgttctggtttgaaggggttcccttggacttggaggagtgcttgagttcagcagagaagggtttgtcggaagcgggtcgggtcgagtaacagagtgaagatgcagcagtgagaagaaagatggtgaagagaattttagtgatggagttcatttttggtttcaagtgatgagttgggaaggagagtgtgatgaggagagaaggcagcgtttgggtaaaggaggaatatataaaaggtggaggatgggaaatgagattgggtttgaaatgaaaagagcattaattgagggtattagtggacagttgagggggcctccatgaatggaggggtaggtaggttgagtgccattattaagttgctttttactccttttcgcattatcatcatgccttgccttgccttgcctataatattttatgtaattaattataataagcttccttattacaaaataaatcttttttcctctaatagattttgtttgatactatttttgtagcattaatttataagtgtggtaggaaaaatttgactaaatcatatatttcttttattgattaatttgttttggaaaaattatagtatgcccatttatactttttaatttgtttattttatttttataaccgtatacgttattgttatttaagattatttataaaattataattaaaaaaacaattacgcatataacaaaaaatttatacgtacgattgaaaattatatttaaaaaaaatatattttaagtattataaactattcaaaatattttaaaaatttacagatacctctaattaaataattgcatcgaaaatagaattctgtatatatataaattagattaaaagattcttacgaatgacgaattagataggagtttaccagaacatccctaaattggtgtactatagaatttccaatttgtacattaatggtaccacgtgttgagtggtgtaatggcatgcaagaaagcttttcctagtctactcctttacatggttcaatggttcgactctcactcgttctcctcaattgtgaggggttatgtttgacccttgaaagttgacttgttgtgtggtgagctatctttgggataggaaccctaatgagttaatggtcaatttatttattggtcttttttgtcgttgttaggtttttatcagtactatttttaagttaattttagtgtatttttaaataagttttactcttatttggtgcaattttatgctttttggtatcttttattttgtaggtttaaaataaaagaaaaataaaaaatatggaaaaaatggtcaaacaaatcaattctcggggcaagaccacctggagattaatttgagaaaaaattcagaagttatggtgcgattaatgaagcttttgaggcgaagaaaatataaaatttggaggagcgcctcaacattaaaacccaggcagggaatgaaaaatttaaaaattggttgagaaagtcatattggaccaaggcatgggagttcctaggcattgtatatatctctatgcctagacagaaattcgtagaatgctactgcccaaataaaagggagttctgcctaggcatagaaatcctatgcctaggctcgtgtctgggaatcaatgaaggcgcgagctgtggcataagatttgagtgtcccagctcgcccctttgaaattcaaagaattgatatttttttatttcttttttcggctataaaaagagtgggacttgatatttttcaacaagatcaaatcaaagagtacaaaaattagagagtagaatcaatattcgagaaggcttttccaacggagttttcaatattctcttcttctctattttcttcttttcttcttaattgatatgtgcgaagttgctacgatgaacaagagtagctaaacagtttattagggt

SEQ ID NO: 19950 - DNA, 1408 bp, Cannabis sativa
ttcgctgttggtgcttgtgggcaccgcagttctgtgccttatggccactggggcctatgtgtacttcagggcaatatccacaaactctaacgggataaagcttcattagcttctgtgctcctttcctcatcttttcccatgcttgaagtgtttcctctgcgagcaatgtcgtttcttcttcgttggaaggacctactatatcaaaatcgggtatttcagttaatattggtggcttgggagcatcgggatcaggatctggtagctcactttcgtctgcgtctacaaattcactcttgttaattcgaataattggctttcttctccttttggtgggaaagtcggggatgtcaacaccggcttgaatgcaaagctcaactaatgctggaattcttggaattgcgaatctctgattatgaggaatacgtttcccgaggcggtcatagagatggtaagcgtcaacaggtaaaaatatgtcttcccaagttgcggttgtccagtcatgaagaccccttctggcactagtattttggcctctacaagatctgaatggatgtccagttggccccacatgaatttcattacagtacctgcataatcgtgtattgagatcatcacagaacaactctatgaacttctgtcatcttttaaaagtttccaaaagaattcaacacacaaatattcataaagaaattactatcacaatcctcttaatttgaatatctaaaaataaaatgaatacacattgttctagtcacatgttgttatctattccagacaagaagtatgaacaatttttacttctagaaccaaatgcatataacttgggctgaccaaccaatactcattgctaaaacaatcataaaaacagcgaattttcagacgatgttattgaaaacacttcagaattatcgaggccaaaaaccaccatatgtctctacaactttaggaaagtgaacttaatgagctatacagaagttaaaagtaagaaaacttacttgcaagcattgacagttacagctttcaagagcttcttaagattgtttatcaacgttattcttgcattataaacatcataggcgatcggtatgaaactttttacaagcatcccattctttggaggtggaactggttttctaggctgacctttccttttcttaagcctctcccttgcagcacgcctcaactctacaatgggtactgggaacggtttcttctccttcctggaatagtaccgaggaaaatcagtattttgaggatgttcggccttgataaccgatgcatatgatggatgcatcttctgagatgactttaattgaactttgagtttatgattaaaatgctgccaatagataaaaaaacaacattaaccaaactatggacgattaacatagattgaggcatagaaatt

SEQ ID NO: 19951 - DNA, 3396 bp, Cannabis sativa
  modified_base (610)..(635): a, c, t, g, unknown or other
  modified_base (1103)..(1108): a, c, t, g, unknown or other
agcatcttaagattaaactcttaccagctatcgcctaagcggtaaatgccctgtccttccaaaagtaacaaaccatgctgattataatggacctcctgaataagaaaacaaccattatgttaaaaaaaaatgatcagatgtttggtaagagagagtgccttcaagaagctggaaatcgagataacaaagcagtttttaagtgtactttttgtacatcctgacttctataccagccaaactgatatggtacaaaaacaaagaagtaattagtgaaaaggaaaaccaaactgattggattttaagctaaatgatctattttatagtacaaaataatccatgaatatgtatgcacacctgacacctacagctattcaagttaagtgcaccaaaccttaacccaaatcaaagctgcagttgtttaactctttataaaggactaaatctcataagacatatttatatatggaaatgcaccaccaatggtgcccaactacacactacaaacaggttccacagtgataatctctagtgttgatcccgtgtctgtattagttgtggtgttaagcactactggtgcaccataaaaatgttagatatatatatatatatnnnnnnnnnnnnnnnnnnnnnnnnnnagagagagagagagagagtactttaacattaagatactccccaggctgaaaatccataatctgcaaaggcaagggtccaacaatgtcaaataatacattaaaattgttcagaaccatagaagtcaggtttaagattggcatggaacaaggaatttacatggacattgaagtcataaggagtagacgttggcagaagcttcctgagctcaaagatctgacaagaaaataggttgtgataagtaaaatatatgtgtataagctcaatttaaatgtacccccatgcaaatctgacaaaaactcaaaacaaataacgaaccaactactacataaaagttttttttgacttaataaagcacactaagatttccaagaacaaggacaccagagaacataagtggaaatttctcatcagacttctcctagataatttctcccaaactctaaaactaatacaatacaatacaatannnnnnaatacgacgttccaaacgaacccctactcaattttctattttaaactgagaaaacataagaaaatagatctagatatcgaataaattcagtacttacctcccctggagtgtcaagaagtggctgctgatctgtcgaacctacaatcagttcagtaaaatgattctccaaagaagcatgcctaaaatgaaaagaatatattaggtacttgaatgactattaccatgactatttgaaatattcctggctatttcttatatgttgtaaaaagaaggaaaaaatattcatgatgatggcacgcgatctttcaatcatcaatcgtaaatacataatgtaacgagcgaaccttctttcaaataccacaagagttgcagatgcatcacacttgattatatgttcaaaattaggaggtagataagcatatgaatccacctgtatttcatatgtgaacagcatcaaatgtctattttaacatctgtggacaatctataagagtcatgtcattctcatgaattcaaattctcaataatcgtcccaaataatctaaaaaatctcaattgcacttgaagctaacaaaaagactgttttggaatcatcaatgaaatcaaaatcgattttaaagtcttcagagtaacatattgtattttaaagtctttagagtatgtattagatacataaaggaattacactttttaaagagtgcaatattaacgagatgatagacaagaagcctaagagatatgatttatatagagatgagttgtagagaatagtaacattcactacagctaggcaatgtcatgtttaagggttataatcaaagcagaatcagtttattctccagtacatggttactgacattgttttaaagtcctaagaatatctattagctagagaatttagaatttaattgtgaaattcagcatgaccagttttaagacaaaaactgccatttgttaaggtcttaaataactttgccatggcccatttgtcaaaatggctagtaagttttgtagaaaatggtgaatgaattgtattttatatatcatagaatagtatatatttatatacaaagctaggagactaaatagaaaactactaaatacaaatagaaaattactaaaaacaatttatcataacttttacagcaaacaaaatgacaattaatctcaacgtgcttagtgcgctcgtggaacacgggatttgaggcaatataaaaagcagcttgattatcacaacacaattttgctagaatagaaatcttaaacccgaattcagtcaaaagttgataaatccatattacctcacacacagactggtcataactctattttaattcagcactgaatctagacacaacattttgtttcttactcttctaagagagatcaaatttctccgaataaatacacaatatcctgaagtggatcgtctgtctaccttagaacctgcccaatctgcatcagaaaaacactcaatctgggtatgtccatgatccttgtaaacaatacctcgtcctggtgattctttcaagtaacataaaatttgctctaatattgtccaatacataaactgactaacgacactaactgggaatgcaatatctggacgagtcacagttagataattcaactttccaaccaatctgcgatatttcttaggatcttcaaatggttccccatcacgtgtaagatgcacgactggatacattagagcattacaaggttttgttcccaaatttcctatctcaattaaaaaataaggtacatacttccttcgagacaggaaaataccttgtttactctgagtaacttcaacacccaagaaatatttgagaacccctaaatccttcgtgagaaactgggtatgaacgaaagacttaagagatgagatgccttcagtatcatttccagtaataacgatgttatcaacatacattactaacaaaatgataccagcagttgatcttttatagaacacagaatgatctgacttacttttcaacaaaccaaatttctcaacagcctgactaaatttaccaaaccaagaacgaggattttgttttgcgaagatgacagactcgccctgactccccctgagcaacaaacccaagaggttgctccatgtatacctcgtcctgaaggtctccatgaaaaaaaaggtatttttaatatctagttgatgcaaaggccaatgatgaatagctgctatgaaaatgaacaatcgaatagaagtcaatttaggagcaggagaaaaaatatcacaaagtctactccataggtttgagcat

SEQ ID NO: 19952 - DNA, 11102 bp, Cannabis sativa
tattaatttatattaaacagtcagtactgtaacactactcccctcgaagtctgcacctaacacccagctaaaccctccctcacctgatgtcacctctcttcaaaccttcttctattgggccccgccctacgactctctccaattatatttaatactctctattattaaattaattaatattattaggttatttttagcatttttttcttaattaataattttctttagctttatgtcgtggtccatatcttacgatattagatcgacggtcatgatcaataatagttggaattttgtttagcaacttggagagttttttataaacatgtttactgtggttaattaattataaataaaaaataaacaaattacatggaccctctacacagtcgaaagattataaacaaaaagagttgcttcctatcttttaattgttaattagtaacatttttactaattttatttggaaaaaatgttattggagccatgggagttggcgttattgacaaatctgcatggtacatatagatgggtatatatatgtctagtatagatttattacaacctcgtatttaacgttattgacaaatacaataatgcaaaattacaaataagatattgtataataaaaataaaatagaaaaaaactttgaccattcattttattttatacaaaaatcgtaattaattaaaggcgtccttaattaaatatcattagtttacagtacgtatgagtataactgtataaatcaatcaccatttgtaaagactgcgatcccagtacgtctttagtttcaaatttcatcattctattttttcaaataaaaaaatgttacatattacataaaataatagagaattatttaaggagattttttatttttatactttaaaataattatttttttttatatttttttatagaattttacataaaaaaaatttattgcaactagcgctgcaacttaaattacaacaaaaaaatcgtataaaaactcatattacacctagcactgcaaccaatttgaaaacacaaacactaaatttaaaaaagaaattaaaaaattaaattatataaaataatttcctattatttaattaggttgtatattaatttgtcacgatattatattgacatcacataataaatacaaactataaatttgataacaaagaaaaatcttcttcatctaattttctctttcattttacatacaacgtatccaaaaaaataaaaaggcaatatatccatttacctaaactaattaattttatattttaaaaaataattaaaaagaacaataaaagcgacccataaccatgttttaacacctccaacaaacttctttacttcaaatagagaaacaaaaggaaaaaggcaaagcccactaacgaacatactagtgtaaaaagctattgtacaacataactaattaaaattaaagttaaagcattattaattaacgaaataatcaataatataatttactaaataggataaggataatatttgaacagagaatgagggtgtagattagattagcgtgaggtgaatggcagaggagtaaatgtcggaccaagccaagtcgaatcagctgatgtatttttccttcagactcatccatatctttctcttactagactagactcgtcttcgcccaaagcctaaagactcggaatgaaaccaaaaaagaagaaaacaattctctctctatagaccacccacgtcatcagtttcaaaaccaaacattacagcctggcaacactcttaaaccccatactacccaatcacatacttccacgtatcgtctttcgataatgacacctctgcttctgtacagctgtgtccttctttcccctaaccttctccccctacctccaccgctatataaatagccctctttcactcttcttcttccataagtttcatctcagctacaaaaaaaaaatttgaatagtaatttttttataaacaaaaaaacaaattcaaaaactgttttcccgtactgagaaaatgggttccgtattttacgttgttcttctatttctttcttcttttgttttggttgatcgtccgactgttgtggccgcggtcacaactggccggaaactttcggctcttgtacaagaacaaccgctggttcttaagtaccacaacggtgctcttctcaaaggtaatatcaccgttaatctcatatggtacggtgattttactcctgttcaacgctcgattatagttgatttcatccattcgttgaactcgcgccgtgctaccccgccttcggtggcgtcgtggtggaaaacgacggagatgtacaagggaggttcgtctaatctcgtcgttgggaagcaagtcttccgtcagggttattctcttggaaaagttctaaagacttctcatttgatggccctcgccggtggaaacggctacggactaagagctattaacgttgttttaacggcgaaagacgtcgcctttgatggattctgtatgaaccgttgcggtactcacggtgttaaacggtccttgaagggaaaagctcgtgaggcttatatttgggttggaaattctgagacccaatgtcctggtcaatgtgcttggccttttcaccagcccatgtacggcccacaaacaccgccgttagtggcacctaacggtgatgttggtattgacggaatggtcattaacctagctactctcttggcgggaaccgtgacaaacccgtttaataacggttacttccagggacctgcaacggcgccgttagaggctgtatctgcttgtactgggacatttgggtccggatcttatccgggttatccgggtaaggtcctggtcgacaaggcgagtggagcgagttacaatgctcacggtgataacggccgtaagtttctattaccggctatgtgggacccaaaatcttcaacgtgtaaaactctcgtttgatcaagaaatctaaaaaaaacaaaatattagatcagattgcggaatacggcgtcgttttgagaacacgtggcgttagcttctctctcagtggtgggggtatgatccggtgcaggctattgtagatacgtcgttttgtgtacacatttcgaagtttgtcgttttacgtgacgtgtaaatttgtgtgctaaagaaagggggggttcatgatgttattatatatatttaaaagtgagtttgagtggagaaaattattatgtatatccgaaactaaaaaataaaaaatttagtaataaatgaaaacgttttaaagaagtgagaactagtgggcatatcattaaaagttgtgtcatttgtttgtgtgttgaagaaggtaacatttggtggggtattttgttttgttttgggtaaaaactaataaaaggcattattgaaaaatgtaggaaagaggaaaagccattgagaaatttaattcagaattcagagtccaacaatataaattgggtgatatttttatttaacagtttcatacaatgaatgaatatgccaagaatatatgaaagtgtgttgttttctaagataaaccattggaagtgttgacaagttactccatattggaaatggcattaagtcaagtttggttacaattaatggcttcaacttggttatgattaggttgggccatatcccaactctactagcaatcataaaaataatatatgtatataaaaatgtaaatgtacttttggttcaatgaataatgtgtgaaaatatttataatatggatatatttatgtgcattaaaagacttaccactaacatagcattgttccataaatatataccattattcttctttcttaccaaagctagaattgtttatataatacacaatattcttcatgtatcgataaggcaaatggcttagtactaagcaaacagttgtctatttaaagataaagtaactcaataaaataagtatggcttagattataatattttttggtataagtgttttaatcactatttacttcacttgtgattctttttgggtgcttaatttcatttgcattaaccaacatttattataagagaagattataaatgatatggaaagggattccattttcaatccaagattagaaacaattattttaaattttacttcatttttattcttatattttcattctttttaataaaacgtcactttaatatttatttctttgtttagtgcattataaagttttaaaatgttattccaatagaataatttttttatcattttggtagaatgaatattctattttaaaattgaaaaaaaaattagtccaataatagatgaataaaagaaatcataattttttatgcattttaattttttttttcattatattcctatttttatttgtttatttccatacatattctttattctttattcttatgtttgtatttttcattcttccgaagcaaacctatgtatccctaaattatgcattgtggcttaatcgtatcatattagatatcattcaaatcaaaatggagactattgagtatataaaagtatatttaatgaagaggtaaaagtagtgtatgttatttttaacattttggcaaaatgatacttccatgctaaattgctaatgttagatatgtgttaaatttgactgccacaaaatataatatggactatatttgtatcataataaatattatcttttttatttaatatttttttccattaatgaatataatttacaaattttaactttttaatatatatttaaaagaatatatatatacttatataaaaaaattaaataattttttccgagctcccaaatcaattataccatatatatatatatatatatatatatatatatatactggagtacaattattaaagttgacccaattatacaattagtttattttttgaatcaaaattgactcataaataatgattaaaaaattgcttaaaatatgttgggattttatcttttttttttttaacaaatttatttattttgattagtgctgtaaatatagatcgagttttttgacatgacacgaaatcggcacgagcccgagaagcacgagcatgacccgatacgaaaagaatatgtgtttaggtacaacacacatcacaacatgaaaaaatataggcttaggcacaatacgatacgaaacaatatgggcttaagcacgacatgacatgacaagctcaaaagcacgacatgtaaacattaatagattagctcgaaagcataacacattaaaatatccagtaatttaataataataatgataaatatttatttatcaattaaaattatattaattataattatttttatatcattgtgtgtaattattattgaaaaatatataaaagtgactaaaattataaaatacatgtatattttagtatttagttcattaattgtaataaaaatataaaaatatagaacacgaatttaagctcgcataaaaaaaacaagtttgtttatttaagaaaaaatatcgacatgaataaagcactacataaattcaagcacgatacgaaattatcgaacttgtgagccatgtcgggtctaccttataaaattattattgcacggcacgaaacgacctggcgcaactcaatttttttatagtccggcacgacatgtattttaaaaagcacaaaaaatatagaccgaactagtatggcgcaaacgtatttacaattttaaattgcatttaattattttcttatgtgacaatcaaagcaatcaaccccgatataaaaatttatagtgctcaatatattttatggctttatgtgtagtagtagctaacaacccttctagattttagttatttttggagaagttgtcttaggcttttaattttaagtattggaaaaagaattgaagatatccatcaataataagtggctatcaaacaagtggctttcaaatcaagagaagtgggagggcaggtcaagataaacccacctttgtttacattattaccatcaatagtaagtaaaacaattaaatcatagatttttattaaacttaataattctcaaaagcacctttagttgattcatcagcatcatgtttcattatacctttaactcttccataaaactgatcattatgagtgagtgactagccaacttgaagaatcctcaccgccattgtataattcatgttttagttaatcctttcttacactataatcccttataaataagtctcccatacccattacaaaatattacagaaaaaaaatgacctttttttctacataattaagttgttaaatcgtaaatttcattgtttgaaaatgccatattaatacatgtccttttttaagctttaattttaacacaatttttttcataaccatctttgtaaaaataccccactaaaatgggccaaagcttctacaaaaaactagaatgatattgaatatgttttatggcgcacaaacgaaaatctctatgaaaacttatccaattttcatcaagtgaagaagaaaaactaatagtggaaaagaggttatagaaaaaggctctctttcataatattgtataaatagtctagttcttataatgcataaaggtaaatagcagcaaagacactaattctttcaaactatcttacatggcttaaagtttattccaatttctcatgcggtgaaaccttttttttttcacacactcatatggatggattaactctataaggatagacagaattcaaagcataatattaaagttaccaacttcaatatgaatcaacaaacttaaaacccataaacatcttacaaaccagctgaggccacagggttcagtgatttgagccttctctttcgcagccgctctgcaataatgaaggcgagctccagtgactgggaagcattgagccttgggtcacaatgggtgtggtagcgtgagcctagatcattataagttatagttcttgagcctccgacacactccgtcacattttgccctgtcatctccagatgaacaccaccagggaaacttccttcttgatcatgcacgtcgaagaaggctctcacctcattctattgtaaaaaaccaacaaaagttatttccaaacgtgtaaaaatgtaatttttgatacaaaaataattacataaaagaaaacatccattcaatctttaccattgtagcctaaattttcattgcaaggagggaagaatataaagcgaaaaagaaagaaaagacatttatagtccgccaaaacatatacatggcatgattacagaaaatcgaaagaagacgggatggaatacaaggaccagggatagcaaaagaatcatactacttatatgaagtcgtttctcaatgaaatttgagggttcaaatccataaatataatgccccgctaaagtaaagttccatgatagactgtaactaaaagacatttctaaggattaatttattaatacagcaagattttgtctcatcttcagtctaccacattataaaatatgatcttacttgaagcttaaaaaacacctctaagaaagtgagatgaagtgagaaagacttgaagatgcaatggctgaaagatttatgtactttcaatgaaagaaaattattttttctttttgcacgtcttgttcttcaaaaacgaaaattttcaagttcatagtgaatttaggtatcataacctgattttgagcactaaagacactaggacataccaaaattttaatggacctagaatataaacaactatacagaaatagagattgcgagtattaaattgcttgtaagtcataccctgattgcatcaaaagagcgagttttgagtccacaaggtgctttgatggtgttcccatgcatgggatcactgacccaagtgacaatctgaccagctccacgaacagccttgataagatgaggaaactttactctcaaattttctgctcccattctcacaatcactgttattcttcctggcttgttattggggttcaaaatgtccacaagcttaacaagctcgtttggatccatcttatcactcacctgcatcacattcgtgtttattttaaagccttaacgtcacaaaatgaaaggtaatagtatgtatataacatgaagttacgaaccaagcacactaataaagacacaaatcttgtgcgcaaaagtaatttgtgtccaattaagttttatagtaataaacaaagttcaatgcaatacattaattaataaaaaataactgtaatgaaaataatttcctgtttcttgcaaattaatataaaattctacttatagtataaaaacattcatatacctttatcccaaggggattagcaactcctctcaagaattcaacatgtgcaccgtctagttggcgggtgcgttctccaacccacaccatgtgagcagagcagtcgtagtaaagcccagaagtagaatcttccctagtaagtgcttgctcgtaaggcagaagcaagcactcatgagatgtccagaattcagttgtggtcattattgggtggtcaagagtaagtccagcagcagccatgaacccaagggcctcatcaacccgatgagccagttcacggtatctgttgaggcacatcaaaagcattattaaatgacccataaactattgcaagccaaatattgatgaagatacacatacgccccatcttgacaacaaccctattcatccctttacaaacatttacttggtggtgtttggttaagtacaccaacaaacataaatgcatgtaaaaagaagatgcaaattggtttagtttataaaattacaaaattatgtaattttataattaataatagagaaaaaaaattactatgatttaagagcaactccaaaggtacggattatatattattaacttaattaattgaaaagctaaattatgacttatttcttaactttagagcatcacaatagctccttttttatagctaaactagctagtaacttttgtgtggccctctcccatcacactccctattttcagaaaacacatattatattaatattgctgttgaattttattaccaactgattaatttaattaatgcagatttaactttatccaataagctttacattttgctttatgtcaggttgataacaaaataacaataaaataagatttgactagccttaaagtctgagagttaagaaagtaaaaattaaaatagttacaatacaggtaatctgttgaagagataacaaataagaaataagtcatccttttagctatttcagtttcacaacaaaaatatattataactagtctatttgcagttggttcttatcaatccacaaactagctattttaaagttgatttttttcactcttcaactgtagctagccaccaattttttaaaattattattttattacagataatattactttattaccaacaacctgacatagaacaaaaaataaaagtaatcggataaaagagaaaaatatatatatatatatataaatatatattgaatattagagaatggttggagagagtaacacaaaaaagtaactaactatgttagctaaaatactgtagagatcctttggagatgcttataaaacattataccaaatcatcacaaataaaacatgatacaaagttaccagctaaaactctattgcagaatgcttcaaaaaaacaaactctattgtagtatggaattaatagcgggaatcttgataaaagtagtacaaaccaagagaaatctgggaaaacccgatatcaacaaattccttcaatcctattcattatggaaaataaacattcaaaatttcaagtaagaagaaaagaacaataaaagtttacctatccccctgctcactgtgatcagtgaaatctagattccagtgggtcactctctgcatagcagcataacctccagtagcaaatgccctcaaaagattcaaagttgcagcagattgtgtataggctctaatcattcgattagggtctggaattctcgatttttcatcaaatgcatcaccattcacattgtcacctctgtaactaggaagcttcactccatccctatcctcaaatgaatctgatctgggcttggcaaactgacccgccattcttccaaccttcataaaaatatcatcatttgcatttcagaaaaatgaaacaattaacaaaaaaaatagaactcttaacataacaatcattcaaaccagtttcaaacaccataattcttaccaactataatctaaaggaataaattttgaaaactccaccaaccccacaattcttaaaagaattcttttgaatacatgcatataatattataagaatgtgtgtgtatgtatacatataaaaatgaattagacaaaataataataaaaaataaaaataaaaaggaaaattgaagaccttgacaatgggcatttggcctccgaacataagcacaacgcccatctgaagcagaaccctgaaagtatcccgaatgttattagcattgaattccttgaagctctcagcacaatccccaccctgaagcagaaacgctttccccatggcggcctggccaagcttctcctctaggctccttgcctctccagcgaagacaatcggcgggaaagactcaagggttttgagcaccgaatcgagttcggcccgatccgggtactcaggtagctggattgccttcttattcttccagctgtcgatagtccatgatttggagggattcgaagccgtctgagacgtcgattttgatggcttcgaaggttcagcggcgtgtacggcggagatgggttttcggcgattggggaggcgaggaagatgagaatggagattgagattgaacttgggggaaagtggattgggattttgattgttgagaagggatttggtaacaggagtggtggaagccaaagccattggaggtggagagaagaaagagaagcgaggcgactcagtacagagtgagtcaaggaaagggataactcggtagtagaagaaatgacaaatgtgattttattattttatttattaaataatgaaatcagatttttttttttttttggcagagaagaagaataagtaggaaataggaatagtgtggtggatagttcaatagtagtacggatgagattatccaatggg

SEQ ID NO: 19953 - DNA, 3721 bp, Cannabis sativa
gtcatttggtgtccattattaattaatctaagttaatggcatttttggaaatggcgaaataacaactctcattggaattttggggttgtagcttagtttattatctgcacgagcatggttatccacactaatcgtattcagtacatttaataagtcaagctttataattgattagtaatatttttttaaaattattttttttaaagttatatgagattcgatacttaattaccagtatgacatcgagtatattatttgtccgaattattatgaggcaccctccgtgtcccacactttctataggtggcgcttcacgattagttagcgatattttctgaaagttaatttttaaattatatgggatctgatacttaattacaccatataataatattacactaagaaaaatattaaacactaataatatccacactttctataggtggcgcttcacgattagttagcgatattttttgaaagttgatttttaaattataagggatttgatacttaattacaccaataatagtattatactaagaaaaatattaaacactaataatatattttagcaattttcttatctaccccaagtcttactctagaaaaggacaacaagcttttactaccgactctacggctttataagttacaatgaatgagaaaaacaaatcaaaacaaaacaaaaaagaaatagaaggctcttaggttcttatcataaatgcaattctttatgaaagtaaaccaagttatttgtagctttatgtccatggactttttgcgtttgtaggcacataatgtagctagacttttctttgtatgagaggctcccgaaaattgtgactttgtgaaaaagtaactattattagacccatccaattaatcactttcattatgcacaaccagttagtgcagcctttgaaattgaaccattactaaacactgtaactattaagttattcactagttgggaaaccatcatagattcaccatcgataatggcacatctgatattgaataaaaatatgtaaaatataaatcatcattacattaccatataggattaaaagttggctaactttgaagctaagtctcggctaattaagaagtttgtcattgttcaatttagataggtcatttttggattttagcaatttttttctttaaatgtcattattatcaaaatctcatttcttgaacttcatgtgttaaaaaagttacactccacttgtcactagtggtacgtggaagaaaattgctcacgtgtcatttcttacctacacggagacccaaaatttccccccaactttttaattctcttccttcatcttaagctgtaatccaacggcctatattccatcactgaagttgcgtactcttcttcctttatatacagtttctttcctcgttactagcactctctctctctctctaaagtttcagctctgtattttggaaccttcaccggaaaaaaaaataaaaatattttagaaaaaccatggcgatgtattcttcttcttcgagctcaagcaacaattggtcgctttcactcaaagtagtcctgatttcaataggagttttgtccatggctgtggctctgaagctctcaattccggtggtggcgaatttcttttcttccgagatcccttctctatggagcttcgttctctcatggctggagcctccatacctttatgttgtcataaactgcatcattctcagcatcgtagcttcctctaagctccagcaaaaggccgaagctcctccaccaccgtctccgttgccgggtatgatgattgtcccgccagtgacggttgagacagtgaaaatcatagacggaaacaacgacgtcgtaaccggaagaacggattacgcggcgtacactggggtcgttttgactggatacggttacgatccgactgaggctgcggcctcagcgaaagtctcggcagctcaggtcacggtagaggagcctgctgcatacgagccgccgcagcagccgacgagagcagttttgaaagaggtgagttctaccaactctgatcgggttgtgatgaacggcggtgatgagatggttgtaccgtcgacgtcgtggaacggccttcagagaaaagattcttctcagctttgcttttcgaatgagaacgagaaaccaccgctttcatctcggtttggtaaccggaaatctgtcaaaggcagtcccgaaggtatttatagctgcttttttgatttttttttaataaggatatgactgcttagttttagaccatcctaactttcggtggtccgagttcacacatgattaatttttctcagtggcaaaagtgctattaagtgatataggtgtttaattttttttttttttttttttgaataggtggtaagtcgcttagagtatcgaaaccgccgaagaggcaggacacactggagaacacttggaagacgataacggagggccgtccgatacctttgacgaggcatctgaagaaatccgacacgtgggattcgcacgcgcgacggagcggtcaaacgacgtcggagttttcatcccctcctccagcgccaatgatgaagaaatctgaaacattcagtgaccgaaactcgtcgatgacgcagctgagcccggcgagcggtgggtccgggaagttgaggaaggaaccgtcgctgagtcaggatgatttgaatcggcgagtggaagcgttcattaagaagtttaacgaggagatgagactgcagaggcaggagtcgttgaatcagtaccaagagatgatcagtcgtggggcccactagacgccgttaaaaggggcgaggagcgtgttctcaatgcccatcatcatcgagatgatcaagttgatcctcatttagagagatgaccacgtgtcatgttttgattcgttgttcatacttttcttttccattccccggaaaagaaaaaaaaaaggaatatatatatatatatatgtttgatgatttggaagaacatagggtgtcagtatagtaattaaccaaagttgtagaatgcgaaaaagacataaatgtaaacggtaaagttttgattttttttttgttcatttggttgtatatttagcatattgctaattgattttcattttccctctgaactcgaaattaagtttttttattttttatttattgagagatatgaattgtgtggttaacaatgttgaaaatgattgtgcttttgtagcttatagtttgtttatttgtttttttttttttttatttgaataaagtaatgctgtgaaattttcagaaagaaatatgaaaatagcgacctataatgcaagatagaccagtacatgttaggcagattcgataagatgcaatgtggccaagaaaatgtgaaaataggcggcttataagtgccattaataatgttgaagattttcatgtctttgtctattgcccactccaacctcacataacactagtaataatgtagtttacccagaatgcagttttttaggcttttcagcataaactttcttgacgaggggatttaacaatataggaatacatcttcaaattttatctagaaaatgttgcaaatacactagtaataatgtagtttacccaatatagtaataataaactttcttgaagaggggatttaacaatatagtaatacatcttaaatttttatctagaaaatgttgtagtttaccaagaatgcagatttttaggcttttcagcataaact

SEQ ID NO: 19954 - DNA, 3891 bp, Cannabis sativa
  modified_base (3841)..(3847): a, c, t, g, unknown or other
atgggttcgaccttgcacttacatgaacactatattccgaaatgattcgtgcacttgcgagtataaatattaaaacactcacttttgaggacaacacctatatcatttttttttattatgttttatatctttcaattttttttacttgatatgactcattctcaattttttttcttacttgatatggacatactctctctctcttttaattgttttgaagcaaattgtgatctctattaatattgattctttttatttattcagaaaatgaatatagaaggactatatcaaaggaatgaagatcaagagataacagaaggactatatcaaaggaatgaagatcaagagataacagaaggactgtatcaaaggaatgaagatcaagaaataacagttgatgatacagtaaaaataaatgagaatcattctaatattcctattgaagagatacaaaaggttagtaaaaaatttgaaactgaaatttataccatctaatattttccaagtagctatagttgctttagatagaacttgtacatttttctttgtttattttttttctttgtctcaaaacagattcattccaacaatccttaacaagagataccaaagattaatatggaatttgacactgaagaataagcttacatattttataatgcttatgcttataaagttggctttaacatacgaaaaagcaaatggcataaggataatgaaaatggaaaagtaaaagaaaaaaaaatttgttgctcgtgtgaaggctttcgtaaaaaggacaaacgatatgattatgtgaaatctcatatgctgaaaccagatctgcgtgtttggcaaggatgaagataaaatttcatccattaggaaaatatcaagttattgagttcaatgcagagcatacacatataactgcaagccctaataagagtcatttacacaggtcacaaagaagaataacccctgctcaagcaactgaaattgaattggtagagagttcaggaattgctcctaaagctagtatggaacttatgatgagacgagtcggtagacatgaaaatctcaaatttattttggataattgttgaaattatatacacaccaaaagaacaattcaaatgcgtgcaggagatacaggtggtgttcttgaatatcttcaaaagatgaagtcaaaagattctaatttttttatgcaatgcaagaagacacagatgatttgttaacaaatatattttgggaggatgcacgaatgaaggaatcatattacaactttggtgacgttgttagctttgatacaacgtaccgaaaaaattatgattgtcgaccgtttgctatattcgttggggtaaattatcataaacaaaacactatattcggagctgcattgttatatgatgaaactactgaaacatttatgtggttatttgatacttttatagaagcaatgtcagggaaaaagccaaaaatgattcttactgattaaattgcagcaatatcaaaagcattaagatctcaatggccagaaacttatcatcgcttgtgtatttgccatatgtatcagaatgcaacaaaacacctgagtagtgttttcgaaagatttcgtgaattttctactgattttagaaattgcatatatgaatgtgatgaagaatgtgaattcattaaggcttgggggaacatgcttaggaaatataatcttaaaaataatgattggttggtacaacagttcaagttgaaggaaaaatgggctttggtatatggaagagagactttttgtgcaaacatgactactactcaacgaagtgaaagcatgaataatgtacttaaaaagtatgttagctatcaacacactatgatgcatttttttaacattttgagaggttgattaatgatcgtcgttatgaagagttaaaagcagactttagagtaagtcaacgtaatttagcaccatccctcccaattaaaattttgaatcatgcagcaattgtgtatactcctgcggtgttaagaatgtttgaggctgatttttcaaaagcttataattgtgctatggaaatttgtaccgcggtaggaacaatgacagattataagcttactcctaatggtaagtattttcatcacatggttaaatatggctcatcagttaatacatcaatatgtagctggaagaattttgagtttgcaggaatactatgctcacatattcttaaagtattttcctttcataatgttgtgaaaataccatctcaatatattttgaagagatggacaaaacatgcaaagatgggagttacatgtagtacatctgagattatagatggagatgatcctatgcatgtttcgcaaaacgttaccaagatttgtctaaatcttgcaatcatattgtaacaagagcatcagatagtaaaaaagcctataaacttactaaggaggtctttaaaggcctctcggatgacatcgatgcatgtttgaaagaagaaagagttgaaagtaaagaagaaaatcatattgtgggtggaattgatacaacaataaaaggtgtaaagacaaataataagaaaattcgtggtgattcttcacgtccaaagaatgctcttgagaagatgcataaaaaatccaaagcttccaaaaaaaaaaaacttgtcaacaaaagaggtacttactcttattttattttatttactttatgattcaattgtgaaattttacaatattaaaaggtaaatgttctatcatttaggtttcacatgacttcaacactgatgatcaaatcgataactacatgccactttctcaaccagatttgttattctccacaacatcgtttaatcttaaccatgtaatatatttttctatatttttttattaaattattgtataaagaagtattttttatagatgtatgatattatattatatttttacaggttggtttgacacatgaaaattcaagcacgagaacaagtatgactgacttattctcacaggtatattagttttataaacaattataaatgatataatttgttttaaccatttcttataagattataattgcacattgacaggttgatcaatctacatctactgaatttggagggactcagtttttcaagaatacgatttgacttggtggatttccaattttataaaaatcacaaaaagtttttttagagaaaaaatcactaaaagtttggttaacatatttggaatttaatttatataattgggattatataatatcttatggctttttttttttctttttatatataaagaatataaatgtttctctaatattctagtcaatggtgtctaatgtcgcacaataaactacagcaatcgcacataaacacaaataacacttatagaaaaataaatatcaaaacaacaataataaatagagaaaaattcacatacctttttctcaaacagtgaaccacatcaggttgcttcacatcatgtttcgtaaccgaattaggggtgctccagctcaacattaattcgagggaatctagtccctttgcactgaccatacttttttcccaaatcttgcatgacctcaaatgtctaatattgcagggtcagtgcatatctgtagacattgtacttcgcttctggttgagtaacctttttctccttcttctctttcttcttcgtcttatcttcttactagagaccttattcatgtagttttacctaagctgcatcatatttttttagttgttgaagacaacatcttgtgataagaaagaagggcccaaggatacacaaagaaattttctatattttctactaacttcagcatatctgtaacgccctaatgctaaggcacgctacagtnnnnnnncaattatagtgcaatctttgctaatcaaagaattttctcaaaaa

SEQ ID NO: 19955 - DNA, 3048 bp, Cannabis sativa
cgtggctgaaataattgaacctacacaaagtatatctcctaattataccgactaggccaaaatgaagttgaattagccaaagtcggaccctcgacaacaatcatccgagcagagctgagatctcgtaaaataccaagtaggcttagcgtgccgaacgattctaatgactgactagaggcacccaatgagtgaaactcttccacaaatcttttccttaactgtttcctcaaaagtagctcaattaaattcctattttcgtgggattcgctaaccaaattaagataattgtgagatttcagatttaactccttacctaaaatttcccctttacatttaatatctcttataattcaacaacttacgtaatctcacttcccctataaatagtgaagccatttcactatttagggggaccttttttgcattctaaaagagtagacactcgacaaaaatatttgtacacttttcaagagctattgagaagctcacctgaccagaccttgtggtcttgatagttcgtcacaataatacaataaaaataggagtaggctatcttataattaggggctgagcttttataaacactgtgtattatttattttcttattttattattatttactctacaaatattgtcactttaaagattccgtgttgtaagctaaaagtgaggtctacatctaggttttttcattgagggccaaaaatttcatcttgctctcatcaaccttcgattttcaatccacacttaactcaacaaaccatggttttgacaagaagatcctcgtcaacttaaccatgtgatcctatggtgacagatcttaatgtccacgcacccgttgatgcaggggtagacaaccccaacactgggctgcttcctcaacaacttgaagtccccacaagtgcaaacactagaagcactcaggtcactacccccaccactagattcacacttggtgttcgagagactgggacgaccagtacacaatatgccagagaaactggacctgacactgttcagccatcccaaggagaaccccaaatagacatgggagataattctaagctgcataacttaagaatgtccagacgcataccaatacactccaccacaaccaagagaaaacacatattgttgtaaaccatactttcgaacaacaacatcgtgagctctaggagtggatgaaccgtcaagctcaatccatgtgtgcacaacaagaagagataaatctctgcttcagggaagctactgaccttattaggaaatttacccaacagactggcggcaaagacagaaggtccagccacctagatgaggcactagaagaggaaaaggtctttgaatcccaagcgaatgacgagaatatgggctcaaggaatgtccaacaaattatataccttctaattctacgctccaagatcaaatcactggctaccttatagatgattaagttttacctggtcactacctcagaagaaacgacaagacaaacttccaacccagacttgagagaaagagagagggcatatctccttgacaagctggagaatctcggcgacatgtaggcctgtataatcatgatcgaagagtccaagttcatggtcagaaccagtatgccaactaacaacctcaacaaggtcatgaaaggttctggagtggacaatcataccctagcagaaatgatgacaaagccgacagcaggccctgtaatgataattaaaggtgtgactaccattaggacaaactgcccaacgatggtaatcatggtaacacctagaatgtcgtagatcctcccaggtcagtaaggtccaccaaccaaaatgcgaacacaaggccaaaagctaacttagtcatccaaaagatgggacctaggccgagaaataaccatcgggatgatttgaaccaaagtagaggccatcgggatagacattttatcccaccacatgataatcatcctatcaatgtggacaactatgtcctgtagaatagagacaactttgtacgctttgatattctaggggtccaacaggtgacccaggtcggtcaacaggcaagctaagttgatctaggggtgcaagctcaattagaccaactttagagcctaatacagagtctaaccagcccaaaattcactaacctggaactcaaccaggcaagaggcacgcctttctcaacacggatcaactcccttcacctcctgaccgtgttcaaaatgtcaacttgaaagatgtacaccgggaaggagaaccctttggctcacattaaatatttcattaattgaaataatggtacaatggaggtatatatagtacaaagctagctgatgaaaatagttagaattaacaactaactcctaactaacctataactaacttaacaataacaaaatttaaatttcacagtgtaagttatttgtaattttttgaaaactttcataaaattaattataataaatcctgtcacaaaaaataattgagattaaaatatttaaatagtgtcaattaaaaaatacaatatagtataaatatgtactaaaaattaagaggatcagttgcccccttctcttttaaaagtctggctagctatgttaaatgagtgtttttccatactcagttataattaattaatcttattaattattgaaaatataagattaattattttttttatcatcaataattaatcttatttaataaataaatataacattaatttagtacaatgtttttttattaaaaaataacaaataaataaattaattaatttcgagtaaatttaaatatttaagtttttggagaatacttgggtgggtggagtaacgaatgttggtagctgcttttattataagtgtggcaatcctacaagggaatatatactatgatcaatttcatattcatggtgtgaacctacatacaatccgtgtgatattaattggtgtgataggcccttacaaaaaataaataaataaataaaattagtgtgatagataatatatagaaatttttacatgaaaaatcctttttactctctttattacattattaccc

SEQ ID NO: 19956 - DNA, 2748 bp, Cannabis sativa
tcattaagttatatcatttgtaaataaataattacaatttattgagtatatgcttttaggatataacttgaagatctaataaaacaaacaaataaagaacgggtaatagtgatcatatatattttgtggtttagtggtattatgcaagcaaacaaggtacaaaacaaaactggaatttagaaactgtaccagaaaattactaatataccgttttgtttctatttaaattataaattaaattgatggataaggttcaatggtatggtacagttcagaaaaagattagaccataaatatatatatggtacttattagttttcttgtttgagttgatttatgatataactttggtcaaaactccaaatcaatgcacttccctggtggctaaaattcctcaatatatatccgatttatttcctattcaattatttgcttcaacgaaaccattttctattcactattcagtaatatatatgatttttttttaaaaaaaaaaaaaattgatggaatttaataaatacatagatggattatgattcagccaaaaattagagtctaaatttgcgtagtactacatatgtcacaatcttaacacaaataataactctcaattgatttgccatatcaaaagaaaattctacttttatgttatcctatattaatatacgtacacttggacacataccaaaatcaagatccaaattcatcaattggaaccatacgaaaaaacaattggaaggaagtgaaagtttggataaaataacatcatgtggaaaggaaagagaaaggataaaaaaattctacactttaagatagttaacactgaacgagaagttatcataatagagttaccccattaaatagaataaaattatatgaagaggaatgagaaaatggatggaataaccgagaaattgttaaatacacactacttaaaaaagggaatttctcgaccgtttaatagtcggacgaatggtattatcgttcgtctttatgatcgatgcctattcgatcatcgcaaaattgggtagaatagatgttggtggaaaataattaaatatgtctattcccaactatttaaaaccgtcgacaataactgacactataaccaacagtttagaacatttggcaaaggaaatgccaaaaattttaaatcgtcagctatagtgagccactaattaagaatttgctcgctgaactttgacatacatcatttgacatacatcaaattatgctcatcaaattatgctctttgaatttttaaggttgttacaaattttctctaaactattgaaattattggatttaaggacttttgtctaattttacttacgaaagcttgacatagataaaagttcaagaagcatgatttagtacatgtcaaagttcaggagacatgatttgataaatatcaaagtctgaggaacacgttttaattcatagacaatcacacattagtaaaattgacagaattgagcaaaagttcttgaatccaataatttatctcaataattcaagagaattttttaatagcctgaaaatatataatttaatacatgtcaaaattcagggacaaaaattataattagcatatatatataaaatttataaccacgtgaagaattatcttttgtagtgtttgacactttaaaatatatagtaatcagctagagctctcataacaagtgaggtattaaagttaaaagttaaaagctaaaataaaatagttaagagtttaaaattaagcttcgtcaaatactttaaattcttagttattataccttatcttaaattttaagaaatttttcactagatataattcaatgaataatggagttatgattttatactttttctttctcactttattcatttctttaattcattttttatttttctctttactgtatttttctttgtttttatcaataatatgtatgtaaagatataatacatatattgtgtaatataaatatatatgtgaagtaaaataaataggtagtaagagaacttattgggagtgccctaacatctaacataagaatggtttgagataatgagttaggtagcaatagcatgtaagtagtgggccaatggcaaaggcaaaggcaatgccaccaatgaaccactcactcccacccatatccacagcatgaaagcgataatttcccatgtttctgcctcgaaacatgcttccttcttaggataccactccttttgactcccttcaatgtcaaacaaagcaactcacccacgtaccccactctcatatataataacttttcaaactccaaaactagtaaactaaattattctaacaaagaatatatagcaaaaccggataatgtaaagtttgtatggccctatggatgacatctctaaattaattattttctaatccacgttgtagttcttcgaggaaaaattgacataatcaagtttttgaatttatagaatattttagtaaataattcgctattatatattttaatataaaatatatatatatatatatatatatttctgagttggtttgtggatcatatcgttatatgtagtgcaagtaatttgtagttttgtacacaaccgttttattttatgtacacaaatgcttgaccccatcaataaggctctagtgttctactttaatacagcatgtaaacattattttaaacaaatatgtttataaaatggttacccgttagatttaatagcaaaattatccttcaacttattgttaataataat

SEQ ID NO: 19957 - DNA, 1625 bp, Cannabis sativa
tttattcttacctatccagcctgtgaaaaagtagccattttttcacttccttactctccaatcctataaatacacattcccacacacctccatttctcacaaaacagactcttcttcttccttttctgatcacaccctttactgaaatatggcgatccatcatagatcttctcttgtttcgtgttttgccatcgttttcttggtgggttttgcctgggcttcggatatgtctatcatcgactataatgctaaacacggcatggaggtcccttctgaaggcaggactgagaaggagatgagagccatgtacgaatcatggctcgttcatcatggtaaggcgtacaacgctctgggagagaaggagaagcgatttgagatctttaaagataatttgaaatttgttgatgaacacaataaggagagcaggacctacaaacttgggatgaacaagtttgctgatctcaccaacgaggagtacagaaccatctatttgggtaccaagatggatcggaagggaaagctatctcagtcaaagaagagtgatcggtacaccttccgagttggcgattcgttgcccgattccgtcgattggagggctaaaggggctgttgtacctgttaaagatcagggtcaatgcggtgagttttttttttctttcaaaattttaaccgaagttgacttttttttagcctccgattatagttttcgatggatcattggattgttaggttttcctttttttataatcatggatggaattcgtcacctgtttttggagattttcaccctaaaagaaattgataagctttcacttttgattgtctgttagttgttttcctggaaaattgggaaatacccttttgatatgtttgttagacttgcagattttaagggatttttttctaaaaaaaattatatattattggagtgattattagtctttactgtaattggttaattttgtctttctgtaacaattagggtttattttctgccaaaatagagtcatcatgacgatcatttaaaagaatagaagcaatttgttgatgaagttattatctttgttgagtgtcactaaactaacgtcataaattggtttgaattgaagggagctgctgggctttttcaactattgctgcagttgaagggattaacaagcttgtaaccggtgatctaatctctttgtctgagcaagaattggtggattgtgatacttcttacaacgagggctgcaatggtggtctcatggactacgccttcgaatttattatcaacaatggtggcattgattctgatgaggattacccttacaaggctcgtgacggtcaatgtgatacatacagggtgtgtgttaaatttatagcatttctcgtttttcctattgaattatcaagatagcttgctccaatccaagttagcccggttaattaattctagtctttgaaattacttatattttgtctttcattctctgcagaaaaacgcccatgttgtgacaatcgataattatgaagatgttcctcccaatgatgagaaatcattgatgaaggctgttgcaaatcagcctattgctgttgccattgaagctggtggcagagcattccaactgtaccaatcggtaatga

SEQ ID NO: 19958 - DNA, 3324 bp, Cannabis sativa
  modified_base (27)..(30): a, c, t, g, unknown or other
aaatttgattatattgaaatggatttnnnntagggcacaaaacccaacatggcagtggtcggcccttgcataaggaaaagggtttcgttggccaaattagattttcaacatctatgtatcagatacaagtgagaaaagtcacccaaggcttcataaagcccttatccgaccactgccataaagaaatggcagtgcccatcaattttgatgagcgctgccacaatagagtggcaatggttggctactacacaaggaaaggagtttcattggtgaagtagtatttttaacatccatgtatcaaatgcaagtgagaaacaccacccatggcttcccacaagccatggccgaccactaccactattcggctccaactggtggctatgacctcccgttagggtttcggacatcgatattatgtttttgggtctcgagacctccaaaatatgaatcaccatcaaaaaataagtcaaaacacacccctaggagtccaagaccactcttctcaagtggggtttccatcaatccaaattctttgtttctgtttgaatcgggttctaaccttattctacttcttgtttatgttgatgactttctcattacaggaccaaacaaatctctaatttagaagcttctttatgatatgcactctagtttttcattcaaggatcttggtgatgtccactatttccttcgagtggaaattcatcgcaactcagtgggcccgtacttatgtcaaataaagtatatcacatatttgcttgtcaaattcaatatgaagggtgttaaccaagttctagtcccacaagttcagttcaaaagcttgcattaactgaaggagcacaactggaagatgttcatttgtatcgaattgctcttaaggctctccaatatctcacacttactagacttgaagtttctttcatcatcaacaaacttaaccaattcattcatgcacctaccattgctcattaggatgccacaaagaaactcctcagatatttagagacactatatttgaatgtctcctcctcaaaatagctctcacaatggagttatatggctactcatatgcgaattgggccagttgtcccaataatagaaaatctactggttgatatatcattttcttaggaggaaatttactgttttggtctgccaagaaataatatcttgtggctcgattgagcatagaaagtgaattttgcccttagctaatgctccctcaaaaatcaagtggatttgctctttattatatgaacttcaagtctcccctcatggcactcctattctttggatggataaccaaagtgttgtagttcttgctgcaaatctagtctttcacgtttgctgcaagcatattaaaattaacatgcactttgttcgggaccaaatccttgcacatcaactttatgttcgatatgtaccatccgtttgatcaagtagttgatgctcttaccaaaactctccttgttgatcagtttcactacttaaagtcaaaactcaaagttgttatacaactcataactaattgtgatatgttagttttcagttgttagttaaaatagctaggcccttctctgctttggttgaataagttattagtgtttttagtttgttaattttatgttacaaaaactcttctttactttgtgtattcagtctacacataaataaaggattttaatctcagtttgtgaggttaagcttttattgccatcattgtttctttttaagattatatgattaagagcgtagaattctacatagatcatgaaaaaataataaattaaaaaactctccttcatactaaaacagatagggtatcaatcaaaacaccttatttgaagagttttaatagatttttcgtacgttatatataccacaaaattattataaaataattatagattgggggtgccgcgtaaaagcacctaaagcactacccatttgactcatctgattcaatctgcattatttcatattttagatccaatccaatccgcataataactcaaatccaatccaatcaaatatgcaaaattgcaaattgaattggttacttttaaatactgaattatttaatatttagtttaaaaaaaaattatcacataactaacaacaaaataaaataaatcattattgatgtatgtcttcaataaaaaattaaaaaaataaaaaataaataacaaattcaaagcaagaaagaaaaaatatgtataaaaaatatttaatttaattttaaaatttatttttcttataaataataatgaaacatacatttgatctactatgtttttaaatatattagttttttaaaattattttacaataaaatattatttttatatataatattttaaaatatgtataaatatgtgtggattgaattttatggattacttttacatgtcaatcaacatttaattcttataagtgcgaattttaaattttccaatccaatctatatatatattatgaacacctctaaattgtgaatttttttttctacataataatgttcactctattcaaataataataacaataataataataattataataatgttcgttgaaaactagaaatcaaagataggaatctcaggattctcttctattggcatcatggctagctagcaactccagcagtccttaccaaactatcaatctagcactccttagcccttatcaaactatcagcaactaatataaattaattaactgaacgattaatgaaaataaaactacaaacttcaaacaaaaatggcacctttgaaaattttaatgataagagtttataccattttgatctaatattttgacgaataattagtttggatcctatattttttaaaatttaatttctttttgatcctgtatttttctaaaaaattacaattaagatcctaataatgtcaaaatatttttcaatatgactaaattacccttcattattgtaagagttataccatattagatcttatatattttagtataatatcattttcttttaaaaaatttaattaagaataataacaagaatcttatattttctcttgttcattttgttgcctaactacacaataaagaaattacaacgtgaaaaatactagtaaaattttacagtcagggaaggagctacatatatagaagcctagaaggggtgaggggacctctctccccacactttggaaaaaaaaaatatcgatgtagtgttttttttaatttttgtcaaaaaaaaaaaaaaaataggcatgatgatctctctctcttttaattatttgacaccttaacaaaaactatttttgtctctgctttgtttac

SEQ ID NO: 19959 - DNA, 4558 bp, Cannabis sativa
tagtcataagataaataagtaaaaaaaaattaggtttgaagtttgttagttgaacttgtaattaataatattcaaaattaattatgaataaaaaaaatattaatgatgatttagttttcaatggttaatttgagccatttgattaaatcaaaggctacaaattactatccctattaattagtaaaaattacaatacctattgtattagcctccattaagaatataatttatataataaatatattaaaaattatataaatatatattattagtgattgccttttttttggttaagtttgtagccctttctgttttttattatttattttcattatattttgttctattttattatttgacagttttattgtgttagctattttaattttttagttcgaataatctagtaaaatgatatctttatagagtataaaacttattaaataaatggtgatatttagtttttagatatttttcttcatatttttacgttaatattaaatattaagtgtgtaattggacatataattagaaatgcgatctaatccaattaaaaattagattggattagattttgaggtttaattggattaaatcagatgatgattttctaaatagataatttcatgaataaaaaagagtaatttgaggcataaatactcaagtttattttttagttgcaatttaatacttaaattaaaattttagcgatgaaaatatcttctgttacacttttgaaagttctgtaagtacctccccattttttaacacgttaggtgtcaaatggcaagacacgtgataaaaaataatgcaacatcattttattaatagccaccatattattttattaatagccacgtaatgtctattttagttcacagttaatataaattaaactaacatataaatttaaaaataaaaattaaaacaattaatatacattaaaaatctgaattgtaaaacaaaaacaaagtaaatttaaaataaaataatagtgttagattttgagagcctaatttaaataaaaacacaatctcttcaattacatggagagagagaaaggcgactccatcttctctgacaacgaacaccgatcaaggttctatcttctccaaccacgggtatcattcgaaattacatcttctccaaccacgagcatcaatcaagggagcagactgagatttagcaacttttgcttagaaataaatggggtgatgggtatgtgattgtgaaccaccacaagaagtcgtgattcgcacctcaaagacagtgaagaacccatgtcgaagattcaagtgttgtcatagattcaatgtttgattttttttccttttttgtcttccttttctttctctgaccttttttgaatttagattgtgtatctttattattaatcttcttctttcacattaatggatatatgagttttgattcttgttaaaaaaaattcttccctccacagctaatgggactgatttgattatgtaattttttgaacatgattgtgatttttttgagtggatggaccctgagatatttcaccctatttgtggagttggatgttgtatttatggaagtttgagtgggcaagcctttagaccatctctaatgggagacataaaaattgtgcgatatttagcacaaaaaataattttgtggtagatttacattaaattatagcattgtgctccaatgcacaattataaaactttgatgtaaaatttaaagtctaattaatgtttttattaaaaaataaaactaaaaactttattatcaattttattattattttaatatgtaagacaataaaaataataatataaatgcttcataatttaatgatatagttaattatactaataaaataatacaaatgacataaatataaataaaaaagtagtgtatttattgtattgtaaattttacattatagcaaatgttgtgctaaatttggcacaaaatttattatatgtcaaatttacatcactttttggcataccattagagcacactttttgttaaatgaactatattttacttttcactacttatttacatctccattgaagatgctcttggcagcaacacaaagatttactccattttgtagccatggtgataatcatggttgtccctctacaattgttaggagctaaatagctaatgtagcagtcatcaaaaagataacaattttgaagatgataatgaaaccacctaagtgattaaagaaaataaaggcagttgtgtgctttggtttttctgaacttttaattgtatttttttttaaaattttgttttgatgtgaaaaatgttatgaaattattattctcttattactggaactaagtaaaggtgttttgttcttgttttaagtaaatttactatcatgtattgcaactcttcgattatgagaagttacgagttcatatgttcaaaaacaaggcaactactgtacttttatataaaaactagcaagattatcatttttaaattaaaaaaaaatataacttctcacaagttacaatttcttttctcaaaatcacgattgaaaaataaattctaaattctctttattcaaaatataaatgataataatttgcacaataatagtaataaacaatattatattactttcaacattattaacatactatatataactcatatattaatataatatgtatgtcactaatcactatcctatatatgtaacataaacataatatcaatactaaattcataaatacatatgttacatatctcatatacatataacatatatatattaacatatatattttaatatatatcatatacacataatatatattaattacacaattatatatgttacatatctcacacgtatataacatatatataaactttgatatacatgtatgatatagattacatacacataatatatatattatatatgcatgtctcatataaatatatagaaaataattatttttacatatttaatctcacaatgcacattatattatattcgccatatatataatatacatataactgatatatatacatgatatatctcatatatatacatatgtaaatatgttataaattcaaatatcatattatatactgttaaaataaattctcacatacactgtccagatcagcaagaacaagattacaaggatttaaacctacaagtggcattcggtctctaacaacctattctgacagaagctaaagttagtttcaaagtttgttaaaactgttgcaactaactcccaactttctcaatctatcctaaggctatataaacatgcatactcaaacatgaaagacagatcataacagaaaaattggagaggacttacagaggttaagcctaaggttaggactcggagatccaatccaaggacatacacacagacgagaagaagaaggagtaagtacacattcaaagagagagagagagagagaaaataaacactctaataataaaaagattaccaatcttacttgtgatttggaatccaacattgtaattcattgatcttaaagatcttatagtggaatcgagccattttttgaggcgagctcgaaagaggatgtacctagcaacatttggcaaacctctataaaatcctggtgctatctctcttatttttttattgcttttactattttatatatctctgtgtgtatagatctagggtttaaattttgatttgagaaaggattaattggtttttctaggttgatagtagtcttcgagtttcttgagaagaaactcgaagctctgctagggtttcgagctttggtttgagtgttcagagtgtatgtttggttctagagtgttcataaggttatttggggtttggatcaaaacgacttggcgttctggttgtcgtctgtcgtttgattcattaatcaaaggagtcaactgtgttttgactcaaggtgaaaggtcatttttgacctttggtaaacttgatttgtttctattttgtgtaggttaaattggtaaaaaaatcttacatataccattatatataatatatgatataaataatcacatatataccgcatatacatatgtaattttctatatattaacatataaaacttccttatctcaacaaaagaaaatatattaatacatatattactatgatttaaatagtaaaacacaaaatacaccatcatgctcaatcatgcatgactttcccacaaaatctcttatatatctattctcaaaatcttaatttatctcctcttccattgaaaagaaataaacttttgattgttagatattttatatatcaatagaaagataaatcaagataaattacaactcaattgtaaaataatacaaggactaaaataagagattgattacataaatattaccacacatatatacaatatacacacactttatatatatattacaataaaattagaggagatgaattacaacatatgcaatatacaacatatataatataatatgaaaaaaaatatatatagagtttttggcgactaaactctctcaactaagatcggaagagcggtt

SEQ ID NO: 19960 - DNA, 5330 bp, Cannabis sativa
tcaatttcaattgttgtcaattgctaactgtgtcatttcctgatttaaagttttggtttttagataaaatgattttttttttgccatgatttatatgttttgtagatctggattcgtatatgtgggaaattttgtattttgaacaaggttttggtattgttgttttttttttttctgttttgtatttgattttgtcaacatgtggtaatgtggttatttcccaaatgctgtttggaatgatttcccccaaaaatattattaataatcaaggctggagtctcgaagcggctctgtttgccataaaccctttttgagggtatttggaaagaaacacttatgagcttgagaattggtataaattattaccataggcctttggttgtggggatcattctgttacagctgttgggtttaattggtattgcccttgtttgcaggttaattgtatgcattggttgttgtatattttagttatactatttttttttcatgtgtaaatgcttttatacatgtgatttatgttttataatctagactagtgctgcttgtttataatttaagtggttttgttcattgtgtaattgttctgatattcaaaccccagctgggataaatgtcatgttatattgtgtgatgttgcttcttttttttccctttgacagggtttgttgattgttgatttgttttatagtttttaatatcgaattgtattttttttattaattgtcatcaactaaggctttgactgtttgttaagtttagcaggaattatgtctcatcgtaagtttgagcaccccagacatggttctcttggtttcctcccaagaaagagagctgctcgccataggggaaaaggtttctttcagcttccgaaactaatttgattataatggtctacatttgaatatttgctgaattattgactgttttgaataggttctgtgtgtttaatgatctgatttttttgtaataattttaattctttgcgagatctcgttgatttaattgttatctttaagaagtttgttatgttttctagagttaaaatgttagtttgtgctcttttagtgaatttatcatcgacatgcttgtaattttgcaagtcttgattgttttgattttctgtaaacgtgttgatctttttgagttatgcttgcagtgaaggcttttgcaaaagatgacccaaccaagccatgcaaatttactgctttccttggatacaaggctgggatgactcacattgtcagagaagttgagaaaccaggatcaagtaggttttcttcatttaaaatccattgttttttacataaaatttgtgaacataaacacatgctaatgtggtataacaagttttccggaaataaataccaactgttgtcaattcaatttatcctttatattatacctggttttttttttctctaaacaatgttcttgttttcaatttttgatctgttagtatattttatagttagaccattatatgcttatatggcattaatcttatctgtttttatggtatagaactccacaagaaggagacatgtgaggcagtgacaattatcgaaacaccaccactggttgttgttggagtcgttggttatatcaagacacctcgtggtcttcgcagtttggatactgtttgggcccaacatttaagtgaagaggtgaagaggaggttttacaagaattggtgcaagtctaagaagaaggctttcttcaaatactcaaagaagtatgaaactgaagagggtaaaaaggaaatccaggctcgattggagaagttgaagaaatattgtactgtgatccgagttttggctcatacccaggtatttgattgtgcgttgatacattttcgttaagatataattgtacttctgttccttcggttgagcactgatgtaatcaattcaatttgttctcattttgtagattagaaaaatgaagggcttgaagcaaaagaaagcgcatctgatggaaattcaggtgaatggtggagatgttgctaaaaaagtggactttgcttacagtttcttcgagaagcaaatccctatcgatgcagttttccagaaggatgagatgattgacatcattggtgtgaccaaaggtaagggatatgaaggtgtggtgactcgttggggtgtcactcgtcttcctcgcaagactcatcgtgggcttcgtaaggtagcatgtattggtgcatggcatcctgctagagtttcattcacagttgcccgagctggacaaaatggttaccatcatcgcacagagatgaacaagaaaatttataagcttggaaaggctggacaagagtctcactctgcaatgaccgagtttgacaggtttgttgctttgcatttctacgttctttccataagcacacttttgttgtcgtttgtcatataattcatggttttctgctttgctatgatcaggaccgagaaggatatcacaccgatgggaggatttgcccattatggtattgtgaaggacgattacattatgattaagggatgttgtgtaggaccgaagaagcgtgttgtgacactgagacaatcacttttgaaacagacatctagggttgccatggaagagattaagctcaagttcatcgacacatcgtccaaagatggccatggtcgtttccagactatcgaggagaaggctaggttctatggacgcgctaagcctgtctaaatttttgttttttttttcttcttttgagcaattagaaagagttaactttgtttaatcttagaagtgttaagtttttgatgtccttgaaattttctttatatttctgctttgtcttgtcaaattggttggctattctttaatactttgtttggttgtttatctcaaattaccaattttattaatttttcttttttctaatttggtaatgggcagtagattcatttagaaatactttttcttaaattgatttttcagataatataagattgtatgctgatttcttgttttttagtatcttttttacactgttcctaaattataatataaatcatttaaaaaagaaaataatttttgaaattttttgtaactttacctgttcactcaactctagtcttcaattattttgctgacactataaaattcaaaagtctccaaacttttacttctaaatcaaacaataagttttccaaataatgatgtataatgagtcttaaccacacaagtaaatgagtaatttaaatggttaaatatttatacgtgcaattgtgtgtgaagtgtgtaatttgaatgtttgtaataccttgatatggattgtgaaggggcttaatacctcttttacatgttatgttagaggaaattacactctatactctttttatattgtcctcttttatttttaccctcgtttttaaagtttattatttttacctatttttttaacattgtaccaattttgtgcctgtcactttaagatgtgactctagagcatgtcagagtattttgggtacaatacatataaaaagatgtatatttcaattaaatataaaattagaggtaaatttgataattgattaataaaagatagttttaaacgattgaaatttgaaatgctctttagatttgaactgcttttaaagtgaaagaaaacagtatagaaggaaggactagtgacacttttgattattgttgtgttctcttttttttattgatgcttttattgtgagcattgaatacagaactatatgataatcgactagtttgctttggctttgtacttgtaatgaaaagaaaaatagtagtggtactcttaattgggtcccatattcacaaatcaataagcattataagttgaaaagaaccaaaatagaagaagaaaccttaatgcttttgagttttgaacacaatattttcatttcatttcacttcattacctcaattaaacgcgcttttgcagtctctttagtcctaaactaggagggccgctttattaatgctgtcaatccaaaattgcagaagtctcttctacactggaagctgaagtccatggattgttgttggcagtgggaatggattgtgcaagagatttgcgtgggctgaggtctgtgacttctccaactgccaagtcctcatcaaggcattggaagttgatgcttctccatattggaaattgttggccttattccagtctttgggggagaagagaaagatctgaaaacttgattagtaagatatatatatatataagttgagaaagaatggtgtttgctttttaattagatattttagaattagaggttaattaattagttcaagatacacaaatggatagcttaattaaaactatacaaaaattactaaactactttatatgttaaatcatgtacttaacttacttagcccacaagtcctatacataataacatctctctcattctgtacaacaaaaccaaaccaatgttattttaagaaaaataataccattgagtttagaagcacttcggtaacaagtttcgctgacccgttttgacatccctagttagttacagtaagcaagtactcgtgggatttgcgaaataatggttacgataaaccaagtttggcttgctaaagctgctgcttctgaaaagggtccccaaaattgttggaggtgtagcattgtatgtagtttgatgcatcttccttacattaagatgtttatccaaaatcatcagctctaataattttctacagctctgcaatagatcattcggaactcgcatattagcatggatattttagaacatatatatagatatggatatcatattggtctttcaggtaactgaattgtgacattagcaaactatttattatctattttgagtttttgaattgaagagaaattttagtaaacaaaattggaatgatggcatacctggggattcaaaacatcaatccgattgataatttcatcctaacacaaaaaacaagaaattaagaacaagtgagtagaaagtaaattgttctgcttcgatgtaaaaaactccaacaaaaattcttttaaaagcaacaaattcgagtcattaacaatggggaaagaaatcaatggaaacaactaaagctttccagagaaataacagtaacacaatagggatacacttccaatgcatgacactaatggagtgtttggttatggggatttgagttcttggaaatgagagtgtaaaaccaaatccgtgtggtatgattttagtggagggcttgtgtttaagcgggttacctttttaagtttatttcgggggtaatctcaataaagagtttgagattcctttaatgtcaaactctcttaactaaaacccttacaccaaacacct

SEQ ID NO: 19961 - DNA, 3389 bp, Cannabis sativa
taggtttagatcgatctagatctaaacttttgtgtgtgtctatgtagaaaccataaggttcgagctggtttagctctgctagggtttcgagaggaagaagaaaattagagatctgattgatttcaagaatcttcgaaaggttttgttgtgggaaatcaaaatggtgtagttttgattttgttacccttagttttaactgaagtcaattgggtttgggaaaggtcttaaaggaccttggtttgaatattgaattaaattattttgtgttggcgaagattttaggttttacgtaattttgtacaagtcccaaaataattagatcatgattaactgtctacattatcactaaaaatagacagacactttaaaaattaacttgaagaaaattcatgtccaaaaaagaaatatcaaagaaatagtatatttgcagacctttcttgtagagaaggattttttgaagaaaaaaaattagggaagaatagcccaaataagaacatacatatttataaatattcatgggtttaattcaagcctagctaatgcaaagatcatcactcatcctgtagaaaattagctatacattttctaaccatattacaaaaatgacacaccaaaaatattaggcataatttgtgtaaagaatcatgaaatttcgtatttttgtaaaaaaaaaattataaattgtaaaaatatttaaaatttcgtacaaccatattctttttaattttttttggctggttaaatatagtaatccttttataagtgaatttcatgaattattaatttagtttgacttatatttcattttgcttctatataactatgtatttatgaagaagtatcaaatttcttgtgttaactatttttatttttatgatatatacccgtccaaaaaaggtactatttatagatattgacattaaaattatacaaatggatttgtttaatttacaaaaaaatccctctgaaaaaaaaaaaactatttataaacagcttttgaagatttgttattttgttataatataatttttttcttatcaccctggtgaataattgacaagatttgaagtcacagctcatatcttctttttgttcataaatatcaggagaaaagactactcagaaataattaataacaattaatctatactttattaacataattaataattaattaactttatagtacaaacaatatgagtggatccccatgaaatcaattaaagcaaagtatattagtgattcaaatttggcatatgcacatgtgacacattttttgactgaagatgatctaattgtaatctcagtgccatcttataaattattaattaattaatattaaaccatataatattaaggtttgagtagactactaaattctaattaatgttttccttaaccaataaaaatatatatatatttatatatatatatatatgcatgccttggtagaaccaagaatagtaagatcccatatgagaaaatgccaaatacagaaagaagtaaagaacaagtagtatatatagtgatttaaaatcataatttttgactattatgtatatatatgatctctaaagtgaggaccctaaacaatttgcaaattgctgattatgatttacaatcaccttatcacaaacttctatggttacttgggattttgagccttaatatataatactttttctttaaaaaaaattgattatatatgtgtaactatacaaatatatcccaccaaaagattatcttgtctactccaagggtgctaccatgtccaaatctctcaatatcaaatattaaatctcatatttgtcttccttaagacatgaattagagtatgaccaatttcattatttttcccctcaaatcaaatttgaaccacattctttttggtttgtatggactgtgatgactttgtacctacatatatttatatatatatatagctatagctagctagagattcccattataatgttgtttcaattggaaatctactaaggaaacagtagtactaaaagctggaaatttctatatgtttttatcttttttctcttgtttttttctttcctctgtatagttccctaactttcttcctttcctctcataatttggcctcacatacaaacgaagactcttaaaaatattgctttgctttcactttaaattatttgaacaaattaaaatgtgtattcaatactcaaacctataacaattcccacttggggtgcactttttgttggccttttccacaacatttcttcttcttctttttttaataaaactaatttatgggtcccttttaattctttcctcaatttcatctctatctttcttccacccactccaatgttatacataaatatatatataaatattttcttttcttaaaactaatttttttaataactcattttagggttagggtatacatacataccctataactataatatcttactatcaaaataataattcattttcatgagtttaattaattattattttttttaatttaatttttaagggagttgttgttttcaaaattggtttgggaccccatattgcttcacaaaaaaaaaaaaaaaatacaaaaaaaatacaaaaatacaaaagaaaattgagaccccatttagttagagttttcaatcaatttcaggtccaaactgttggagtccactctcatgttcccaattgtaatgacatgtcatgcatgctgtgttttgtttagttctatctgggccatgcatgtgttgatatttagtatcaatctaatctgtccccttcatgttcttttataacctcttcatcactcttcactctttattatttatttattcattaattattcaattcagcactttaatgatcagcatgtataaacacatctatattaattatataaatatatataaatttattatgttcctatcatatcaattctgttttgataattcaatgcaagtcatgaacaaggtatatgttcttttatgttttccttttattatatataataaagaacgaatgagtgaaaaaatagggtttgtgaaattatttttttacttgtgtagtaataattctgaaagattctttgtatcaatagtaaactttagtgttggttaaaagaaatagtaaattttagtgcatgcatgttccgatagtaaattttagtgtttgttcaaaaataaataaataaatagtaaattttagtgcatgcatggtccaatttctttgactcgttgtaaattcttttttttttttttttcaaacatgtgtaatttttccataaaaaagtgcattggggtcttgagccattttgaacatgtatgcaattttgagcaccatagggttcccttagcaattaaatattaaaaatgaaaggtataatatta

SEQ ID NO: 19962 - DNA, 2541 bp, Cannabis sativa
cttgctagtagagtatacctcaaaatccagccttctttatctcatacgttgctttaaagtaagaaaagtattttccttttttgaattttcccatgaaatgatatttttaaaaatgtgtaatttttatgtgtgtgtgtgattagttataggttttttgtggggtctagtgttaactttctcgaatagctgctgtgattgcttttcacataaaaagaaagttgatattcagtagtagaatattaatatgttaaaatcatgatgaatatagtcatgaatagctgctgtgattgcttttcacatgccaaaaaaaatttgataaaatattcttcaaaaagttgtgaaagcagaatcttcatgaataattttaacaattttcatgaaaagcacagtgcaatacatacgagtcttcgatgtataggaaaactctaaactaaatgattcaagattcaatagattttcctttcttaattactatcactactgaattagagaaatactattgttctgttttcaaagcttatactatattgttatttttcttttctaataatttgtcaacaattttgcaaacaaaacttaaggaattctgctttagcgtttgcgcaatcagtttgttgtctacttaaactaaaaagactttgcttttgtcatgattaaacttagtgctcatcatatatcttgattttatcttctatatttctttgttacctaacatcaaataatatttttatcaagcactgagtatgacttttctcttatagtgatattgttttttcttttaatatccatgttgttcgacaatcataataatatagttttatttttttcattctgttcgtgtgtcgggtcatatttatgaacttctgaaaatttgtcatccaattgttcatataatcaaatcattctcttatgttcatttcaaaatgatcaaaatctcaaatctgcccacatgtacaagttttttcttcttccttggcatgttgagtacacttctagaatgaattaaattactctgttgttggttgagttgtaccttttgcataactttcttcctcctatttgctcaagcactaaactaaaccagagatgctaagggtttgtaataatgcaaagcttccaatcctaggatcctaaattattatcattatctctactgcaatgcttgtaaaattcttttctcacttatgcaaataaattatttgtgtattttttaaattgatttttgctttgatttggtaatgtatttttagtgtttggtttgtcgactgacaaacatatttcttatgttattttcttaggggtttacaatggtatttacacatatactctatgatgtgctggtgcaaccaaagagtttgcaatgatctctcaagaacacaaaaagtagtgcaaagtggaagatatgatgaatggtcttggttcatttgttgtctcatttgaaactgacacgataattttttataaaagtaccttaattcagtcaaaagtactcaaaaatttgaatatttatatatattctattacatgtgtttccatagactttaagttacacctaaagtttttatatgttgttttgtaatactaatttggtcaataatagtctttggtaattaatatatgtttttcagtttaaggtctctctatttgttgtggtaattatttcttttcatgtggttatgaactcatactaatgttgatcatgtatattatgtataaacaggggcttaggaagttcgaacataccgacatatttttgaagaatatctgtaggtgcaagccaattcataatcatttcgcgcacaatcaagtttagaattgtagtctgccaaattattttttgccatattatattttactttctttttatttgtgattttaagtagtttatcgatctacagtatttactaatgatttttttttttgttctttcatgtagtggtggaatcaatcatcatacaatagctttcatcaaaatatggttcagatgagatttgcactgtgactagctatacatttctgcaacatcattttactaaatatgcgttagaataagtgtattagtgtgtatttatatgtaatctacacttgacaactttgtttaaagaaagcttcacaaaattttagagtcaaaatgttaatacataagcaaatatgtatgttcggattctatgtatattaatattcaaattctgcatcaaatttcaatattttggtatttaaattttcttacatttttttaaatcaaaaaattgatatatatatatatatataaattctaataattattaatttttttctcaattataaattttaaaattttaattttaattaagcaacgtttgaataaaaggtgttgctataggtatattttttttaatataaaagtagtattaaattttgagaataaggtaacacttgtaaagtgttgtcttaaaaccatacttttagtaacagtctaggaggcaacacttttataagtgttgcctttaaatattttttagttaaattaaagtgttgctaattatattttttctagtagtg

SEQ ID NO: 19963 - DNA, 4235 bp, Cannabis sativa
  modified_base (3438)..(3444): a, c, t, g, unknown or other
cccttcttcttcttgggagcttcaggttgtggctcaaaagtaacctcttcagggacagtcctcttcttgcctcgcttaacagaaacactgagactacagacgagatcttctaaactatccatatctacaagggtaaaataaaaggaagttaaaatctacagaaaatgaataaatcaaaagtggaaagatcaaaactcccacctaaattattactataagtgttagacgaggaaggaatgctatgataattactaaactccctagaaccagcgatcatgaagagatcgtaagggttaaatggagacatatcttagtctgaactagcagccttgttggtattagtaccatactggtcagtaatctcataatacaagctattacaagttagttggacatgaaaattgggataccaactaccgaacctatgggataccaaatcgatgcaactctgatgtagaagttatatttgctatctttaaattttactaaagttgtatgctcagtcgtaaggacagtaggaggccatccataaaagtaagaagtattacctcgggtagccccttcttcaacctcggtggcttcccgagtggttacattttttaaataaatgaatgcaagctacatagtcgtgatcttcttcgtcctcaagtactgagacttattgccaagtaggatatatgggatccttgtagtctttgtgcattgatccttgccgagaagaacacatgactttaaattattatcatgtaatagaaagttagcagctcgcaatccataagggagattcagcaagatcttgtgcatcctttggatttcaagtgttgggattggtctccttgtagcagttgaaaatatgaaagaaagaatagaatcagtataagtattaaatcataaaaacttaaacttaaaactaagattttagaattaatttatacttacgtaaaactctgaatttggtagtgttaattgggtggaaccctgttgtccataagaagtcttccttaaactcctttttatttggaagcctaacaatgatcttgtgattattggtgtgagttcccaaatagtaaaagcctccttaacaatgtttcctcgcaggacatgatttgatagagttagagtacaatatctcaaggagagttggacactcacatcctaagatgtgatataacgacttcaagcaggcgaggattctagaggaattagggacaagttgaaagggtgcaatcccgaggtaattgtagaaatctttaaaatagtccctaagggggagtacagcccctgctctaatgtgttcaacactccaagctcctattcttgaaggttcactggtattgtaacccttgtccttcaaaacacattctgggggaaaaacaactaaattcgcgaggcgcgactgagcgaatatgatatcctttttcattcctaatatcgcaagaccttaaaacatcccctacatagggggaaattgatctagccatagactcgatcaattctgtctcgaatgtaacagtgggattctgggacattatagatttgtgagctttagaagccatgatgtcgaattccaaataacctggtggaaaagcaacaatgacttgtggtaaaaataatagctttactaaggaaatatttgctaagataggcgtctcagaccaagctgcttctcctagacaacgacatctaccctctatgacttcatttaagaatcgcctatagtaggtggttacctcttcttgttggtcctaatgatgtgttttctaatttttttcatcattaattttgaatatggattggggtttatgaatttgaggtttaaaaactacagcctgaaattgaggataatctgattttaaagggtctgagtgtgcaagttctagattggaatgggaacatggtattgtcacaaagtataatgccccaaaaatgattagaaaaacagagcacagttaaaactcaagacctgcgaattacataaccttaaaatttctagccctagattacttaaaaattcatataaaaccctctccaacaataaatggtgcaaaataaaaaggaacatacataaaggaagcaaaacataaagaaataagaagaatagggaaagagaagccacttactagtttggagcaagaaattgggttccgaagaattctttgttgaagatccttggtgcagagaacctggacgtccttgattctgggtttgagaagtgaaatcacttgatacacgaagaaaaaaagtaagggataatgatggcaaggagttttaggaagcaaagtggattgaggattttttcgagttctaggagcttcgagaatgataatggcagaatagaaggaatttcaagttttatacccaaataatgaaaatcattcgaccgcgatgatgattgatcgaacagatggaaactattaaaaaaagaaaggttagtgtaataaatgccgaaatgatgtataccttgaagttttgaactgccaaaataaagcatacaatttttaaatgggaaaaatacgatcgtacccttaaagcaatcaaaaagtcctttttattttaaaaaacactttttagggggcaattgctatacttatattttgagcaacaatatggtgctaacacatgtaatatagctggaatatgaaccaacctgaattatacaatagtagatatgttcaaataacttgcctcagaaaatacatgagttggtagaagtattcaaactcaccatcttaaagaaaatggtgagccacaaataataactactgactgatgagactagtgaaacgaacaaagaaggtccatatcgggatatacataatacacaatataattgtttagaaagggtagataatgaataatctaaagagcttgcagctcattgacccacatactcgtgagtatgttgaaagactaaaggcaacacctttaacatgattcaccacgtaattgtcagatggtgataatcgtctcgcttataccttactcaacgtcaatgggagaacaagagaagtactacttgacatatacttaaacactgatttatgataaagtgtctagaggaggattgttacattgcgagaagaatgaaacataatcagcataatttcctatagataaagttaaaaaaacggttatgagaagttacttgtaattatcccatgtgtataaatatgaaaagtgaggattgtctacgtctcatgaacggttacaagtgataagatctcaagggaataactgtcatcttagactcctataaatatggacgaccaattggagaatgaaagagaattatatatgtcatctattttgtaaaataatttattgtattttgtatacaatttatcaatctctgaataagatagacttgtagactatgaaaagttaacttcaaaatcacattaaaaattctcttgttatttatttatttattattattannnnnnntattattattattattaattatccatttaattcttgagtatattaattataaaaaaaaattatttattagttaacgaaaatttgcgttaactaataattttggactaggctttttgacaaataaagcaaacatgaaatatgggatttagaatttaaattcacacaaatatggcatattaaatctcataaaaaacttaaaaataataaattatcataaaaaatatacaaacttaaaacttttatatttatcaaataaaattttaaaatctcataataattgtaaatttctcaaaaatatgttagattaaaaagaatatttttaaaaatagaaaataatattttaatattttctgtttcttaatttttaaaattcaatttttaaaaaattactttcaaaaaagggaaattttcacaattgcactaaaataggaaaaatttaacaaaaatacggttacaccccaaaatacaacttatatacggtaagtgtaatctaaattacataaaatacggtttcaacttcttcaacaccttaagcattctcgtccgactgaaaaagaaaacagagcagccattgatgctcgacaaaacttgcttaaacaaaaattcaacaacattttaatgaaaaatcaacaaaatttattatcccataactaaaaaaacaaaatagtaaaatcaattaaacataaaaactacaacaactatgaaaataaacataaataaactatgcataaataaaaaaataactaacaaaaaaaaaataaacaagttataaactcaagaaaacaacaata

SEQ ID NO: 19964 - DNA, 3344 bp, Cannabis sativa
tgcacagtatgtttaaaaatcatgtaatacgcctatagttagggtgttacaagccattaattgctttccacgaaataaatttgtgttttggaacagacaacctatgccaaacaatcttatgatagctcacttcttctttgttaaggagcgaaagatataaatatattaccttgtagtttccattttagtcagcctccatcaaacctttttttgtctatgcaatttcaaagtttaattagttttttaaagtaccaactagcatcaagactcgaagagaattgctagaatctaaatttttcaaatacatcacattgatccgacacacctacaaacaatcttgcttagaaaagatgacccaaatatatttaaacatcaacgttatgtttcacttcttcctttcatgaatgccaaggctaccaaaattcttaagcaagcaaattcgcttcaaagaacaaagatgtattttactacacgtgctattaccactccagaggtaaccacaacataatttatcaatggctgtagttactttttgaggcaagatgaatatactcatccagtaattatgaatacccagcaggactaaatgaatcaactgagctcgaaagttaaatgccaactagcccaaccatgaagtttctttctaatcttctctaagataccttcgcaatttatgactttccatttagtaggctgcaagagtgcttattttgatattttacgttattaaaattaaaattaactaactccaagcgtgctcatttgatatctatacgttatccctatcttacattattttaaatttcttgaaaatctgtcagaagtctcatgcaacttattcatgtaccaaaaatataaaaaatacctcagatagggattgaaaatagtcactactatacatacagaaaagacttgacagtacagattttgaagtatacattagctatgaagcagtttttgacattgacataggtctgttgaataatctacacacagtaaactctaattcctcgtggtcctcttccggccacgaggcctgctagtctgagcatcctttgaagtccctgtgatgttctttgaagactcttcctcacttatatcatcgaaactttcagttttgtctgtggattcatcttcctcttcttgcggcaatttccccacagcagcaccctgttctgtaagttgatctcgcagatctctgagttttgctttcttcgaattcaagactttgagaaactgatagcaagaaaagcgaagatttaaatgaaaaggaccattctctgtctcttgtgaacagaagtaatcattaagttaataattaacaaaaattaaatccaacgctattattttgagagaactatatgtagtaaagtatcaaatctcctttttcaactcctaacaatttagcaaagaaacatttcagtatcaaaagtgcacacctttgcatataatgcagattcaaactccactttctccttgctaatcttctcactctgtgccaaagacttctcagcttcaactttcaacctctcaaaagattgagtttttatgacaacttcttcctatatgaagattggtgcttccgttagtaattcatgataatgcctagtcagttaccaaatgatcaaagtccatggctttctgtcatcccacaaacttagaaacctagacattgtcagcatgttgattatatggggaaacatcataacaagacatagtaaattggtaacggaagtaacggaagacaggttcatccattagtaagcgatacaaaaatctaccgcaaccttgtgtaatgcatatgatatgtttataaaattgccaaatgatcaaaatctactgctttctagggttcacaaaatctcagagggagaggatagcaaaaatattacaagacttggtaaattggtagcagaagtactgcgaactaggagaaaaaccttagtaaggactcatcatacaataagttcaactagtgtaacacaagctccaacagagaggaaccactgtagagcatagattttgcttcttgcccaatatttggcacttgttgctaacggcaacaatatgaaagttctaaattataacttagacattagattaattaattatcattacaaacggaattaagatggatggatttcatatttttcctatgctataccagtcagaaagtatatacacaggtgagctaaattgtcaagataacaaagctatgagcacaccatatcaaacatacttacacttaatcttatgtttgcatccattagaaagtccaatatctctgctgtagtttgtttactatcaggggctggttcacatttccaccgccattggagtttagttccttccttctcaaaagtccacgacaactgcaaatcaggacatgacatgataaattaacaaagtagcaacatattcaggcattacagcaaaagaaaaatacatactacaagcaccccaaaaatacaaaaattcattattgacagtattatatccaaattatgattttcttacctatgtcatctattagtactctgttttcctgctagctagctatgtaaaagttcaaacttgtcaacaacatatatttggcaaaatagacttttttcttagacacacttgtataaaaagaaaaaggccagcttgcaacaatttttactgatttctcttaatgtaatagacataaatccctttcaattctaaaattattctcaacactcaaaaagttgcactttctattaccaccgctcctccccaataaaagtgcagtgaagaatgattgtgtaaagaataaattgaacaattttcatggtaggagagagagaagagaaaagagtagagaacaaacccttttatggccatctccggcatcggcaaaaccgtacagtgaatggggctgttgaaaacccaagtattgctcggccaatgatacgtactccaataccggttggtcccactgtgccgctcggtttctcacttcctcttccgaagctgcagtagtgcagtgtataaataaatataaacaagtagttgtaaatcaattaaaaaaccaatgcgaaaatagagaggaagaatacctcggcaaatccaagcgttgtggccatcggtgagagagagctcgaatcgagagtcgaaccaggtccctttgacgaagattggatccacgtctttgagctcaagcttcaagcaactatgccttgttacctccatttgttagcctcttccttcctttgcactctctctctccctctctcttcttctaatttaaattaactaatgtgtgctaacacttgattttttaatttttttaatcaaagatgaaaataaaatttttattttta

SEQ ID NO: 19965 - DNA, 2885 bp, Cannabis sativa
  modified_base (143)..(143): a, c, t, g, unknown or other
  modified_base (183)..(185): a, c, t, g, unknown or other
ttaagttgatccaaaattaattaagaaattaatgtttaaccttaatttaattttcaaacttttaatttttgaaattctaacatttttaaaaaaaatgtcttttgaaaataaaaataacatatattttgaaaattattctaatntaagttgatctaaaattaataaatttttaacttaaatatnnntttctatttaattaaatgtattaacataaaattaattaattaagtatattgaattaaatcaacttaattactgatttaatatttaatatccaataaaatattctaatttaagttagtctaaaattaattgagaactgatttttaacttaaatatatttttctatataattaaataacataaaaatacaaattcctaaccccaagtcccgggactccagatcaagttccaaaacttacaaccaaccatcatccaaagggatgacacttccttcagtgccttagtctactttatctttcctagtgtaactgcttgagcagacgaaagaatacaggatctagcttgaggatactcccaacccttctggaagcggttcaaagtagaagcgactaaaattcgtcaaagaaccaatgtgatcgcttcaagacgcaaagctgagttagctgatttagcttcgggagttggtgcacatgatccaatcattaatcactcagtggtctctaagaaacttaagcctgtagtcaggagtgacttggctccatttgtaggaatctatgggaacaaacaggtgacacttactgtcaactgggtgcacagagatgggctacaatagccagcgaagatccaactttcctcgcttattctcttcgacatcaacttgatgaggtgaacattctaactccattctaacatcatttctatctagccctttttactaataaatgtttttactctattcttttctaggggaacttgttggttgagcgctgttcgaaagtagtgtctaagatgtccttggagctagagaatcttagagctgagtgagcagcttcagacacacagaaagttgaggctatggctaacgtaaaagaagtccaaaaccaagcaaaggtgttggtggatcgccaagtcaaggagaggctgcagtctgctatggaaaatctcgggaattttgacccatagcgatttcacccatagagtgattttactctaattttatattttatattttaattaattagttagctaaataatgaagcttaaccctaatggttgcctatttaagaatgagatggaagagcattctgacctaatgctttatcaattaaattgtcagataaagaaaattctctcctctcaatcctaaatcatagttgccgacccttatggactctctctatttattttttggtgcctaagtgttgagcaataactcactattagttattacaacatttagagctttgtggaagattgtgaagactttgagtttttgttcgagtttttgagaagttttaggttgagtgattgataataccttacaatagaaatgatacaaatgttagatcactaaacgagaggagacacatactctataagtatatttgaactcaattatttagaatacaacttttctctctctcctggtgtgtgcagcttctcctagctggtgccatggcaaacactcgatcgagagggtagggaaaggtgaaggtttctgcgaagaagaagaagaagaaaggggcaaaaactgatgcgaacgacgacgagaaaattgaagaaataggtatcgatcccctggagttcactaacgatgaagaagggttggatttaggtgagacgtgtggtgtgaagcaagggcatcattcccatggtgcgagtcaggggtacctttcgccaaaatcatcactggagctgatcaagaagcaggaaagtatcaaggctgatttcaatttttttcttagctgcaaatcaagtttgctcagattcactgtcaaagggattgcaagtttctcctcccgttctccgatctgggaatgtggtaaggaatcttgaaacctcttttgataagtctaagaaagttgataaggtcaaaattacacttgaagatatagaagaagaaatttctttttagaattctgctctagtttgctatgttttgggagcaaaccctcctctgaatgtttagatggatttgtaaggaggttatggaaggaaaaaatatataaggttggaatgttgtcatatgggattttcttaatccggtttcatagtgttcaggatcgggatgatatactcaatgggggctacacttttttcaacaaaaggctggttataatgaagccttgggatcctaatacaaattttagaaaggaggatacaagcaatgttcccatctggattcaattggatgatctagaactgaaatattgggggaagaagtcgttgttcaagatagttggacagctaggtgttccgattgtggtggatgatgttacaaaggagagggacaagctaagctatccaagagtactaattgaagtctctatacaacaagagttcccagatttaatttattttgaagatgaacttggctccaatgtattagtggcggtcacttatgaatggaagcctaccatttgctgccattgcaaaggaatggggcattccttgagtgagtgtcgaaggaaggagggtaagcaacaggagtgggtggttaaaaaggatcatcagaaaatagagactaattcgaaaatagaggctgatggattccaaatggtcacaaatggttggaaagtcaagagtaaggaacctgggaagaatactgaaatgtctaactcttatcaagttcttgatgagttaaagatagctacggatttgagggaagagtaggagattgaagaacaagtagggatgattct

SEQ ID NO: 19966 - DNA, 2324 bp, Cannabis sativa
ttcatattgcgagaggtacgagaaattcctaaaatagatatttgaaggaactggacaaagagggggagatgtgtgcggtagtgcactcgccaatgcaacatccgcaaaccatgaagttagaaatcacattcacagaggacggtgccaggcacgttcacttcccccacaatgaccctttagtcatagaatcccagattgccaacaagagggattccaaggtcttggtagataatggaagctcattgaacattctgttcaagattgcattttaagcgattgggtttacgtaggctgatttatcaccctatcccatccagatccaaggattcaatggagatgctcttatgccgatagaaaaaatctagcttctagtgacactcaaaggggagaacaacatttgcgccttcaaacactgcctattcgcagttgtggattgcccacaagcatgcaatgccatactaggacaaccagtcttagtcaattttggggtcgtgacttccataaggcacctgtgcataaagttttcatgtgacaatggaagcatcgaagtgatcaggggtgaccaaaaaagcgctaaaagttgttacaatgtctttgtctagaccatgttcatggtccgagaagagacgaattttactcccggaatggacattcagatgaaagctaaagctgtccgagaggattacaaagatgaactggatcccagaattaggatagggagaatgattgaaccactagaggatgtagaggaagtcagaatctgtgaagtcgatcccaccaagaccatcaaggtggggaggaatctgcatccagtggtgaaagagaaaattgtgaatactgtcaagacgaaccaggatgtgctaccatggagccattatgatatgatgggaagtaaccccaacaatatatgcatgccttgaacatcaacaagaaccctcgtccactagaagagaatacctctagacccagtaatggcagaagcggtaaaggcagatgtcgaaaagttgactgctaataatttcctctgggagtcattttactcagtgtggctggcaaatcctttgggagtcattgtacccagtgtggctggtcaatcctattttggtccctaagtcaaatggcacatggagaatgtgcatatacttcatagagcatgaagccatgttagcaggattagaattggctaaggaagtaggagcccaatgcattaaagtgtacagtgattcccaacttgtgggtaaccaaatatctaggggtaccaaaccaaaggtgagaaaacggttgcctttgtgatgcggtcctgtgagctactacaagggttcaaaagctataacatttgtcaggtcccaagggaccaaaagtcatttgcaaacatgctggccaaacttgcaacagacccgaagatcgtgcaatacggagtggtgcctataagacatctaaaggctccgggtattgaaacaatgacggtatatgccattatcaatcactcaaacccttggataggcaccatctatcaattcctttgttcgggtaagcttccggttgacaaggctactgcttgaaaagtccaatatcaggctccttgatatgtgatcttagatgggaagctttatcccagggggttttctgtaccatatctgaggtgcatagtcagaaccaagataagttcagtcatccatgaggttcacgtggagactaaacttccagaccaagcatttccaagatgattcttcgttaagggtacttttggccaacgatggaaaaagactgtctgaagtacacccaaaaatgtgaacaatgttagagatatgtcaaagttctgcgagcactgccaactgagatcacactcatgagtagtccttagcctttttcagtttgaggaattgacctggtgggatcacctacccacggataaggaaggagtcaaatatgcaatagttattgtgtattacttcaccaaatgagtaaaagttgaacctatgaacacaatcacctccaaggaagtcttggacttcatcattaagaatattgtgtgtcgttttggacttccacacaagtttgttttttataatgggaagtaatttgatagtgtacacttcaccgacttcagtgttcaacacggaatcataaaaagcttctcagtcgaggctagaccacaagcaaacgaacaggtgaaagctgtaaacaagatcttgaaaacaacattgaaaaaaaagctccaaacttgtaaatctcattggctagaggagtctaattcatttataccaagagcaaatcaaaataattttattatatatgggacatctgaaaaaaaaaaaaaaaaa

SEQ ID NO: 19967 - DNA, 5361 bp, Cannabis sativa
tttttttgtggtggggggggggggggtgtttcttgtgggctagtatgatcttgtgacgaaaaaagtcttttgtaaaagaaattgggttcccccaaaggcaccaaacggtttcgaccgaaaacagtcaaaaaatttgtttagtgtgggttcctcttttttcagttcataattcatcaccctttctttgcgtagtccctttcttatttatattgtacgtccttttagtacatgagtgacctgtcctttttttaacgtatccttgacgcatgtcctcttgttttgctgaaccctgcctgccatgtgtcttactatagtatgatgggggctattttcgtctgtacctattggatccatcggcttcttttctagcctctactgattattttgcacctttggggcatgatttccttccaacggaacaccttacttttggatgacgcaatggaaagattatagcattaacttatgcttgggtatatttctccgacgggagtattgtttattttatcttgctttgaatgtactcgctctacaaaatctggcttccctggagggttgatttatccaacggcgagttggatggaagattttcctggaccgtgcttgaccatgtctgtcctatggctttcatctgtcagttctgacttttattttagacctcaactctttggcttgtctttgaattcactgtcattacttctttcttctggttgggtttaattctgcctttagttattatcccgagcaatggacccctattttatcctttcatgttttgtcatttaggctttattttttcttcttgcgacttctcaggctttttaatattttatctagtagtgggctgctttgttttttacctaactattgggctttaacgttgggggtatcttttcttatacctaattgagcctttatgtccttttccattttttcccccaaacaatcacgaaataataaataagagatttttacgtggttgaggcattaactattcttagtccacgagtccattttattagactcattggccgatcattgtttacataaatacagatacaatggacttttattcctttccaccgtgttcctcttgaagaagaggaagcttagtaggaatattcttgagttaatgtgttttcttaatgaagagtgagtcttcaatctctaggtgaatgtccaaagaagagaatcccctcccttatgctttttgcgaggtatttataggctaaccatattgcatgggttgtctaagatggatcttcgtagggatgaaatcccaccgttggatcggtaggtggcatatttcccatgtggccttgatgggtgtcagattgtaccagctgtataggctgggcttcgaacccgggtcacctaagggccattctcatttgaattccctttctcctagcagttggatttcttagcttagtacacaaggacacgcatgcttcgcatgatagcgtgtcatgggagacaacctctaacattgtacatgaaatagcatggcccctggtttgtagcctgacatgcgtgcgcagagcttccgtgggctaaaggcgtaccctagactagtgcatcctggtttgagaagatccatattctttgcgtgagcaaatggtctcatcttttggaatggaatgaggctttagctcacgatattctttgcgtggacgaccttcggggaaacttctttcatggagacctttcccgcaaagtcaatgccttcattctcccggagtgctaggtgaagtgtttgggtggcttaattactccttgtttgtcttttattaatatccatgtggcatgcttgcagaaatatagataacatttatcccccaagcttctggggcatcccatggtctaggagcttgaaacatcttttcttgagagattttgtgcacttgggacttatgacaagtcctttaatgcactacgtcatcagctgccaatctagggtatgtttgctcaataagcatgattacttccattcttttgtcagttcctcaaaatctgactttcgaatttcacacacgtggtgggcgcgtattccgtgggatgctcaaaacagcggtgattggatttgtgctttcttctcattcgttgggtgccttttgcaatgcatgcaatgatgggggccgactattgggaagcgagatatcccctcagcttcttgttcatccaaccgttaaacacctcttgggggagcgagttgaatcgttggcctcttgtgatatgtgccttttccaggtacccaataaataccttcagcaaccattccactttcactttccttgcccattaaactagaactctttgagttttaagtcttctcctgttgcgcaagacttcatcaccattacagtcagacacagtctccttcactatggacgttgcaccaaaaccatcaaccaccacattctcttataaacttgtaagttttctcttttgttgatttgttgtagaattttgaggagattgtgaggatgccttggcttttggaacattgattccacgttcatcatcgaaggttctaggatcataccatgcgttgacccgttttgttattgtattgacttctcataggtacataagtctgccatggaaggagcgggtccttctgtagctatgagcaacagttctaccaggaaaaggcagaagcttgtggtatctgcccccgagatgggagccttcccccaatgtcgcgatcctcagttaaggttgggccagccttagtcttcttaccccttagcccttttaagggtctcttcagtggggttcaccttccctatgaaggtgattccttttgactcgctcgatatgcagaaggagagggaggtgaacaaggccttgaagtgacacttggaggctgcaaggctgcaagtctacaggagggaaaatgtactgtcagcagtctgtaaagctgaaatctcggagaatgtgcatactctaccccctatggggtcaattgtggaggtctaggccttggagaagaggcttgcatacaaggtgggcagagaggttgcaccttttgcccccgaactcctagactaggtagccagaagggcctctgaacttcccatggagacctgggcgtcctgtagtagcgtaaacattttcgtgctagcccattttgccaagcggtaggcggttggggtcaggcctcgagataatgcctccactttgttttggtttgtttgctttgccccctaatctgacacttcaaccttttttttaacttggcctgttttgacaggcagctttgctggcagagagggttggtgcgaggcaggcgtgctagtaacagagttggagcaaatcaaggcagccaaccgtgacttgcatgccaccaatgagaccctccgggccaaacttacgaatgccacgatccaaattgggggtttgcaagaggcgaaccagcagctggaggaggagaatgcccactaggcccacttcatacggagcatgaaggctgttcaggatctatgcacagagaacgtggggtggatatccagtgcaagctcttcctcccagtcaggtggtgtctaaccttgaaccttcgacaggccttccagattaatgttgtttcttcttttttttatatatcccccctttgactatacttctttagtcacggagacaattaaatttttgcatggccacggagggctgtaatagtaaatagggtccttttttgcaatttttcttacttgtagatttgttgtggtagacttttaggggctggttgtgttattgaagcacctggttccaacggccagtgtttcaacccttttccgttagtcttaattatctcttggccgattcaagaaccattttttgacttgaccctttatttctttgggtcgtgatcctttatggcccaccactaaaaaagttactcatttggagttgccgagatatggcgtctttccgtgaaaatagatcttttgcaatttttcacatctccttcagggtctagttttttcacaaggtcgagttccgggagtgacgtctgggagtgccttaaacttaagcatttttcccttttttgtccttgctagccttacattttagccaatcatgcaatctgatgggataaacctatacgaagtccacggagaattgtaagaaggatttcaggcgtatttttctttttctttttaaagaatttttgctgaatacgcatcttatctgcgggttcgtgcttgggtttagcctttgtggaaagaattcaagtgcatttctcttagggagacttagttgaaaatgtttcctattttttggttggatgcgtgcactgaggctagtcgactttggatgtaacgagttataattgtcaataataggacacatagtatccccaaagtagctgggaatcttggactcaaattctcggtcatttgcttggagtctaacttatgtcttttcacaattttcgaggaggagtgttgagtgtagttctacctttattcggaaagcatacaatccttccgagggagtttcttgaaatgtacaaccactctcaggcttccatgagaaggaaccatggggtaacgaacaaaaacccagttgtatgattgatcccaaaaaatccctccgtgacataaacctcgtaagtgaacgcatgggcctcttgcagtgccaggggctttcggtttccccacaaggaaagctgggcctgtatccgtgcgcgggccattccctttatgctgaggttttgcttacaaacatcgaagggcaaggcatcattgggtgtgcgagagtcatgttgattttttataaaacaagcttcaacttccgggaagggaggctgatgttgtataaaaatttaagcccagactttccttgaaatgatcgaagggaaagcatcccagggagtatgacatacttcaagcagtccttccatttcgggaaggaggattgaagatgtatcgtaccccagtgacctttattgcacgaaaaataatgtgcatgcaagagtcacattgaattcttatgaagcaagcttcagcttccgagaaggaaggctaaagttgcataaaaattcaagcttagacttcactcgaaaatatcaatggaaagtatcatggggagtaggacagacttcaagcagtccttccattctgggaaggagggctgaagatgcatcatacccctaatgatatttcttgaacgaaaaataaagttcatgcgagagtcgcgttgaatttttataagggaagctgaagcttccaggacggaaggctgaagctgcatgaaaatacaagcttagacatcgctcgaaaagattaatgggaaagcagtacggggaataggaaagacttcaagcagtccttccattctaggaaggagggttgaaga

SEQ ID NO: 19968 - DNA, 8278 bp, Cannabis sativa
agaaaagggtattgaaatagaatagtaaatagagctggaactgttaaatttcatagagtaagttggagagagaacaaaactcttatctttcccaattcttcttcttcttcttcatccttcacatactttttttttttttttgatatgtactacaaaagaagatgagtattgagagagaagagaaacttcatttgggaagattatgtaggagaagattttgtaagaattttattattagttttaattaaaaaaaaaattgtcacaagtaacaagactacccatcacttaattaattttaataaaaaaaattatcacaagagacaagacaatctatcacttttattattagtttttacaaaaaaaaaaaaagaaaaaaaaaagtcacaaacgttagcatgtgactatattttaaatataatgaaaaagataaatgaatttggtataaggtaacgtgtagcatagagaaaacaaaaaaactcaatgtaactaacatgacaactcaaagacagtaaaaaattaaagattcaaaataaatacagtaaaaatgtaaaaccccagtataaaagttgtaccgtttaacagtataaaagtaaataaattgataattttagtatgtggtgtaaattaaggtactcaattagtttcccaacccaaaaaaattactactatcatgtgcattatattttatacaaatttttaaattaaaggataacacactcgttattttattattgagaatattaaaatatatagtgatatagcatatatttgtaatataatagatccacatccactgttatgtgtctaaagtctaaacccattatttagagttcatttactctccctttcgggaaaaaaaaagagtatttactggtaactacaatatcagatgggaatatggtatgttgatagagaacttggacattgaatggtgtaattaaataacaatatagagttggtagtaagtagtgtaatgtgtaataaatgaaaagatgtctaatacgtaagaacaacttaaatgatctggtgcagtgcaagcaacacatggcttggctaatagattatgcagcagttctccctatttatatgtacaacaaaagtgggtttcataaaggtttatactcccatattgatattcccaccaacaggcaaacatttttgtaatattaacacaaaacaaaaagaaaacaagtggtcaattcgagaaagatccaaagcttgaaacaaagataaaacaaaactcaaaaaaataaataagattggctactctttttttcttgtttttttaatttttcctgagggagatggcaccactacaataggaccagttatgtgaccaaccaacccaaatgcgcaggactaatcaaattttcatgaccacaaagtgatgacgatactaaagaggcttgaacatataaagccaaattttctcagttacaaatattagtagaagaaaatgttattgtacattgattgatctgatgaactaaagaactcccaacaaattcttcatcatcttctgcagggtgtttcttttgaatcttggcatactaaaaaatgactacctactctaagtaactctccgcatcatttcgatccctggctgcagatcatacaccaaggtagtttggcttaaattaatgccatggaagaaggaagaccaagagtagagcttctaccatgggctttctttatcacaaaatttaaaattttaaatatcatacactctggcttcccgatcacagcttttccaacagagcaggaagcttcagaaatcctctgtatcatcatccttgattatagtattcatcctatcgtcaaggcctgaaccgggggcaacctcatttaagtcgcccggggcaatatcatttaggtcaccagtggcaatctcattcaggtcaagaaaacgccttttctgttgtataccttccacttcatcttgacctgggctatttgacttttcaggaggtggggtttgaggtttttctactatgtcgggataaccttcaacaggctcgacacttttcatttcttgctcatcatcattgccaacatcatcgccatcatcattgccatcagactcttgagttcccattgaaaaatcaccattctcacttggttctgagggctcatctgatgtatttgatttttcacgtttcattgaatccacttctgattcagacacttcgtactgtcggtaattgattcggtttctggtcgcccttttacttcgtcttagacctgcctgaaggtcatcaacagacctcaacttagcttccctcctggtacgacctggcaatttcttaaattttcggggctcatcactatcctcactaatacttaatgagtcttcttcctcctcttcttcctcttcttcaggattttcttcctcaaaacgatactcatcgtctccttcagagctactggacaatttcttcttccgtttacgccgcatatactcttcatcatatatagcctcacccattatgtcatcatcactatcaaactctgcatcattatccgaaactgcttctacaaaatctttctcagaatagcgttgaggtctctgtctccgccgattgctacatttcaagatgtaaagttaataacgagagttttcactgagaaaaataaagtaaaagaaaagacgcagaaaaaaaaaaaactgaaccttctatccattggatcagatttatcatcttcatcagcgtcatcataatcagaagatttgggagaaagagcactaaaaccaccatgttgagaggaatgtgaaggaccgctccatctgccattagtagatacatcatgttttaccattccttcccttttgtataaaggttctggagatggatgcttccgcctaacaaagaataataaaatatcaaagacagcactaaggtaagtcaaagacgattctgtataaagagtaggtgagacaaatcaaaaggcaatgattttcatactttgtaatcttgattgcctcattgatggaccgatcataatcatctgcaataacatttgagaccaatcagatcatacaatcattaacacacaaggcttcagatcaaatacagatgattgtaaaggggaaaaataagaaaattttaggatggacataagttagctagccttttgaacagaaacaggtaagcgagaaatttaatttttttaagtcgctcttaagcaaaatatatcaatgcaaccttgcagagcaaattcatgcattccacctagaggaaaatactcttctgggtgtgaggatgaacaacatgacactggtatcttttaacaaaagacagaagtcaaacagatattttcttccactagcttttagcccacaaatattatcgtagattttagatccatgtaaaaatgatgatgggaaaggataattcactgtcactatattgcacatatttatataaccaaaaatttaaagtaaaatcttatcaaagaatccacattccaatgccacaagtatggcatcagaggggagaaaaataaagcagcttaagccatttggccttaccaaaagtgtatgtgacaggttttctatctcgaagggagcgccctggagcaagcccatccatattgtaaaaattatcaagaaggagagcttgtctgtgctgcttcttcagtaacctctcttttctctgtacaaaacaaaatcgaataacaaaagtttatcaccccccaaaaaacaggaaataattgatcaaggttaaataaaacaatgatagcaacacagcaaaatttccatctcagaaaacagttttaggtaccttatgaaccctttcaacctcaggaagcatgtctatctttaactttttccctagtgaaacctctgttctattagtacttgagaagagtttctcctgtgagatcatacaatgagcttagaattaaaaagaacggcaacaacatggcaataaatattctaccaagtggcagcaaatacatatatatatatatatatatatatagatgtgtgtgtgtgtgtgtgtttgtgtacatatatagtacatcgttgaattttgtttcaggtaattctgtaagaaagaggggaggaaattagagttctgaaaatagtttggattaataagccagactaggaaactgatttacagaaatatttacaatcagaaatgatccacataagtcaatatttgtaaagataaaaatgtcattctgggacacatacacatgggcagatcattcttagcaacttacagaaacatcttggaattcatcaaaattggttgctactgtttcccactggtatgatgcattgagagggacttgagagccctttgatttcgctttcttcacttcaaattttcttatctctctgtaaagtctgtgaccaaccatttcatcatcttcatacctgtagcaacaaacatgagaacgccgtatacaagactcagaccaccaaacatgaacttctatggagaccatttacaaacaaattaagtttttccagtaaaagtgtaaaaccaataccaatcactaagttcaaagaaaacaaatagatagaaaccagacttattatataggaaagttgaaaagtctttgattaccagtatgaaattccatgagagtcacctccaacgcgttctttacgaaacgttgcaagtggaataccatgtttaattgagtggtcaatatagttcctgatgtcatcttgctgcaaaacatcacccacattcaatctaaatgaacatacagaaaaataaatgcagtgaaaggtttctgcaagaaattcacaataaacttggtaactgcaaagtatgattaaaggtttaaaaggaaataatagcaaattagatctgtgttcacgattgcatttatgtatctatatttataaattcaaaatcataatgcacactgaatgtaaatgtaaacttataactgcacaacattttcaactaactcactaaatggctgaaaacacaacaaacaaataaatatgaaggtacacagtcatagtcaaaagtataaccctttttcaaaagagggagttttaagcatattacatcttcacgagtgtatcatatttcattgaatttcaaaaacttgtagcatataaactagcagttactaaaaaattatacagtttggtattgaccactacccctcagtttggtggttaactttaacatattttttttaaaatattggctactctgcatgcaagatctcgctcctgcatacctaaaaaacatccaaatcacaagcgaattgttttcatttcttgaaatataacccttgacagacttcaaaataataataaatccaatataataatattacccattaaaaatatgcattgagtaagcgcacttataattaattagcacactgcatgagctaccccaacacacgcatacaaaaagaaaaaaggaacaaatcataagtgacaactgtttccacttagacatccctagacaaacatcaaaaagaactccaatttattaattcttattaacaattactcattaacagcatgaattgagtatatgaatttataatcggtaagaacagcactgtcccaggaaagattaccagaaaaattgacgaagatagagaggaccaaatgattatacaagagttcaggcaacagaagacatcataatgtggctagtgccatcatattaactaaatatgcacattaaagttctattattaattaattacctccacacgaatatcacaaagtgctttcaagatgaccacacgaactccgggatcaagcgttttgtatagttcaatctcagccctagaaaattaccaggacaaaacacattagagacaaaaaaaaaaatagtataatacaggaaagtaagccaatatctatgattgattactcacccatgtgaagcaacgatgggtagatccccatctgcaacctgcaaatagatgctaagtctaattacgttttgcacaatcaaaaaattgatgataccaaatcacagttatgacaaacattagtaaacgaggtgcaattacccaatgccaccagtccctcaactttctgcacaaaacagtaacccaagtatcacgtgtaagtgccattcgtgtaacaggaggtatcgcctgaagaagaatgatagaagttatagggaaagccattgtcttagcagcataagatggtatactaaaataaaattacagattgcagcaatatgagtatgagcaccaaaaaatatataataatttggcacaactgttaagtgtatatgatataaacttgagaagtgaccaaaaaaaagagctagaaaatcatgccacatttaagacttgtaatgcgtggactatgagtaagaatatgaataaaacagatcatggtaataaaagtgaactgggagatactctgtaactttccacaaattacggagctttaatattaagcaaagatcaagacttcttaaattgaaatcaaagtacagtaactataaaacacaaatgatcaattttccagttaagcagagcttctttgcacttaaaaccgcttatgtaatgtagctaagagtcacacacttaagtttaacggtgattaaaaaccgaaactttgcaccattgaaacagcaaagacataaacttgtgcgttttttcttgcattaaactccaatgaggactaaacgggcattggcaaagatgaaaacaaggtaaaagagttgcacattcatcaaaagaagccatttttattcaagacacaaaaaaaaataccaacctttaatagagggatgtgaatatcactaagagtgtcattgggattaagcaaagccgtctcaaactcctcagctgagaactcggccgaaatattcaaaaggggtctaaaaacctgcaacgaaagacaccaaaaacttaagccctaaagggacgcagacataaacccccaaagatcgaacacttgacaaaaccctcacatgcaagaaattgagtacggacgcgaactcccacatcgaacgcagagtccaccgcggcaattgcgccggcggaggaggttccactaatggcgtcacgatcttactgctactgcattgttgctgatactgcggcgactcatcgcccccagcctcattcctatcttcctcctcttccttcttcttcttctttaaagccttcaacctccgctgctcggcggccggctgagacgccgcgtagagtctcgcggcggtgcgtatggtgcacgcgcgagatggacggttgctcctggagaggggaggtcctgttcccggagctacggccgcagtggtagtggtgtcgttttgggtggccggagtgccgttttggggcttggactggtcggaggaagggtcaccggagatcggggaaggggaagcttcgctggacatggttgtagggagatcgaaagggtttacggcagttaaggtgggattacacgtaggggatcagcataggtttgcattggaagaaaataaagaaaagaagaggcaaatcaagcgagagagattgaggaaaacagagagagagaaagttgcgaaggtaattcctttttttttcgtccttttttttattttatttatttatttatttattttggggtgagagagggggtcttctcggccttgtgttaaatgtttttttttatttatttttattttttattaatttcaaaattgaaaaagaagaagggtatggtggagaaggaccagaccagcaaagttgttttataacccatgctatgaacaacacctacatatattatatatgtgttcgaagaaaaaagggtttccttatgaactggatttaatattggcactatactttttaaaaaaaaaaaattaaaaacaaaaattgaagtgaaagaaaggtgagaaaataagaatttcattatgagtagtaaatttattgtttgatttttattactattttttaaaagtatatttactgttttatatttaatttactgtgttttaataaaattttaagaagcctccttaagcgcaaaaaaaaaaaagtacaagactcaaaacagttgagaagacccgatcatcaaatcataatgtgatctaaagataaaactaacttagcaagattatgagctacagtattatattacgtttacaatgcgtaaaactaagagcatggacactactacaaatagatataatatcaactaacaacatacctaacttcgttgacaaatgagtcttagacgaaagagcatcacaaattcgctaacaatcagactcaacttcaatatccttgttgttagactatatatatagtgtatgtaatatagcatatacaa

SEQ ID NO: 19969 - DNA, 3716 bp, Cannabis sativa
aggcaggtggagtgcttgatgttgataatgttgccagaggagatgatattaattcagaggtaggtgtttctatttgtatggatttaccttcctcttgttctgagattgaagcggcgagccttgataatcaaggccgccgaacacaatgaaaatcttaagctggaatgtccagggaatcgggaatccctggacattacgagcattgcaatcccatgtgcgtgattttgggccgaatttaatttttctagcggaaagtaaattaacccgtgatcaagctgagagggtttgtagtgttattcaatatgggaatttgtggacagttgatagagtggggttgagtgggggactgttattaatgtggaaagatgatgttaaagtgcaagttttatccagttctccgggacatattcttgctactattgcaggtaatggatttactccatggtattttacaggattttatggaaatcctgatgctagtcagcgacacttttcttggcgactcttaagggatttgcgaaaagaagttcaccatggctttgttggggattttaatgaaattgtaagcttgtcggaaaaagtgggtggtagagatagacttccgggggtgatggacggcttcaaggaagttttagatgattgtcggtttatggatttcagttcagtgaagcatgatctgacttggtgtaatgaacatggtacttccccaattatggagcggcttgaccgtgggttgtgtacggaggagtggttagctcagtttgaaggggctgatatttccttgctttattggtgggaatcggatcatcggccattgcttgttgatattccaattcgggtagacggtaataaatgtgggaaaactaagaggaaaagccgctttcattttgaggaagcgtggtgtcaagaggaggagtgtacggaaattgtggatagtttatggaaggagagtggtagtagaggtcggccacatgcttttcgttgtaaaattaataagtgtggcaaagctttgaatgattggaacaaaaagaagaaacagagattaactagggagattgagcaaacaaaaaaggcccttcatgaactcactatgatgcaaaatcctggggtatgggagactattcaaaaaatggaggataagctgaatggtttgctagaaaaagatgaacagtgttggcggcaacggagtcgtgccttgtggttgaaatggggggatcgtaatactaaatatttccatcacaaggcctcttcgcggcgtaagaagaatgagattaaaggccttcaagatcatatgggtatttggcaagatgataaggttctagtgtgcaagattgtggaagattattatagaacacttttcacgggatcagatatcaatggggctgtccttgatgaggtcattaatgtggttcaaccaaaggtttctgatgcgatgaatgagaacttgatggccgaatttagagaggaagaaattgtcaaagctgtgaaagagatgaatccaactaaggctcctggtgcggatggacttccggcactcttttaccaacaattttggtcgcaactgaaggaggaggtgattgccgtgtgtttgaatattctcaatcatggggcagatttggggtgtattaatgatactgtagtggccttgataccgaaagttgataaaccacagaaggtagaagagtttcgacctattagcctatgcaacgtaatctataagattgtttctaaatgcttggctaaccggttgagactctctttaggcggtgtggtttctgagtctcaaagtgcattcttgaagggaaggcttattcatgacaatgccattgtcgggtatgagagtttacatgtgatgaggaagaatcgttttcgtaatggatcaaaagttgctctgaagttggacatggctaaggcgtacgatagggtggagtggagatttttagaagccatgatgctgagattggggtatagtcggctatgggtcaggaagatcatgaactgcctcacaactgtccaattctcctttctcataaatggtgagatccaaggatgtgttattccacaaagggggcttcgacaaggtgacccgctgtctcctttcttgtttttactttgtgctgaagctttttcttgtctaattcaacatgctgaacaacaaggaagaatacatggggtggtgtttggtaggcagcgagtggaggtgtcgcacctgttctttgccgatgatagtcttgtgttcttggaagcgacggaaagtgaatgtaagtggtttcaagaattgttggataaatactctatagcctcgggtcaggttgttaattttcataagtctgaaatgtgttttggacgaactgtttctgccccgttgaagagtcaattggctgcgttgatgggtgtgaaggtcgtggataattatgggaagtacttggggctaccatcctttgttgggcgaactaagaagcaacattttgagtttattaagacaaaggtgtggaataaattgaagggatggaaggggtctttcttctcggctgcgggtaaagaaattctcatcaaggctatcgtccaagctattccaacatatactatgagttgttttcggcttcccaagaaaactattaatagcattcatagcatggcggcaaggttttggtggggttcctctgaaaaggatgcaaagattcattggtgtaaatggtctacgctttgcaaacataaggaacaaggtggtctcgggttccgggatttgggtctttttaatcaagctcttcttgccaaacaaatatggagatgtatacggtacccaaactctttgtgtagtaaagtgctaaaggcaagctattttccaaatgttggggttttggaggctaaaagtgggaatcatgcttcctttgtttggagaagtttggtgtgggggaagaaaatcattcaaaaagggtataggtggagaatagggaatgggaattctgttcgggttcttgaagacccgtggctgcctaggccggttacattcaaggtttatgataaaccttcgctaccggaggggatgtatgtggtcgacttgatgaaaggaaatggggaatgggatgaggagtttattagagctatcttcaatccaacggatgctgaattaattttggggatgcctacgtcggagtgggaaattgaagataagatttttggcattatagtaagaatggggagtattcggttcggagtgggtatcgtatggcggctgccttgcaggttcatgacattcaatctaatactgaggcaactgagaggtggtggaggctactttggaagcttaaaattccaccaaaggtgaagcattttgtttggaagatggctcactcgtggttactaacaaactctgctcttgcttatcggaaagttcaagtggaaccttattgtactcgctgctctagtggggcttatgagaatgttttccatgcattgtggggttgtcgtgtgaattgtgaagtgtggaaattaacggggtttcatggtaggatcaaaagacaaggtaaagaagacgtccttgccttcttgatgcgactttcaggtatgttttctaaggatgattgggagttttttctgattttatcttggaatttatggtatattcggaactcggtgaaccatggggggcgtaagcctcaagcgacggctgtagtggactggtgtgggaagtttctttcggagtttaaagatgg

SEQ ID NO: 19970 - DNA, 3302 bp, Cannabis sativa
tactaacttttgtaattctattcttacattgaatctcacctctgtatacacacttcaactctttgtattttttgattccaaaaactatcatttctattttccatatttggtataccaaaccagcaaccattgcactcaaaacttgttttcaaacatgaatattcttggtcgagatatccaacacagcaaggcaaggagcggtttgtcacttactattcaatctattcattttttaaattgagtaaagaatcggcgactgaaagtacactcaaaaaatagatggccaatcaattccaaagctgaaccacataacgaacatgttgaatcttgacagacttgaaatgaaactaacctgtctctagtttgaagatgatttggactgctaaccaaattataaaactatgctttggtacattgtagcgattccacaattctcatgccatgctactttgctttgtttcgaacataaaacctcatatcccatttagatgctataaacccctattgttagtaattgaaagttcggcattcctttatatttctctttgattcaaactatatcttgccaatactaacttccattataataggaggtttatagctctaccagttaacctttttgatgtagatactatggatccactgagctcacaagttattttattttgaagtaattgtccaaacatacttgcccagagcagtaatattcctgtgtctgaaccctaaactttcctcaaattcgggcctacatagcctatcccaagcaacataattaggactatttatttcagcttctcctctccatatttgacaaaatcattgtttgtgtccaataaaaatggatagtaagaagaaccaagttaatcaaggttacccttccagcaaatgataagtttcttgttctctacacacagatcttttgaaccattttctccattagaatttcatatttcgaagctaaaattcttcgagcacagattggtatgcctaagtatttgaacggtaaaacacttctactgaaccctgaagcttccataattctctatacttcttcttccttcattttactataatataatgcagatttcgagtcattagggaataaactcgaaatagctgaaaataactagaagccttatagcataaatagatagatttgaagtcaccatgacaggacaatagtacatcattcgcaaaaaaagatatgatttaaattcaattcagagcaatgatttaatttgaaaaaattagggttttaactctactggaagattatataatggacatttttgtctctcgagctatgacatatgtattattgtgtctcctaaactttttagtattttacaaataatctctaaactattatcagtattgtaaattagtcattctgtcaagttttatcacatgtagtaaataaaataatgatataactacttagctaattgtcgcatcagcgctccatttatagttttacattaaaaaaaataaaaattatacattttttaaaaaaatcattaaactaaaaattaattaataattaaaaaaattacgtaaaattaattacacaggtggagttgaaatgatattgacgtgacaactggctaagtgaccatattatcattttatttactacgtgtgataaaacttgacaaaaagattaatttacaacttagtgaatgaaaaattcaagaaatataataatatataaatcataaaaatttatatatatagaaagattctcaaaatattcaagtaaactaaaagtttgcctacatagtcaagacatattttgaggtcatgtaaaatagcataatgatttaatattattattatagcaaagaattaagaaagtgtagtctcaaataaatgatatacgacagtcatctaaataaaacgacatatggagtcaactctatcttctaaaagtcttacggccgattgattatttataataatgtatttggaacaaggaaggaaattacatcaaggatcttatgttatacaaggatcttatgttatatatatacatatatatatatatatatataacataagatccttgatgttatatatatatattgattataattactaccttaatgattatagtttttctttttcattgaaaaataataattaagagtaaattaatttttgttagctattcctctcttcttcttcttcttctatacctggatttgtaagcatgtgcagtatctctgctactaataatcaccatggtcatttcccatcatcacttttttcttcttctttcttatttatttgaaagaataatatataattgcatatttttgtactgttttcagagttttgagtttttttttttttttttgctggaattttaagcttaagcaaataaaataaaataaaataaattctttatttttatttaaatggtacaacctcacacttttttttttaagaaaatagtaaaatctcttcatcctagttttatttataacgaaatttattttaattttttggcaccaaacagagaattatttttggcgcgtgttttgtccttaatcattacatatatatccacgtgtcattatttgattcgctaaagtaaataactgtttttttaactattcaggttatcattccggtgaccggcttttcattctcgggttcatactggttttggtgaccggaaaagctttcgccggaaaaaccttcgtctacgaatcttgtttaagcgttaatggaaattattccaacaacagtacttaccagaaaaatctcaatcggatcttcactaatctcacctccggcgacggcaatggcgaaggatttcacagtttctcgtacggaaaaagttcagaccgagtttatgggatcggactttgcagagctgatcttgatcccgatttatgccgaagttgtctcaatcaatctactcatcttctttcgctggcttgccctaaccagaaagaggcgattgggggttatgacgattgtattgtgcgatactccgatcgatcgttgtttggaatcgtagaaactcgtccgagattctattcgtggagcgatcgaaacgttttgtctgatttcagtggagggttttctcggcatctgaatattttattagggaatttgaagaatcaagctgcggctgggggtgattttcggaaatttgcagaggggaattatagtggggatcctcagtttgatagatctttgtatggatttacgcagtgttcgccggatttgtctgaagtgcagtgtaagaattgcttagatcaagcttttgaggatattttaggggaaaatggaac

SEQ ID NO: 19971 - DNA, 7491 bp, Cannabis sativa
ataaatgactattataatcacaaaataatcataaatttaaattgtatgactaatataatcgtataaaataaattaagtgaaattattttataaattttattaaatttgacaaatttgacgcatgaaatagcacataaagcaccaacgagcaacacccgatcctttcccggcatcacggcatcacttatcaaaattaccaatttacccattaccaaaattacgtatttatgtgtatatacttttctttaagcacaagttaaaatggaaagaaacgtttttttccagattcatataaattaaaaaacaaacgaggtcttgcctcagaaatctctcccattgcagagacctttctctctttatatctactctctctctctctctctctctctctctctcaaacatggccgcgctgcaatacctagagtctctgcgcagcgcacatccggagctgggtgattggtacaattcgcttgcagatctgtaccagaagaagctctggcaccaactcactctcaagctcgaggagttcgtagccctcgctgtcttccaggtctgttttccacaccatttgtactccttagatgctaaactgtatttggaaatggttgaacagctgttcatgtagggttctttctgatgtgatgaagattagggtttgtaaatcttggaaatgttgcggcattttttttttttgcagtgggattttaattgcgaatttggggtttttgtaggggatagaggaggggaggaattgagactttgagtggaaagctagggttttagagatagggttttgagtattcagtagtagtatgacagttatgtgaaaagatttccttaaaaatgtttttatttaggatcgtgtttttcactggtaaagagggtaaaagaaaaacaaaggaagaagccgaaattttgataagtaggcattaatttgcttgatccgtggtcaggttggaggtcttagaaggcatgtgttgtaactatatgatgtgaagcttaaaagttttaaaattgattaaggttgtgagttgtggctgcttatcagcacttaccagcgttggatgcttgcttcagtctttgtagttacaggcattattgatcttgaatttgatgcacttctctatatttggttgatagatattgggcctgaaatgagttgagttgatcaatttccactgtttagtcagtgcctctagaatgtggatgtttataatagtttagactttttttattggaaggatagtttagactttgtaattgaaagaattgcatgggcactttttcctttttatgagaagaacggcttggacctctcttcccttgtaatgacaaaatttatgtactttttcataatcttttagccatgcaatattgataggtgttatttgctacgttttaatttgtttgtttattaaaataggaagtaggctagtaactttgtagagttggaatttttgaaccacatgcattttagagcagtaagccagagggttaaaaccaatttagttgaaacttttgattttgattgttcaagaaaatgctaacggctatatagtgtcttctcccatatttatttcctttgaagagttttaactttcaataaataacaagttatatgtgtgtgggctttaattggattgttttctcttcctttatgtcaagaccaatataggaatgtgactaaagtgttagtttgaaatccagagctgttgttaatgtagttaatatttagtttgaaatccagggctattgttaatgtagttgcaatatatggtttgcttgtcatgtatgcctcatgggttccctgcactctgaaaacctttaggagagaagttagtgcatgactatacctttgaaatttagtttttacatgccagccaagataattttgatattaatacatctttttactgacattttaagtagcactctgtaaccttttctctggtaatagtagtgttaatactgcaaactaataatacctaatgctctttgtaaatttcattctattctaggcatgtaaatactcttaattgtttcagtgaattgcctagggattcagctacaagtccttggttgttttctaggcttgctttcttgttaacaaaatgtccgaacttttgaattggatttgtatctattgcatgaattatctcttgttgctaatacaaactgtgttcgttctcctcttatccttatataacagtattatctttgctttcactttgctatccctgacaatgaaactttctttttattcttgagttgcaggctggggatgctctaatacagttatataataatttcatcactgactttgagactaaaatcaatcttctcaagcttgcacattttgcagtcattgtttctcggcaatatcctgaaaaagaaacagccattgggtatcttgaaggggtgatagagaagcttagagccactcgggagcagcgtatagaggagccagtcctttacattaaaatgcaaattgccatattcaaacttgagcaagaccaaaaggagtgcaaaaacctcctagaagatggaaagagtacacttgacagcatgactgacattgatccgtctgtgtatgccatttattattgggtttcttctcaataccataaatttcgtcaagagttcgctgagttctacaaaagtgctcttctttacttagcatatacctcagtggaatctctatcagaatcatttaagctggtaactgctacttcttgttaaattaaaatgtaaatatgaacattcacatcgtttggaatcatttcatgcttgtttttttcaaccttaacacaccttgttgttgacatgctgtgtaaatcttcaattctctgtgtagtcatgatgtatcactatcatgtattgtgtttgaaggttgtctgtcattctcttcagatgcacagcaaccatttatgtgtgtttatctaattacattagtttttgttggcgtcccttcatcttagataaggactgctattgtggtgcattgggaataaatggtcctatgttaaagctacaaatataccaggttgttagttgatacttttaagatcatgggaatgggatgaaggctcatttgggaattttgttgaatgctgaaataatagttgagttattcaagataatctttaggtaatagcatctgaccaagtgcgatgcttttttttttcctttttaacatatgtgatgatcatctataaaattgcattatttgctaagaataaaatgaaaagaaagagatcctgtcatttcatgaatttgttttttatgtaagcaaataagatttgaaggctattaaatattttctcaagtcttttgaactcactcaaggtactataatttgtggtaatgagaagatttgtcttttcagtgtatataatgctaagtagttttcttatgcggccttcttattataccaatgttgtgatacaatcatacaaggttaatttatggccatctgacaagtgagtaaatttggatttgtttaaatgtgttctctaaattagagcctctttacaaatattttgtttgacctggatgacagcatccattaaacttttccagctatttttgactgtaagtttcagtattttgattttcggttcattttgttaggacttggcatttgatttgtcgctttctgcacttcttggggataatatctacaactttggcgagctgctggcacatcctattgtaagaatatctctgtcctactgtgtgtgtgtgtgtgtgtgtatttttcccttctttctactcaacttgtcttagctgcccaactttttcttttcatttacaattggaaatattccatgttaaatgtgacctgtaacaacattttccatgtccgtggttcaaagtttttccttctctggatttttgaagtgccttcgcataccctgctatatatcatcctggggtgtactagagtactagtacaaggtgaaatccttaatagtatcttataaaaaaaggtccttcacaacagcgaaggatgtcatgtatatgctgttgtttatcttctatgacagaaatagggccactttagtccaccaaataaagtgcatttacccaaaaacaattgtgtgaattttagtactggaagctttttttttttttttagtgctggaagctttatgattcttagatgggtttggtatgtcaagtcaacttactactagatttcctgcccattgaggcagtgccatctctttcatgtctgtcagttatctttaaaaatctctattcaattgcattagcatacagctcagttgcagtattatatggcattaattctaggtttgtactctagtttatcatcctggtttgttgtgataacatcataatgatacatcattgttcagattaagagtcttctagggacaaaggttgagtggctgtactatattcttcaagcattcaatactggtgatttagttcgctatcaggaattatgtcgtgtgcacaattctgctttgagtgctcagccagcgctggttgagaatgagaagaagctagtggaaaagattaacattctatgtttgatggaaatcatcttcaggttcggttatttttttgttatcatttcatataaaaggaattctgtatgttctctatatagaatttaaccatgttgatgctgtgtattcttgcagtcggtcatctgacgacaggactatacctttgagtataattgctgagcgcactaaactttccattgaggatgtggagcatctccttatgaagagtctttctgtaagttcatcacttgaaatcttgatgagcactgaattgatcaatatttttgtagaacctgtgatctttacaaagtaataaaaagtaaataatgttctttatgtagcactgccttgagattgacaaagtcgtcttcaatattttattcgtttgagacatgtcttatcctagagttaatggcttaaaataaccatgtctttccttattattgccgatttttcagcagttttttagaacattgatcagaaagtttagagcttagttatggttatcttttttttttttttgctgaatttagttatggttatctttaaatttagcaatgctgagagtgagttaaattcataacttcctagtcagtagtttatgcttcatatgataagttaatatatgcacacgtatccaatcttgaatgtgttttgtttaacaaaggatgtatctggcatccttgtgagatgttcttctccagcttgattgtcatactatagctagccagcattatattggaggtgtttggagagtaaagcctatctgttctttactaacataatttttttttctgcgtccaaaatcactttacttttaatttagtagtcttgcttattttatttgtatttgcagacctttctgtaggtggcctgttttggtgaacaagttctgtagtcatttttcagtgtatttgtcttctaagaaacaattggtgcttgtgaacattgattgttgatgatgtttgttttctctgcctttttagttgtttctctattcctaacataggggaatgtttgttgcaggttcatctgattgaaggcataatcgatcaagttgatggaaccgtgcatgtttcctgggtgcaaccaagagttttggggattccacagatcaaatcgttgcgagaccggctggacaactggttggataaagtgcacaccgcattggtatccatcgaggcagaaacacctgacttggttgcatcatgagttgacttcttttcttaacaagaaaggcagtaaaaaaaaagtacatgggatgggtggcctcaaaagagatttagcctcgtttgcttgggcagatgagccttctttgtatgcctgctttttctttttcatattgcctctcctgcgtttcttgaatcatttttctgaaaggagttgcttcttatacttcacttcggagtagtaaattttatagtggcatgcctagagacatgatccatttgatgatcaattaaaagacggctgttgtttactttcttagctatgatattaaaccaatgtattttgaatttttcttagttacagttacttgatccatttgattcagatcagctgctttgctttagattgtttaaaattaaaattgtcatggttcgtatgagagagagtggattgggttttcagtttacactatgataaatagctatcttttagaaacacttcggtgaactaattttcacaaagaatcctgctgtttcgaaaagaagctagataacttagatactatttagataaatagtttttcagtaagaaatttgttgtatgtgtcatcgcaaaataatttcaaacatactccaatcattggtagttgatatacatcacccaaaaaggatggtcaaccacctaaacatcatcgggtaaagctcgcttcatttaatggtctttttttttgccaacttgacatctattgcggaagagaatataaaaccagaaagtgttttattgaattgaatgaatgagtaaaatacaaaggggaaaggtatatatagaaggggacccgattcctataaaccaagaaataacaaaacagataccagaaaaatctattaaccacctaaaatatctactaaccaattaaccaactaaacaatcactaacggtccaatgtttagtacatacagcagagtagacagaggatagagtaaatcttgttacccccctcaagatggatcatatatgtcatgtatggccatcttgggtaaatgtgagtggagaatggtgtatggcaggggtttagtgaaggcatccactagttgtaagttgctgctaacagggatcagacgtattgtggaagtggcaattttcttgcgaatgaaatgacagtccaattcgatgtgtttggtgcgctcgtggaaggtgggattgttggctatgtggatggctgagtggttctcacagtagatgaaggccggtgttggttggttgatgtggaagtccttgagaagatattgaatccaagttatctcacttgtggtggcggctaaggcacgatattcagcctcagctgaactctttgaaacggttgcttgcttcttggtttttcaggaaataaggcagtcgccaataaagatgcagaaacccgtggttgaacgacgagtggtggggcaagtagcccaatcggagtcggagaaaccacgaagatggagagaagaggcagtggagtaaaaaattccttggcctggtgaaccttttaagtaacaaagcaggtggtggagagccgttaaatgtggtgttcgagggcaagacatgtattgactgagagtgttgacaccgaaagtgatgtccggccgtgagagggtcaagtagaggaggcgaccaatgagttgtctataacgagagagattgtccaggaggtctccttcttgatcattgaggcgttgtcttggatccataggagcttttgcaggtttactgctagtatagccggtgtcatggaggagctgtaatg

SEQ ID NO: 19972 - DNA, 2134 bp, Cannabis sativa
tgcggatagatgattagatcagtgggaacagtcattgtcgcttgaattggagttgccatagacacaaatcaaaatcacaaagaagtaaatcgagaaagaaaaaaattaagagagagttactctgatactatattgagaaaaataaatttgtgaaagattcattctattcttattgataattaaattaagtagagagtatttatatacattagttagttatataaggctagaaagttagttacgaaaagagctgaaaatgcagctagaataactaacaaagtaacagctttaacaaagtaccaacatattcatcatgatcattctctttatatttgtctatagctattatagttgtgatcatctttctaatattgtgtttgtagtctatttatttgtaatttgagcacttgagttgtaatctttgaatttattattcctgtgttaaggatatccaacattttttgtagtcccaatattatgtgagaacttatttcatatctaatatgataactttataaattttgaggtcttttggcatttttcttaattaacttggtaaactattttcttatataactaaggcagttaggaaaacaatagttttttatgataaaaatacaaataattaaaactgttgttaataaggtttagggttcttaagtttctaggttgtttgtcaatgtataatagccgtacgaagacaagagtaagcagcaaaatattgcttgcaagcattcagttacgtactcttttttttgcaaatacaacctaaaataatgacaaaatctcatacatcagtagtaaaatcaagatagaacctataaaaatcactcaaccataattgcaagctgccactatttgtctttttcttaattttatgtctttcttagctttatgtatgggactacttcataaatacccaaaaatggtgatgtacaattttttttttttttttttacaaaaaaaatacagaaggttattttcttattattgtgaaatcaatagtgtttttacattataacaactgttatgggaaaccaaaataaaaataatatttttcgaatgaaaaaaaaacaagtaaaaacttgtaaaagaacaaatccgtaaaaattttacattttggattattgggttttaaaaaagcagcaaaacaactaaatgaatccaaatgacacctttttatttaattaatttttctttctcattaggggcttcagtctccactctccaagcttcgactcttatatgtattatttaatggaaactagaatcgtatatggcggcttctaactcacttagaccctttcaaatatgttaaataaaggctattgagagaatggcttagctgaccaaatcattattaggtgccgatatacaccggctaacaaggaagattcaccaaaggtccacaattttttttttttgtttttttgttttttttttttaatactatcgagtgggatgagaacccttttatccaatttggctaaggcaagtggtcttgccagccaagataatatgttaacaagtggcttttgaatgatcactgtgattggttgttagatactggctgagtttgagttgcctatctattctgcttttgtcattttggtttcctgttgcttggtttgggaatttcttttgttgttgctgcttactcttgccttcattattccataaattaaaaacattgagaatgttttatttatttattaaaagaatttattaaaaaaaaaaaaggcaatttcatagtagacatcctcagaatttacgagtatcaagtatcaaccatgtgcacagataactataataggttcattcagccaaactcataacatggatgttgtcattgttgataacttcacaaccaaattgagctgacccaaatcaatgagagtatttgtgtactttatttatttacataattaaattagttgaagcttgttaagccacaagccttaataggccaaaatcttatctcttatattgttaaagcacttccccaaatatcaaaagagggatattacttatgagtatctcatcaaatgagattatatcttttcatgtctatgtaaatctaaaatacactgtaccaaaaaaaaaaggctatcaacaattttataaatacatttat

SEQ ID NO: 19973 - DNA, 3145 bp, Cannabis sativa
ttatattaatttttattgatagtattaaaatttaagttgattagatagtggccttccgggaaggcattagtcgcaatactcccacaggcaagtcttagccaagcgtagcccgtacccgaaggacttatggctctgcgtagccaaaagagtctactagcatgttcttggaagccagcgatatagtttttcttttaccaattcgtacaaaatcaggaaattactttccacggatctcagacagaaaataatatcaagataaaataggaaactacataattgaatatcaaataattaatgcacaattaattatccacaatcaaaggacacaacatgaacaactatcacaccgcgtgatcaacctgccaagtcagcatatagtcactgcctcatgggctagactttatacgataagcccgaagtactattttatttgtaaacaccttattagaggaaaaaaggtaactaagtataacttatattactctataaatacacactgaattatttatgcaaagggttgaaaattcttaactcacaagcttaaaaagagaatagagcaactatatactcattgtaatccctttagtttttcgagcataaaagataataaaactgactcgtgactaagactctttgaagccccaaccacgtacaaactctgagtgttctcttcttgtttaattctttctattgtcttttctcaattcttatattaaataattcattttctgaaaatctcggtaaatattttagtactttcattgagagttgaaagaagtagtgataccatctcaaattacgtttagtagttatgatactcactcgaaaaaagtttggtcgtcactatactgatcctaatgctaagacatgagatacagaagatccaactgaggtaaccagtcaccacaagaaggattaacacagtaaaggcaatccttgaagatcctatggttgaagataataaatcaagagaaaatagttctaatgatcttgaagatgatcaaaaagacacgcttaaagatgatcaccaagatgcgcttgaagatgatcaccaagacatgcctattgatggtagcgcagaaaagaaagacaatccagacgagtcagatactgtggtcataatggccaagaaattacaaatagctaaaaactaaattaactcggcaagaaaaattttctttgctaattcttgagaaaatgccaagaaatggaagttgtaatgacaacactgactgctggagacaaaaccaaacaaacgactccaaaggataacaccattagaaagactgatcccaaaaatcttggaacctatggtccttataaggacaaagtaggtgaaactttaaagaagtctccttaggctgaacaacaaaagaaatgtaaatatgttagccaacctcaatagaaaaagaaagtaaccatacctcagggtagggtgaccaaactgattctaaaggcaaagctacgcaaaaggaaaaatctaacaaaagccaagaaacctactgcccagaaagacacacattgctgcgatgataccattatttaaagtgatgatgtgttagaggagcatctgttattggaccacaatagtggaagtctctcaacaaatgatctttgaaaaagattaaatgcaaagaaagaaaaggtaagaacaaagaaggctaggcctcgctaagatgacttgagggatcatatcaatgatcaagctcgcagaagagaatctttagatgatagaactcaaggctttgaatgcaaagtcaaagagttaatgaagctcactgagaagatctcccaaaagaaaaatggaattatgtctgatttagaagaagaggacacagagccatgtgtgaagagtattataatgcaccgctgctagagcgctttagaatgcatcaaatgaaattgtatgaaggaagaacatcccagggatcatctatccaaatacaatcaaatgatgcaagttgctaaggctagtgatgatgtaaattgtctttacttttcactaactctaacaaaatctgcaaaagacgggtagtgacctgtaagcaatgtttaagaagcaattcataacagtgaaggacttcaacctggaatttagttccctgactaacatcaagcagtaatcaggagaaagtctcaaaaaatacatccaacgtatgatggatgttgctgcaaagacaaagcttactaatgatatgaatgtggtggctttgacatcacgtatatctaatggatccttattgtggggcaaacttcaaagaaagagggcagattcgctatctgaccttttattcaggacccaaggattcatcaacttggaagatgtttatgctagcttaagcatatggggtgcttccgacaccatcaaccaaagcatcattaacttagacaactgttctggccatagtgcctccgacacctacattcacaacacctacagtttacagactaggtacttctgtacatccaattggacatgcaagtttttctagctttggtgtgacacaaattggatatagcattcctccccaaaaaataaaccagaaaaaggaagcaccagaatcaaacataagaaatactcgaggcaaaataagttctaaggctccaagccgtatcgaatttgtaaagaaagtaagaattcaggaaccaacatactcgattgatactcagaagaatgtatacaaagaaacttgcaacatgatccactataaaaggcctttgccaatgtacgaagatggaaaacaaaaaatggacctaaataaaaggtgtgaatatgatgcatgtcgtttaccacaataaatttactaatatttatttatatattaccaattacttcagtataatagtaaatataggtcaatcccacgaggactattatcaatttattgttcaaaaattagtgacaagaattagaaaatgggattttgatgatgagaataaaataacctaaataaaaataaaaaaaaaattaaatgtcatactatgatcagagataaatagttatgttaatctccaccctcaataatcatccttaattcataataatgaatgtaatttcaattttccaatcaaactattaatcccgtagataaagctaaagcagtcaaattatcccaatctctctattacatgtaatcaaggcgaa

SEQ ID NO: 19974 - DNA, 1987 bp, Cannabis sativa
atatatatatttatatatctttaggactcctatgagcaatctagtactgcaaagtgcaaaccaagtggaaccttttcacattaagcaaaaaaaaaaccttttcacatttctaaagaaagctaacttgtccctctacttagggatgaaattttggccgttggatttgaactcttttcatcacctacaacagtatacagtatgaatataatataagtataaatggatttggattgtggatgttgacatttgtgttgacttttttctttttaattatttatttagcatgttttggactactcataaaccagcataaataaagaattttgagttaaaacggcaaggaatacttttctctaaaccattcaaaattttggactatagtgattcaaatttcaaatagaaataaaatatgcagtctattcttcattaaataaatatataccaaagtgattattatttaataacttctcaatgtgacaaaatgagtgaaaataataaattatcaggtgctcctactaattatttaggaaaaaaaaataccctcaaacaaatagaaaatatttaattattattctagaaatttaaattgggaaataaataattaaaattgaaacggccggtcactaatcattattgttgaagatggaaagatatagaaacaaaatcatgagaataaaaaatatgtttctaaattcgtgattaatcgaaacattagtatgtcattagtcatgctattttgggattgtaaaatagttatagaaaatttggaataaggtcaatatttaggtgaacttactagtactacttagcaaggttaattaactagggattctttcgaataaggtcaatattgatctctttggtgccatagacaaataagagcttttttggtgccattgtgactgttgagggttgtctctttttcctacctttgaagcctcagcctatatatgtattataattgtgatgcttctctttgtaatggagaggtttgactatggtggggcattggcggatccaagattaaattttagggtaggtttaattatacatttagggttcgtttggtacgttgtattaggtcgcattgtattgtatagtattatatattaaattagattatataccatattttcaaataatactatgttaaactttaatttatataaaaatattatatatttatgtactcatacaagtcaataccacatatagttttatataaaaatatttcatgaaatacaattcaatttgatactatacaatacaatacggtgtaatacgacgtaccaaacgaacccgtaatgtaattcaaaacaataaataactagctaaatttaaatagaatgatggtttagcaacatcctcttattatagtggtcaaaagtttgaacctaatatgaaccttgtacttcatttgttttttctaataaataaaaagtagatacacataagaaaaagggggcaatgggattcaaaacatagtctcccatgtaatttaaagtatcttaaccaattattccagctatttgactactatgtataaataaaaacaaaaattgcatatttatatattagcccttcctcaacacccgtagatccgcctatgggtgggggtgttaaaggatttcggggagagtggcctatttagaagttgtgttctttctaggacgattctcggcgaaagatggaagaatgtatggccataggctgttgagaaactcccaactttatttttgcatcagttctgattgtgtttttgtatcaatgctgaggacatgtgatgggttagtttcaagttgtgctctaatttgtcccactctttgagagaggctaatatgatatatagctcatgttttgtccaaatttgttgtaaaactttatcaatataggttgtttatattgataaccaggactagagaggagtgaggtagctgcccgagagtcgagaccccctaatgctaagggctcacattttgtaaaaaag

SEQ ID NO: 19975 - DNA, 3119 bp, Cannabis sativa
attttcttaggaggacttgtttgcatgcatcttgaactaaaaaaaaaaattaactgtaaaaagtcaatttattagcaagttattaaacacattttgaaaagaaaattttcttttatttattcattggtcttacaaatgcgttgttgttgtgcaacttacatatatttggtaataaaatcttacaaatctaaagtctacttgtaaaacgtaaattttggctactcatgcacgtcataccgtgcaaaggccaccactgaagattagtggtaatatagctctttgcataatccgtgtacggggaactgtgtaggaactactgcttaagagtagtattttttacaagttggtttcttagtattttctgagatgttctcctttccagtatcttggtaggaggactaattctatcttttcgttgtaccgactgagtttgtaagcaccttgacttataatttccatcacttggtacggtccttcccagttaggtccaaatactcctgctgcagaatctttgatgtttaggaatactcttcgaagcactaagtctcctataaagaatttcctttatttgacttgtttattgaagtatttgcttgtaggcatgcaactttaagttagctcggtctcttctttcttctatttcatcaagggatttgtcagcaaggagtggtttgttccttggtcataggttatcctcttgtgggatggtggttccaatttgagggaaagtattgcctcatagccataagcaaatgcaaagggtgtctgcccggtggccgtcttctcggtagtcttgtgtgaccaaagtatctctgggagtaggttgggtcaatcgccctttacctcttctagacgttttttcaagcaaagttcgacgtcgttgtcagatgttatggcgatttctgatgtgattgatagcaaggataggcagaatggtgcgttattgtcgatgatataaggtattttgtttgagttgccaggctgcacacttcctaaagcgaaaatggtgagtaatggagctgattgaatgtcattggtatcattataaaatctggaccttgtttgaaccaaacaacaaaaagaataaataagcataattattcaaacatttatgatgcgccctaaattcataagaatttactctagaaccatcaaaagtctttggcttgttcaaaacatttccggtacaaaaatttatttctttggattaatatttatgttgaagttcttgccaaaatgaaacttaatatgaaattaaattctgacaatatattaattattataaatctggatatctttcatgtctagacagatctcatggccagacaagataaagtaacatgaaattagttgatatgtgtaaatgattaaaaattccatggatctaaattatgataactcaaatacatttgcaatttgcatatatgaaaatcattataaaaacaaattatatatttaatagtttgatcttaatctaacatattattaatttgttgttcaaaaaaaatatatattattaatttggttatgctaaaaaaataccatatttcttatgtttttttgcacatgggactagaattccttcgtcaagggacactacatggactagaattggagaagaattagctgatcatgtttgtccctattccagattatgatattcaacatacacatcctaaagaaataatcacattctaaaaaaatattgggtctcactttaatgataattttaaatattatatatatagtggaacttacttttatattttattgctttaaaaatttatgaacattttattatcttaataatttttaaataatttataaatataccatataatatttatcaaatttaataatacaacaaacaaaagataatataaacattatttcaatcttatgtaactattacatttcaacccaatatataatattcttatctaatccttcgtcatcaaacatagagcatgttgggacaaaggatttaaatttttatcactagaattgatcatttagttagaaggctattgaaaataatattccaactacataattaatccatgtgataaatttgcctaaagaaatttgtgatattttatcatattaattttaggaaaatttcagtttatatgtttcacatgttttagtttttatatgtttcaagtgtatccaattatttctcttttcttcaatatacacattcaaatcgtatccacacttatcagacacaatattgtataataaatattagttatttatatttttattaatgctaaaaacactaatgatatttagcattttcgtaagtattatacgatcattaatacaattaagtattgaatctcatataaattaattaaatgacttttaaagaaatatcgataaccaatttaattaagtggtgctaatacttaataacaatatttttatatttttaaataaaaccatatatcacttttaattatatatagatgagattaattacacatcattttatataaagagtgtttataatttaaatgtgtcccaatcatttttcctttccatcattaccaaattatgctaattttttcctaactttctaaaatagcattgccttaccactactgttatattatatattaaataatataaaaataattaaaatataaaaatgtgacaaaaaaaagtttaatatataatttggttattattttatataaaaatatatttatttagtactttatgttttattgaaaaacatatttgatattttgtgtttttaataatatttaattggtacttcatatttttaaattatacatatttagtaccctaaaataaaatttaatcacgataattttatcaatttaactaaacagttttcagctatatataatcaaataattaaatttgaatttctaattcaaaaaattttagatagtttgtttgtatttatagaattttatcaaaaaatttaaatttaggatatcgaatatgtatgacaaagtacttaataaatattattgaaaacacagagtacttaacttgtatttagataaacacaaagtaccaaatatgtacacatccttccatatattatatagtgtggtgtgaccaacaatcaatatatatatata

SEQ ID NO: 19976 - DNA, 3099 bp, Cannabis sativa
gataagatagtcaaataaacagtaacattcaatgtgaaagaagtaaggaaaaatgagaaggataatccaatcataccgaaaagagatgatggtttttgaaaaagtccagctttttttaatccatcaactgtgtgagcattagtgccccctgccaactgaaggaaacctgcaaaatgcgaagaaaacgatgcaatagctgcgagcatgactagagttaaatctcgagaaaacattggagaatttcactcaaaccgctaggcctttctgaggtagcagccatgcgaagagcaaatgcaattgtttcccttgtggcgcctcgaccaatatctccactcattgggcggccatccaactgcaattcacatcaccatatagctaaatagatagattttcaaataagctatttttggttgcgtttcgagtaatagtactatgttccaagcagttgaggacgcacttgccacagattcgggcaatgtagatgtggctccataatagagtacattgtattcattgaagctatggttgtctccccaatatcaggcaagctaacctgaaaaaagaagaagaataaccaaacttgatgagtgttaaagtccctatgaacaattacatttaaccaaacaaggatagttttacactcaccgcaactagtttgagaaatctgattgaatcttccaaaccatcccagagttctttaaatggagaggtctgcctacagagaggtaagcacaaaagttttcataataaacccaacaaaagtacataaataacatcatacatacacaccctcaataaatcataccttccactggtatgtatctccaaagcatcaacatcatctcttttaattagttcagcagttgcagcaacatcccttatatatgtaacagcaccttatacagaatgtgtaaactcattacaatttcatgcactatattatgctagaattctatgtattgtagggaaatatggcaaaggaatataacaattacttattttatcatatggacaaactggaatgcaacggccacatccataacatctttcggttagaactccaccctatatgtttgatcataaatcttaaaaggggcattcaagatgagtattttctataatgaaaacaattatttaggtgcagaaaaccttgaatccgacatgagcattcgtgccttgggattgttgtgacgtttttctatcttccaatgatattgcattagcaggacaaaccttctcacaaggtttggaacagtcaacagggcaatcctccggatcaaattctgttaacatggcagattgcaaataacttgagctctaaataaaatcaatcaactactttaatcaaaacctggttctttcataggtaacatccaaaaattcatgctggaaaataccaatatgaacacagctaaatattattacactcttaccagccttacgaaaatgaagatcttcatcatcattaacactaatcatcacccaaggttttctaagaggaacaatctttctagctacttcaattccttcattcacagcactcacaactgatgcatcagcagcacaatctatacaatcaactgcaacaacagaatgatttatatcatttcttcactatccaaaaaaaaacacacacacacacacacacatatatgatgttcatattatgtactcacctccagcaagagtgtaaacaagagaaagatttctgatatcaaccacatcctagagaaagatacaaaaaaagttagaaactttaaagcaatagaaaacataactggagctttttgtcaaatgggttgtatgcattatagttatatagttagtacctcaaagcttgcaccacaaatgagcttgacccagtttccattttggagggattcatgtggagaagacgcaattgaaggaattccaatagtcttgaccaggtgttggacattttttagagctaagtacttgctcttgaggcctagtctcactgatgaatcaaaaaaaaaaaaaaaattaggaaaaggttgagcataataagaaaaagcttagaatagtaatatagcttaagtgtacgttgttgttgagctaagattgaggtattgcagataaagtttaacgccataactggctggggatatgaaatacagatattaatattttttttttgtttgtgagtagataaatcataccatttattatattttgtcaaaatatatatttgctaccaatttttttttttttttttttgaataatgattcattgcaaaaatttgagcatgttttacattgctttttttttttacttttaaaattatgttttaaaaatgagaacaaaaaataatttttgaaatttttaaaacacaaatcacgtttagttaatattttttgaaaatagtttcatttttattttattttctaaaaaatacttcaatactttgagatcttgatatgaacaaggctcaattcgaacttagatcccggccctagacctagaagtggaccccagcccccggctctcggctcctgacccaaactggacccttgacccacacacaaacccgaacatggtccttggccccagttttagactaggactccggactcgcacccgaacaccgaacccatactcagacccaaacctcaatcccgatcacgaaccttgaaccccagtccctgtcccgacaccaaactcagacctaaccttaatgagagagaaagtgatgaaagaaaaagtggtgagatagaaaataaagagagagagagagagtaatgagagagaaaataatgtgagaaatgatgagagagagagagtgatgataaaaaaaaaataatgtgaagaaatgatgagaaaaataatatgagataaatggaagaaaaaatattgaaaaagtgaattattttttaaaataaaagataatatttttttgtttttaaaattcttatttattgtaacattattttttgaatctattttaaaaaaaacatggtaaaatgcacttaatcaattaaacatcgataattaattaaaaaatttgatcgtaataattaatacaatacattgcttaatccaaacatagtgttatttattatttaatacaatacgacatt

SEQ ID NO: 19977 - DNA, 3850 bp, Cannabis sativa
tttagtggtacttaatccaattccctgtgggatcgacctcacctgtgtgagatttactacttgattgcgtatacttgcgtagtgtttaaaattatagcaacactcatcaaccaaataatcacttatttattacttccatgataacttcaccataaatatagaattacactcttagtaattatagaattatatttattgagtttaactgtagtgtccattgatataatcaattctagttattaacgatgcaagtgacaaacactggggagcagtcctactagaggaagacgatcgtggcaaatgcaaagtgtgcagttacaaaagtagaaatttcaaagattcccagctacactaccattctacactcacagagatactggcagtaaaaatgagcatcacaacatttgagtttcacctcatcggacacaattttctagtggaaacagatgttgccgcattttaagggatgttcatattttaacaaaacaaaatagtcaatgctcaactgctcaggtcagccatgtggttcttacgttacacgttcgaaatcaaacacataaatagaaaaacaaatgcgattttttatttcctctcccagccaagcaaacttattataaatatgatcaatcaacaatctaaaaattcattccatttgatatacatggtcaacatatctcttatcctccctaaattccccatcaagggttaaagcaatctgaagagccctagaaattcattccactctcttccagggatatggcaaggctatatttgaagaatttgacttctatctagactacctttttgataaactcttacacatgaaaagtagcatattcataccaaaaaggataacagacctatactggtatcttgcaaactcatacactattgtggtcgagatacccacgataaggcttggaacttccgtctgtagctatttacaatgcttgatctcatgcctactcaccaacatccaatggttatgttgcaatggttcaaaacatctcccaaataggacacactcctcacacaagagtgggaaaaagtttgcattaagagacgcatggctatcaattgcccagttaccaaaaacatgccaaacccattgcaatgttttacaatcctactatttaggctacatgtcaatcgagacttatcatttacggctagtgtcaaaatacacaagtcaagtgagcacccacttgccgtaataggaagcattgaagcagacagctcgaaaaattgctatttgccatcaacatggtgatttcagacgccatctggccaaaatccaaagatgacacaccatgggcatattattcgcctgaagacctccaaaaacaagaagaagatatgaatcattataaaaaaaaaaaaaaaacactacactgatgaaaacaaagtcgactataaagatctattttttcaagattcacaatacctaaaaactgcttgtaactgcccattctcactcaatgatcttgatgaaaaaatatgtaggggactagcaatatctcaacctatcaacaacaaatctactgcatcaacaagtggcaacaaaagagaaatcattcatctgtgtggcatgaagatgacagtgacacatgtgagtgcatgaaccttagtccctcacataaacccattaacaaaaatggtaaaacagatgaacgttgtaaacatactcatgcgtacttgtgtcgtgtttgttttatgtcaataataaggtggacatgtgactcctgaagaagtcagtctgttgtttagtgtgccaagatcatgtgactactcacaagacccatagagattcctgctcaaaactaaatgacagctaaaggcaaagaatcatatagacgatagagattcctctagccagctgaaaagtttgtttgtttgtaattatataagaaaaaaaatgtctacaatgaaagagattccttctctagggaaggatataatttaagtttttgtcatttctgttagtagagcgcctatatattgcccctcattcttagttgcagagacacaagtttagataatctcatctttcttaatttaatgtctttctaaattttctcttggggctctttctcttctttctctattagaattgataataagaataataccactagctaaaaaataccaattagaagatatatacagtaaaatctttatagtaagcgtcaatcacaatagtataacctacaaaggctaagagaaaaagccaatgttaagaaaagtattgaggttgattttaattatgtgtttggtatatggactgatagagagatacaatgctaatccatatagtcagtatcaacctccacatttttcctaatgctggcttttcctctaaccctttgtaggttatactattgagattgacgctactataaagattttgcttagtatatcttctaattggtaattttgagctagtggtattatttttattatttatcctaatagagaaagagcccatagagaaaatttagaaagatattgagttaagaaagatgagattttattatttgaacttgtgtgtctacaactaaaaatgaggggcaatgtataggccctctactaagagaaacgataaaaacttaaatccttttctggaaagggaagctttttcattccgaactcttttttttcttatataactacaaacacacaaacttttcagctggccagaggaatcgctgtcgtttgtatgattccttgtctttagctgtcatttggttttaagcatgaatctctgttggtcttgtgagtatttacatggtcttggcacactgaacaacagactgacttcttcaggagtcacatgtccaccttattattgacataaaacaaacatgacacaagtacagataggtatctttgcagggttcaggtgctttagcattttttgctaatgggttcatgtgagggactgaagtttatgcactcatctgtgtcactatcatcttcatgccatgtagatgaatgacttattctcctgttgtcagttgttgatgtagtagatttattattgacaggttgagatattgctagttccctatatatttcttcatcaagatcattgagtgagaatggacagtaacaagtagtgtctgggtattgcgaatcttgcaaaattagatcattatcatcgaccttgttttcatcagtgtagtgttttttgtaatgattcatattttcttctaatttttggaggtattcgggtggataatattgccatggtgcgtcatctttgagttttggctagatggcatctaaatcaccatgttgatggcaaataacaatttttccagatctcttggtttagtgcttcctattacgacaaatgagttctcacttgacttatgtattttgacacttgccgtaaatgataagtctggattggcatgtaacctaagtagtaggattgtaaaatatcgcaatgagtttgccatgtcttcggtagctgggaaattgggtcccacgagtcccttgttgcaaactttttcccactcttatgtgaggagtgtgttccattcgaataatgttttgaaccactgcaacatagcgattagatgttggtaagcaagcatgagttcaaggagttataaacagctgcggacggcagtttgaaaccctataatgtgtttttcgacaacaatagtgtatgagctggcgaggtcccactataagtccgttatctttttttgacatgaatatactacttttcatgtataagagttttccaaaagggtagtctggatagaagccaaattcttcggttatagccttgtcatatctttgaacgagagtggaatgaacttcttgttggatatattttacc

SEQ ID NO: 19978 - DNA, 6610 bp, Cannabis sativa
aaactctccaatcggattggggaggtgaatatcgaaatttgacaccattcttggaatcaattggattacactttcgacacccttgtccacacacacacacacacccaaaatggaaagtccgagaggaaacaccaacatatcatcgaaatgggtctcaccttgctatcttaagcctccatgcccttgagatattggtgggatgcattcagcacagccacttatctcataaaccacctatccacaccaactttagcacataaatctcccatagaaaaattgttcaaagtcactccaaatctgaaatttctcaaggtcttcggaagtgcttacttccctcatctacgtgcctttaacaatcacaagttagactttagatctaccaagtgtgtcttccttggatatagtccaaaccataaaggatacaagtgccttcatccaagtggtcgtttatacatagcacatagtgtctcgttcaatgaactagagttcccattttctactggttttggacagcccacagatcaccccactccctcacctccaataatccaatacagtcattggctccctttcatttcttcccccaattttcacgatgatgatgttgatcaggccactgatttttcaactgatatggctccttgtgttgcaggtcccacgacacctcctacttccccattgtccgaatgtgcttccacaaaatcttagcatgaaagttcttccctatctaaatcatactcaaccatcccaattgccatacatctccccattcaaccattgacaccagcatcatctagcaaccccccttccagtaccacaccagaaaacacctcagacaccagaaaacacatcactgccctgtcccattcccgaacttacacttccctcacatcccatggttacacgctctaaatccggcatcttcaaaccccgaacctttctcacctcccttctacataatcctcacctcccagccctttccctctccacactggccacacttgaaattgccttaactatccctgcctggaaacacgccatgtatgatgagtattttgcactcaaaaagaacaagatttggtaccttgttcccaggttaccccatatgcatgttgtcaattttcgtcacaaattcaactccgatggctctcattaacgttgtaaagcgcatcttgtggccaagggctttcaacaacaaccgggtgtggacttctttcatacttttagtcccattgttaagccatccaccattcgtgtcaccctctctcttgttgtcaccaatgactgagatgtctaacaaattgacatcaacaatgccttcctcaatggcactttggaagaagaagtctacatgtcacaaccggctgactatgttgatcctgagtttcctacagctgtgtgcaagctcaaccgagccatttacgaccttaaacaagccccgagggcctgcttcgacacacttcgaacagctcttttacgccttggcttgaaaaactcagtcttggatacttcacttttctatttagctgaaggtgatgctcgactctatgttctcgtgtatgttgacgatattttactcactggcaacagctccaccagtgtcctacatatcatctctcagctgcaccatcaattttctctcaagactcttggctatgtaacttactttcttggttttgagacaagtagggggcaagatggtcttcactgatctcaaaccaagtagtctcttgatcttctcaaaacaacacatatgttggaaggcaaaccgagtcccactcctatgattcaaagcaacaaactctacctacaagacaacccaccgtttgaagatatcactcaatgtaggagcgtcattagggcgctgcaatacttgaccttgagcagacatgacattgccttctctgtcaacaaactgagccaatttcttcaagctccaacccaaatcattggcttgcctgcaagcgcatactgagatatattgcatggagtgttggcaaaggcattcaattcaccaaagcaactaatcccgtcattgaaagcttttgtgattcagactgggctagttccattgatgatcgaaaatccacttcaggcatatttctttactttggaggagagctaatcagctggagctcaagaaacaaaaatctgttgctcgattgagcacagaagccgaatacagatctctagcttaagcatgcacaaaagtcacttggttgcactcactcttcactgaaattggaatagaatacaatcacacttctataatttggtgtgacaactctagagcacgtcaactcacttccaatccagtgtttcactcaagaaccaagtatatcgaaattgatgtccacttcatatacgagacaaagtgatgaacaaatcgattgaagtcagatacataccatccgaggaacaaatagttgatatattgacaaagtctctgcctatcacaacctttcattacctcaaagacaagcttactatttgtcactcaccacagcacagcttgagggggcatgctgaaatgaaacgcccaaagtcagtccaattagaagatgaaatcaaggatgccgactaggctgattctttaccgttatcaatcattgggaaattaattccctcaatcttcatatcattgtgtgggccatagagaatataattctgttattgtatcaaccaataggatgtgatagcttctagtatattccaattgtatataaaaaggaactttccctattgtattcagtgcagtaaaaaggtcattaaactagcaatatatagaatattatcagtcctttatttcctctgttatttccttcaatttagctcttataatttatttaccctaacgattaacaatcacttaaaggtgttaatagtaacataattttataaatcttatggtcactactccgaaataccacgtcataataagttgtccaaaaaataaaattgtagaacagcaatactcttttgtataatagttgatctaagaacactcttgttaggaccgttgggtactgatttgattttgggtacactttcccaaaactttcgttccaatagagatagtcttcattcttatatacctaagattctttctatttttagtataatgttggagtttaattttatccacaactctaaaaataattaaattgttgaattaaatatactatggttggttgaaactacaatttctacattattatataataatatatatgttgatcttttgttgaaaattattgtgtaaatattaaaccaataagattataactctaagaaaaataatataaaggattaaaatattatttaaatgatgttacaacattaaacaaaatatacacataaaataaaaaatataaagatgaagagaagaattataactcaaagcaataaattaatacacataaaatacaatatataaaagagatgggagagcaatctcaatatataccacatacatcacaagtgtataataaaggaatcactaaattaacttgaataagatcttacacctttgtctaaaaacttatttctctctatgccacaaacactaaggaaaaagagaaaatttatagaaaaaactttctagatttatcaagcttaataaagggtttctagcaatgtgtgctctcttgatagagagttgtttacattgaagtgtttcgttaccaatactccaaatagaacatatatgttcctttcagcgcgttgataaccgccttagaatcactctcgatcaatacaaaaggatactttcaatagaccgctaatttcataactaaaagacaggccggtgattctaatagaccacttttatgttacaaatcatgtatattattaaactatatattatataatttaatcaataagcacatgatatataatcttatatttaatatataacatgtctcttcttgatattttaatctatattcttgaatcttgccgaacaatctaacgttaattaggtgaagaaaaaaaaaactgggtgagtttgtaaaagattattctctggtgtgtttgatcgattgagagaacttataagtataagatgtcgtgtaaagagcaactgtgaagaggacttcgatcctaactttgtaactctattatggcaatcctaataataaattttagccattaaaagttattttctcccgtagattaagctgcaagagcaaactgaacttcgttgctcatctctttgactgataattttgctgcccaaccaagtaaatccattgtgtgttcttagtatttttagtttgcacaccacagaatatataaatatgtatagaaaaatttgtatataatttctttttattttccttctaaattaattttcttacaattttccctccaaattttaactttctattccttcgacatataagattgccaccaatattatagcgaggccttgaaaaatcatcttttgcttagcttgttgatgatacatctagaaccaaatgattctataatatacgtacgtacgtatatagtggattattattgttggtgatgcttatagtaacttacctaaataactccccatgcataatagtaataacaaaccctaaacactaatgaaacaaggaactgtcaattatatgacaagaaattcaagagtagtacataacaacaaatggtgttgagggtgtggtagtgggagtataacaaaaatggtgtttatacatatatacactcaatatctcaaggaactatatacaagataaaaatcacaaaaaatataaataaggagaaatgtatatatattatatatatggagctagctaaaaaatatgttttctccaggaccatctgtacgtacagtgcattgcaattatatcgcctaggccaagattggatcttcccttatatattctaggtttaaggatttgatctcacttttatggccaagaaaaaattgagttcgatcgtcttgcctaggtaaatattgatagcttgtatttattttctaggctaagaaagattggccctcagtttttctagacttaagataattgtctatatatgccaaggagatcaatcccgtatatcctaggacaaggaaggatttgggctcaccttgctaagccacttaggaaaaatggagcttgtgttgccgagggcaaagaagaggagctcgtctattgcataggccaataaggagcacgtattttctagggtaacgaaaaggattaatggaccttgttagattatataaaacagttatttctgttactgtttaaaataaaaaatcagttagaatcggttagaggttgttagtgactgttaaggtctcttttcttgagttgttattgtatccagaaacagtataaataatagagctactcaattattcaagattgaccattcattccacattttctactctcttttttctctgctcaaactttgtttttcagagttcatttagacctcacctttttctaggtcaatataagagaaaatggagctcctacgtcttgctaataggccaaggatgaactcataaattctaggataagggaggatttgatcaaactcacatttcctaagccaagaaaaaatggagctcgtcttgcccataggtgaaagaggagcttattattatcatatgttctacgtcaaaggaggattagaattcaccttatgtaaacctagctagtatatatacattggagagatgctaaagtcacaccttggtgccaagcacataccgctattgatgtaaattaatatcggtttttatacattttgatttaataaataataatataaaaaatcgcaaacccctcgtaacacaccagttggtgtttggcttcataaggtgttgagctgtttaattctcctaggagattatatattcacttgacagcgtttccatgtagatagcaatttgttatatagcttttttcttttgttttttgcttaatcacattgaagagagtacggaatttttacaagagcgatcgacactgagcctaaccaaagaaaataaacgaaaatatccaaatacgtaccaccactgaccctaatcaatattaatgccattaatcaaacaaccgaaaactccagacctagagctctaatatatgcaaatatagattgaagaaaataattaataatggtttccccggagatgctcgatctgtatctgtaatgcattacaattatatagatatataaaaaaaaattgtacactacactacacaatatcatatattatgaaaaatgaaagagaggaaaattaacacacaacaaaccctgtatctaacattcatcgtgaaatcacacaacatacatacttggatagattcaaaggaataagaagccttacatgctttaatacaattcctcaacacatataaattatatatatacctatataggacagttactagctactaaggactagagttgaagtccttgacaaatttaaaagtatctaatgcaactgaaaccacaaaggtcacaacaggaattataaaaagattagggtcatgccatagaaaaatagcaatgataccataaaatgctcctaaaataagagaatgaccaatattccgaattatcaaaagaggataaggtaatg

SEQ ID NO: 19979 - DNA, 1734 bp, Cannabis sativa
acatagactaatttttggtggcttgtgtgatcaaatatatgattattttgctaacaaatttttttaagaagttattttgctaaaaaaaatcatatataatgactatatatttttacaaagaaaaaaaaaaactaaaaaaaaataattactattttctgtttccggtctttattaattaatgccccaggaaaaagtatgacatgattagtggatggattaggaatttaatttattcttcaaaactactttccctaagaaaaggcataataagattatgaagaaagaaaaaagagaaaagagagatgggtaattaaagagaataaaatttctgttcattttacatagaagaaaagagtttctaataaaggaaaccagctaattaattaagattaaaaggtaacattacatgtcatttgtgcatttgcatatcatatatacatctatcatatatatatataatttgaaaacctatatacatattggcatattgtaaacagaggtagggtatttttatttatttattttcgtatggaataatggaacataaaacatttccagagtaaaaatgtataggtaccgcttatatgtgtatatcctatttatgtacgtattatgtatatatagatctttgtgatttgaatttggtggagtacgtggcctattgtgtacaatgattatatgtatgtgtgattattataaattaaacttgcatgattggagtagtttcaattatgttgataaaaaacattgcagggatcttagctaatatagatctctaaaggctgcaatttgctggtcattgttaaaagccccccaagagattttccttttcatatatgatcacatacatcaacattaacaaataataaagtacaacaaaagtcatataaataagtatattaaaaaagatttcgtataataataagtataataataaggattttctaaacgttggcacatctggaaatggtttattgggaactacaaagagctagcttgatcaatcgatcctgacccacatgtgcatctcctaataatttatcaaaacaatattaatttcaactctctcctataaatatatagcaaattctagtgtgtgtgtatatatattatgtatatatatggacccacttatcatgacttggtaatggtggcactattaatgcatatggtccttcgtgtctcctgagttgtgttagtgaaaaaatatatacactttcaaaaccaacatccccagtgctcttacgatctatcttggatattatttctctgatatacgttgattttataaatccactatcattattcattactactcttcccatcattattttattaatcattgattctcttatgttattttgtcccaaaaatattatttctttatgttccaatattcatacgtacaatataatattcactatagctactacttctctgatctatctccagttgttgaagcctttttattatctttttttttcattgtactaattaataattggcatgaattaatgttgatgttttggtagcttccttgatctttcgagttagtgaaaaatctccaatcaacattgagattctatatcgttattattcttttcattagttattaattgattttgaatctgggggacttaatatatcagtgatcaattattctaaatttttatcgatcgtgcaaagaaattatacctatatgtatgtatatatatccgttgaattggttacaat

SEQ ID NO: 19980 - DNA, 1876 bp, Cannabis sativa
taaaacaaaaaacttaaaataatgccaagcaaaaaattttgtgaaataaattattctattttttaaaaaattagagaaaagaattatctcccctcacttttctttctctattgttttctttcgttaaattttctataattaaaatcagatatctaatcatattaaacttaagatcaagaatgtcaagaagagcaattaagtagttcatgttttgtatttctaattaaaattcatgaattatcattgtaatttatatattaagccaatcttttcatgaatgattatttccaacaatgcaatgagcaaacaaaatatgaattttcttgaattaagatcaaaatggtattatgtaaagatcatgaaacaaacaaattataattgtttcatacatagataaaaaaaattagctaagaaatcttgataactttagttgaagaaaatgtttccatactaaactctactctcagtgacaaagaatggccacccgccaacaagtagtgtacgaattggattggaatgactattccattttcgttgttatgaatttcgcgatgactaacttggatgcctcgcggctttcctttccacgacacgcttctttcgtagccagaaacgcgcattttgaatgtgaatcgagtcgcctcatcgtcgtcccccatgaattgaacaaaggccatgtaacaaagccctctacgaaaaagctctacttgtcgaaaatacaagcagaaatagctctcaaaacacctcagaacctgcagcattgtgtcacaaaaattaaaattagtactttaaaagagaaaccgaaaagatttgagtgaaaatgggaagaacatacaatcattttccatgcaggaattggaggccgaatatgaaaaccgacataggtaaccatgtagatttgtccatggtagattggaactttgtgatgacttttaagatggttcaaaagagatgagatgttaccacagaaagaacaagattttcctaaaacaggattaggacaattgaataggcgatgttcgcaatttttctcatgttttaaaccgttcgggtaagggaatttggcgttgcaaccaaacaattcgtatgcacacgagagttgaaatgactctgccatttgctctagtaccaagcatcttatgttcccgagcgcccttcggcatgtagggcagcgatttacgaatgatttgcatcttgaacataacgggtggccattcgagcactaaaaaaacagaggaaaacagagaaaaacagaggaaaacagagaagaaaacaatgttataatgtgacttggataacaagttatcttaattaaacattctttaaggtttggtaaccaagaaaatgaaaagaaaagagaaaaaaaaaagtacctgttgaattggtggatacattacactcttgcaaacaggacattcaattagctcttcaagttttctacccaaagaaatttcagtttcattcgaaccaaacattgtgtttaacttcattagaaaaaagggaaaacagagaaaatttaatgagaaagatgataaagattaaagtagaaaataaataaaagggtgacttaattacataccaaatggaaaaatcttaaccaagaatcagcaagaccagaatatgatgattttgagtcaatgtgattgtgagtgagtagaatagtatttagaataggctaagaaaaatgagcaagaattggcttatacccagatgagtacacagcttaatgtcaaaacccaacttcaaagagttgattaatccaactttttttggttttcaaatcttggagccagttaagaagatcttggtgtttcaggctatgaatgttattaacttatgattataatttatatatgtatggaaagagttgaattta

SEQ ID NO: 19981 - DNA, 4572 bp, Cannabis sativa
tttatttcaatatatgacatgtttagagtctttctaccaaaaaagttcaaatagatttgccttaggtctaaatgtgaagagaattaaaaaatatagctctgttgtttatggtacagccctgttgttgtttatgttataaaattgtgtttcatttccatgaaaaatgtgactaatttcattggtttcgaaatttggtgagatagacattgatggtttctttagtcgctgcaagaactactagggctgaagatattattacgttgaataacggttacctttgctgcactgtgaggggtgatcttgtaaggatgatatcagaattggtgagaggaagaaagagaaatttgatcattatgtgattgagactacaagtagaaaatttggtcatttactaaatgattaggatacttaatttgattttaaagtatgtctcttgacagtgattattgttgatttcttttgtttaatcctgctatatatatacaccttactatataaattattgtattttttgtttttattatttttttttattttaagtccaccacatatgtagtggggctatttggtttgttatggccggcttctgattctctctgaataatccaagactcaaccacttcgttctttgctctccaaaatacaagattcccttcttcctcaccatgttcctttcttctctactctccaccactccactcctctccaatggcctcctcctttcccgccattttattcactctctttctccttacatctctcaccttccccaccgctcatccctccactattggagttcgtcacctctccaaccttctccaaacgcaggatcgcgagaggtctccaccttcccttcaacttgccgccgctcgtggcgtccttcgccggctaattccttctcattcttcctccttcgattttcaaattgtctctaaggtccactattttcttctccacttagtttctttatgctggtcgctaaaccaagaaaattgcttactaacgctacttttcaatgtttttttaggagcactgcggaggtgcgtcttgcttcatcatcaggaaccatcctgatttccatagacgtggaggggacccagaaattttgtatgttcactgctcgacttttttttgtcgtttctttggttaagcttaatttcattttcaatttgtaaatgaagtttaaaatacttaacgttcagcattgagaaattttttcatagtgttaactagtactagtagtattgttgaggagttaatgagatacccttttgccaacttagttgaagaatacttgttcttttgatttgaactttaaacttataaacgccgttcagcactcttatttaaccaaaatattgtgatgttcaattggataatagaataattggggtcactggagtggacattgtggctggtctgcactggtatttgaagaattggtgtggttcacatatatcctgggacaaaactggcggagctcaactatgttcggtgccaaaagctggattgctcccccgtgtcgatgataatggcgtttttgtcccaagacctgttccctggagttattaccaaaatgctgtctcatctagctgtaagcttgtgtttccaaactgctatgtattttgtgagaaacaagctattgaaaaaccatttgtatggcccgtggcttccaattttggagttgtcttataaatttgaatttttgttctttcattatttgtttttgttagattcttttgcttggtgggattgggaaaggtgggagaaggagattgattggatggctcttcagggtatcaacctacctctagcatttacagggcaagaggctatctggcagaaagtttttcaggttggaaatgaaccaagtctccttttttcttcacaaaatttacattcaaaatcagtgccttgccagaactgtactgagttgttgttgatatttaattcttaaattaaatttcattagtgcccctatactgatactcttttggatgttttataattttcttatatacagaaatttaatatgagcagtaaggatttggatgatttctttggaggtcctgcattcctagcatggtctcgtatgggaaattttcatgggtgagttaacgagtagctgaactaagtgaactcatttataatttatgatataatgagtatataatgtgtgtattttttttttttaattttcttattttttattttttatagtgtctgttctgagaaattcattggattagattactttagtaagaaaaataaaaactttccatgagaataagtattggttaggaaactcatagatgcacatgattatattatggatgtgaagagcaagagtcatcaaacattcagacttttggggggagagaccgatgaaataaagagaataggaaggttgattagaaaatgtcttgttcttaacttttatacaggacaccatgtcaagcattaagatcctccagtcatagtgagtttttttcttttttcttttctttttttcttttgtgtgtgtgtgttttcttcaattaaggttcaaaaattgaagtttgagtttggatgtgtgttttcttcgcttaatgctgttgaatatctctttttgtctgtcttagttggtggatgtggttttcccgaaatacttttaaacttctctagtttatatgctttattttatactttgcagcatcatagagtatgcttgtgcaattcaaaccttatccattttattagtgcacttcctgtaataaatttaatttatgaatagtattttttatatttatatgtgcctgtttttcattattgaaatcttcaaagaattatgttaacgtatttctctgggtgtagtatgtcaaggagagctttcatctttggcaaaaccagatgctctccaaatagaaagtttatatagtgttgactttctgttgtacatgtaacaatctatacagatggggaggtccattgccacaaagttggcttgatcaacagcttttactacagaagaagatacttcgaaggatgtacgaacttggaatgactcctggtacatatagatacaaccactgaataatatagttttgtatatttaatactatcttaatctttcgttaggctctgtgcctgcagaaggaagttaccagcattaccattgtaggataatatcattttcttttctagggtggaaataagaattttactgaatatttatttttcaatagggtcttctcctcctgacaaattatgttaccatgtttttatatttctgcttcagtacttccggccttctctggtaatgttcctgctgcactgaaaagtagatttccatctgcaaagataacacgcttgggaaattggttagtcttgttatctgatatttggattttgatactttctggttaagcataaagtttgaaagatgtgaaaattgtaaactactttattgtttttgtaatattacaaaagatataagattgaaaactatgtgtttttgtaatattacaaaagatataagattgaaaactatgtttctgatagaaatgcatgcagagtacataaatgtatacatacgcacatgtgcatgctatcatatgcaggtttcataatttgctatcaagtgacatacacattataacgatcctagagtgatcactgctagaaggatggaagaaggctcctaaatggagctacactgaagcaaaagtaggaaacatttttcatttttttatatgaaagtcgaacaagaaaatggaacaagtctacaaagaagaatactttaaatgtcacttttcaacatggaatgcttgaatattagtaaaacaatctattttttgtaatggatatttcttaattttatatgctgaactatgtataatgcagtgataggtgaaaacttttttcatttctttgtcattatgcttcaggtttacagtgaagagtgaccctagatggtgctgtacctatcttcttgatgcaactgatcctttgtttgttgaaattgggcgagcattcattgagcagcagctagaaggtgaccactaatcccacaccttgtcttttgtgcttataggatttccagggtgctatgctttcttatggcaagactgacactctaagttcatattctaatttgttccactggctggtttacatgtgtttggcagaatatggaaagatgggtcatatatataactggtaatgttctctaattccatgactgttcctcccaagtttctctaacatcctaactatagattgggagtttgatttgaattgggggtggggggttagtcagtctacaaagaggtttggagaatggaatttcaagcttcattctgctgcaacttcttttactcttctaattttaaactataatgctggatggtttttataaatcagagttttaagattgagagaaggaggttttgtggataaattaataatgatatgtgaaattctaggttcacttttctcctaggctagacgttatttcttgactgatagacttttccccacaaaactattatcgattgcatcaattaatacataagcaaatgtagtgttcgatgc

SEQ ID NO: 19982 - DNA, 4389 bp, Cannabis sativa
  modified_base (2322)..(2327): a, c, t, g, unknown or other
ataaatacctaaaactcattctatagtgagtctataagtaggtagtggtccttaagaaacactatgattcatgtattctctcctttcccatcagaaaaaatactttagacaaatagtatattcttgaaagatcataaccttttgtgaaatctctaataatagttttaggttagtgcttccgcttatcttgttattatctttttcttttttgctttagcaaaagttctataatatatgatttagggttttctatattaaaatattttaagtatatatttagatatgtgataatatatattacttgagtgttcttataaatcctaataggttaatcctaaagggaggtgcaccatttttcttttctgttttaactcatatgggaggctgagtgtggattgttattgtcggatagatgtcgttgtgcctctttgtccatgttcaactagttttggaatggttttggtgctccattttgtgttcatttgagtgaggggtagcttgtttggtggcaatttcattgtttgttttggttttagggctaatttagtacaatttttgaaaaaactaaaagctactttttaaaaaagctgtgataaaaaactgtttggtaagcagttaaaaacaacttattgaagaatttatgaagaatctctttaaaaaatacttcatatttatctatatatatatatatatttttatcaacaaactacatcaatttagaattttctataaactgcaaattataaaaatataatttaaattattataaattatttttatcaaatgtgtataaatttatattataagaaaaaataattaaaaatatataaaaaaaaattatataatataattttttatatagatatttatgattataataaactagattataatattctcattattatagtagaatcttaaaaactcacaacgctttaatatttttatttactaaatactcaacttaaattttttctacaattttgctacagctgtttttttctcacagtatagctacaactgctttttcccgcagcatagctatttcaaactggcccttagtgtctttgttagttattttttggccattgttgtagagtttgttcttctgctttttccgttgagttttaaactttgtcatcttcgtaatcggtgtgatttatcgttcgagtaaccgtctctttgtgagcttgacttgtacagttttatttctgtctaaactttaaaacttaatttgtcccttgttaatcattattctcttttttaataataataataattaacaattaattaatcactcaataagcaagtgaatcatatagctagttaactctaattataccactacaaacaacaactctcccatattaatgtttcatgtactcatacataaatatatattatgtattaattaagctgttaagcctttattttgtagtctagtcacgaggtatcctgaaaaattacaagtgggtatctataatatccaattcattgtcacgtcagctagttttggtttgtagactataataaataatatgatatacatctgttttttctttctataatatccctcaattaaaatctttggttgaaccagaaatttaataaatatataactataatatctttttcttagcaccttttgttaatcattatttgggttattatagcatatatccagctaatgacattatcaaactgtacagctaacatatgccacgtgattaaaaatacctattgaatcaacaagttgatacctattaatatactttgtcagtttgtcataacagcttgaaggggttctttaatgacaaaatttgagtttctatgagtgagaccatatataattgaaaatgtctccattgctaaaatcaagttaaaattttattttattcttttaatttcaattttctcaaaatatctctcccataattttttgggcttgttcatttttacatttgaaagtactttatttttatttatacggtaaaattagtaaaatttcgtacttagcaataaatgacataattacaactcacgtaacgatctaactcaatttacaatccacatcgcaatttacgtagcaaccgtacgtaaaaaaaaagtgtaaaattatataattcatgtaattttaccgtcaatatatatcgaagctgaataattaaaatgctattaaaaatagaaataattacataaaatactattttttgtaaaataaaaatttatatttttacgtttaaaattttttatatatatatttttacaagttctcatgaaaactacataaaggtaacatgaaaataacatcaaaacaataannnnnnataacatacagataataaaaaatcaacaacaaattaacaagagtacaacataaaaaggccgtatatattttctgtaattaaaataaaaaaaaatcgtaaaaatatttaaaattcagtaaaattgtatttttgtaattttttttttattgtttttgtgtatttgtgaacaaatcaaatatgcataataatcaaaacttaaagcaaatatgtacaagattactatatcaattgagaatgagagcttctaacctttttcttatctcttccattttttttattgaggttaagaaaattaacttacctcatcaccaatggttatgaagcacatgtgggcaatcccatttagctcttcatcacttgaatcttgaatgtgaactttcttcttaaccttttttttttatttatttttgagttacttccattgaattgtctttttcttctttccggcatctttagcttctagtaaagctatcacatttccatcatacgctctagtatagttcagaatttgtgtttattggtaatgtcatttacatttgtgttttcttatttttcttagttttatttttttagctgttgtttgtagtagctgtatgatttgaatattatgttttggtatttgatattttttttttccttttttaattgatttcacttcatttttctggaaaggacgagccagacaactcatgaccatgggaattaaatattcaacacttgtaaaaaaaaatagttgggcagtactagctggtggtggttaaaatgtttttctactatatcaaacattcaaagttatgcagaattaatagatagagtccatcatgccaattagttgaataacataatgcattttcagagcaatttattaatgacatgttaataactgggtatgatactgctgccattcatcaactaatctcctcactcaactcacaatttgccttagaagctatgggtccagtcagttttttcttgggatttcaagccatcagacaacaatctgcactttatctcaatcaagctcagtatgccaaggaaattctgagaaaaaccaacatggaagatgccaagacatacactactcccatgacaccaggtcacaaattgtctacaatggacagtgaaccatttcatgatcctactctttgtagaagtacaatcggctcactgcagtacctcactttgacaaggcccgatctcagctatgccataaataaatggagtcagtttatgcaaaaatccaattaatgcacattggcttgcttgcaagcgtgttctgcggtgtatcaaaggtacaatcaacctcggtttagtcttcaaaccagccaacattctcactttggagggatactctgatgcagattgggcctgcaaccttgatgatagaaagttcacaactggttactgtgtaatgcttgggtcaaatctgatcacttggggctcaaagaaacaaacggtcgttgcccgttcaagcactgaatccgaatataggtcgttgtcttccactgctgctgaagtggtttggatttcctctgtgttacaagagcttggcatcattgttcccgtcactccagtcatctggtgtgacaatcaaggtgcccagcaacttgcatccaactctgtttttcactccaggactaaacacattgaagtggatgtccattatgttcgtgacctggtggctcaacgcaaagtaactgtctcctacattccaacagaagaacaaccagctaatcttctcacaaagccattaactctgcccaagtttaattttctttgtcacaagctctctctcgagtaccctcctttgagcttgaggggggatgttaaggagtttgttacatgacagttagagtttgctataacagttagttggtcagagaattagttagttttcttttctaatttgttggtctgttataggtgtatatatatactccttttcactcttgtaaattaattcaaattcaatagtaattcatttttagaaatctttctcttactgtttctcaactcatttccatcatcataggctcttgtatagttcagaatttgtgtttat

SEQ ID NO: 19983 - DNA, 7107 bp, Cannabis sativa
  modified_base (2300)..(2310): a, c, t, g, unknown or other
atagactatacagtattcaacatgcgatggaaacagaggagccaaaagagagagtagcataattactaatgctttactcatatgcaatcatcactaaaacaaaaccacattgttaattcccaaaatagcttgacaaaattaagcattgccttcaacaataagaacaccagactacaaccaaaagaaaacattgttatctttattgatttcttaagaaagtattataaattaaaacaacaagggatgggcatattatcataataacctcttggtgcgcagaacggcgagtcctatcagtttgtcgggcaagacgaatcttcttcaggacatacctatgaagaaagataaatacaaaaaagaaaaacaatatatttatagtaactcttacaaaatcatattaatccatatacataagatgagagggttgctcacttcttattttcatgcttatgcctcacgagaagagcagaaccaaaagaacctttcccaatctgctctagaacttcatactgctccatctctggaacttagccaacctagtgtacctgccctgtcaccaatattgggtgataaattagattatatggttatatgaagtttcaacgaaccaaaacagcaacgagctttctatcaaagcagtgaatgaatacagaaaaaccatcctcaggttttattttactctgaaacctaaatctgtttgaaaatttcaaagtaagtgctcgtagatttactaagcaaaagaacagtacaagagggccccaaaatcagggaaagattttcccactctgaacttctcaagtgtacatgctatacatagctatataccaccatcttgctcctctcagtaccaaccatagatataaattggtgactcttgagtcttgtccaccaaatatctacagggtttattcacacaagtactaacacaataaatgaaaaatcaacaaggatcaatttagtttgtacgaaaccaaacgtaaatgacccaccttgtttaatgtaggacccaaaaaatgtaattacatgtatattccacgcacaagaatactaaaaataaataactttgatgaaaattatctaaatcagaaggcttgctaaaacccaaggcgtacaaaaacctccaagaacaatgtcaaaaaagataaatcattccactcaaaatctaaaatgaaatataaaactggaaaatgcatactatatattatatgttatataaatctatacgtgtgtatatgaatgtaggtaggaaattaaacaaaaagaaaaagctttaagacctaaccatgaaaccccaaaaatccagaaagctcatgaagcaaataaatgaaggaaaaaaaaaaacattaagcaagtaacaacaattagataaaagaaaaagaagtaccgaaatggagaaatggcgaaacttcaataaactatgaagagggatgaatcttcagcttcttggtgagaagaaagtgaacaacacttgacaaccattcgcaatgaaaccaataaaatgagaaccaaaagacgaagattaaagcctcttaccaatttagagagagagagagagagagcggcaaaataagaaaacccaaaccaaagcaagcaaagaaggagaagagttcaagttcaagttcaaaattagagagagagagagagagagagagagagagaggctggttcaaaaggattcctgaaagcgactgaaaaagagtgcagtacacggtgaagaggagagggctatgttcctctgcaccaaactctacggtacatactgtgctctcttacttttcttttgagtaacacgacgtcgttttaagctgcttaaaactcggatgtgttgcactcatgttttgttttgtcgtttgtcgtttcgattttgcctctatttttcttttccttatccttttgttgttttttttgtcttatttttcttttattcgcaaagttgtcttattttcttctaaattcctttttcagtgagaaggaaagttctaagatgtgtcagtctgggcgttgaagaggcaacttttgtcccccagattttaaatatagagttatagagttatctttatactaaaattctaaccttatgattatatattttgcttttattaattatatttaaattttaaaaaattaagtttaaataaaaatataagaataagtctacaatgcatttctttaaaggagatatactgatatactctctacttatttcgacattcagaagaattttttagtctaattttttccatattcatatacgttatagctatttaagatatcgtataaaattttgagaaattcgaaannnnnnnnnnnatagaaaataatattcaaacaatctatttacacgcgtataaaataaaatagttacgcgtgcaacacactgtttaaatacagaaaatggtgagatgggcctcttccaccagattactttacttactttcattcagcgtgttaaatttttctaaattttttaaaattttgcaggattttttaaataactataatttaatgaccatgagaaaaaaatttcgtatactaaaatagataaaaatgtatcgtacatttttttaaggagttgcattattgaatttttcaaaatatagtacagtataaatttatttattaacaatcattcataataaaaaaaaaaagaaccaaaaaaaaaataaattttacatcaaattttataattataagtataatactaaaaattaatacaaatatattataagttattcttttgctaaatatagtacatttttatgtatcccattaaaaatattattgcaaacttatatataataataacaaaaaaaaatttattgaagttaataaaaaaaatgtacattttaataacaaaaatattaacggacacattaaggtacaaaacaccacaaaaaataacatagtgttattagtatattttaatatcagttcccacaaattttaattaaattttatttagaaaactgttaactaattattgtatatgtgaattagtatggtattgagcaccttaaggtatcacataacaataatagtacaaaaaatcatttatgaaaaaaatagtataaagatcattcataaaaaaaaaaaaaaaagacaaaaaaaaaaattactaaccatttattggatgccatattggtatggcattgaacaccttaaggtgacaatagcaagtacaaaaagttatttaccaaaaaataatatatatatatatatataaacaaacgataaagacaagtcgtttttatttgttttattataacatccatttatatatagatgttatagattaagttttattgtaaattcagcaacaataacaagattccaacactaatacatgcattaaacaattaacaagaacagaaataacaaacaaacacaatacgagaaaacataattgaatcaagagagaaggcaacaagatttatcctggttccaatcctagagatcaagttgatccctggccatactccagctgagaaacgtcatctttgctttcattaaaatggagaataagagagtaaatacaatcactaagatcatagcaacaatgatctatccgcacttgatacacacgccagagaaacagtcacagtttctcattcaccacccgagtacacccaatcatttattgacccattcgagaacatgatctcacagcttagaaaactaagcacttaacctccaaactctctctcaattctctaactcagaagtgaaaagaatagcctatatataggtacaactcacaattagaaattaggtgcaaaaccagcaccaactaacataactgaaacttagttaagttagtaaagggtaggtgagttagaattagcttggtttagaggatcaaataccacaagtttttttaccaatacgaatctaccatcttttaatatttttatagatttttagggtgaaattaatatttttataaatttttaagatatatttagttggaataaatgaaaacaaaggaataaaaataaaaatgtaaatatgaatatgaatgaaaataggaatgaaataaaattatttttgttttggtaattagatatgtatattaccatttgaacataatttacatcaaaacaatcattttaatcatggactctaggtattacgattttccaaaccaattaatatctactttagaaacttccacacttctaagtctattctttacatcatattgtattatttttacaaatgtctctacttagggatgtaaacggggcgaggtgggtgcggagattgctcccccacccccatacgcgcttcctaaattcacctcatacccgccccaatatccatttaaattaaagcggggcagggcggggattacccaacggaggaaagattcccattgggtacccattacatatatatatatatttaaaaaaaaaataatgtttcaaagagaattaagaaataataatcataaaaactcagaaaaataataattttaagtggaatagtgtgtatagtaagaaaatagagtataatcaataaaaagattaaagcatgaagttattttaattgtagtagttatgattttaaaacttaaatatatacatataccatattggggcgggtaaaccgtacttagtagttctatattaaagatttcttttactttaatatactaccaactagttttattcatattgtataatcttaatcctcttgtacatccttataagatcatacattctccatataattaaggaatttttagatatttattaattacacttctataattaatatattcatttatcttaggctaattaagattttttttccccctaaactttgacatatacaaaatcatgccccctaaacttttctggccgttaaaattcctcctgaactattgaaattattagatttaaggacttttgtccaatttcattcaattttaccaattcgatgattgtttatgtactaaatcatgctccccaaaatttgatatctactaaatcatgctcctcaaacttttacatgtaccaaatcataccccctaaactttcatccatgttagactttccttactaaaattgaacaaaagttcttaaatccaacaatctcaatagttcaggagagatttttaacgaccttaaaagtttaggaggtatgatttggtacatgttaatgttcaggagaaaaaaaaatcctaattagcctttatcttataattgtatttcatatattctgtaatatattatctattaattacttgcttttagggcatttattctttggggttcaaccattttggctttccccttgttgtttgctggctttgagggtccaacctcaagatggttaaactctcccactagtgagttttcggcattgagattcccctttgctaccatgttttacagttaaagatgggtttctcgtatctggcttgtgacttcttgttgctttgccatttgcctttgttgatcaagaactacttgccttagtctcaccatctttgggtcctcctcatagtctttttcatggtttttattgtagtcatcctttgggttcttgctttggcctttttggttatccttgtcgaaggaagtctcataaacataattttcttggtgtttgattttccatggtggatgattagctacctctgatgtttcaccgtctttcgtgatgtttgcctaagtgtccaccagaggagggcaatttagatcgtcttttcgctgtctttgcaagcgtttagcttgaccaccatgtatctagttgcaactattattgtagatgacgacaatggagaatacctttctcaactctcaatgaaagtgccaaaatgtttaccgaaattttctaaaattgaataagtaataaattaagctaagaaaaaatgtttaagaaataaagaagaagataatttctacgtggttggggtattgataagccttagtccacgatagctctttggatatggagtattttacacaagattattcttgccatatttctacagagtgtctagctaaaatttgtaaccctttgcatgaagggataaatccatatttataggctgaaactggattctcgagtaaacctagacctgctagggttttgtacatgaaatagcccactaatggggtgaaatacattataatattgcctttgggtcgggtaggtgagacctaaattggaggaattccctttgtttgtacgtgattgttcaacttgacggtgataaatgtccatgcatcgccgattgtgtacagtaaatgtaagaggagtggacgttggacaaaaagtatgttgatttttggtgttgtactcctttcctaggtccgacacaggggaaaaactctgtgggatctgatgtcagaagggtgccacgtaggattgcaccccgacacctcctcgactactttccattattaaccccgaaggtatccgactgtgtctctccgagtctttctctctatacgagaatcatccttcccaaaccaaggaggttcgactttgttgagacaggatcatagttgaatctagggccacgacccggctccgcttatgggctaacccattgctctatctagcctgacgaatgggctcgtgcattaattttggcccttgaagtacacgtgtgatgcatccagaagtgtggataacatagatcattaaataattaacttttttattatactttctttaattacagattattaattaattaattttatttaattagagattattaattaattaaaattaaaaagaactatataattacataggataactaatgattcacttaattaatttataatagaatgattcacttatgtataaaagttagtacttaccgattattgtttgatttattttatgcatggagtaaatttattgagaaagatattaataatgattacaaattaaataaggtgatgacaattattttacagataattctatactttttttttttcgttgcatgttttatatatatatatatgaaacacttcttaatgggtattacctatgaattattactaaacaattttaactataaatattaattttaaaaatatcaaaccatcgaattttgatctaataacgaataatgaaatcaca

SEQ ID NO: 19984 - DNA, 2218 bp, Cannabis sativa
agtttatcctggtagaaaatgattctaaggtagtgatcaactctttcaacagtgttgatcctagataggaaattgtgaactattctttattttgaaatataatcatttctttttttttttggatgtttattttgcattacttctaaaacttgtaattttatggttcataatatggtcaagtgggcctttgtccataactgatttgggcgattttctatctcgtctatttttgtaaacatcttttgtaatagtcacgaggtctaatttttattttaattaacgttttttttttgaaaaaaaaaagagactatcacttttaattgtgtgattgaaattaacaacatattattgtatataagaagtgtgtataatttaagtatgtcccaattgtttcacattttttaattttagttagtaaatagtatataaaatattttatatgtaaaatgagggtgtgtatgtgcattagcatattagtcacttttacgcatatataaatatattaatattggtccctaaaactaaataaaaacattgaaaaaatctttggttctggtacacttcgttacctgtttaggcattagggagagttttatagtccattttttaatatttgtttaggcataattaggaagagttttatagtccatttttatttttttaattatgtaggtttgtagttatatattaaggacaacgtacctataaacttttgaaaaattatttaaatattttgttgcacatacacgtgacaattttatatcatatgtgtggtaaataaatattttaaccttattttttatacgagaactatttgaaattttctataaatttataagtacgatcataaataactataacatgctatttagaagaaagcaaaatgtaggctaagtatctttccagaatgctgaaatagggatagaacaatcatttaggaagtcatagagatttacctaaaaaaatttatttatttatatatgttacatcttgctaattttttttaaatattttgttgatataatactaacataacgttaatttgtcttgttagacaaaaaataaatacataaatatcagtctaataataaattatgaaatgtatgcatgttaataatatttgtatgaattaatactaataaattgaatttcaagtagcgtaaggttgttaaatagactctcatattataattatatatgtacctcatggccaatgtttataatagagaatatttgcaatgatttgtatatagtttgagagaatttttgccgaacaaaaaaaaaaaaaaaaaagaaaaataagaggaaaactctacaaagttcatacttcatccttcatggtgaaaaaaaaatcccaatttattcaaaaaaaatttaaaaatgaaccatttcattttagtagataatttaacttaccaaactatgctcatatagtgtaattaagtgggcaaaagccaaagaattttgtgataaatatagcatatcgagtcaataattgtatgaacatatcaatacttaactaccattttaataagtcaataaccttgtgtaagcttaatttaaataacattgtaattagatacatcttacaaacaaggcatcttacattaattattaaattaaaatacatgtaaaattttgatacttaattataccatatgagatttcaatattaatattttactcatattgagcactattgatactttttaatatttgtcttgcttaaaatagcaatcaagtagtgagttcatatagataaaatgagagtgattgcccctcataaaaaatggaaaaagatatatttgtatttaattaattacaacttataaaatatttatagttaaaggttatgtttatggacatagtacaattttagtataatacttaagatattttatacacataaaaatattattttattttttaatattttaactttagtttttgaatatctaccattattgaatttaatattttttattgtcactctttttttacttgaaactatatttaatattataaacatttaaatttgtatcaacttttaagatatgatattatatcatgctggaaaaaaacgtacccatgcctcccatatacaaaaaattaccccacatccaacgtacttgagtccagttattgacttttatttggggaagtctacaattattgactttaatctctatttattaagccccattactaaaaacatttc

SEQ ID NO: 19985 - DNA, 3594 bp, Cannabis sativa
aatttcgagctgaggagaaggaggaggatgtctactgggctttcttctcggatccgaaggctttctaggaattttatgtaaagattttcctggtacttcttctgtttgttcttttcttctttttacttctcagtttttttttcttaaaaaaattaatttttgcctgaaactttgtagtgtttggtctttagctatggatagttgtcctactttattgagatgatgactgaattttaggtatatatgtattttattttattttcttttttgttatggctatatttgtttgtttacttgtaattcctatgtggaaaggtaatatttttagaatttattacagagatttatttattttatttttttggtgaaactatgtttaaagctattcgttgagctagcaatttcagatcagatctctattattcttaaacatgcagaagttgttgtgttggtttctttctttgtttgtatttttttaacatattatatttatatatatactgatatagatacggattaagctcagtagaatatgatgcaccatggtgaaaagaagagagaaaatctcgtctagattaaaaatataagtgggaacagctaaagaaatatgggctctgtaagttctttctttaattatatatattggagaatgaatgactattctccgtttaattgtttgtcttatctactggaagtcaggtcattaattatgttttctccaatatctatgatatgaatagtttaaaagattgcttaatttgggttagatagtttgagcctcagttttaatttgcatgcagttttgttttagaaatttagatccgaaatcaaaataaactattctgatatacataatctatatttgtgttcatatttacggaaactggcatgtttgccaaatttggtgtcttatgtgaattaacttttatgttaaattttatgcagattggtataatagtttatttctctgtatttataataacttgacttcgtactacttggaaataagggaattttttcctttcatagttttattctctccactcagaagttgagataatttgtatcttataccatacatgtactatttttatttggagtctgcagctggtactaatactatcaagaaaatggactacaaatgtgtttttatcaccaagatgataaacttggttttctttttaatctcatgtgttttgctttttcagtcataaaaatcataggtatttcagtggaagtatcttaatttgttgatttgtttttgttatagttttaattctttttaaaaaattcctgctggtatcatattaattgttatattgttttgtctaggtattggaaaaagtgttcttgatagtaaatagggaacgtaaacatgtaaaaagatgtccaaatttctattaattctaacttcagtctaaatttcttgcattctgtgttctcattcttgctttaggcttttatgagctgtacatgtttattctactactatttctgattggggagttgttgtagtaattgcacaagtaacgtattgccaatacatctctacgtcctctgtctatttctctaactttacagttgttttaagatggatttttaataatatttccgcaaattggtttgcatctttggcacgttcatagtctaattattttattcctcttttcagaatttatgaaggttgatgatttttcaattgggggcgcaagaagctccagtgatctattcaggtcattgttaattgttgtaataaaagggttttatcctagaaacgtagtcagatatttaagaaagcaagacctctgaagaactgtgatttttgtgctgacatagattaagatggacagatcagacacatcaggctttgttagcggtggaaatatctcattagaatttcttctacatgctcacttaatactcatatgttgatttgctaagagcttcttgtacaaagattcttgtaggctcctagttggttttcttagagattgtattgtaaaatggatctgaacaagaagggtttcaatttttctcatgataatgaattcacaaaaaatgacaacattggtgatactgcactctgcttgaattgccctggctttggaggaggtaacataaccaggtatggttgtaatcaaaggaattacagcgttaagctgtccaatcctgctgatgatggctgtaagttggtacttggactcggcccaacaccaagtacatacagtaatgattattacagttacacagttaagaggagcaacagattatctactgtacaacctcagagtgttccatctgaagctgattcgattctccaactcggcctatctggaggggctaaagaagtttcaagtatttcggtttcatcagaaacggaaatgaatacaccttgtatacccaaccaagtatcaacaggaaataaacaactcttgattccagttgttgatgagggttctacctcagcaaaaaaatcgggtgggtacatgccatcacttattctggccccaaggatggatagttacaagatttctttcggcacacaagaacttctggagctccacagcactccccaggcgagtgaaccatctcttactggagaatattctgtgggaactatctctgagcaggaaacaactggtacaagcttagaccaacgtgcaaacaatgctaaaaaatgcagattttcgggctgtacaaagggagcaagaggggcatcaggcctctgtattggtcatggtggtggacagagatgccagaaacctggttgcaacaagggtgctgagagtcgaacagcatattgtaaggctcatggtggaggaaagagatgtcagcacttgggttgtacaaaaagtgctgaggggaaaacagattattgcatagctcatggtggtggtaagagatgtgggcatccatctggatgctccaaggctgcacggggaaggtcggggctttgcattagacatggtggtggaaagaggtgtaagattgaaggctgcacacgtagtgctgaagggcaggctggcttatgcatctctcatggtggtggacgtcgttgccaataccagggttgtaacaagggtgctcagggaagcaccatgttttgcaaggcgcatggtggtggaaagcgttgcatatttcaaggctgcacaaagggtgctgaaggtagcacaccgctatgtaagggacacggtggagggaagcgttgccttttcgatggtggtggcatttgcccaaaaagtgttcacgggggcaccaatttctgtgttgctcatggtggtgggaagagatgtgctgtgccaggctgcacaaaaagtgcaaggggacgcactgattgttgcgttaggcatggtggaggtaagcgctgcaagtatgataattgcgggaaaagtgcccaaggcagcacagacttctgcaaggctcatggagggggaaagaggtgtaattggggagaaggcaaatgtgaaaaatttgctagaggcaaaagtggcttatgtgctgctcatagcagcatggtgcaggagcgagcatcaagcaagggagggctcattgggccgaggctttttcatggccttgtatctgcagcctcaacaa

SEQ ID NO: 19986 - DNA, 7501 bp, Cannabis sativa
tgacatttttagtcaaatgtcactaaaatatattactaatgacatttttttaaaaaaatgttactaaatgaaaggttatttattcttattaaataatatattttaccaaatgtcactaataaaagtgtccctaaacctatattttgttgtagtatactgttgaataataggtttaattaagattgatttgtagataaacacaaaattaaaggtagaattttctctttcctatttctctttctctctttcagctcacctaaaactaaaggaaaccccaactacagaccagatttttcaaagttaattattcctccctacctagttatccaaactaagaagtagtgttcttgattcaaaggaaacttaaggtaattcttagttcatctctttctttaaatttttcaagtaaaagtttggttttaagcttcactttgtggtttgtgggtttgtaaaaattaagggaagttgaatattatttttttaagtttgtgcttagtttttggcaattgtggctgttgtagcttgagttgggtgagtttgagtttgttaacataaaactcactcaacaatggagaattttgattcttggtttaattttgattcttgagttgtcatatatgtttagaacttgtagtaggattgttctgaaaagtttagtaggttttaatcaagtttggagtagatttgatgtgttaaaactcaggttttgaactttagaaaacagttaaccaaaaccgtttccctagttattcagttatccgtttgggggatctggttaacagtttggagtattttttgtgtgcctatatttttatattttcttaacctttagggtattaccacactatttatcgataggagaactttcaattttacgttttaggttttagaatgaattaaattgagttctttacctgttattactgacatagggcgtcaaatcgtcgtgcgttttccataagattggccaacacacctaaatgtagacgaggtaataagaaaaatataattataccacttagcatgtcaaaatgtgatacgataattattgtttttaagagagtgttattactctattttgaaactaatgttaggtttcttatatatcggttgtcctattagataacgatattgacattgcttgtctcattaggcaacaaaattagaaagattgtctcattaggcaacgatattcgaaaggttgtctcattatgcaatagagaatatagttactttattaagtaatagccaccactacaaaaggcttattttggtcggtcctcaaattggtttttttttcgaggactgatgctaataaagttatgtaattacttaaaattgtcgcttataattgggtattcttgatacacaatttttactacaagcgtacaatattgttataacaaagttttaattctaaaaaagttgaacacagggattgattattaaattttcactatgttgaccaagatttttagcaactattaattagtgttgtttatagtaattaatggaagttaaagaagggaactttttttattgatgagtgttttcttacagagtattcccaagtgtccccccttctatacaacatggaggtattgataagctcataatggttgtaaaaaggccaccgttattgtgtttgtatgagtcatgctttgtacaattttcctaattcaatcataggacatgatcgcttactttttatgatgtacatagactttctataggcatttgatgagactagacttgtctcttgcttctgatttaatagctcgtaatgtagctgtcaaatgatgtatagggcatcgtgcaattagagaattatgagtttaaaccattgagcacgtatctttttcaaagtaatgtgtaggatgttcttatgaagaattaaatgtgtgcacagtgacttaacctcaaacagtgcgccatgctccgcctatgcctttatctcttctccgagtctagttcactcacaaagaggaagaagcaaaaccatctatcatctaggtggaccctcccaaaaatgactaatagttcccaattcttgcaaattaacagtctccagaagtagtttaatatggcacgtcttgtagtgtaggtctcattgccacttggaaaattatcatccgatccaatctaaaatccaatccaattaattactaattgaattggattgactttttaattgaatattcaattacacacctaaatttcaatattaatttaaattaagtattaccttttatttaagtttattacttcataaacatactatcgtttacaattgtaatgtcgtcaaaattaagttttaaataattaacacaacaatattcctaagtaataaaataaaacaaaacaacatgaaaataaatacgataaacaactaaatgttacaaattcaacacacaaaaaaaatcttataaaaatataataaatatatattatattttttaatattttttattttataaataattttttaaatgtaattaaattggattggttttaaattggattttgagattgacatccaataaccaatccaatccaattagaatctaacttttagcatctaatcaaattcaattgtaattgaatatccaactttttgtaattagatattgtattggatcggttcagttcaattgaatcggattggatgatagccacccttaattaaatttaacgaaatattcttatattcttaaaatatatattcccttaaactaacaaaaacctttaaataaccatattttatatacaaagatatggtgttattttaggtagatactataacaaagatttgatatgttcttccaagtggggtaggcgttggttgtgatcataattatacatcaaaggaactaatcttgcgagattgagagaagctttgaggaatggtggtggaaacgctggatttcgaagtatgcattctttattgaggcacttccatgcatctgaaatcttttccatcatttcctcacgtgcatcttcaacactgcctcctaattccttcatgtaacactccacataagatccgtcatgtccttcttgattctcatcctatatattttacatacattatcaatattatatatattgtatagtcatatgtacctagaaaaataacaaaaactaataaagcaccttcaactatgtatatttacacatacatgcatgtttccttgagtaaagtttaaattggaggttttggtgtgacgcaccgtgagttcggtattactaaaagtagcagtttttttgtagttaatggcaaaaagagaaagaagaagatggttgagaagaaggagaagatatttttacgttttatttacctatttatgaactaaattttttatttaaagttttataaaattatttttcttttaaaaaatatgattgtaaagtatcaaaattaccctttcaataaaaaaaagaagtattaaaattacaaaaatatgattttttttcagcaaaaatataagtgtaaaaagacaactataaataaattataaaatacaaggagaaaatcaatatcatgacaactataaatcagttattaaataaattataaaacaacaaaaaaaatattgaacaatttattgttatactaaagaacatatgttcgtaaataaaaaaagtcataaaaatagaaaaaattgttttgaaatatttttgtaatttttggtgcatttgtgtaaaaatttcgtggacatatctataataaattagtaggtgatttgtaattattattgtagttttttttcatgtttaattaattttcggttaattatgatttttattttgtttcctttactaacagatgcttgatgtaaataaaaatttaggggcacgatttgttacatgtcaaaaaataatttggacgcacaattcggcaggtgttaaaattcgcaggtgaaaatcataataactagccgtaattttatttaccttggcactaccaaagtcatcccaaagcctaagaatcgatgctgtagaagtaatgatggaaggcatgttttccacaaaatccagtgtcttttgggtgagactggtttcatccaagagaacaaatatatgaaccagaactacgtgcactcctgagctgaccacaccattttccaagtattcttttgcctttggtacgtgccttgatgcaaaccattttgcctctactaaaaaggcttcgcacaaacttgcccacttcaaattatcatcaagagataaatatttgtactcatttattagtcaaagtttatcaattgcctatgcatgcataaaaaattaaaagaaaaaagaaagttgtttagtaccgtcttccgaagagagtgtaaagggctccatccacgcttttgatagatcgtatggctagactcattgatcatattatctagggctctaaagcatgtcttcatggagtctggaagtttttgtatagcactatattcccagctgtaaaaattaataattaattatcaatagctaaagagtactaattaattagcatgtagaattccccttaaataaatatgatattagatgaatcttttttggtaaattaatggccaggtgaagttgtgtgtgtgaatttcatgaatatttaaatacctagagacagcctgggtgaagagaatgagttcatcaagtgaactgtacatgtcgaaaatatcatctattacatagataaacgaaatggattttgtaagcgcaaccctttgtttcgacaaggttggatcggttaggcaggccatggaccaaatataccacttcaccggttgatctcttgcgaaagttaattccttagctaaaccaatgtctcgccaccaccttataatataaattaatgcaaaaagattatatacatacatacatgtatatatttatttattagctagaagggacggttttcatagctgagacaaataaaaagtacttcgccaaaaataatttaaataataatctttgcatcctcaataatttccaaagtactagttaatattacctggtgacttgatcaatttccattctatgcagggactgaactctattaaattcaacttttgctagttgttgaaacaaatttatgtacccattctcactgggatagacaccaaaaaggtccttggctgtgaacttggataaacttttgtgagtgggattttgaagtgtagttgccacaaatttggcctgatattgatcataacgatgaagacgtgtcatggacgcttccaagtgttgagcactaaataaagcagcttcatcaaggatattttctccctctatgcatagatgggaggcttcatataagctcagcaaacccttgatgtcctctcttagcctcgtgtcgaaacaaccgttattattgtccttgtacttgttgaaaatatctaattagtttaaaccgacataattattattagtcaaattaagatttttgccccctaaattttaacatgtatcaaatcatatttcttgaatttttttgacagttaaaatttttcttgaactattgatattgttagatttaaaaatttttgtctaattttattcaattttactatctcaatgattatttatgtactaaattacacttctcggacgttgatatctactaaattatgcttttcaattttgatatttattaaatcatgcccataaatttcaatagttgaggtatttttaacgatcttaaaaattatttggtccgtgttaaaattcaatggacaaaaatcttaattagccttattattattattaattatctaatgagtgatataattaatcaacagaactaattatttgttatatatactgaccagcaggaacgaagagaccgtgttgtctcaagagtcgaaaacgaagagctacatcatacagatcttgatgatgatgatcatgttcgaattctctaaaaaacttataagcagactggctttgtataattttatcaatctcttcctcgaagatatagtcaattcctagccgttgaatagcatcaatcatcttcagaccttcatcaaatgggtctgcttttcttaaaacgtccctgtatttatctaaatcctgcaatatttaatttgtaaatcaatttcatcagaaaattattaattaatattacatcgcagcaaactggaaatatatatatatatatatatatgtatatatatatattgttattagagaaaggtttatacttctgtaaggatactaacaaagtattgtgatcatcgtggctactattaatattgataccttttgtggtgtgagatcaccgttactcctgatatgatatttggagttctcgtcaaaatttctaattatgttttgagaactcgaaagtgatgaggagggtttaaagggacgaaaagatgcgtaagaagacattattgacaacgccattgatatgatgtgagagagaatgatgatcagtatctaatggcacagattgaatatacaaatcaaaaaatatatctgttatgcgaagtctccctttgatctcactcaaatactcatgatcagctcacatggacattagccgattggccatagaacactaggttcgattagttacagtaaaagaaatcagtattgtatcatatgagtgtgtgttattacagcatataatgcagtaggcaattaggtactaatataatatagatcttaggactagctaggagttaattgacataactaatttaccgaactgcacctaactttaactaatacgtgtacattagggaactaacagtattacaaatcttcacctaggaacctaatgtacaagaatgaaaaacactcaaaacaaagacttacaaaagaaaaagtagatcacagaaacagtatgctaagctgtgatttgtagtaagtctaaacaataaataaatttgctattggaagtggcttggtgagcatatcagaggggttttcatgtgttgaaattttctggaacttgactttcctttagctattgcgtccagaatgaaatgatacctcacatctatgtgtttggtcctctcatgaaatacctgatttttgctgagatggagtgcactctaactatcatagtggatgacaacagtcctttggtcagcaccaagttctctagtgattcccttgagccagagtgcttctttaacaacctcagtccaggcaatatattatgcctctgttgttgaaagagttactacagtttgtagatttgccttctaactgattgtgctgttgtacattctaaacacaaaacgtgatgtgacattcttgagtctaaatctctaggataatctgagtccacaaacccttctatctgagtgttagttgtgtttggaccatagattaggcctgtatatcttgtaccacttaaataccttaataaccacttcacaacattccaatgctctgtgcctagatttctcatttacctgctgacaacacttattgcatggctgagatatgttctggagcataccataagatacattatgctacctaccacattaga

SEQ ID NO: 19987 - DNA, 6004 bp, Cannabis sativa
ctaacccaaggacgaagtctctctaccatttcagctttattcataagggcagggcaaggctcgtccgatttatcataataaaaaaattcaacattacgtctgatagagatattgctggtcagcttcttcaattaatcatattcgttgctatgccttttttggtaaaactgctcaacaacttccaaatgtgtattatcttcctccgtcacaaataagggcctaataggaaggttgaagggtggaggacttaatggaggtaaagcagttttctccctagatagttgggtggtagtagcaggaatgatcttaggcattgggggtggtagaggaggatcttgactgtccctggtagttttggtgctccttctaagcaaccttccactgtcaaagacatcagaccccttccgggagtggcctttcacagcctgctttctcgaagccgccaattatagaactttttctttggtctctaccctagcctttttattagctccaacgtctgaggagctagactgtttcttaatgatcacgactgacccatcgcaatcagggttgtcccctccaatgttctccaaaggaacctgctgcaagggttccacgatcagaataattgacgaaagtggtcaagtcttccgtgcttagagccatagaagcagcctctggatttgaagccaaagggtctagctgctgagttccactcccaaaagtttagcctttcttgcccttgtcctttccttccctagctatctctcaaacctcttcaaatcttgattggatgttgcccaagaacctattgagtagacccatctacaaggtggctggttgatctgcaaagaaaaaaagaaatatacattacacatggccatgaagaaagatatgatttttgcaacaaattatcatacaacacatcaaggggatccaatttctttaattttagcataattaactttccccctagaaaaaagagcaatgtcttcccaacctaagttagtcttatgctagaagaagcctgggaagtaaatcttactaagcacatccactctaaaatgattggtgcactggtggaacgaagtggttaggaatccttacgatgtaatctaccttatctatgtatctactgcaagaatatctgctttggtctaagttcaaaaagtatggatcaattctaccttggtcaatattatctaagtcagctaaagtgggagcctaattatgtgaaagggtgtctcaccactacgaaaaatgctcgctcttggagaaacttcattttgcactacctccttgaatctaatagtgagttctttagcctcattcaagatttttgagaattgtctcctccaatccaccagccatttctcattggcattcactgcctttaaggcatgctcagcagttatgactgcaataacctctttaacatcttttgaatcccctcagagagactcttggacattttccttcacaaaaagatgttcgacgtcctgatgagaagtgatgagacccacgttttgaaggttctcactggtcacgagtttttctacttgtaactctttagacgaaaaggatctgtagaaggccatcctctcttccaactctagggtcaagggcgactaaggaagacaatctgacatatgtaaaaaaaacatatcagaatacagcaaacaagagtagaaatgaaattctaaatttcaatatagggaataacacttacatactgggttaaaatccaaactgagggtgggaattctcttcaacaggaagccagaggtgtagaagtagtaatctctgaagtcatgtgtgtacttcgtggagctggttggacaagaaacactcttggagtagcgttccagcctttagaaacctactttctcattgtggcctctcatgggttgagacttgatcttgtagaagtacaagatctcctctggtgttggagcagacttattgtgatgagcacagaaaatgtaccacctcgacaataagcgatatgcttggggatgaattaaaaaggtgttactctagcaacaacacagaagttagcaaagtagcaccttaaaggaaagtacacacccatttggacatgagcccagctccagacgacaaagcctccttccacgcacttgctaggcatttcaccgtgaacggagaatctattccagaacagctctggaacactttcaagcccccattgggtcttgtacttcctcagattattataaatcctaaacttgtttatgagttggtccatctcccatggactaatgtttaagatcaattttggagcactttcttgctctataatttcctcctctgagtcagcttcatctcgatagacccgtttaggcatgatttctgtaaaagaaaagaaaatgcaaacagtcattcactttaactacctaacatagaaagagagttgagggtcctcccccataatctacttggagaggtcccaactagactaactatccagaaatgagaactcctaggagtcattcattccaaataggaagtcaagaacgacaaagaggaaaagcaggatggaaattaatggagagaccaaaactagaaggattttgcgcgtagaaaaattttgctagcatgtctactgcaaaatactcaatttccaaaaattttaaaattcaaaaagtaaaaaggtttgtgatgtatatatctatctacgatgacatccatccagatcaaaaccttaatcgcatcctagaacaaacacatgcaaaacttacaacagcaaacccagaaaatacaattcagagatgaagaaaccacatacctggtatcgaaagcggagatttcaaggtaatcattgttgggtccggttggggaagtcgattgcacctttcacgaagacaagatgctaaagtgatcaacgaattggtttctgcgttgaaatttaggtttgtgatttctcatgctataaaagtcttgatcactgggggttgatgatgtgggaattctcgtgccctaatcatcaagactaaggcaaaaatcaacagcatgttccatattgaagaagatgactcagttctaaattcaggttcaaactcaaaggatgcagtatgagctttgaagtataaaaatttgaaaacaagagaaaagtggtaactagagttcacaaaaggtatttatacctaaaaagagcaatccacgtgaaagaagacggatggtccacaatctagtccccagaaacacaagtttcatccaacgactaaggagttccacaacccacgtgcatctctaaaattaattttccccaagattgaggcacaaatcaatgatgaagattccatcttttgattttcgttccaaaaaatgaacagccaagcgactcctcgatagtcgcacccttccaccatcatgtgattgacacgtggatgtactacgataaaagacggaagccaacttccgtaattgagaagcacctaaaaattcatgattttatccctcaacctccacatgtccatattgaaggagtgaagcaagcttccaccatacacagcattccggaagcttgggggtaaagttatctgcgtttctaggaatggaaacatggaatccaggtcagcatctaagacccatcagtgggtccctcaacaaagataaagtggggcaagcccatttagacgagtccttcgaggaatgtctcccaactccgcgaccatagagcttctgccattggtgaatcattcccagaagcaagtctggtaccatgagactagaggggtgagacaaagttttctcggaagactctatcattttccttttttattcctgtgcacaaataaagaaacaatagctgccagatctcgaccgagcatcttaccaagttaaatggggaaacttcctcaaatgaatatcaagcaattaattcacagttaattttccacaatcaaagcacatggtgttgaccaaatcaagtcaaatctgatctacctagtcagcaaattctctccttcgtgggctggacttcacgaggcagcccaagcttgttattcaatgtaaactccccaacagaggggaaaagaaaactaaatgtaattctcaaactactataaatacccatcaaatcctatagattaaggttgaattctcttgcaaagcttgctcaggcaaacttgagaacatatattctttgtattcctaaaggttttccacgttaaagaactactgaataacattgactcatggactaagattgattaatgcccaaccacgtaaaaaattgtttgtctcttcttactttttctattttagttattttacttcttcagttctaattaattaattagttttttggaaaatctcggtacatacaagcatatatcaaaatgttcaacttatatttataaatagaaatgtctttacacatttttcaggatataaactttaacacttaattgttcttagagtaataccatcaaagggggagtaggttattgccaaaacttaagacttaacgtctataaattttcttgtgtcgtttactatttattgaatttattgtcattattttatagtttcacaaacactttgttgtaaatcttgattccgcatctttagctaaaaactaagtcaacacataggatcaaacctgctaactaatatgtttgtttgttagctacatgagataaattcaactaaaatcctatatttcaaaactaaaataattagtttggaaaacaaattaagtactagcatctgaccttattattaaagaagggtgcaatctatcttattaataataagaagaaatgagtgagataggcgacatgtagcttgattccaagctgggttagcagcgaggaatcaagagatctctgccagtgctgacttgtatctcaagtgacggaataaagcggccaattccggtcgaacaagaatattcaaaagacataatttagctattaaaaaaaagagacataatttagtggtggtaataagttggggttaaaaaaagaactgtagtaattttacatgtctcatgacgtaaagataatttactctgtattagttagtataaatcatagatgtaacggtaaagattaagacacgtcatcaataaagaattgtgacattacgtcacagcaaacgataaaaactgataatgagggtaaggcgagagagagagaaaagatatggctatggcgggaggaggagcagcttctctgcatttaattaacaagcccacaattccaccaatggcttgtgctccaggaaccatacaacttccggagaagatccggaactcgaaggtcttggtacttggcggaacgggtcgggtcggaggatccactgccatttctctctccaagctctgccccgaccttcgcattctcattggcggtcgaaacaggtacgacatacaaatacccatatgggaaaacttcatacccgtttaattattttcacagaaaaatgaaactgaaacttttatgagttttgtattgttagggataagggagctgctatggtggctactcttggtgggaactcagagtttgctgaagttgatattgacaatgtaaattcattggaagcaactctgaatggtgcgtatattgagtcatattgttttaattttgattttcctgtgcttgaacttttttcttcttctgaagttttgaatgtgggcagattgtgatcttgttgtacatgctgctgggccatttcaacaaacacataagtgttctgtcttagaagctgccataaacacaaaggtgagaaaatgtaactattgtagattatagtgttgcatataataattcatacttatatgtcgtgtttgtaaggtgggattaggctttaataatttttaattaagtacagacagcctatgcacctaaaccccaaatccatatattcatttatccagtataatcctactctccaaacataaccatataatcatatatctctacatgtatatatctgtgttttttctcgtggaacattacccttttgatctagtgttgagtgagtatatatatat

SEQ ID NO: 19988 - DNA, 3832 bp, Cannabis sativa
ggtaaaatatattccaacaatcttatgtgaacattaagcagtgtttttggataaacacttattggtttaccgttattgtgacataggactaagttcatcgggaaggtttctctatttgggttggccgacgtgcatgaatctagaataaaggtaagaaaagtatattgtactgcatagcatgttatgttgcaatgcaattaatattattgagaattgattgatattgagattaagatatggttatttttgttatacaatgaaaagattgtctaattaggtgatgtgatatatggataccgagagaggtattcaggttatgcctgtgaagcaactgttataaagtcatgactatagactgaaactgttattaggtttcttcctctcggcaatgcctgattaggcacgggcaacattgatatgtgagtgtcagcctatggcacagattgaaactgttgttacgtttcttcttgtcaccaatgcccgattaggcacgagcggcagttacatgtgagtggcaggctatggcacgggctcatctaattaggcgatgtgatatattggtgccaagttttagcccgggctcacctgagtatgtgatacgattatgcaatatatgggtgccaggctatggcacaagctaacttgattaggcaatgcaatacaggattatcatattaaagcatcgacttgcctgattaggcaatgtgatgtaataaagatagttactttatgagataacatatatattatttatattattaattgaatataaattctattattggtataatagttttgtattatcgaacatctatactgacgcttaattgtgacaaatgtcagtagtaatttagattttatcttatgagtaatgtgtgatcatctaattctgattgtctgagtataaataatgatattagaataataatttatatcattgttattacttttcttgctgagtccttgtgactcgcgggtgctatgtggtgcaggtaaggataaagaaaagctaggtcagccatgaggtgacaagtcttctctagaattgtacatattgaccctaccgacctatgtgagttgtcaagagttgtgtttgagctgtatctgtcgtgtattttgatttagtattttggttgttgtcgcatttagtctctttgtaatacttttacaatagcaatcctcggaacacagttttagtgtcgttatgatgtccatttttagtgttttatttttatgaagtttttaatattacacaggttttaataattaattaatctattagtactagtttataaaattacacttatggtgtccctgttgataaggcattacattgtctcttgcaataattctctaattcaactctcttatttctaattccaatgcaagagtcacgatttgatgtatctccttcacttaaagttgttactttctctgataccatttttaatcccatcttagctttagcttttcgttcaagaggttctcacggactatgccaaaaattggctcaacaataaattgttattaagactttgaatccgttacaccaggttcgatctagtggaattcaattcttaatcagtttacacaattttcctctcgattcactcatttaaatttagatcgcttgtttttttagatcaagtgtgaatttgagggtgcattttgacagattttcggctagtctagtgtgaccaagaatctgtcctctttttgaatgagggagtctcctatctataggtgtgatggactacatgcttccttctctttttctattcttatttgtcgacatctgttaaatctcattcgttgttcatcgcgcttccttttcccacctccagagctctttaagtgtgttattccctttctccccgagctctgctctgtatttttcttattcagagctttggtcttccgttctttaaacttctcgttctacttcctttctttaatgatacagtgtatttctctttgtgatttacaacaatataatattaatattttctcctcgttttaatctcttgaaattacttttttacccaagggttatttttatctcttccatataattatatataataaaattttggtttttaaaaatatttttaatttatgttttaaaaaaattaaatttaatcttttttacctcaacatcgaattactaaatatatatttttacatacttatattattcaaaataaatttttattttttgtatccattcaaaaaaataaaattaagatttctcgttcctaaatttatagctacaagcggttgtcttttttctttggctaggctcgccgacctttcctaggcataggtgcggcttgatcagggttgtgctttgttattgagattcaattttttctactgtgatttatcttgtctctgtgatatagttttgagagttttagtcttttctctgtgacatacttttaagtatttcagtcatattctgtgtggcatgattttatttagttctttttttcgttgttggttcttctttgtctttcgatggctcgccatcaaattgatgttagtgatttatagtaacaagttctttgcgactgaaagagttagtagtgcagttacttaccttgcacaaaattgagtgatcaagctacgaggttgtatgaacctgctgtaacagtttctattgttgtgtcttctaagcgatagataaaactgaatataggttttcttaaggttaactatgatgctgcaatcatttgtatcttattatatttttagtttgtttgtcaaatgatctcgaaattaggtagttgattatttgactcgttttttaattctaatcatggttgtgtctctaacaagagagatgtcttaattagattgcagactattattttagttgattacgtcaaatggcattaatttgattttatttgtaattttgactttgcttatattgatgtggtttatactgcttatttttttttaagcttttattaaaacgtaaactaattatttaattaatcatttcaattattcaatatgctttattttattttctttgcctgtcagaactttttttttttatttatttaaataaacatcaaaacttacacgtaatgtcctaaattactaagtaaaattaccattatactatttttaccttaatttaactaaaatttaattaaataagatttattataaccacaaaatttataatttactaatttttttaaaaaaaattaaaagttattaaatagcgaattgtattctcacatttttttttataatagttttgaatttttgtaaataaaatcaattttaggtataatattaaaaaaaaaaaaaaatctaatattgtaatatttattatagtaactcataaattacttgatatactagttttattcaaatataattttagttacttctttgttaataatttataaaaaaaaaaaaatattacttttaccttttttagctttgtttatatcaaaaaatatatatatgtttcctataatttaaaatatagtttaaaattgctaaaaagaaaagataactttaaagtatcttaaataataaaataacataatatagcttaaaaattaaaaaataaaatcaaagttttaaagtaaccgatcaaaataagcaaccaaatgtgtacgataaaaaaattattttgaaataatttttttaataaaaaataattaattgatatattatttacatcaaaaaaaatcaaaaggttactttttttttttgacgcggtgatcaaaatcacacaagattatcaaagcagcaatccacaatcggcgacagcacctcctcgaaccaggatagtgttggaatttatttt

SEQ ID NO: 19989 - DNA, 3626 bp, Cannabis sativa
tatatatatatatataaaaaagcttttactaaatcatcatgactagaaaaatatatataaaacgtacctttactaataaatatagaaagcagtccagtttatactcagtgcatactgtctaaataatttaaatagcctaataatattaaaactaaaagtttaaattatctctaaaaacaataagtgaaaaatcaacaaatttggtcctcataaaaaattattaatactttaacgacaagttgaaatgtttgataattataagttgggagttggagcaggtggtgagctattctggtgatcacaaggaattatactcgtagtaaaattgaaattttgactttgagagctacttaagttgataatagcattattactgatctgtgggtcatcattaatatgatgttgtagagtaaaagaagtttcatctctagtaatcatttggtggtgtgatattgatgatccaacataatttgtagattgttgatgatccccaaaaggaattattactttattagaatccatatataacagttctctttcttcaattcctgttttatcaattctcttcatcataaaatgatcaataataatacttaatttaagattgaataaagaaaatagtatatactcaaaattaaagcatcaaaagaagaacaacaatacttattaccattttttaggaaatattacataccattcttttgattgaagttgttctcgcatcctatgcatttgcacttcgtagaacatccagcttgtcccttaatacacataaatccaacaaagttcatgacataattagtaactctaattagttataaagtcaaaaaatgaataattaattataataagtagttaattatgaagagtacattgaaacatttgcaatatttggttgagcagcctttctgacaattacatcccttgatatgtgtagctaaattagtagttgcatttactacaatctgcaaaatttaaatgcaaaatatttaaactgtgttacttcttcaatatgaatattcataatttttttaaataaaattggtgacatatattgtaacaatattgtgagaagaaaatatacttactttggacgtgaaagtatatgggtcacgtgatagatattctttctgtttttgtaaaacattactttcattgctaatggtattggaacaatttcgacaatgacaagatcccgaacaaaatatacttgaagcaaaacatttgcaggtcctaaataaaaaatgatggcaaggaaaagttatatgagaataatattaatggtgccatattttctagatatattgtaaaatattataaattaagtgacaaatttaccacataattacttaatatttttattttgttgtagtatttttttattcacctttttttttttattgtgatactaatattatatttgtaaaacagtcattttaatattgatgctcccttaaacatgccaactccagattgattgattgactcaaaaagaaatttacatgtatatctcagtcaacaattaacaaaaaaactaaagaatttataaatattaagtgccaatgttgccataaaaacaaaatcaaaatactaatattgagtatctatgccaccaatgtattacactataattatttattgtacaaatttttaatgcttgttaacattttatttaatctaaaagttaattagaaaatattgaaaatagaaaaaagagtactatttatatatgttttcaaagtagtaatattttaattaacttacaatttcaaacaaccattcttcttgcaattacagtttttgcaagatgtgatctctccatcagatttagatttgtgcctaaaaataagaaatacatgcaagagaaaagttatcttaattgttacattcaaaagtctattaaagtgaaattgataaagttaatagtatttgtgcataccttttatttatatgagtactaggacttacaatatcaccttcattggtgtctcttgtatattttgtttcaagaagagaactagatggctgaaaatgattgagcaaataagtataatatatataccctaaggtggcgtttagctagaaggaataaaaatataagaataaaattgagaatgagaatatgaatgaaatgaaataaaattaaaatgcataaaaaaattgataaacaaatcattaaatttatattggaatgatctttccttctttttataaatagaatagtcattctactaaaatggtggaaagagcattctaatactttaaaatgcaatcaaataaataaatagaatgaaaattattttctttccattccattctatttccttacctccaaccaaatgccacctaaaaagtgtagaaagaaaatatagcaaaaaaaatcctaactagctttaaaaactgtaaaaaaaattatatatgtatgcaatcaatatattgatgaaatttataagcccaaaaaagtaatacgttattacttaatacttattacctggaatgtggaattaatttgagaattgtttgtactagtactaaacttttctctgtctccatataattgaacaaggaaatcgaatgtttgaaaatcctgatcaataatgaataaaattttgttaattagtaattaatggtatgtatgtgattgaaatatatatgtataaattaattgaaacttgtaaatttgtaattcatatagcaataaatattactcaaatttagtaattattgttttattggagcattctcataagtttcttttttctattctttaaaatatagcatcaaatataattttttttttatttcactttaaacttttacaatacactatacatgtttattatcattttaaattaattaaataatatatttttcattgtatatactatcatgttataaaaatataaataaagtattatttttatattgatttagttttaaaaaataaaatattatatatataaaattgaatatgtttacataataaatagtgttagtaaatgaatactattgtgttctttatttgtttctttattataaagcttatgatgtagcaccattttataaatatttttacaattcattactcctccaaaataaaaaaaaaaaaaaaagtacttatacatcatctaatctaagtgttattatgtatagtgctcaatgtagctaatatgtctttctcttatcacttttcataaatacttaatgctaaaatataagattaaaaattatatacataccaaattaattgaattataattaatttttatttaagaactacttactattttagacctcatattttataaaaattaatagtcagttctttaattttgttaaaaaagataatttaaatattatattttgtaagaaaattaacataataatacattgagctctgataccatattacaaatatgtaactatattattttgaataaatgtatttatttacaataaatgtgactttatacggggagagatattcaaccctatactacacatcaaaccaaactgagaataattcaatctctatatccaaaaatattataaaaaatcatttaatacttaataaaattcgtttctttaactttaagattttttatttcttaactctaataattgtg

SEQ ID NO: 19990 - DNA, 2403 bp, Cannabis sativa
ttctcatttctatagttttttttttctgagttaattattactattgatcgtgctagaaaaagctagagcataccctcgtcaaaccaagatatatataattgaagctccattaattaattatatcaaattttaatcatagataaagccaaatgaattaggtgacaactagggtatataatcaattttgagatactgagtatataatatcttaattaaaacagcttaaattaaagggtatcatataatcttattatcagcacttggaaattattatttaatttctttatatattatacacataatattaattaaatacatacatatcattggaaagagttgtgaaattcttacctttagaatctccttctgtcagatgaattatataattattaataactaatgtatattatatagatgatttatgcatggtagtactacaaaacattatcaaatattatattaattaacatataatattaacagacatgcattcagagaacttcgtaactagttaaaatattattatttcgtaaaacacattccaaactttagaaagaagctagcttatattatcatgtacatactactataataataaaatcccttaattaattaataaaaaactaatatatatattaattaataacaatcataataattataataataataataattaataacaatcatttctttctgtaatagtctgtctctttgccctagcattatgaagcttcccatggccttagtgatgtcttaattcagacatccaattaataaagacattaattgaatatatattaaatgagaagatgcttttgtaatctccatgcctaatcatggggctccctaagcttatcttatagtaccacccatatgagctgttctatatatacatatgaagtcaactatatattcttattaccctttccaaaattaaataaataaaatatttttattatttacaattaaaatgttttattccattcatcttttggggtacatgatatatttttatgttaagaaaaaaaaaaagtgcttgctttgctgtcaatattatttcttttttctcttccctctctttcatttagtcaattgtatgtatatgttgatttttcttgttttctttgcttttttgttttatctgaaataatgtaacattgaatattcattaaaaaaaaccataaatttggggtgattattattatatttattttgctttaatgatagcagaataaaattcatgggagttaatagtactacttcttattaattaattaattaattaacaagggttaccccagctaattgacatatttgataaaagtattttctcaagtcatttttattttattattaagtgaccaattataaaaagccactctaccatgtatatatataataagttttcttcattttcttttaaagcttccatttttgggtgttgtgaatctctgtctcaaatgattgacttggtatctgaacatgaacatgatgttcatcaaagtaaaaatatttatttttactaattagctagctcgatcacattatattttgttttattattattattattatgcttcttttcatataattttttttaatacaactcttttgtatagtacatgtataattatctcaacacaccaattgcaaggccaacactgtacgaatgttgggctcttaaacacgtttcacaattatagccaagcaattttgctttgagtcgacatatctaatcctaatcgtccctagtaagttaaactagaaataattagaggtgatgaatatataatttaaattaaattttaattaatacaacttaactaattatatatacatatacacttggtctatatatatttgaaaacttaattacgatccgtaccctaaaaccatatcatatatgtccgtaaaatttagaaagggaaacaaacaatatttcaattataattagcaataatatatagcatagaaaataatgtaaaatattatttaaaaatattaaaattgaaaattaagagaagaaaataggagttgtgtatagggtatagcttaacttgcttgcaattttagaaaaggtccaccactaccacactacacaagcgccgacgacgacattaaaggggtcctagtcttagatgatatctctaattggtattagattatatttgagaaaatcttacaccatatatagccatatagtattttcaaacgtgaacatggtaatcagggtcatctaattttacttgataaatattcactttttctcatatatattatagcatcgtggctaaagatgaacttattaccaaaactttcattaggttacttgtgtaatattcatttatattcatgtatttatatatatatatatattaggtgattgttacgtgtcaagcc

SEQ ID NO: 19991 - DNA, 3338 bp, Cannabis sativa
atgagtgatgcttatgtcattattaagacattgtttaaaatctattcaatttcaacctatacgtagctctaatttatgttgtttatatttggtttaattgttaatacaaacaaagtaactcatcaattgccatatcatcttatttcttgtccgattgtattttatttttactgtgaataatacttcatttgaagtaattatccttatgtttgtttgccatttcaagtttgatattttattaagaaaaaaaaaattgttaaaataaaataataaataaataaacaaatcctcgttccctctgtctttctaccctaacccactctctccatcatcgactctctctcactcaccaccccggttacgatcttccacaccgccggcgccgactctaaattcttccccgcacccaccggaaccgcctccaacactctctctctctctcacgcaggtcaggcttagagaactgtgtttttttttttctcttcatttaatatctcatcagtagtgtggtgctctttcaatttatgtttacagtttgtagtttattgagattagaataacgagtaaatgattttgtgaacctttagtctactacggtatgatctcattgtagaaagctcctaatctatcatttaaattaatctttattatttatttcgttacagaacgaataaccacttatctctctctcgtctgtaattcaatttataatatacgcgttcacttgtttagttcgccttgctttcgtaagtaattggaagtaatttcaatattctcattttgagattcaaatttatttccaaattgtcctcaaagtgattccagatatcatttgaggtctattcatttacataatagagaacttatggtctataacttgctgagcatatttctatacgttatttgtagtgttgtttcttgatttttctttaggttaccgaatagtaatattaaatttagatacatagaatttttcacatttatgggtttcgggatgctcttgattaacggtcattataaatgtaaattataatcaaacttgttaggtagaagtgcttcatatgggtgagattggcattattagattagtctttgcaactggtctggagcttttggttttggctcttgaatggttaatttataatcaaactcagttacaaaaatgctgttgttgtctcttatttctattgttatcacaattatctgattttaacttgctattgtcttgaattgtcttgcattattatgatgtgaatatacatatgtatattatatacatatatatatctatattttatatgttaaaatatgtaatttccacaatatgttgtttgatatctcatttgttttttcttttctttttcttttccctctctttccattttgcgatgcatccagataacttgctaaacttgtccttttttttggtaacaatcgatatcattatttcgaaaatcactgcttcatttctttttttggtcaccgtttgaacatcaccatcctcttgattttcattcagacttctcttctgcctgtctctaattgttgttactatttggtgctccgttagctgtaaatcattctctttgtaactccttaaggccatacctcatggcacagattcagtcaatattctttttctgcaactccatttggcctctcatattgtttccacctttccatattattctttctcctgtgaatgcttctggcttctgtgtttctttcacagttgccttgcaagcttgcttttctttagatacataagatgccaaggacaaggagcagtgctgaagctaccgaaaagcctatggatgctggaatgtcaacacattctgaagagcgtgtggaccttgaaggagataatgatcctgaagagacaatagaggaagaggtggagtatgaagaaatagaagaagatgaggaagaggaggaggaggaggaggaagaagaagaagaagaagaggaagaagttgaagaggaggtcagtgaagaagaagaggaagaaggtaagagtgttgccaatgaagttgacaatgagaagaaagtagttaaggaagatgacaaaaaaatacatgctgagcttcttgcacttccccctcacgggtcagaagtttaccttggtggcattccacatggtgcttctgaagatgatttgagggccttttgtgaatctgtaggagaagttactgaggtagtgtctagttaactgtttctttctctgcatgctggtactaaagctctgaactaaattttgttactgatgacaggttaggataatgaagggaaaagattcaggtgaggcaaagggttatgcttttgtaacctttagaaccaaggaatttgcttctaaggccatcgaggaactgaattattcagaactaaaggtgatcataccacttttggtctatatactctcatcaagtaattaaatctgagtttatttgatttggaattgtgctgctactaattcgtcttgcatatgatagtgcgtcactgcctctctcattgataatttttttaaagcactttctcattgataatttgatgtctctattttaaattgtttgaagaactgctataatcaataatgtgagtttactacttttctcttgtaagataactttctttttgggtggctgttgctttctttctcaggggaagaagataaaatgctcaacatctcaagcaaagaatcgcttgttcatcggtaatgttcctagaaattggggagagaaagatatgaagaaggctgtgacagatattggaccaggtgttatttcggtggagctattgaaggtttatcatcttttccaaaatatttcatcagagccctgagcttattcagtttttattcgttactctcttgcccttttaatatccaaatttaactaatttcatgattatctgttgtgccttgagagtgtctctaatttttgtaatcttctcaaccatgcaggacccacagaactccagccggaatcgtggattttctttcattgaatattataatcatgcatgtgcagaacactcaagacaaaagatgtcaaacccaaaatttaagcttgacaccaatgctccaactgtgagctgggctgaccctaaaaatatggaatcctcttcttcttctcaggtgatccatatgtgttttttcatttttggctatgcatttattggattcctgttgtgcttattctcacgtttggagtttttaatgttatatatgatctgcgtatggttgctaattggtgatgcctgcaatctgttggattcagagaaaggatatagtagtattaaatagtcgggttttggttgctaaaactttttaaattgattat

SEQ ID NO: 19992 - DNA, 1916 bp, Cannabis sativa
aaaaaaaaaaaaaaacattattttagatactaaaagctatggaaatatattggttcattctttataaggagatgtaatatagaattttacaataatatttagtagtagattataattagattgtatggatgctgagccttaaattttgagtgtgaaattatgttttaatctcagccgtcggtgagaacctttactccgtcagatcagttccctcccgtatctaatctaactacagactcctatatttagggttcgcaagactccaacaggtgaaaagcggcagaacttatccgagtgcattcagtcgcagcatttctacagtcatggctacccagatgagcaaaaagcgaaaggtgcacccccacgaacttcattctatcaatttctactcattaagcttttattgataagtatatatgtatgcatttctagtttgtagcggacggagtgttcttcgccgagctgaacgaggtcttgaccagagagctcgctgaggatggctactctggcgttgaagttagggttacgcctatgcggacggagatcatcatcagggctactcgtactcagaacgttcttggtaatttactgagttgtttttagaatttcgatactgttaaatatgactactttaattttcagttgattttctattataaacagaaaatcaggtgtttgtcttttggtcatttctgagattttgaatcaggggttatgtaatttggtcctaagttggagctgagctatccagtttcactggctgattatgggtttgattattgggataggtgagaagggacgaagaattagagaactaacatctgttgttcagaaacgttttaaatttccggagaacagcgttgagctctttgcggaaaaagtcaacaacagagggctttgtgctattgctcaggcagaatctctgcgttacaagcttcttggggggcttgctgtccgcaggtatgccttgaaacttggttggagctggattagtagattgtgtctctgtaggaacttaaatataacgatctatgttaattcaactatatactttaatcaataatgcatattttgtttggttttttttaacattgtatgaaaacttttatgttaccggttgcccaactatcttcaggcctaagcttgtttggttgaattgttgctttttaatatgtttcctgagtatggtggatggtaaaagaaaccacaagctaaaagcattacttacatgactacattaatttacaatttctactagcatttattatattatttcctgtcccaaaaataatgggttagaggatctaaaagaatgcttatataaattatttggggtttttagttttctttgaactctctattagttctaagagttcgggaactccaacattttatgaatttctgtctgtcatatctttttttttttttggtctgtcgtgtccaacataaataaagttgaatgaaatattgtgttatggtaaactaaagcataagttttctatcaaaataataataataataataaactacagcataagttaaacacttcatataattagcattagcattcattttacaattccctgtcctaaaaatagtgggttagaggatccaaatggatcgtttttagttttctttgaactctttagtccttagagtttgggaactcaaacattttcattttcaaaactcatatggttattctttagtgctatggtaaactaaagcataagttaaacacttcatataattagcactagcattcattttacaattccctgtcctgaaaatactgggttagaggatccaaatggattcatatataaagtagttggagtttttagttttctttgaactctttagttcttagagttcgtgaactcgaacattttcattttcgaaacttatatggttat

SEQ ID NO: 19993 - DNA, 1705 bp, Cannabis sativa
  modified_base (84)..(86): a, c, t, g, unknown or other
gagtttacctggtcgatttctgtgttaggaagctccaaaatttgtaaatcaacattgtgatagtggatatcaagcttctatctnnnagaagagcttgacagagacgtagcccagttttgggtgaactctgaaacaaatttctggtgttttctctccttatttttcgtttttctctcatctaatctaatttgtgtttgtgtgtgggtgtggatctgggtttctagtctagaatcgagcaagttcttcatcttgttaagaacttgctctgctagggtttcgaatcagagaggctgtgtgtgtgtgtgttgtgtttggtgtttagggtttctagactcttttactgagtctttaaaccaaagctttgaacgacacaggacttggtgtcgtgtgcttaaacactgccgttttagtctaagtttaaattagacgggtaaaggtcgattttgacctttgacactgatattaatgttcttgttggtgtagggcaaattggtaaaattttacacttttatatgagacagatagtatgagaatttatctaacaatcactaaaagtatttgtttttttgtagtgccaagtaatctctgtagtaattaagaaagacaagactcataagttaagatgtgtgagacacatggtattgttagaactttgggaaattaagtatgcagtagtcaagaaaacacaatagcccaaggtaatgagaatcatcggtggggtcaccaacctagtcaacatcacagaaacacgtatggagagagtagaagacaaatgtaaatgcaaactatttgataaagtgcaagagaaatcacaaaaagataatccactttactacctaccagtcagcttccggtggagtttgtatttattgaccaactttgataacacagtaaataacaaacaatttgtcactaactaattaataacagtctctaattactaattaatcacttaacaaaattacagtttgctagctatctaagtaactttgataaaattagatgaagtcctcaaaattattaatttttcatcgtcaagttcaacccattttcatttggaatatctatataatatatataaatataggggttttttatttttatacttcaaaagagttttttttttaacatttttacggaattccacacacagaaatacttttatagtactgactaacaaagtaacataaatcgcaactgaaattcgtataacaacccacatagaaagcaccgaataaattaactactgtaacaacccaaaccgtaaatttaataaataaaaagttaaaaaataattatatatatgggataattctcttaaatatatatgttttgaatatctttgctaatcttttattgatattatttaatcatatgcacatgtgagccatctaggggcttttgttatcaatcccatattgatattgccttgttaataacgctataatctacttcagtttgttgaagcaataatatcacatgtttattttccaaagaaaaaaaaaataataccatatagctaggaagatcgagattggggatctatagttcatgaaactcgataaatttcttcatactcaaatcttttttcttatcatatctacaactcaaaatgaatcaaatcttttttaatcgcttcgaaggcagttatgaaatttataaaagcaaattattctttttaaatatttatatagtacgatatata

SEQ ID NO: 19994 - DNA, 4104 bp, Cannabis sativa
ctctctcctctctcctctctcccatcaagttgaaacccacggactaagcattttctttttattatattttggacttgttattaaaaatagctcggaaactagcctcatttacagtatatataaataagtatacacacaaaaaagtacgttctgatttcagatcttgtgacgatctttctatcacgtggtagattttagtttgtatatctaatcgtacaatttactttttgctcaactttatttaggttccctttaaaaaaaagatatcaagtcttattgtccatgaattttttccaaaaatctttatttactaactaatccttttcttagataaaaaaaagtacttttctttcccctttccttgcaataataataataataataaaatatccattttcctactttgtcaaccactgttattacattacaataattttctatttactttagacgacaaaaacattatttttttgtctctaattttacagaagttaaaaacttaataatttgtcattatattttaatttctaggtgatctatatccaaacaatataataaagcctcttttgaaaacaggtgggtctaccaaagatattgcaaagcaatgagagaattatctctggtgatcatggagcttttggcgattagtttgggaattgatagattacactacagaaaattctttgaagatagtgaatcaacaatgagatgtaacttctatcctccttgcaataactctgggctaactctagggactgggcctcattctgacccaacttcattgaccattcttcatcaagaccaagttggaggccttgaagtctttgctaataacacgtggcaggctgtaaggcctcgccttgatgccttagtcatcaatatcggcgatacattcatggttggtatttcgtatatacagtttatatatacaatttttctgcaaaaatatttatatatattttaactacactaaacacagcaattaagttccataaaaaaaatacagtaattaagacttaatagttcttaagtttaatataaactttaaacaaagcatttacttaattatcaaaactatgacggtgaaacattcataatagatgtttcgtatagactagtttacactaaaaaaatcttactagtcacaacaaaacttctggttaaaagcaaaaaaaattgtgattaattattaattattatttttatattgtgattaaaaggtccatggttaaatgtattagtcacaaaaattacaatttatcgtgactaaatgtatttttagtcacaatatttgttgtgactaaaacttaattaatgacaacttgtaactaaatactatattttaattacaaatagcattttgttgtaactaaaagtcacatttaatcacaacaaaaattatattataactaaaaagttttctactaaagtagcaatttttttttgtagtgttgctacttattattatgatttataggaatatatattaatataaaatataaaatataccttaattttaattgcacaattaatatttatttagtctaactttaaacattatttatatttaaaattaaatgtacatttattctgtatgaaaaatatattcaatttaattgtgtgttgcagtactcatcaaaactagtactttttttccttaaaaaatagaaaaaaaaaaaaaaaaactagtactttttttttgtcgtatgtacattaaagaactttacatgtctataaacaaaaaatattttaaaagcccaaaaagtaaactttctattaatctcgaacataatttgtaactaactatacatataattattataatttgagttttaaaataatttgtcacagttttgtgttgttaattactaattatattaaaatgaaacataatattcggtttgtttgaaaagaaccatatatgtaaaattactattattgaaatgtgttagccttcacaaccaatatgtctattattataataaaataaaaactagatgtgcataattaacttttacctttctttttcgaaatataattttgacatgatgaaaattttattttaagttgtattatgttccaaaagattatgacaatcaaatctagttttcctcaattaaccagatgtgtagtgcaatgactagggtatagggggtgtaatttgtggggcaatgatgcctttattataatcttcaaatgtgataagatgtgatcatataatgctctttgaaaagactaagtgataagtaaatcacacaaacgtacaatagaactccacctgctcatgtttccggactgtagctgttttgaaaaggagctgaaatgggtcaataaggccaaatcactaggatgagattcgagcgagattttgtgatataatgtaatggctatgaaataattctaccagtgtactcatccatatgtcattaaagtagtaatgtatccaataattgcttctctgtgcaaaaggaaaaataaaaaaagaaatgttgtactccaagttctaaaaatacttgcattattataggtaacaacactgtagtggcatgaaactgttctgtagactgtatgtgcatttaattattatttatttatttttgacaacatatgtatttatttagatatatttaattatatgaaacaagaattattcatccaacgttggaattgaatataatgatttatttgtaggcattgtcgaacgggagatacaagagctgcctccaccgagcagtggtaaataggtataaaattcggaggtcattagtgtttttcgtaagcccaagagaggacaaagtggtgagacccccaaaagatctggtttgcagagaagggccaaggaaataccctgacttcacatggtcagatctgttggagttcactcaaaatcactacagagctgatgttgctacactccaaagcttcattcactggttactatcttcaaagcaagcccgcttttaattaattattccttttggacttttctttattgcacctccattatcccaccttatacgtactcatcttctctctctctccctctgtactatatatcatatatatctctagtttctatcttgtatgtgtatataaatatggatatattatattaaatcgaagtttgcaaattgtctaacacctgggacccatacgtgtttagtgcgttttgggattgtgtatcaactttaatgcatatggattatggtgtcaaaattttttactcttttggtggatattaatttgtttactgtgcaaatatatcatttctcaaattattctcaacaattcatcacacatgaaattttattcaactgattgcaagtttattacaatagtacacataaaaaaaaaattattttaactagaacaacattacttttttttttcaagcaaaatatactttttactgtttttagtatattagctcaaaatggtattaagcagaaataaatttataaataccacactactgggcttttagtttcttttttttcaacctattttataaaaaaagaagttaaaaggtgtaaaaatatccgcattgatatttagaaacggttttttgataaaaatcataggtataaaatttatatatatctatatggtcagttggggttgggggaaaattgagggtttttggttaaccctatggcgtcggttatttggtattaaccgacgccataggtgccgcctttagtcaacacgtggcacttatggtgtcggttaataccaaataacggatgccataaggttatatatcaaaacccttgcttcgtcttcctcatttcaccatcttcttcagcacgaagaacatccaccatagcagcctcaaacccacgaaaaaatcctcgccaaccaccactgtaatagcctcattctccctcatttcttcaccattttactttatttttgtcttcaattcttctattttcaatacctaaacctacactgtaaaaaagtttagttttttttcccctctatatatcaaaccgaacttattataaaaaaaaagtggtagtataactccggccaccgattttagcggagaaaacgttgaatctcaacctccattaaggtataaatatgatttctattcatttt

SEQ ID NO: 19995 - DNA, 2387 bp, Cannabis sativa
tttttcttacctgttcaacccaatggtggtatgtggcacttatgttggtttttctccaggcctcaagatcaaaaatgttcatgccataagcccatgcacattcattagggtcgaaattatttgatatcaaaggatgggagaagtttaagtagctctttaatttctttgacatcacaaacttatcttctcctctacatgtctccacagctccattcacctttccattcatatcaatctcccacagaggtgaaagatcagtttgaaccactatatcatcgtccaagaagactatcttattgaggctaggaaacaactgcaagaaaatgatcagtgttgaaaagatttgtcagaagaagacacaataagaaagggagaagttcaaatatagccaagtctaatcaaatattacctctgggaggtgtattcttatgtggttcataactgagttatacttgggactaagagcttgcaatttggctgcaataaccctaggcttttcggtagcatttgccacaatggctgatgaccctcctctgaactgggacctgactttttgatccttctccattgcttccaaaactggcactttccccttggtgaaccaatcaaagtggtgtaatgctttcacttcaattatagcaggtgacaaagggtgcaaagaaaaccatgcctgcattggatagtaagtcttcctatcagtgatgatgtggaggacaaccttgtggggcctcaatgagtttttgacaagtgatgtggcaacaacagaggcggctaggacattgtctgaggcaaggacaaagtggaagtaggaattgtcgacgagggcagggacgagttcagccgaaggcagttggaggcgagcagctgcattgttgctgtgctcattggctagcctcaaggctaggcaatgaagctgttttggtatgctgcttgatgccacgtggcggtacaagtattcttgaattttggctgttctagtcctttgttcaagaagggtaacctgaaatgtaaaaaaagaaagagtttgttgaggagtatctttcattcattgtctttgttttctcttgtaaacataagttaaagagtcaatttactagtgttcaaaactctatttgtggaccctcttgaaggatttgtggaccaatatatacagaaacaatcattttcaagtgacatctgattctttttaaactagtcttttatttcccatgatggaaccttttttaagttagttggaggtgaactaacaccttcttccaccccaccctcgcgaaaataaataataaaaacaaagatgctgatttcatttccaaaataatattaatacacaaaagtaaacaatttttagaaagaaataataatagaaaacatattaccatttctctaagcttgatagcaaaagtcctcgcatctaagttgctattcttgatctcagccatgaactcatctagagtttggggaatatcatttcttccttgtaattcatccttactgatgggttcttctagtacttgatatatcacttcagggaccttaccaaaataaataagtacataaataaaatttcttaagacaaacaaataagtttcataaaaaaaaataataataaaataaagacaaacaaataagtaatttctaatcatcaaaggttgttggggaagttacattatatgagtcaatccttcttcccaaaatttttggtcctatctttttccccaagcaacctatcatcaagaacaaatatattattaggacttggctttaatattaataaaaaaacataataaacacgccatttatttattttattttactctttttttttaaggacatttactcaattttagatcgtaacaatctaccaagaagtacaccgaccatggcataacaaattaataaattagttaatacgcagttatcttatgagaaaaatatatatcttaatattttctctttggagtttgtgcttacaagttggttttagcataaaaactttggtggcctagaccatagcgatagccatgtggcttaactgaattttatccagacacctgcacttaggcacatgaaccatgcacgtgttgtccgtgtgcactcattacagaaagtgcaaaactttgtagattatgttggattattaattcttcaattgaataattgtttttttttctcaattataaaaataacagagatactatgcataactttttaagaattgttatttcaaaaaaaaaatcttagatatcttaagattcacaactgttaggcttttacttcttattatctgaaattattggaaataccaaaacttttactctgttccccaacaataatttataactactaaaaacaagtttaagataattttaatctaatatatatatata

SEQ ID NO: 19996 - DNA, 3737 bp, Cannabis sativa
  modified_base (3056)..(3057): a, c, t, g, unknown or other
ttgtcccatgtggctcgcgataagtattctgaaacttatagtttggcaaaacattcgattagacaatgagctattatagtttgaagaagttccaccgctaattgtggtttgctgctttattaatcatgtatgactctattcaccatgttaaaaaaaaaacaatagttggaaactttgtgaaatttttcataatctagactacttgctgcagtttgaagccataacaccaaaagaaatatgaatttagaaactaatctgttaaacttaaacccccaaaacttaagctcaaatcccttgaatctctatcgagttgtaatggaagaactcagtgagaataatcagtggactgtgtgagatacatagtacaaataagagagaaatgaagagagattttcaatgttttggggtttataaaagaggatctgagttgggtacaaaatgaacccagaagtacaacaaaatttttaattaaagaaaaagaatacaaaaacagctcaacactatgaagaaaaaaaattgtatgcttatgactacaatggacgagtaacaaatcccctagcaaccatcttctccaccaattcttcgtgcttttgtaactgcccggcttgccttagctgctgcagtaccatttcgtaaagagacagactcggtttcaaacacttctcttcaatcatctccctaaagaacttgtaagcattattccaatgccccatcccacaaaacatcacaatgagaaccttgtatgtattcacattaggctcaacttcgttttggtccatttctgctttcagcttcaacaccatatcagtagacttgaattcagtaaacatttgcatcaatatattgtaagtcacagtgttgggcttgcaattcaagtccttcatcctcgcatacattcgatgagcaccattaacatctttgagcctcacaatcaacctaaatattggattaaaagtcgatgcattcggattacaccctttcttaatcatcgaattaagtaccttattagcctcgtccagattctcatctttacaatgacactctataagaaaattatatgtaacggtatcagcagggcactgaagcttcctcatctgattaaacacttgcaaaaccttttcggtacgtccagccttgacatgaacacgcatcaagttattgaaagtaattgagtttggttggcaaccaacgtcgatcatctctgagaaaacatcatgagcacgagtagtttgcccgcatctacacaaaccgtcaatcactatggtgtaagtatacacattaggcttaatccctgctaccttcatctccttgaaaatcctctcggcttcagtaatgttaccagaacgacaccacccatgaatcaaatttgtgtatagaacaacatcaacctcaaacttgtcctttaagctatcgaaaaaggcttgagcttcatttgctcttcttttcttgcacaaattactgatcactacagagaaagcaatcttatcaggcttgcaaccataatcctccatacgattaaaggcgtgcacggcttctgcagcaaatccggccctaacataacgccgcacaaggattgctaaggtctcaacagtgatctccacatttcgagctttcatcaaatcgataatgtaccaagcaatgtcaaactgtctcaccttcccagcaaggtcgatcatctcattgtatggctcgggcgagtgatggaaactgtcaagtgcagtggcccagttgaagaacgccagagcttggaggacagggatgccatggcgaaccccaccacatttctcaaccacacggcgaacaacagcaggtgagatagaatggagggctgatactttggagaaaccgagagaaagatctgggattgtgaagttatggtttggaggagagggattagagtctggactaggatttttttggtggtgacttttgataagaaagtgtaatttttcagtgacaagtgtttcgtctgcggatagattggtgttacaggtagtttggggaatttcattgacatcttcatctgaaagatgagcttctgtagctgaagaaaaagtgaacaggtagacttggcgttggaatggaagagaaagaagctgagttcctgatatacacaaagcatagttaatagcatccaaaacgtatatatatgccagaacaagagtgttttgtaaaacatgaaattgttaaatttgcaataacaacataaaatttacattgtgcactattacaaaccaaccattttggtcgttttatggttttatggtcgcacagtgtaatttttagtcactcggcgaccaaacatggttattttaatttttctgaaaagttttttgactaataaaaaatttcataactattttcacaaaacactcgatgcattcaaagttaaaatatgtttcttccctaaaatcatcatattccaccacaaagtctcaagccacaacagaacacaatcacgttagctataatggaaaacaattcaatgaggaaagacataatcacaatctttcaactctatgatcctctgctcaaatcggaaccacagtacttaataataggggaaaaaagaaattccaggagcctaaatacaggaacacaatcagctcaagtagtaccataccaagcccttcaaggcttcaattaaaagtagcttaaactcaactatttgatcacgaaagaacctaaaccaattctaagtttgagaatagctttctaatccttaacaccacataagttagagtaacataacataaagctaatttataaaaattaacgtaccacgaaaacacttattaaccaaattcatagccattgttctgtgatttgagctactgttctgaatcaaagtgaagaactttaatttctcttgcctgcaaataacaaaacccaaaacccaaaattacgacataacacaatagttgtccattcttacaagaaagagttgtaaataataataataaaaaaaatcttcaaacctgaaatgaaaacaaaaaatttacagaaaattaaggttacttacctggctgtgttatggagagagagagagagagagnnagagagagagagagagagagcggtattaaagtggcgaggggtggtggtagtggttgggttagggcactgcactggcgggagagagagcgagggaggccactgttgtgaagagtggctccaccggtttttctttctccattcttataccttcaattttcttttacacaaagcttatcacgtgacaaacacgtgagatttgttttaggtttatgtttttgcatagtcatcaaaaaaaaaaagaatagaaaaatttaatgttttaaaaggtctaccgatttatttattttggtatttagaagaatattttagtttaattattttatagttgttatattgtaattatttaagatattttataaaatttaaaaatattttgaaaaattttcgaaaataaaatataagagtttcttatgcaacaaactgtttaaattttatttttagagtgttaaattttttcaaatctctcaaaaaaaaaaaattattatatcttaaataactaaaaaaaattcttacaagtcaacaaatattgtgtgcatcgataaatgcaatatagaagtatgccaacaaatattgtgttcattgcttaaaaaatatattatatgtgcattcttttttaagtgattctatttttaagtgcatttaagctagctaatatgattcttctaaaataaatttaatta

SEQ ID NO: 19997 - DNA, 4447 bp, Cannabis sativa
  modified_base (4417)..(4419): a, c, t, g, unknown or other
aatatagtccataagcacgatataacattaaaattacagttttacccttctcaagttaaaataacgaaaaaatacccctagctcgccaacgggatcttaacatgtcatctaacggtataattccatatattaaattataatataatttcacatcaattcacatttaactagttagggtttgctaattcgattccttaattttagagtattacagtattagttaggccacagtcctttagattggcaggagtaaatagatgcttggcagtcctttcaatgtaagaaaggtcgtagaattctccaaggccctgcgagagtcagtgctaagcttgggaatattcttggtcactgcaacaaagaagtaaagcataagcctgcagtaaagagagaaaaataaagcaaaagtaaggaaagtgaatcacgagtttactaatttaaactctgagatgacgccagctggtatgccctctaccatgaaaaatctagaggtcttgatggaaattgtagaaggcatccttaataaacattcgacgtctttagcacttactatcctaaagaaataagtatcagtcattgtggagctatggggattgttgtagaccgaatggaactcttctactaaggggaaatgaccatttgcccatttgaaggcaatggcaaagctcgataaaatgatgtagcagatcggagccaactggagtggagcaatgccaaaataagtcgaaactgcaataagaaatggatgaaggggaagagttgcaccgcacgtaagcagctgatcattaaaggaaactctacaagccgcatgatgagtagctctttccccatcactggcaactaataaacaaaaatgggcattaggtggaatgcagtaagcggccccaatatcatgaagttcataaggtgatagaactggaaacatcagcatgagcaaatgggtccaacaacataggcaagctagggaccaccctcttcttagaaggcatacctacaaacataaggaaatgatggtgagcacgggcttcgaactttcaatttctttcaagaactttgtgagctcgagtcttaatttgagttaatccaacaagggatggagaagaattgaattccatcctacaatcattgggtaagcaaactccagtgaaggaggaagaataggtttctagggaaaggtattctcggtgcaataactcgttctcagtctcagctaacaacatccacctcggggttagtaatttggtcactttgctccctcctaggactgaatatattttagactgaactctttccagatgctccttgtagtttatgatgcatcttaaatggtcgcccctctcaaataacaacctaacatatctctcataaaggtcttcttgaggactttcatagttcaaggaggagatgtaaataaagttggccccaaggggtatttgtccggtattcatggccaactcgaggtggaataacatgacaccttcacctaagaggtataagagggattactaagtttgcttagcgaagaaaatagatagaagggttctatggggcaacatgcaattcgattctgtagtcgtaagaaagacaagactcgcatacataagaaatgagtaaacaattaacaacttcagcagggaaaggaagacttcttttaaggtgctgaaggaaagccaatgagatgcaaagttctgtaagtaggaggtgaaatacctgtaacaaaaaaatatatatataatgatgtgtcaaaacaatcatcctaccaaatgatttatgagattgacaagatctaaggtcactcggcccaagaatgaatgaatgtcactcgaccccaagaacgagtcaaagtcacttggtctcatgatggccaaatgtcactcaaccttgagagtgactaatgtcacttggccccaagagcgacccaaagtcactcagcctcttgaagaccaagtgtcactcgacctcttgaagaccaagtgtcactcaaccttgagagtgactaatctcactcggccttaataatgactaatgtcactcaaccctaagagcgactcaaagtcactcctaaatgtcattcaatcttgagagtgactaatgttattcggcctcaagagcgactcaaagtcactcagcctcttgatgaccaaatatcactcagccttgagagtgactaatctcactcggccttgagagtgactaatgtcactcggcctaaaaagactcaaagttactcagcctcatgatgactaaatgtctcccaacccctagtaaccatggttactcgcaaaagagtgaccaaatgtcactcgggctcatggtgaccaaggtcactcagccaaagagtgaccaaatgtcactcgggccgatggtgaccaaggtcactccacctcatggtgacttaggtcactcggcaaaagaaaagaaaaaagaaattctttttgcccttgaaaaatcaacaaaaaaagagaaaaaggtttagacaaggttcgaacctgggacctcttgccaagaaggattgaccttcaccactagaccaaggaaaaaaatgtgaagtgaagaagagaaagggggagacctcctatatatactaagggcattatcaaagtgcgcatcgagggagaaatttacaaggcatccaaaggacaccctaataactagtcctcaagaacaattaaaagaattctagaagactacgggggtaagtgttaattttagaaattggcacttgtaatttctaaggttagctgaccaaggcatgaagaatgacatgaccaaagtcactcagctcaagagtgactcaatgtcactcatccttgagagtcactaatgtcacctgccccaatagtgactaaaagtcactcgaccccatcatgaacaaatgtcactcggcctcgtcatgaccaaatgtcactcggccttaagagttacaatgtcactcggccataagagtgacaatgtcactcggccttaagagtaacaaatatcactcagccttaagactgacaatgtacctcgaccgtgagagtgacaatgtcactcagccgtgagagtgacaatgtcactcggccttggcattgagaagtcactcagaaaaagcattaagaagtcattcgacaagggaattaacgaatgtcactcggtaatgacttctcaaaaattaattcgacaacctccctagagaagtcactcggcaatgacttcttaagaagtcactgggtaatgacttcttaagaagtcactcgacaatgacttctcaaatagtcactcggtatcctcctttgaaaagtcactcggtagcctccctagagaagtcactcgacaatgacttcttgagaagtcactcggcaatgacttctcaagaagtcacgcataaataacttctttgagaggtcactcagccatgacattacaaatgtcactcggccatgatcttgaaaaacttggaagaattttcccaagccagaggagaatgaaagcgacaaggatacaatcacaaggacatggtaagcatgcgaggagagtacgaccatgcctacaagctctgaaagcaaggaggtactgcacctatagggtctgaggagctgaccaagggtacactgtagccacaacccctgtgacccaggaccatctgacaccagacaagggtatgaagtgtaagaccaccttctacacctacgatttacaccctgaaagtgatagcttgtcccctttgggaccactatgtatctcaagccacttaggcctataaataccccatcctaaaatgtgagaaggggttggaaaattagagttgtaatcttgagcttgaaagcaatagaagaaaaattttctctactctaaaatttcatggtcatttgaggttacattttatcatcatctccttcttatttttgagtttaagtttagattttgattttccagctacaaagttagttgacaagttctcgtcgtcaacacaaactaatatgcctgaaatgtaagtgttatcctgatttttcccacttgacgtggcatgtccacgtggccaagatcaatgccatgtgagagtacaactcgtcaagaagaaggtcaagccatctactcaacactataactaacggggggtcagagtacttagaagggatgatgaaacgacgaacaaccaccccgagggggttggtcgaccactcttggtcagccctatggacaacataggctggctagctttcaagcattatgtggccagccaacttgcacttggcaagtgcatggctggtcagcctttgcctggcaggcctttggtgtgcagccttcatccatggacaataagttaagcagcaaattgggccttgacaaccaacaaaaataggggaaatattaacttccctatttttgagggataattaactcatttaaagtttattattgtaaagcccgcttagtnnntttggaaattagcagttgtttatgatta

SEQ ID NO: 19998 - DNA, 5976 bp, Cannabis sativa
accgttgatgaaaggaggtcaagtgatattgcttaactagtttttcgatagaagtcgacttgttgagaggtgtatatcttgatgcagcaatcatgaccaggtaagaagctcactcactttgtcttgttctaccacttggtgcaatttaacaacggatacgagttgcgctattgtccttcaccttgaggacaagctgaaattcgggcaaccagtaatgttagacccaagaattaattaaaagggtagttaagtcattgtggtgacgatagcttttaagtggaataggatcctataaataaataagtgagtttagaaagtgggtatatgcaatgtattgagtaaaactctttgcatcaaagtagtctaagggctcccatcaattgtacttggttttctcatatattcattacatattttctactgtttggctattattttgctactgtaatactgctactattgttgttgtttgtgctatttgctactggtttgagtgatttagtactcggttcttatcagacgataaacccaaaacaatggaaagatgacaaacatggtcgtccaagctacagttgtatacaatcatcaaaaaataccataacaaaccaacgcaaatataggcaaaatacctcattcatcgttgcctagaatgtggttggagcattggctaaaccaaaaggcattataagaaattcataaagtccatgggtcctaaacactgttttgggcacatcttctggttgaacctgaatttgatgatagctggatttgagttcgagctttgaagaaataattgccccatggaggtcatcctaaagttcgtcaataactggaattagaaacttatctggaattgtcttccagttcaaggcctgatagtccacacaaaaccgccaacttcaatccttcttgcaaaccaacaaaacaggactatagaaaggactcacaaggggtttgatgatccttgccaccaacatccctttaactaactgctgaagtgcatctttctgcactttgtgaatacctataaaatcaaacgcttattagggatgaaccttcacgtaagacaatagctcactgccccgtatgggtggtaactccataggcatctcaaacacacgattgccttcttggagtactctagaaattgcagcaagagcttcctggtcttcttctggttttgcaatctcccccaactcaataatcattgcttgaccctcatgtttaatcagtcgcgtcatggccttaagtgatactcaggtcttgtgcaatgttgggtctccttggaagtgcactgctatgttacccacagtaaacttcattggatgatgggtcttggtgctctggttcctatagcttcgcatcttctacactctccatggaattcttcctcactttcagatgcatcttgtaacaataacacttgtaattctctctttttacatcagtgtctcggtgaatatttctcatcacactcataacacagacctttggcacatttctattggagctttgtctctaaaaaattgacggtaccttgagtcttctttggatgaaattgttcgagggaaataaattttctaggctggatttgcggaagttgcacttagctaacctaagttacaatttgtctctacacgttgggccccaatttttgttttgatcctttgggctaattccatgtcttgctcaagtaatggcccaaggacaataacgtcatgtcttgtttcagtttggagcccacttatgaaagtagactccactccataactggttcgatgattccctctagcaatgaagccaaaagctccaaattttagcgataatctcccacagatccttcttgagttgatgccaagaagtcactaactatacatagatcccgatggaggaagacggaatcgatgtatcatctacccttcaatacagtccacatccaaaaaggtccccaacggttttcctacagaaaccagatcagcgcttcttccacaagactcattacagcaatttctaaacttttagcatcagtcataggatggatagaaaaatatcttagtcttgagaatccaaccattcgggttgtcaccatcgaaagtagagttcaatttgcctacgtctgatgtcccctctggttgataaccgccaaaacaactgttgttgtcttccatctcaatccccttgtacccaggcatcaatcgtggttcttcccccataatcagcgtctttccagtcgccaatagttgctcctgaccatccaacaacaagtgttagtcgacattcctgaagacgcatgaactgttcgggacgactcaccaaggcaggaaccctttttcaatcacaggtagtttctataattcctgacatattgctcgaatactagcaatcaccttttcttccattgtatccattcgaatttccatccaagtcattgctttgatacacaccagtagtgtatctgtcccaactaaggaaattaataggaattatgagggaagttttattaacatagcaaaaaagtaacaaaaactcccaggttattcaagagacttagtacctcccccaagcataagcttaatcacaataattcaagacataattttcccttctctttcctctcctttaatccctcataactatcccaaaacaaattttaaatagaaatagaaaatcactcgaaacaaaaacaaaacaaatgaataatatcataatattatttaattaccagaaactcaaacccaaatcctctcattacttacgagtccttctagcataaataaatcgaattggtggcctatcattacaccagtgggtgggaattcattagaattcttagggaggcataaggtatccccaaatttccccttctatctctatttctttgtatttaataaaatttgagtaccaatatgcacggctgaatagccattttcatatctaagttcctataagaattgaatcaagcgacaacttcataaacaagctcgacccaaatacccaagttcctcgaggcctttaaggatttcagagacactttaaacaccaaccaaattacctccttcttcgggtcattaaactgaatcatacttaacgaaggaaggaactccaatttatgtaaggccttattacttatagtgatgttttcatccatcctttcatgtatttatttcatcaaattgcaagatcgatatttgaaaaacatatatatacaaaaagagttaaaatctcaaacaatttctattcgagtcttgaaataagaaaattagcacataccaatcctccagaagatttagctagtaaccattttgaaagtttcttatgtgatgatttcttgatgtctagggtgatgcccgagggtcgacatggtaatacatggtttgacctaacaaccaaacaaaaatcataatcaattgttggagaactaaggtagctttcgattggcaggaataaaaacataggaataggaatgtgaatgagaataggaatatgaatggaatggaataaaatttaaaatgcatatcaaaattgataaaaaaaattattaaattttttctcatcatgcattagaatgctctttctttccatttcaaaatggaatagtcattccaacaaaatggtggaaaagtcattccaatggaatgaaattccaatactttaatatataaccaaagaaaggaatggaataaaaattgtttcctttccattctgttttattaccttcaaccaaacgccacctaagtgacaaagttagaaaagaataatagattctttgccccctgccatcgtgccattgaattattatcggcgttaaaaatgctccccaactttaaatgttacttttaaagtagtattatgttaacttttatcaaaatcagtttttaagttgctagtgtggcatgtttttccaaaaataaatttttcacctaagcaaagctaaataaaataaataagaatgtttcccctgaactatgaatcgagttgattgattcaacttaagactggtgttttcatgttttgtctacactagaagttaaatttcaggcaggtatcttagcgatttatttggccattcaatctgagtgggtgaatcttgctttcttttcggattgtaggcagccttgagaggcttttgctgcgcagagctggctgctttgtctttgtccttatttgctggtttagactgtttggttgaattatttcttggatttctagagtaaagaattcagttagactgtctaattttctagttgtcctcatctttgggagttaacactctttgttgttaacaagctttgagtttttgttcttggaataaatttttttgtttagcaaaaaaaaaaactgacccttatagagttttgctccctagacgttctttttttttggccaaaaattctctaaactattcaaattgttgcaaatattataaggtctatttagaaatttaagctacccgaaatccagtttaccgtacaaaagaatcttatctttagcccatgtttgctttgaaaagtctttcttttcgtcctcattgctctacatttttcccttatcatttatgaggtatacaaacgagaccgttcaaatattcttcttttctttttttttttaatttcattttaactttttaaatgttttagtttcttattcatttaattccttttattttattattttaaaaaagattctttgatttcaattaatatttttattttttttgacacataatcaatgacatagatgtactgtacacatcagtttgtacagtaaaatgtgtccaccgtgtcatgcctgtttaatgtaaaattaaaaaaaaattgtaacaaaagtcctaataattactattggttaaagttaagtggcatttttaacaacgttaataattcaaggggtataatcgtattagtgacagttcatgaggcaaaatacctatttacttataagaaaatacataacaaaaatgttacataaataactaattgaagactctttaaaacatagaagcctaggatgatgttaatcttaccatagggtgcttcccggcatgggtaagtcttttacggttgtatgcaacgcttgcaaaagacacttgtccaaaagcatgtccatatcctccacggacaaaggatgttggtcctctgcaattgactcatcaccagaaacattatctgttaccttcacattggccaaacttaacattatctcttgttcagctgttttctttacagcatcaggtacagattgatcatcagcagcatcaacagagtctctcacttcttcatcatttattccatcccattgattatgagaagaattggccgtgtcatcatcatatgaatttgatgtctgacacaatgaagatgaggcaggatcctcaaacacaacatcctcaagaaatcctgcattgggcacatagtggccttctactgattccctaccaaaaggtaccatcagaaagtcaatgaaagcaatgaagtaagccagtttttccaatactcattttcaatagatataataggacagaaagacacccaaaatacttgccagagtaaatcacgataatagtgagtaattttcaatgcctttcctcgcaaaccggcttttaatgcttcggtgctgctcattgtggtactcccaaccttgaaataaagtcccaagaagaaaagaaaatcttaatctaagctcagaaaccagtttgaacttaaagcaatatatattcgcacaaacataattaggcttactgcgattggagcagggttgccaggaacttttactgcccatatttcaccagctgaaaaggtcggcaatccttcaggaggaatgctaataccgggaaacatgagatccgccccaccaatcacataacgagacacctcaccccccttcagcaagaaactaggcaacagatttggaaccttccacagggcataaactgccattatttttaatataagatatgaatgtcaaaaaaaaatatat

SEQ ID NO: 19999 - DNA, 1863 bp, Cannabis sativa
taaaaaataccgtctgacagtatttttatagaaaaatagcaaaagttagtataaaatgtaaatttttcaaaaaaaaaaaaaaatatacatgtgagggacatatcaagaaaatgggggtgagaaattagtggcaacttgctggtatgggtggtccattgatgtgttgcatttaatttgggttgtgcaccatccttgattcgtaagtgtcaaatatgtgtgcacacactattcgagagttcacacactcacaaacattaaaatatatgtagagaagaatcacaatatttttctcattttgtgtctaaattacatactacaatattttatttattatactaatatatatcattcttatagtttttgaatttttttgaatcatttataatattaaaaatagatttaatttttttttaaatataaactttaatgttagaaactttattattgatactataaattatttaaaatatttcaaaaatttataaagataatattataattattattattattattattattattagactctttgtattattaaatgacaattcaatttttatttcaactctaaaattaattattggcaacaaactatgtagcccaaataaatgctaacatttattatatagttataataattatagtactgtatagctataataattatattgccataaataataatgaaataatttagattgacaaatgttttggagcatattatatatttatatggagaaaaaaattagaatgctatgtgttaattatgtgttagtgagtttttagaaatcaataaaatataataaagtttaaagaaatatattataggcaaagaataaaattagaatttttatgtgattgtgggtgttaacgagttttagtccacgatttaatattattatgataagtctcgaaagatcttatgatttacacaagtgtttgaaccctagaatttatctgagcactcaaagaatgagattctaattaacagtttgcatgaatgggtttcttatatttattttgcaagagttcttgcccactgataggcaaatacaaataatataatgatatttgtatcgatttgataaggcccagcttgtcaggctttaatcttctactgacgtggaggctacatcatattgatagttgtcaaactgtgtcttacttttgtagataataaagatacattaatttttgattaacaattactttatttccttattcgaaagatacaaatcctaaatataattttggaaataaagccatgatattgtagaattttgtaatgaattattgtgatatggagctagatatatggatgtccattaattactcatctaagagatcagctcgaagtcattcagaaatatgatgtgtcagaggtgtatcttgtctggatgactcgtctgtctaacatccggacggcttgactttgttaataaatttagtccattatctggtttggacttacgattgggcttggagcatctgagtagaaactgtcttggaatgtccttcatccgaaaacatgaatgacactatgtattattaaaattatattttagtatatgttttttattaaaggtaaaattaaataatatatgtaaatttggtacaagttaaaaaaatgagtcataatataccataagctaaatttggcatatcataatttaatgtaagatatttggtggctataaactatttaaatcttaaagtttagtacgctgagctattttcactaaaagtttagaagtttagagcatgtttggtattgttttctgttttttgttttcgaaaaattatttttagaaatgagaacaaaaaataatttttgaagtttttaaaaacaagtcatgtttg

SEQ ID NO: 20000 - DNA, 4356 bp, Cannabis sativa
aacttataattaaaatcataaaaaagtccgataaaactcattaaaattttttttttttttttttaaaaaaatgaatttagcaaatgtaactaaaaaagaacaagaaagggtacagaagctaagaaaatagaacacaattgttccaaagaacctcttcaccagttcgtaacgcctggttagcaatgttatgagcaagagtattatggccgtgaggaatgaagcggatggttgcgctaggaaagtgaaataaagaggaaatgatctgccaaactttatcggaaagagccgagaagttgtgctgcctttggattattttgttaatgagcagttgacagtcggaaacaatcagaccaatggggaacttcaccactaaacaccatgttaaagctcttaagagagcttcggcttctgcaaagattggttctgttcgagagacaaccgaagagtggaaacctactatgatctaaccattgtggtcttgaactacatccccataatcctatttattaatgtgactctgaaaagctgcatcaacactagcttgtacaaactaggggaggttggaaagtgtctttggtgatgtctgtagaggagctgccctatgaagacttgaggtctagaaggactttggattgagcttcattgcattcccacaaataagaattaataaagtgttttatgtcttgaaagtttggcttcttatttgcaaaaatagtcttgttacgattattccatatagcccataagataccaaaaaaagtgtaaagttcttgtttagaaagcttttcaaaacctctcaagagatattctttaatatcacactgtttattgctcttataaaagtcaaaagaacttgtattcttccaaaacttacctggaacactctagaagagaatgagaatttgagtccactttgttagaacagagggtgcagtagggactctagagaaaagattaagattggagggaagaagatgattgaaagcttttcttccagacggatttccaccagcctttgagactgctggggttagaggaagaaggagaggaatgatgagaattagctaagtgatatgatgaattaacggtaaccgtactagaaggatcatgtccccaaatgagacagtccttggaagagggattagttggggtagatagaatggacttaaccatatccttgtcaaaaaaaagttgagtttgtgaaaatctcaattgccattatcttgataaaataagagatagtgttctcaagaggaaaggaatcatctttgtagcaaggatgaccattatcagacaaccaatttgggctaagggtaggaatggatttaccatccccaatcttccaaacaaggccctttaaaggagatttcttccccaaagaagacttctccaagaaacggaaggagaatgaccaaaagaggcttggaggaaatcattatgcttaaaatatttagcctttaagataatggtaagaagggaagtaggattttgaaatatcctccaagcttgtttagccaacatagcttggttatgatgaatgatagacctgaaaccaagacccccaaagaatttagatttgcaaagaatttagatttgcaaaggttgttccaagatttctagtgtatcttagatttattttggccttttgaaccccaccagaagttggccatgagcttttctagttgcttgcaaatcgactgaggaattctgtaacaagacatcacatatgaaggaatagcttggataggagaggacagacatgttacctcttgacggagtaactcaggaggtgtgaagtgattgcatcgcttattggagcacagacaaacaaaaggtacttaataaaatttttaattttagtaatgctttatgttatatagtcaataataaataattaattgtaagaaaatatattaatttcaggcaagagcagcgaaaaataaagaaagtcggggtaagatgaaacttcaaggaggctgggatcaaagcctattgtttcacatgttgtcgctagggtaagtttatataatacattatcatggatttaatatttttttttttataaaattacaataataatacttttttcttaaatataggctaacactgacacaggagaacttccagctgcggtggaaacttttcaaaagtttcaccataaaagcaacaattggcgcaacgaatacgtgtaacaagcttatgtaagtttacctttatattgatttctatctatttctttcaatttattctgtatttaaattaactatttaatttttttttttgttttaagagcaaatggttgaattagctgcaactcaaccagcgtccactgaggatcggcttgatgagactgatgtagatcccacacaatacccccgagacttgcctgttatgacacaagtacgcagggagcgatctcgacatctaaaaggctttggccatctcccgagactgaaggcagttggggccaaaagagcacctgccatgaattcttttgccccaccgacagttactatggaacagtacgaggccttacaaaaaaaatggaggaagcagagcagacaactcagtatacgaggcagcaatatgaaacacaacaactctacctcaaatgattccaagatcagtttcagtatctttctcgggccgtgtcgggtttcaacttacctcccatggatcttctaccattccccactgctcccggtgttgaatcgtcatcgcatcctctagagactcagagaaacaatgacgatgacattactcgtctttagaacattacatattttatataccaattagaactttacatttttttcccaaacatcttttaatattttgttgatttacattacttattaattttcgtacaaaacgtttgttatattagttcgattgggaaaaattttaattatcaatgtaaattatgtttgtgtttttttaagtatgttaatataaaatataatataattttatatttaaaattgattaaattataattattataattaatttattatttttttaaaaaaaaaattattttaccggggcattactgtgcaggttaaactcaactctaaaaggttcgtgccttttcctcacattggtgcaaaaagtttattgccctggtaaaacgtttcgtgccaatgtgaggaaaaggcgcgaaccttttagggttgagtgttatcggcccagtaatgtgccgacaaaaaggtatcaaagctggttcgaagcggattagggtatacgttgatcccgacgtttaatttatgccggtgctatgtcttgccaataaaaccaagttttgccagcatatttcacctatgcaccggtaaaaactcttttaccgacgaagattcgctggcatcttttaccgacgctattatgcgctgacaagcttagccggtgcatttagtttacttttgccgacgactttttgcgccggcaaaagtaccttttcttgtagtgacttaaaaccttgcaacacaaagattgatcctcagtaaggagagcccaacatcatttagcaagaaaggcttgatttatttccaaagttctcctgaatccaagccaaccttgagacttagacaaaactgattccagacctttatatagataccacagttgccttcttcgtagccccaccaaaaatctctaaccatacaattgatttcagttgcaagtttctttgacaacttcgtagtttgcatataatagactggtaaagaaagccccacccattttatcaaagtagcacgactagctttagacaaggatttcaactgtgatcgagccttgacctcagaccggacttgaatctgaaccttgatcctagacccaaacttgtaactggccccagagcccgaatcctagaccccgaccatgatgagagaaaataatgtgagaaaataatgagagagaaagtggtgagggagaaaatggtgggagagaagtgagagagaaaataatgtaaaaaaataatgagagagatagtgatgataaagaaaataatatgagaaaatgatgagacaaataatctaagataaagtaaagaaaagatattgaaaaaaaaagtgattttttaaataaaaaataatattttttgttctcaaaatttgtcttttgcaattttattttttgaaaattattttcaaaatatatggcaaaattgttctaattttttttttttaattataatgataaacatgcaccaaaattcgtgggccaaaaattaaaatgagagagagtcttaaccaacagggctacattacattttaataagggttaattttacaaatgcataaaaacaacaaaaatacggtttcacgaaatttcaaatatttttacgatttttttgat

SEQ ID NO: 20001 - DNA, 7612 bp, Cannabis sativa
  modified_base (39)..(71): a, c, t, g, unknown or other
tgtgtttatttcattattttagataattcatatttaggnnnnnnnnnnnnnnnnnnnnnnnnnnnnnnnnntcctggtaaaatattcccaatagacacctcacactggatgcctttcactagtacactctctcgtatcctatcaagagcctcggtggtgataacaaatgaatgagaaacccaatggtcttcttgtgccctttcatcaagaacttgaggcttagaagcttgtaccaagacatggtctaccctaattactaaaggctgactaatcttgttcaatggctgcttgttaacatcatatgagcctagaaggttgttagagaaaatagttaaagtcttgtacatcctccacctagcaggcatagcctcctccacctcagactcattgtctagactcttagcaccttggttggtcacaagcacctctacctggccaacctctagatctttaccatcaaggggttgcgtggcctcctccacaataccaaccctgcccattgctggtaacctagcaatgtgtaggttagatgatggtgcattatggtacgaccgcttagttctggccatagtgtaccaatgtcagcctagggatcacttggaaagttgctaggggacagaccggatgctagctcacaaatgtaagaccaattagacttatgacaacgtagtttgtcacctccccagaccagcactcgaaatcacttgcatagaagagacaaggggaggtgaataacctaacaaaaccacaaggtacaaacaaaattttggccaatcgtacctaagggtacttgccagataaactacattgtacaaggttaggtattagtgaagtaccgtctcaagtatacttagacaaatggagagtcttaagttgtacatttgactataataaattaaccattatgtctcatacagagttttcaaggaagccacgtatgggattatagttgtatacgcctatatggtcgtcacaagacccttgccgagatcaaaagagaactaaaacttggtcgcttgcttagaaccttggccttagatgactagggttcccaagctgagagagggccggccaggttccatgacccaggcaagggcaagctagggaccctattcccagcattggtcgaccagcttttagggtaccccctatggccagccagctcccatgataaagacccatggccggccaggtcttgaataagacccctatggctagccaggttgtgctttggatccaaacatgtgttttttaagaactcaaacacgttcttcgtgttcttcgtgacttaaagggtcaagaatcacaacgaaagtaaaaattaaatctttttcgttaggaaatcacacattatatatcctaagactatcacgcagatcataataccaaaaagattacaatataacattagaatcagaaaatattcaaagaaaagaaaagcttcatgcaaccatggcaaaatcaactaaaacaagtaaatagcaggattagaaagcttacccactacaagaaacctttggtgaagaagatgggaagcttggatcgttaaaatgacgtgataattttgggagttgaagcaatgtgggcattgacctctagagagaaagagaagctttcaaaagttactgtttctagagagagaatggaatgtgaaaagtgaaggatggtttccctcccataagcttatatagcttctgtgggatccctttcttttacttgccatgcatgtacaactaataagcatacagaagagcaacgcagttaacttattgcacagagtaagatcagacagttaagaacaaacatttcaaaggctaaatatgctacaagattagcctggttaaggttacatcagtcccagctaaactggtaactccctattcacacaaacgtctgcacaaggacttagggagaaaatattatctcaatttttgcccacctgatgtgacatgtctacgtggccaacattagtaccacgtggcaatacaactcatcaacaagaaggctactcaacattctaatcaatgaggggtctgagtattcaagcgggatgatgaagtgatgaaccagccacccctggctggccctaaggccagcataggccagtcagcttttggtgatccaatggttggccaacatccatcctgtaggttcatgtctggccagcctttggcctaacatgattttggtgcgcagctttcacacgtgggcagcaagccagactatgaactgggccttaacagcccgcgaaaaatagagaaaaaatatttatttttgaggagaattttagtcatttttatttggtaaatttcatatgtaaataacaacttattttacctatttctaaagaatttgaagggtgtaagctctcctatataaaaagccttagtcaaaccctcaaacccaaaattctaagtcattaaggctcaaactccaagctctaagtctgataattcatctatttctcacacgcccactgctcttctcttacttgagatttgtcaactctaatttctacattgtaatccttacagagctacttcagatcctatcactatagtgatatgagtagtattatctcaagatatcaatacaaataaaaaggaagtaagtcattacccgctaactaaggggccaaacctctataaagtcaagtgtctatttactttattgttcttgttattaacatatgagaagcatcagtattaaatacgactctgctgtcgattggccaaatctgaggtcaacagtgtatattactaggttatgaaactattaatacagcctagtattttatgtaattaatttcaataaatttaatgcacataaaacatataggacaattcgaaataatcatgtttctaatatgagatacatgattatcaaaagcaaactgagtggaattttatgtatggaaattaaatatgcatgcactaacaattagcaaacaattaatcaaacattaaatgaaatgtgaaccaagtaaatattggatatttctacaataacaacctttgatataaaaaaaaataaactacactaagaataatctctctcgtacaaaattcttctttgttgtttcttgatgtagctttagacacttcacaccattctcctttgaccattagtccacagttaattcaccattgtgtaattagaagcattatttctgattacaaattaattttataaaattaatttcaaccccttatcttgtttcattaattataattaaataattaaatagttggaatttatttgattatttaaaaaataatttctgaaattaattattatatacaatatataacatatagttaggttttaaaaaattttaattaactaactataagacaagataaatgtgcatccaggttagtttaaaataatattctaaaatactttaaaaataagttataacaacctataactagtttttaggaaaaaaaatagttattttaatatataatgatataaatataaataattattctattgattgaaaaaatattaaagatttataataatttttcaaaaaaaatattttaatatatttttaaaaaatatcactaaccattttttttaaaaaagaatatttttatatggtatatataccctttatatataataaaatataatttgaaaaaaatatttctagatatctgtttatttaaaaaaaaaaatgataaatatataccccaaaaataataaaattttattaggaattctttagggttttatgggccaaagctcatttaaaagtttgggaaccctatggcttcagttactacaaaatagtcgaagccataaggtgcaagatgccatttattattttttttttttgtgatgagagaaggctatggttttgcttttgttttttattattgaaaaaatttaaagctaaagcaaattattgtagtagtgctgaactgttaaaattgttgcaagaaactctatgtcgtacattctgctcattttttttaataatttgttgatgtagcactaatatgacattaatctggttcaaagtctaaataagaaaataaatgtacaaatagcaatctaataataaattatgagaaaatatatatgcatctttagaactaatatttatatttttaatatgaataaactagattttatgtaatttaaaattattatactgactcttatattacagctatatttataattcatgttcatataagtaaattattttaaaaagtgaataatataactaaataaaaatattggcaacaaaataaaaattaacaaaacaaatatctacaaaaatcgtagttcaatagaaaaaaaattctctctctatatatatatacactagtggagagacacatacaaggtatgtgtatcccatttgaataaattttgaacataaaaaatagtgcataataagtaataaacttttatgtattgctattttttttaattatttcaaaaaaaaaaattacagttgtacggaatttgaaataattttacagttttaaagattttatttacataaagtctagttttttgatgtatttttatgctatactattgttattttgttgttgattttttgttatttatatattattttttatgttgtttcgatgttgtttggatattattttcctattattttcatgtgtgtgtttttttattatttttataaacaccgtataaatgttaaaaaaatttgttttcttttagaaaagatttgttatataaatcaaagagagtcgtttacaacaatagaaaaaatagccgagggtaattcctcaagccaaatacaatcattatcctgcactaaagcatgtttcgataatccatgagcagcatgattagcatctcgtctaacatgacgaacacaagctaaggggagattggataaatgataatgaacatccgcaaccaaatcgtgaaaataagacttaatgggtattggattgttaatagcattagcaagaagtagagaatctatttcaataaaatccaatattgtagattcagactcctagcaaaaagtagaccatggaacatggccttagcttccatttcttgaggctgatagcaaccatgcactaactttgacattgcagccttgacacacccagaggaattccgaataattacatcttaataatatatatacatatattttgtaaatttatttacgtaaaattaataattttattccaaattgtaatacatgtataaatattatatttactcaaaaataatcctattatgatatagtactattaatgattgtttatttttattattgttacattaatattttttggtattttaattttctttttttagtgtaactctatttagttttaatctttctcaattagaatataatttgtttggtcctaagagtatttttagataaaaattcaactgtataaaaaattaatttgtaaaatatgaagaaaagaaaactatagatctatacttttgtaatttgttttgttatttttggatttttaggaaaatatccattttaatttcaaaacagggaggggattgtatctttccataggagtcgtgtgaaatactccaactagtaatatttctattttaattacctatcatattgaacataattaaaaagttaattgtataggatttgaaaattatattttctaaaaaagtgaattgaaacaaaaaattgaattagtttgtgaaaacttatgaatttatttttaaaaaatgtgattggcatgtaatgttctttttgtttttgttgaatggtgtaatgttatttattgtttttgaatttaataataaaataaatttgtaattttaaaatgaaaaaataagagaatatttagagagtttttgaaataatgatttgaaaacaaatagaggatacataaaaattatgttttttttttagcttaaaatttagaatttgatttggatatagtttttgaaaatagtttaagtggccccaactcttttaaattttgaaaatgataaaacagttttcaaatcctatgccaacaaataagctaaatatattggtgcaaggcaatctcaaaactactgataatttgtggagtaaatgacgcatcttactaaagtttccacacataacactttctcatagagagaaatatatagcataaaaaaaaatcatatttttatgagcattactattagtcaatactattaggcactacaaccaagtgatagcttgtaaatatttaacgatattttataatatttattgttgtcaaaggaaaataagtaataccaaaaattgcaagtattcgagattaacaagaacactaatttacagaactgtaagtatttacctagagcgacaaatactcaaaacaaaataacgagtactatgaaaacaacgtatatgtaaagagacacaaaattatagtggtttagttagagtatggtgatctgcttagtctacttttgtaagagtttgtaattactcttattctgactgaatcactcctttatatagaaagcaagtgattcattggattatataattagtcagacaagaccgttacaatattaattatacttaatttataaaaaaaaagttttaaataataaatgagagaacaatttcgattgttcttagttaatatttgaatgcatgcgactttggaggctatacattggcttgcgagctctctggtgttactcgcatataaggtccgtctttggaccacttaatacctctcagggtgacttataagctaaaaacgcctgcgactacatatgggtcatgtattgagcatgtattgagcgttcatgtattgacaatataaaattcgcaggttcaagatgaattgtcgcacacattaattattcggatcaaacacttgtaaagatgtgacctttacgtgggacgtaaggaagaaacatttagttcttgtatgtaattgatatatatgcgatttatggtaatttctcttagtcctgcttttattttattatattgggcatagtgtatgattagactttgtttcagtcacactctctcgcaaattttaattatgtgataatagctctattgaaactgttattgacacattattattttttaactggaaactaagtccacatgctaaatatatacgagactatacttatatttttgagtaaaaaattcctactataatatttatatatatatgatctgatatttaattattgtttaataagtgttgttgatacatagtaattagacaacattggtttttcttttttttagcatttttatatttgcattggtgtttcacaatatccaccggcatttgtagataatagaaggaatctgacattctctggcccgtctcccaattttttcagttctagaagcacaacaaaatatatggttggaacttccaactgcccataaatgcatattttgatgttattggtgtctagcaactcttcgatgttattttgttatttgtgtagttaattattgtattttatataacttaagaaaataaaaaatgatatatagggcacttacggtacctagcacctttgtaaaggggtaattgttggattaaaaattctaagtggacacatatgtataatgtatatgctattataaagt

SEQ ID NO: 20002 - DNA, 1163 bp, Cannabis sativa
tttccttcccatttcatcattgaagccataaacattggttaactaaaaattcagattgtttgtaacagtacacacacctaaatgtattattctacttgaacatcttagaatacttacataaaattgaagatgattccatgcaactgttatccttcctactttatgccatgctatatttgttgttacaaaccatccttgaaacatttgctggtataaagctcccaatttagaagccttaacccttgtctcgaggagacaaaccaaaccaacctgatgatgagtaatgaattgcttcacctctttttgtttttgttggttgttgatctctcaaacattccaacttaagatcctatccatttggagtaggagaacctcccccttcctgtgttgctctgtttttctggcactatctcttgttatccgttattcaggtcatgcactgacagaacctgaaattgattctccacttctgtgttgcttattcgttccttttctttaattttgctccctttcacaattggttggaactctccttcctttacttcaacttgtttcgtgtgtacctgaccttcctattgtctttttttaactatccattcaggcttatttccttctttccttctacattcagtagtctcatgcctcacccccttgaaatgttcacatagaattggcttccactcatagttgatggagactgagacaatagcatcaaattcatcctcaatttctataaggtcagggaaacgcctgtagattgaaacctcaataagaactcttggataattaagtttgtctctttctcttgtaacattatcaaccatcaatggctccccaacttggcctataattttgtataaggaattttgaccttaatactccaattccagatctgttaattgcacccgcactggcacagattgaatatcttcttttttgaatttgatattgggatcctaaggtttcatgataacaggtctcttattgaagaatgtaaatccctcattcaacacctcattcctttcttcaatactatgaaattgaataaggaaaattccataggataacatacctactttgtcaattttgtccttccaaattctttgtgcaaatccatcaagagcagatagaggaggattagctccttatacatagcatactaa

SEQ ID NO: 20003 - DNA, 8547 bp, Cannabis sativa
  modified_base (580)..(583): a, c, t, g, unknown or other
aattctggtgttgaatctttgattttgttctttttatattcaagcttaaatcaagataaaatcaatctaaatatgaaaaagataggttagacaagaacttagagtttacatatcttaattattatttttgtgcactaaattcatattattatcgtctttaaaactcaaagttacatatttataaaaaatacaacaaatttgtataaaatttaagaaataaaaagtaattgtataaaatttaagaaataaaaagtaattcatctaataattaatgaagaatgaatgtacaaaggtacacttatcacaattttatataaatatatatatttttattgaaaatgcaattttatatattttcaacatatagaattataaatatacacggaagaatcgtaaacattatccctacacgaagatatacaaaagctaatagggctgaaggtgatatgcacatggctccccataataaattaatgacagaaacaacatcatccaaaccttatttgaaacttgattcaatttaaaatactctccttgttgtcgcataccacttgatgaggaaatatatatatatatatannnntatatatatatatataaatagacctattattattaatataatatatatatatatatataaacagacctattattgttgaatatatatttatagatactttcggccaatttatggatctgataatgatattggatatatttagtcttatggatctctctctcacacacattttctcacgttacctatgtcgataatgtttggatctctgataaagttctttgcatagaaaacgttaagcaaacgccaacagtctgcatagatagatgcttgcaaaaattgagttattatatatatgatttccttagtacaattctttttaacagcaaaaacggttctgtccagctgaaataaaataattatttcagagttcagagttgagagtacttgagattcgttttggacaattacgaacaattgcttataaaaggcacaaaagaaagactccttttaaattcttaactttcattgaagctgccatgtgccttttcaagttcgtacatgctagtcttttaaaatcttcaaatttcaaaataggagattttgttattatattaattaaagtaaaagtttcgtaaatagttggtctttgaaaagataaggttttaagaacacttacatcatatactttaaaatagaaattctccaaaatatttaaaagaagtaaaccaaaaacatattacatcacataacttctttattttaaaacttatttaaaatttattatttatactctttatttataaaataatatttagtgattctacaatttacttcttaaaaggaatgtactggtccaccctctacttgtttcggcatcttgaaaattttttgtctatttttttttttcatattcatgtacgttataattatttaagatatcctacaaaattttgagaaatttagaataatttacaatatacaaaaataatgttcaaacagtctattttacacgcgtataatataaaatagtcattcgtgtaacacactgtttgaatgcaatttttggcgtgttaaacttttcccaatgtcttaaaattttggaagatatcttaaataattataatttatatgaccataagaaaaaatttgactaaaaaattatttcggatactaaaatagataaagatatatcggtacatccgttttaagatatgcatggtagaattttccaataatatttattattataaatatatttattttatcaattattttaatttttatttttgtataagaatatattttgtttgacgaaacttttacttttgtttttgtttatagttaaaagtatgataaatataaattttgtcttagatttaatgtttgaataattactatattaagtcttttattaatgaaaattatttttcaaactgtttaaatattattgaaaaaaattcttttataagtaaattaagaattatgtaaattattttaattttaaaaatagtttcgtctttttttaaaaaaaaaaattacaactcctaacttcttataaaatgatttttaaattaaaaaaaaaaaacttttttattttttgttcaaacacctttaaaatgacttttataaatctaaaagtaaaaaaagagcttatagaaataaaatgaaagaggatcatgtgtaaatataaaattaaatttgaataaataaaattttagtgatatatttaagaggaatgctaaaaaaataccagtggttcctagcacccttatatgtattaatatcttaattgagactcatatagtttaatataataacttttagaaagtatcgctaattaaatgtatggcgacatatctataagtactaggaactactgttgcccacaacaatgcaacgagtagaaataaaaataagagtagaaataggcacccttgtttcaaaaaaaaaaagaaagaaagaaagaaataggcacccttttgttgtttgatgacaataatgatgacgatgagggcgacaagctgggagcaaaactttgaaactcataattgcaattcagaacactataatggaaattcatgcaggtaaccccaccatacaaacccctcatgtggaaagttaaagaaacagaaaataaaataaaggcccctaaaaaccaaaataagccttcaaatctcatattccattgattcttttttacagtgtatgtacaagttacagttgggatcatcatcatcatcatggaaacttcaaacatactctttttcactcttttttttttctttttttttttcagttcattccctcacatttctcaaccaccaatgagcttgtgctgaccggggtgacattttccaaagtacttaaaattagttgaagaagaaaaggaaaaaaaaatatacattttgaaacaaaagctagcctctttgtcttagacatttgtatcacaaaatttcccgtccatgcgattttggacagctttgactgcagcaactcttgcagctgtggcagctctatttgcggccatcactgacttgttcacttgttcatccaccttgcgaaggttaatggcattctctgctgtcttccttgcagcctgaggttttcacatgcaaagaaaacgacaagaataagaggtcacaaaacgacacccaattatgctcaaacgacagagtcattttattttatatacctgaactgctctaagaactgcatcagttagtgggggtaacgattgcttaagcgtaccagcatcccattcaccacatctggtatcgccattcctgaaactatacataccaaagccttgttttcgaccttcatgccaagacccttcataacaatggccgttggcaaagtgatagaccccaaatccatgaattttgtccccaaaatattctcctgcatatctatctccatttctgaaacaaaaaaggaaaacaattatgaacttcccattccttctccatacatagattgtaatacaagggaaatgtctcacttggatgatcaaaaagagatacagaactgatatttgagctaaaatggaagattatgaacaattaaacaaaccggtttaaccattaatccataagaaagatagtttacaaaccaaggaaaaaaaaaaggtgtactcgtctttcaactattcaagaatcaaaaacattaggggggcttaaaaatttaaattttgattactttgtagtacataaaaaaaagggcatggtataataggcttttaaaaggaaaaataaattaaaataaatgtgagtacacacactcagattcctacttctagatccaacagtagaaaataacatcgtataatatgaatttaatgctgttctatactcaaatgaggaatcaaattcaaattttggtgaagccaagtgccaagactacaaagctaaagcaacagtgaccccaaaactcaaatgaaaagaagaaaagaattaaagaaatagaaatagaattgggaaagttggaaattgtatgaaagatataaaattgacctgaagtggtaacagccaaggccgtgtttgacaccacacttgaactccccaatgaaacagctaccatcggcacacgtttgaactccaacgccatggctctgcccactacaccactcaccggcgaaagagtcccccgtatagaatctataaactccatacccatgcctgtgaccttgcctatactgacccttgtaccgactccctctggcccagttctcaatcccatacccatcgtacctcccatcgatccaatcgccctcgtatcttcctttaacaaagaaattgtaaaccccactcccattactccttcccttatggaactcaccttcgtaaaaatcgccattactgtaaaactcgaccccttctcgaataatccgcctctcttttggcgccttattggcgttagaatcgccgataaaccactggaccggagtcgtccccgcattgttcttggagaatccgagccgcttcgcattttcctcaaacgagtgcttaataatcgaaaagctatggtgaatcaagctcttgttcttgcttgccaagaaaagcgtcaaggcaacgaaaataagagcaaggagaagattctccgaggtggatatctcttcccgtcggagatagaagaagaaaaagaaaaataaggtcaagaggaatagcgccgccatggcgagaaaatgttgggtgagccggccaggcccagttcgtggggacgaaccagaccggaccggtttcttgggcttctcctcctcctcatccatggcagcgatgacgtcctcctcggcgaccgatgagagactatgaatggacgatcggatcgtcggagatgaacggaggagcgaagattgggttcttgtgagcttagactgactcatctggccgtccattactgataacagtagtaaaatctccttcgtccgattatctcactttgatttctttctctactttttttcccttttagttaagcccttctgtaacgagatattcttatcactagcgtcgtcgctctaagctcctcaggcaacatctcaggcggcgcaagataagcagtgtctcccccgcgcacgttagcacgacttaaactcacaacaagtaaaaattaaaaaaaaaacaaaagaaaaaagctcaaaatgcggggagttttgtaagaggagaaatggacacaagaaagagagactgaaatctgtgagagaaagtggcccgggttcaattactatatttatcgtgaaattagagaaaggcggagattcaatcaacgccgtccgtttagaatgtgagggagggattcaaataagttttccccaccgtctgatagcacaaggagagaatatggccgttagatctagaatccgcaccttttcactttactgttcagagcggcacgtgccatgatcatctgtctaattttctttttagataaataaattggttgtgtatgatggtggtagtaagtggtaacttggtgaggtcttaggtaggatcaagggtcccatcaccgtccgtttgggtcgaacagacggtagtcaaaggtcgttctcaccctaatggggcccaccaccaaatcctatgaaaggcaaacaccaaactatacgccttttaactactaattagcaaattgttctgtacgtccactccactaaaccgtataatgtctcttgattttttttttttattttttttttgttaatgttttacttttctgtacagtcttttttttttctttttaaatatctattttctattttgggagatcttgaatcaagaaaaagtttcttctaggggtgttcacggattggtttggttcggattttcataatttttgaatcaaaccagtataacggttttttgaatattagaaaccaaacagaccaataaatttctcaaaccgaaccaaaccaaaccattaaaaacagtttggtttggttcgaaactacagtttaagtggaatttataattattcttatttttttttaagtaattatactatttttactaagtttttaattttatttttcaaaatatatattgaacatgataagtaaaaagtcgataacatataaataacgatataaaggcgttctcaaatgtcaaacttaacataaaaattcaaaattcatgcaataaaaaagttgacacacaaaaaatttcaaaattatacatatagtcatacctaaaatatataaaaattaattatttattataaacggtccggtccggtttaaccgttaactatttattccgaatcgcaaccgaaccattacaccgtaaacggtccggattgaccaaaccaccaaaaacggtttctccggttatggtttacagtggttcggattgtcgtggtccgaatttaaaccgcaattttccgatttatatgaacagccctcgtttcttcagtaacatttaaatttatttaaataaacccttttatctaaataaatagatagatgctttagcaagtatatgaaagagtagatacccttatttaagagtgagggtcttaatggttcagctttgtctgcccttcacatttgctctgtcgcagttaattccccctcttttcttttaactattctttgttgttaacttcctccttgcttactgttttttgcctttttttcaaatttaaactgctcctccctccttcttcctccctgctcctcccttcatcttcttctcctctggcttttttttgcctaattttatggataattccattcctagtatctctaatgctctttctataagggaaagagaagtcataaatatcacaaatattaatattacaccaccttgtcctgttgtgaacaagattttttgcagaatttattcaaaaaaaggtttcaatccaaaaagttttaagaacttcatcactactcaatagattggtaggtttgctgtcattatctctaactatgatgctgatactgattctttcactataacttttggatgtgaaggggatttaagacgtgtgctttccaaagaaccatgacactttcataatcaacatatgattctttgtctcccaagtgttctacaaaatgatccaatcgattcttataccattacaccattttggattcaagtttaccgtctcccgtttcttagcaaatcggaggctcttgctaagtgtcttggtaatctaattggtactttcattgaagttcatgaaaattctcttaacgaaggatggggtccttttcttcgaatgagagttgatattgatgtttctaagcctcttctccgtggtcagttagttacctttccttggatggaagatgaaatgtgacttgactatagatatgagcggttacctgatttctgctatgaatctggcatcattggacatgtctttgataaatgccctctgtttttggaaaattttgatgaagggatcgagcctaaactcccttatggtccttggattgaagattcttcactgcctagatccaactatgatcgttataggcaagagttttccaaagcaggcccttggccgttcatcactagactcgatcgtaagtctattgctccaataatcccgcacacaaatcaatttcctgcatcaccttcacagataaccaattcagagaaaggcaaagaagttttggagattattaataataagaatttcgctaacaagcttggttcctcaatgcaacattattatcaaactggatcttcttctaccagttcacactttgataaacacctcaccattggttcccccacaacaaaatcaattgccattccttcggcccagcctgtgttaccatctgttctagcgactgattcaaagcaggttgcttttcctaccaacaaaacaatgattgatcctccaatatcgaccctacctgctactgctcctgtcaagcattctgttgctttgcccattgctacacctcttgcttatgtccacatgccccataatgacactttcagtgatggaatgtctgctgctacaacagtctcttccgttgcttatggtgtggatatttttggacaatcttctacaccttttggcagcacaaccaatattcaaaacactagtgatattggtaatgaaaatagaatgccttctcttttttccaaaaggcaattagttacaacaggaggaaatgtctgaaatgtgctcaagagatgttgaaccaaagcctctcctttatctaatttcaccaacaacttgctgcatcaacttcccggtccatcttctgaaagtgctgaacattcacgaatggctgatacaagtgctgctcctttggcgaagactgatgttcagcctcgccagtcaccatgaatattattagttggaatgctcggggcttgagcaacccaagaacattccatcaacttcgtttgctccgttcacataataataccaatgtaatttttattatggaatcttagcttactataggatctgtaacaccctactagtttaggtgtgctacaatgcttttaaaaattactgtgcaacctttgctaatcaaagggtttatcaaaagtgataaaatt

SEQ ID NO: 20004 - DNA, 3372 bp, Cannabis sativa
  modified_base (27)..(46): a, c, t, g, unknown or other
  modified_base (256)..(279): a, c, t, g, unknown or other
  modified_base (321)..(338): a, c, t, g, unknown or other
ccaacgtatactccatacatccgatannnnnnnnnnnnnnnnnnnncctagaaaggacataacacttatctatggtgtaagtatacatgtagctgattatcatgccaatctaaatccagtgaactgacacatcagggaattaaacttttgaacatacaaatatgattatattccactgtgctgacaatactacaatcatgtacaaatacatatgttctggacctaatagaatttatacatataatcatgaaataannnnnnnnnnnnnnnnnnnnnnnnatgttatttatgatctttattaattaataaatctaattatannnnnnnnnnnnnnnnnnagggcacaaaacccaacaataaatactttggggataacggtaagatatgccttaggttcctaaaaattttagagtttctcaagaaaaattagattatcaatttttcatctacctttatgattggcattgctagcacatatgatatctatatgttgtatactaagaatgataaagttatttacaacaagaatcatagaattggaaaaaatacttgaagaaacgataaggttgaggaaaccacctgagaactagaatctgacttgagggctcaatgtttggagttattcaaatttgatttcgaggacaaaatccttttaatggagggataattttaatgagcacattgttaaatcatgggaattagcatataattaaggatttaattgttatttaatgattatatgtctcttagtaaaaattagggcttattgctagaaataggccttaggaaaatattttctcaactacggggatatatttgaactctagatgcattatatatgttatatatgaaatttgataatttttatgttttgtgcccagtaacattagaatgcaatgatttggccagggattaaccggagttatggttttaaactattttacccctagaaggtgaggttgcttcctagtaaagctaagggtagaattgtcttttggctttatttagtaatggagaataaatgatctttctagtaattatccttaagtttaattacattaaaattaagctggatagaaaaaattaagtatcatccaaactcatcacatactcttctccctttctctgtaattcagaccaagcaagggcaattcaaattagatttttgtggttaaagggttgagaagattaaactggtgggtcgaccaacacctcgtcatgggtacctgataatgatctctctcaataagtagtagtctggtctgtctccatctagctttcgaacaatgccttcccgcaggaaagtgttctctccacaaaggtcgaactgcctatgtatgacaactcagctttagggttgcgcagacaaaactcgtaagtaagtttggaggaaaagtcaaggtaatattcgttaatggcctcctggccatcaagagcctcacgtaacttctccttatgttcctcaagatcaatttgcaacccagagatgagagcagcttggttggtgttctcagtgttcctagcactcagcataatctctaatccaaagaccattctctgctagaaggacctatggttcagaattggctttatctttcgcagcatgggatgcctccaagaccttcacacgctcgtaaaaagtgtttgaagaccctctagagtcatcgcgagcgaaactcagcttcattaggtcctaaaaacaaagcaaaacaacgtcagtatcaaactgtcaattctggctgcccagtcccctctttagactgccatggctggcaagacccttgtatggaagcccaaggccggccaggcacttgcaagcaacaccatggctggccaacttatatagtgttaagatgatggataaaggtgaaactcaccacagaaaggtcccgaagttcggcactatacaacctgtcaggcacactgtcttccaactcctataacgcctcatccaagaaagggatagccctctctatatgtcgagtggctaactcagcagcctccctaccagcagctaaccgcactcctctgctaggccttcttgtaccctggtcggcaggttgaaccataggctacccggtaggtgtaggcccaatgagaggtcctggccaccttggccctcactcacccagtaggctcatttgaaggcccacctgcgagacctctcagcctgagacatgcctaccaaaagaaagtagcaaagtcaatatgcattcaaaaatattcaatacaataataaaagcatggtgctataaactatcaaataccataatcatcagaagaagagctattagagctcacaactatagctttgcctttacccctaaatgaaggcgcagggcgtataggtcgataagaagctgggcctctaggcctgatatgaagagaggcgtcaccaacttgacccccacgggccaggcgcctatggagagccctctctctcctctccaaattctgtacaatacgagacaaaggtgcttcttcatcatccaagtcagggccttgctcctctctaaggcaagccacaccagcaactgacattctcgcaaccctaggagtaggggatacaagccatgcatccagaagttgtccacactggtcaaccaaataatatttctctgttcagccgacaaagaaaggatgtgattcgctctatctcttaattccaaagtaggtatggaacatccaaagagcgacaccaactaaaactcatagtgcacatttctacaaaggtgttgtgccataaagtatttttttgcatacttgccaacttttgacatggccttacagttggtgtcgcccaaccattggtgaccaagctggatgaagtaaaaataaccagtcttgctctacttcggaccaaacttcaactcaaaagggtatccaatctcgtaaggggtatgcggaggccaaccaagctacctatacaagacaaacatcgccgacagatatttaatgctctttggcatgagctatgtcgggcacatctcaaagtaggctgcgacatccagaaagtattgatgaagtggcaacactgatccatgttctatgtggcaccccagccatgccaaccagccagaacggggcttgtgcgctctacaattattttgaggaatctcgcaatggacaccccctactaggccactagccatgactttatcaaaggcctcattagagagagcaaaagctggggaaacccaccttctgttaggtggttttgaatctaatatctctggcataggagactgttctaggacatgacctagtcctagtactgaaggtgtgccaagcccattcagcggattgcatcgggcatcataatattgttgggttttatgccctaaataaaactcatctcaatataatcagatt

SEQ ID NO: 20005 - DNA, 3287 bp, Cannabis sativa
  modified_base (2425)..(2425): a, c, t, g, unknown or other
  modified_base (2826)..(2832): a, c, t, g, unknown or other
attttgaataaaaatcttgattttgatataaaattaatttttttttattataaaactttcaaaatttatgttttattagcagtttgtcactttcatctacttttggatgttaattgctaaggtggactaccatgtacgtactcactgtgttgtctacaatgacataatgtacacatgactcaattttattgttccacatcaaataatagttaaaaataaattaaataatgaaccctccttacaaaataaaattataataaaccctaatttcactaaccctaaatctaaatcatcatatcttcaacctctcccttttgctacctccctttgtacctttcctgaaacaaaaaactataaccccattgtgttgtacgtagctttgtcgaaccctaagaaaaaataacctagggtcactagacggtacctaaggaaaaccaagatctctggagcttgaagccgcgtttcttcactcacgagctcacgactaactctaattgagctttttcacccacaagatagtgcataagaggcgttatcgaactggggatgtctctgaatcccaagccctgtgttggctaatcgaagttttcttctccatggtcaagcaatttttaagtggctctctgatcccattaacccagatctcttgtgacaatccctctctctcccctctatctcgttccttttcctctatttcagtcccgaccccccttctttttctctctttcagtcatcaaggttcattccgctgagtagaagaaggcatcccacatcaagctcagacaagaaatggtggcagggtagagagaatttcagagagagaagagcgtgagcatgaaggaaattagggtttctgggttttttcatcaaaatatatatatttatatatatatatactgtttctattttttttttcttttcatttctttacttaggaaattactgtttgaaaaagaaagaaagaagaaggaaaaaagaaaaagaaattatatttatttttttatttaaatttattttttaaaatatttatttacacgagccatttaaattgtgccatgtgtacaagaagaaggaaaaaagaaaaaacaaaaaagaaattgtttttatttttttatttaaatttatttttaaaatatttatttatgtgggtcaattaaattgtgacatgtatacacagtgtctatgtgtacataatgtatacacatggacaatccaccttcgcaattaacaaccaaaagtagatgaaagtggcaaactactaatagaacatgggttttgggggttttattgtcaaaaataagaattaggagttaattgctagcgaggtgatacttttgagggttttaccgcaattcactcataaattaatatatttctaaaattaagtatataaatttctatgtttgtagcacttaagtacctatttttttttttattatttaagtttatttataatttgagtacttgcgctgcatacttaagtagtgatgcaaacataataacttagatatatacttttgtcgacaaccaaaataacttttgatttttttatatgtattattatttttgtataaatgagtaagatttcattgctcaataactttgaatacaaacaccaattatatctctgaacaaatcttagtaaaccgatcatagcttactttactagttttctcattcttaaaaagagaaaacctccaactaatttctattttaatgctatttaactgaattgtatacattatttttgttttaagaacctatacaataaattaatggagagaaacaagtgatgtcttatgatataggttcctctataattcgtccttcttcccctatttttgccttacttttctcctttgttttattctattttgattcttatggcttcctcaagtcacatgcttcatgagatcaacaatcaatgtgctaatctgtgcctcgatgaagaagaagaggatgttattaattacctacatttcctggcagcactactgaaggagtggacacgaggtggtgtttaataaataatttcatccaagatcaccaaatggattttgatactattcaacaccagttggcttctctgtggaaacctggaatgggtatcttttgtacggagttgggattgaatcgatacctctttcaattctatcgtgatttagatattaacagagtaatagatggtagcccctggatgtgccttcgtaaacttatcattattgatagactaaaggccggtgatgatcccgttctatcccactaacaaaactcaatatttggattcaaatatttgatatgcaaccgagtttcatgtaaaagcacgtggttagagatgttgcaaatagaattggcgcttatatagaatccgatctaaataatttcacgggagattgtacagtttactctctctctctctctctcnctctctctctctctctcttaatgtaattcctccacttctcaataaaatcaatgcagttcattcaacttgttcttgctgattttgtcccttgtttttactggtttattattgtagcattctgctgccattgatgttcatgtgttctgctctttcagcactatatgattgatcataacaagtggtattagagcaaggtttttgctcgatagagattcgaatttgaaggctccaggaatcatcaagaagatggctgcagcaagatttgacattgacaaagttcaatggaactaatgacttctggttatggaggatcaagatgaaggcattgcttgtctacaatggaatttcagtagcaattgatgaagagagtctcaaggaaattgaagatgagaagaagaagnnnnnnnagaagaagaagaagaagaggaatgagattaataccaaggcacatagtgccattcttttcagattaggtgatgaagttctaagagaggtgtctagtgaagacaaggctttaggtttatagaacaaattaagttccatatacatgaagaagtctctggccaataagctttatttgaagaagagaatgtacactctcagaattgatgaagggaaagatttgaggaatcacttagatgaatttaacaagatcactctcgatcttagcaacattggagtgaaataagaggaagaggatctggccattatattgttgagttcttttccaagatcctacgagcacttttttaatacaatgctctatggaaaagaaactcttacaatgtctgaagttaaggctgctttgaattctatggaaattcagaagaaaacagaggacaatcaaggtgacaatggagaa

SEQ ID NO: 20006 - DNA, 4708 bp, Cannabis sativa
cttgctattttcccccttaaattgtagaacaaaactgatttcctccttagttcccagctaaacagaagtaagagagagagagagagagagctaaaaaagcaatgggctttgctgccgcaatttttatcggcgtggccgcaattttactcccggcggcggtggttctgtgtgagtttccggcgagtttgaagcttgagagagcttttccttctaaccatggaatccaactgagtcaactcgttgcccgagatagactcagacatggaaggatgttgcagtctttggatggtgttgttgattttctagttgaagggactttcgatccctttgttgttgggtactttatttatttatttattatatcatcaatttcatgcaatttttcacttcgggttttcattttttcttgtttttatttcaaagtttgtaactttatatgtatttagcttggaattttcaatgatgggttttcatttaattttgaattggattttcttcatttgattactcatttgaagttttttctctttggtttttagtgctatagttgtctttggatatttcttaatagacaaaacatgttcaagctagctgtttcattttaaggattagtttatcataatttggcaacaaaaacaacagttaaaaaaagtactaataaatgtgattcatgtcctttctttgtcttgatttgggtttatgagattctgttctttgtttacttgttgactatatgattcttattccttttcattttttttttttataggttgtattatacaaaacttcaattgggttctccaccaaaagatttctatgtccaaattgatacagggagtgatgttttgtgggttagttgtggttcctgcaatggctgccctcagactagtggtctccaagtactacttctcaatcactcactcttatttgtattataaattcactatcttatgtttttttccatatcattgaggcttgagttggtccaaaagtacttctgattggttgagtaaccagtgagtttcgactttagtagctttctgaagtagagctttgggcctttgtgaaaagagttatgaagcttttcaaaccttatatgtactgtcttatgtcttttccatatcattgaggcccgagtttgtccaaaactacttctgatgctggttgggtaactaaggagtttcaactttagtagttttcttagaaccctttgtgaaatcaattgtgaagcttttcaaatcttatatgtattacattcattgtcttatgttttttccatatcatttaggccctaaagtacttctgatgttggttgagtaaccagtgagtttcgattttagtagctttttgaggaaaagcttcaggcctttgtgaaaacagttatgaagcttttcaaaccttatatgtattgtcttatgttttttccataccattgaggtccaggttggtccaaaagtaattctgatgctgagtttcaactttagtagttttctcaggaagagcttcgggcctttgtgaaaacaattgtgaagcttttcaaatcttatatgaattatatcctttgtattatgttttttttccatatcattgaggcccgagtaagtccaacagtacttttgatgttggttgggtaatcagtgagtttcaactttagtagggaagagcttcgagcctttgtggaaacaattgtgaagtttttcaaatctcgattcgagttttttatttttcctttttctatttacagattccactcaacttctttgatcccgggagctcatcaacatcatccttagtctcttgttcggataaaagatgtagtcttggaatccaatcatcagactctgcttgttcttctcagacaaaccagtgttcatacacattccaatatggagatggtagtggaacctcaggctactatgtttctgatttgttgcactttgacatggttgttggagcttccatgattcaaaatgcttctgctcctattcttttcgggtaagctagcaaaagtttgcttcatttcacctttttcacttggaccccgtggaagtcattggctattcttgatgtgaaaacaaacaggtgtagtaccttgcaaactggagacttgacaaagtcagatagagctgttgatgggattttcgggtttggacaacaaggaatgtctgttatctctcaactgtcttcacaaggaatagcaccaaaagtgttctctcattgcttgaagggtgatgatagcggtggaggtatattagttcttggcgaaatcatcgagccaaacattgtttatagtccacttgttccctcccagtaagttttttcttacatctttaaatttgaatggataatagttatgcaattctattcaaatttgtatcctcaagttttgctatatacatttttcgagtttgtgatgcaatggagtaattgaggaatagttttcgattttaatgaaaatatagtttgaaagtataatctttgagttataaactattatttcaggcctcactataatctgaatctgcaaagcatttctgtaaatggtcaagcaatatccgttaatccatcagtatttgcaacatcaagcaacagaggaaccattattgattccggtacaactttggcttaccttgctgaagaagcatacgagccctttatcaacgctgtaagtacctgaaaaaagagcaatttatctacaaaagtagccttcttgacacacttgacgccttgtcaagaaggctactttgcaaaaacaaataattttcactaattgctcataattataacatcaacttatctttgtgctgcagattaccaatgcagtttcacaatctgcaagacctgttcttgccaagggaagtcaatgttatttaatcacctccaggttctttccttaattcgtttagtttaacctgttattttggcttttcgagataatccaaattcatccattaactcttgaatgtttcggggcacagtgtcaccgagatatttcctcaagttagtttgaactttgctggtggtgcctccatgtatttgagacctcaagattaccttattcaacaaaattcgattgtgagtaacagttatatatttaggagcctatatagttacctgcagaaactactgttttttgattttcaaatgtttaagcagaaactgatatattttatcttacatgacacagggtggtgcagcagtttggtgcataggatttcagaaaatcccgggtcaagggataacaattctaggaggtatacaacatcataacaccacacttaattgaattgtaactttgtgaaagatctgtagctcatgaatcgccaaactacttttctcaaaagtttagtttttcccacgttcgataaaaaagtgttaatgactgcttaccgaaacttagggtatgctcggttagaatgaacgaatacataggagtaagaatgaaataaaaaaaaaaaatcttgcattggatgatcttttccatttcattacttccaaccaaacgcaaccttatattttttcatgctgaatatatcttaaaatgatcctcattttgctgcagatcttgtcctcaaagacaaaattgttgtttatgatttggctgctcatagaattggatggacaaactatgattgtaagtttccaacctcttacacaaaacaacaattggatgcctttgattagattattgatctgatgtctgatctgttgtttcataggttccatgtcggttaatgtctcgacaacttcaagtatgggaaaaaccgaatttgtgaatgcggggcaactaagcgatagcaggtcacatcagaatgaagcttacaactctatacttagttggacactaataggcttctttattcacataacaattcagaggacattccagttcttatagtgaaaaaaacacagagataataataacaaaataaaactaccgattctttttcccgccggttatttattcatggcggccggcgagtaagcaagttactgttttgatcagagctaatgtctgttcagtgtgcttattataggttttagccataatttgcttcttttttttaactcgaagtctgacttttattggcatgaagctgatagaaaagagaaaaatatatatattgtagagtttagatgtttgatatggtgaggttgtaaatcacaatttatccaacaattgttgattaaatagcattatttgtttgattagtataaacaaagttactcatatttgtgtaaacaaatccaacatcaagttagattagatcgaacataactcactattgttgtacttcgtttttttctttttgttaagaactgcctgaagttctaactaaaaaaatgaaatggaggctcattacttctactagaccacatacaaacatccttaaaaaacttgacagttaaagttgttaagttgtttagaattttcaattaagttagttaaatcaatgcaccaaggttactttagtcatttcagtcagctgtaaaacttctatttaagccttgtaatctcttgtaattagtgaaacacgaattcatatcgaataagagagaaagagtttgggaaatctgaagccaaaatcagtgttgttggagaaactcaagctgagcttttggaattgaattttggacttagctcttggtggtgcaccatactgaacttgagctttgtaatcaacttgattaatgtagaaaacaacta

SEQ ID NO: 20007 - DNA, 2032 bp, Cannabis sativa
aaaaaaatccaacccaaatttgaccaccacttatggtttcaatatgaaaatcataagggaagtcctacattttgggttatcattacctttaaatcctaaatcatcaccaagttataccaaattgagtaccccttattaccatttctacaatttacagcggacaacttagacaacgatcacctaataatgaaggagctgccctttcatgtaagagcgtatttgctaaaacaatctccggtaacattttgtttttgttcttaatgtgttcattgttcattgaatttcaccaaataagataagatattaagatatattctccataatagtaaacctattctagaaacaaccgaattggtaaaaatattcttgcgcctgccttcagcctttcctcgtgaatttaaaaagaatgaccatttccaccttttgaattccagattccttcttaattcgaaaaaggatagaagcactaactacgcatttatgttattacctttgttgaatttatttttgtttctcctttgctataatcatttaaagcgattctcccttcctaatcttgaatatcactaataaatttcaacatttccgttcttacatttgcacacaattaagagagggtgcaagggcggagatctcagagcgcgtaagagcggagtctccaaagttgttctctttgctatttaagagattgacatagctaccggtgggcgcagctaatcccaggtactctccataccttctagtaaattttccagctaatcccaggttttccctattttgtttgcttaaaaatttctcgacttggtgaggcctttacatactcctttccattgttttcttttcagaattttctgattaaattaaggtgtgagaaattacttttaaaaatgttattttagattaagatggttatacttataggtgtgtattttctagagagaagattaactatacactttattgttattatatatcaaagtgccttcattttaatctgtatacaatcaacagaacagcagagactccagatctagattgtaaatctttcaaggtagtattcaccatacttttgagcattttttttctctaatgttgtttttgttgattatgtaataatatttgttcctgaaatgattaaaatatactgcttaaggttcaaacccatttttttcttattttccccaaatcttgaatctccaatctttaaattattgtcattatatttgatgattgttgttatagttgatttgttcagctcttgttacactcttggatcatcatgattatatttccatggccctattttctctagtcatttgtacatgagcagtaaagcacatgtatataagcctaaaagatttaactgttttatgtaagagattgctctctgaccatcagcaagaacaacaaacaaaattcataatttcacagattttacagatttcgtattcttatttattttgtttcgtgttttactcattacagatttaattaatcagtaggcctatatatatatattggtttatgtcttgtgtttattgtattaggctatatcacatatcaatgtgaggttttattttgattgtgtatattttctaccagaaagatataaacaaacaaaatttaaaagagactttaggactaaaccaaaccaatcaattttgagattttttaaagtttatttttattgatctagttttacagtgacataggttcaaaatgggaagaacaagattgcccgacaaagcttggaactactgcacaatggttgacgggaaaagctgtcatgtctgttgcattttctgtggacacaccatgtggggaggtgtaagtcgtctcaaggagcatcttgcacagaagcgaggagatgtggcagaatgcaaaagatgtccagcaaacgtgacaatggagatgcaggagcatctaatacaggtatcacttgaaaaagagaacaaacagaagcggaagagagaaatgttggaggacatgagaaagaagaaagggcaatgtcactcttcaccacaaccaccac

SEQ ID NO: 20008 - DNA, 7498 bp, Cannabis sativa
acgggttttccgagggtcagtttttttggcatcgggtcggggcgggtactcgggtttttcgggtgtgcgggtccaaatgtgcagccctatcggcaacccccttcctttttcttgcaacaatgggtacaacatgacaggtagcttcctcaacaaattccttaattcgaataactagagaggtggagctgatcctgagttatttcagacaactttccttttatttggcataatccactcataagagacttccttaccttctgtaacatctttgttttgcttctccggacgaatatagtccatactgcacgaagttttctcttgtggcaagccttgaaatatctcgagcctcttataaaagcccaagaatggtgtggaccctttttctcagccctaaagtgaagggacgatggtggtacgactcgaccaattggaaagataggtgattagcatcaacgtccatgtaaatgtagtaatcctacgcataactgcctatattatttagtttttttgttgttcatgctagctagccaaatgtagtccagttgagaaaaataaaagtaccacgacctattctacctttagttgcacttcaagtaaaaaatcagctggtatcgtgtgggaataattatatattaataaaatataacatagtttataaatttatttgtataaaattaataattttattctaaattttaatacatgtattgtggaaggtaaaaccaagaaagaagctaaaagcagatgaagaaaaacagggcacaaaaatagagctaaaagtatacttgaaaaagggtagcaaaccttttatttatagaccaagaaatacaacccaaaatgtaacagaaagtagttaagcaatagtaatagctaacagctaattaacaaaagcagttaagtgatatcattagtaattaggttgttaacatcccctatcaaacgaaaagttgtgtcagacatcttgagtttggaccgaagatagtgatatcgatctgttgaaagaggttttgttgaagcattgaaaacttggtctataactggaacataccgaatggataatttctttgtcattatgagatacaaaatgtagatcaatttcgatatatttggaccgagcatggaacaccgggttagcagcagtggcagcgacactttgattgtcaacccacaatattggatattggtgagaagagatgtgaagctcagataggagagatactaaccatttcatttcagcagcatcatttgccaaggccctaaactcactctcactgctggaccgtgcaacaacctgctgcttcttggcagaccatgacacaagatttcttccaaaaaacatcacataaccccctgtactttgtttgtcatcaataccggaagcccaatcagcgtccgagtagccttctaagctcaaagtagaagttggtgtgagatgtaagccgtgatgaacagtgcctttgagatacctcatgagtcgcttgtaagcttcccaatggatagtagtaggagcatgtatgaattgactcaatttgtttatgatgaatacaacatctggtcttgttagagtgagatattgtaaagcacccaaagtacttctataaagagtatgatcatgaaatggctctcctttagtaagggatagtttgacagaggagcttattggattaacacatggtttggctccttccatgttaagtcgaacaagcaagtatgtgatatattttgtttgtgagagatacatgccagaggaatcacgatatatctctactccaagaaaataatgaattggacctaaaccctttagagaaaaggatttgttgagatcagaaataagctgagtaatgagaagagtattgggtcctgttactagaaatcatcaacatagataagtaggatgattaggttgttaccagagctatagatgaacaatgaagtatcagactttgatgcagagaacccccattccagaagtttatcttttaatgtttgattccatgcacgaggagcctactttaggccataaagagctttgtggagttgacacacatgagatggttttgtgggatccacaaatccttctggttgactccataaacactgtctcatgtagtttcccattgaggaaagcatttgagacatctaattgcttcacagaccaattaagagacacaactaaagtgagaatgattcttactgtgccaggtttaacaacaggggagaaagtttcttcataatctatccctgtgtttgtaaatatcctttagcaataagccttgatttgagtctgtcaagagtgccatttgcatttagtttaactttgtgtatccacttatttccaatgacagtcatgtgtggagaataagggaacagagtccaagttcctgccttttttcaatgcctcaaattcctggttcatagccttgaaccacttggatttttgagagcagcagctctgttcttaggttcagagggaatgaaagactcgagtaagggatattttgtggcattatttataggctttaggtttccttatcccacttagttatctggtctgcatagtatgtgttcttgctgaagcttgaatagtagtagtagatgtgttggcagcttcaatattgacagcagtggatgggacatgtatggaggtgctatcattgaaagagattggcacagggaaactggtttgagcagcaagtattagacttgtggctggattgctggtttgtgcaacgggtgttggagtagttgtattgactgaaacagttatgggaatggcatgtgtatcaatgtttgatgagattatgacattggcaagtatggaattggtgtttgttggttttataggtggagtaggggtacgagtgtcatgggctaatgtatttatagttgtagcaggtattgaattgatatttggtggtgctataggtgtaggtggagtacgagtgtcattggctaatgtgtttgttgaaataaatccccatattcttgcacactgttctgattacaaatataaagattataagcagtgaaaagacaaaagtggccttcggcctctagttacctagacagagcagttaaagttagttacaaagtttagtaataatctttgtaactaactctcctctctttgtgctctaataacaacatcatatatatatattccagcaatataaataataagatagaggcaggacaacatttcagagagcaattatcaatacaacatctcagaaaatttcaaatcaataccagaaaataaaacaacaaaactcaagggctgaacaacaaataaaatgtctgtttacagagagcaaaacagatggagactgagttgaaggaggctcacattgggtaaccttggaatccttggacttgggttcggatattcaactcagtggagggttgttcatgcaagagaaagaagcacaattgttagtactgaaattagagaaaaacagagagaaagagagactatcaaacactgtaaaattattggggattaccaaaataatacctgtgtgttttggaatcccaccattgtaatcgcttgatcattgaagatctatagtggaatcgaggcgagctcgaagaggacgtacccgcacaattttggggaacctctataaaaccggtgttatctcttcctttacttttctgcattttctatatattgtttatgcaattttttgggtttaaatctgtttagaaagggatttttttctgggtattatttttggtgttcttcgtgttcttctgtgaagaacaacgaagaaggtgctcgggtttaagggattaatttctggggttgactgatctgcgcagggatattattttcgggtttattttctgggcagggataatttttctgggttgggtttgaagctgttcttcatgttcttcaaagaagaacagtgaagaaaggaggaacggctagggtatttagtagggctgctgttatatgtttgcttttaaagatgatatatatatatgatgtgattttagggttttagattaaatcaaaacgatctgtagtaaatcaaaaaggggctgtcgttttggtacattacgggaagtcaaaaagggaggctttgacttagtaaaggtcatctttgacctcagtttttctttgtttcctttgctgtgtgtagggttaaattaggaataatttcctacagtgtttatggttgtagcaagtattgaattggcatttggtggtgctataggtataggtggggtgcgggtgtcagtgtttaaagtagtgggagctatagtaggtatggtcattgtatggtgtgtaacagtaggaattgataaaccattgtcctcgtgaaccacatcattatttgtagcattaggatgcacaaaaccagagtttgtatatgtaggagcaacgatagtttgaaaactgaagctaggggattgagataacgggtttacctagttttgtgagaagctgctgctgcttgagaatgcaggaaaatgtccctcattgaatgtgacatgtcttgatatataaactctgccattagggtgttcacacaaataacccttgtgatgagaggaataccccaagaacaagcattgctgagacctcagttcaagtttatgagcattatagggtcgcaaatgtggataacagctgcaaccaaaggatttcaagtggttataatcaggttttttccaaacaaacattcatatagactaatattgccaagaacaagtgtgggaagtttgttgatagtgaagacatcacaagccataccgctcttccgatcttccatacttaaaccgacatgagccaataaagtgagactcatttttgtaatgtgtctgggtttgcgctcagcacgactattttgttcacttgttcttgggcaaggatgctaaaaatgaattccttgatctgctaagaagcgtgcaaaaggtctatattcacttccccaatcggcatgaacacttttgattggaaaattaaattatttttcaacaagacttaaattttatgaacacttcaaaggcttgatttttttgtgtaaaggggaaaatccagcagtaccttctatagtcattaaggaaatggacatagtattttaatccatatttagacacaacatggaaatagtatttagatcagtatgaatgagtgctaaaggttgagtggccctattgtgtgacatagaaaatgggagcttgtgactttttccttggtgactagcattacaaaactgtaatacatttattgagccacgaatatgtggtaacaatttgaccaaagtattttcagtaggatggcaattttagagttctaaaaatcaatgtcattaaattagagacagaaaaaacttgtggagaaacatcagacaaatcaaaagttcttttatttatttcttgaagattacaagattctaatattacactagaataacaatagcaagaacagttacaacaagaattgtattccctagaagtggtggtaagatgacattgtaaagctggactggacacatccccaagctggtataaatcatcttttactttacctttaagaggtccctgttatcttgtcctttacaaaacaacaggatatatagaattcaagatagacatcattatcagtggtgagttggaaaacaataacaagatttttcttaatggaaggcacatgttaaatgttttttaattgtaaaggagaggaatctattgaggaggaaatagtagattgaccaatatacaaaattagtaattgcttaccattaccaacaaccagtgtttcagtaccgtggtagggtgtagtagattccaaatgttgtgcccacaactgacatggttcgtagctccggtgtccacataccagagatcatcaccaatgtcagggagcatggtagtggtaaaaaggagaatcaatttcagttaaaaaggcttgaaaggaagaagaactaccatacttgggagtgacaaagtttttgtagaatcggtagtggcaaacaatggttgtgtgtccaaaccgaaggcacacttgacacaataatattgatccagcaccacgcccaaaaaattgaccagaatcacgacccacaccgttattttgtccaccagcatatccattatatcttccatttcttgatgggttaaccaagttggcttgcatcttgagagacaagtctatcacattactgtgatgttctaaccttgtttcatgtgatagcaagagggcctgaacttcctcaaaggtaagatggtcactacgagaagtaattcctgatacaactagatcaaattctggtccaagaccattcaagagttgtagaaccagatcttgagtagtgacatgcgatcatgctatggccagagcattagcggtggcctgggccttttcgacatattcagcaattgacaggtttcctttccgaagatgagagaacatgcccttcaattgtagtaggcgagccttagtttggttggagaatcattgttttaaagctcgccaaactaaaaaaaaaagtggcaaatgtggcaacggaggcaagaatcagctcagacatgaatcaacttccagctacgccaaatggtggtttagctgaaagcaatataatctcgaccttcaaatactacacatttttggtagcaggttgtgctacgacctacaatgttattctaggatggctagttttagttgattttggagctgtaatttccattcaacaattcaagactttatttcctcaagcttagtatcttgtacatttattattaaatcccacaatttaagacattatttatgagattatatttgagaaaaattaggtattctgaatgagaaaataagtaaattgccaatcaaacatttatgtgtctttattatccacgaagataggacacgttttgacaactatcaatatgacgtggcatccacgtcagtaaaagatcaacacttcatgggctgggtttcactagatagactcaaagtcaatatgttatttgtatttaccccattagtagataatgtttacatacaagaaccctaagcctataaatatatgaaaatcccattcatgtaaaggttttgaatctcaattcttacaaggtaagacaaatctcagggttcgtaaacttggcaaacacttatgtaatactcaaaggcttttctagctgaataatattgattcgtggactagagctcgttaatacttgaaccacgtaaaaatctcttgtcttgttctttattttgatttatttctttagctttagtataattataatcgattttcaaaaaactcaataaatattttggtgctttcattgagagttgaggaagagttgataccaaagttgtgtactaaaacaatggtagccactaaaaccaatgtcggtaaatttggcctttgtgatggggacactcccatggatgatgtaaacactccaactgcacatgcaaaagcaggcattggtggagatacatcgaaggtaactagctttcctgccaagaaaactcaacata

SEQ ID NO: 20009 - DNA, 2433 bp, Cannabis sativa
agtctattatgattaatacactggatttgtgggtttaggttcatgacttgcagtatagattcaaatctgaccatgaattacatgggatggctacgtatattggcactcttgttgaaatggatccaaaaactttcaagggttgtgaagtgattatttgtgtgtgcgtgtgactgttgatattactatctcattaaaacgacacatgaagattaagcgcacgggggtgagttcttttaggccaacttcaagtatgagtatgttctcactttttgtttcatctatggtattattggtcattctgaacagttttgtttgaaactgtttgagttatctatagaggacattgttaagccttatggttcatttatgagagctcatacttaaaaggaaataacacttgattggagcacagtggctgaggaatggtaccgaagatgatgaggtgttttctgttgagcggtggtttgtttttggtaataagtcaaaactatcctttcacactaataatttgcttgaggaagaaggtaaggaatgtagggccgtggtggtgagagggggtcctcaagttattgtttcttagatgggtgaagatcgaagggatgatgaaggttttgagattttagtggttgcagattctaaatggaagcttgctaatggggtttctagtgtggactctaatgttgataagagtatggttttgagtgagaccgttgatgtggatatggaaggaagcagtacggatttgatagttcaaaaaacaagttattggcaagttttgctagtcggaccttccatgtctcatgactattctcagttggaactatcgtgggcttggcaaccaacaaaatgttcagttccttaaagacattgttcatcacaagaggcatgtgtttatttttctttgtgaaactttatgcaagaaagataaagtggaatggattcgtagatagctggagtttgaagaaatgcttgtggtggagataagaggtaggagtggggtgtatcaatgttgtggcatgaggaagatcaggcaaacttaattagtttttctcaaaactatattgatgttattacaaaggttgatgtatggaggcttggacattaattggactttatggtgagcttgatagagcacaatgtgggaagacttcggatttgcttcagacttttgtgcataattctcttttcttggtgtgtgattagtgacttgaataatgtggtcgatcaggtagataagtggagaagggcaccgtatcatgggtggctagtggacaggtttaataaagctcttgaagatgtggggttgagagatatggaactagttggtcatctgtttacttggaagcatcgcagaggtacttttgagtttatggaaatctttattgatcaggctttagctacatcaacttggctttctttttttgatatggcaagaatttataatttgaaagactcatcttcagatatctgcattggcaaaaaataagaagcggtttaaatttgagaacgcttggttggtcgacccaatgtattttcagctagtcaaggagagttggaaagaagattatttaatgaatatttagcagaaggtgcgggtgtgtagtgataagctacaagtttgggggagggatattacaataaaatttgggaaaaggataatagcgtgtaaagttgaacttaaaaagctttgctgtaatattccgataagcttaatggtaaataattaaggtttataattaaattatgggtttattagataataagtgggattatgatcctactcatctagttcagcataaatttaaaatttgctatacgtggataaataagcgtaatttataaattacagagatttatatggtatatgtgaatgtaatatgggttacctgtgtaataaaaatattttcaggttttgcgaccttggagactcgatcgaaggccagaaatatcataacgagtttaattgataaaattggtgagaatattgtgataagttgataatctaggtattggagtaattaggagtatgtgaaatttgacttaacaccctaaaaatatgaatttcttagtaattaaaaaataataggataaccattaataaaagttttttttagtatcattatattatattattattaatcttactactattattaataatatttattatattattattatattaatattattaatatattattttatacatataaaacgttaatagtatatatatatatataagttataagttataaacagaaaatatacgaaccctcgttctcctttatcaataaaatactctcccctttatatttattttcttctatttttaatctgaaacttagctatctaaactccggtaaggtaagatttaatttctttttaagtttaaaacaatttgtttcgtatatgggttttgtgaattagaat

SEQ ID NO: 20010 - DNA, 2883 bp, Cannabis sativa
  modified_base (2206)..(2213): a, c, t, g, unknown or other
  modified_base (2397)..(2398): a, c, t, g, unknown or other
  modified_base (2667)..(2670): a, c, t, g, unknown or other
attattattattattattggagtcatattcgtagtaaatattcaaggccggccaacccatttatttcgtgcatcgtccataatgatagtggagatttccaagccacgggtgaaagcttgattgaaaagaggccgatacgaaaatctgaatgggaaccatgatatgagtgctattggggcaaagatgagcatacccatagcagcatcatacattttagcaaattcacgaaccgagtcccacaacccgagactccagaaaacccttttccaagtcacagcaagctgtgtttttggcacaaacacaaaaaaaaatatttgaatgatgcagctaaaacagtatacaagaaatgggttaaaaatgatcaaaataaatgacttacacaaataattgcccagccagtcggaataaatgcaaggatgctagcaaataagtctcgcatcgaaagatcagtaaatatgaccactagagctatcgccgcaatgagtcccaatgatgtgacgccttgtgtaaatcgaagcactaggtggaagtaagctgacttcttcggactgtaggtaaaaacctgcaacgtaaaaggagcatacataattgagttttcacaaaatatatgaaaagtaggctgagaaaagcgggaagaatagtaccttaaataccatgacaatgacaagtaacacgacccaggaaaatagatagatctacacaagataacaaaagcaagcaattgtcaagatcaatgagaatcaattggtggtgatagtggagtagtcaatgttctagactcaatactctaccctttattctatcttgaaaaatgtccatgataatctcctattttaactacattatacattgacgtcagcagcatgtatacatagcaataggaggaactactaagtacattacaggatagatatactagctactacacagataggggaaatgaagcataccgcaagtgatctttctttggcactgaggtggagcttgtatacaatgccatattgaaacatgaagaacctcaaactcaaaatggtttccaatacacgacctctcagtgtttgaatatgtgactgcaccaacaacataataaattattcatgaatgaatgagaaagcattgaatcattagcatataacatgaaataaataaaaaatgttcaataaacaaagtgtccattcaaatccttatcttgtagaaatttagaacaaataatcctagaaaatggcacaaagcaactattgaactcctgtggattcttcaatgaaatcattattaacaaaaattatacctctattttctataatatgcttcatccccttcatttgtaatgcagcacaatataatattgttaattaatttaagatttgtaattgtttttcttttcctatttttgtggtgtttggtcacctctcaactggacatgtgtccaggtattggattgctttatttaagggttatttttttttttttttgataactggttacaattcgaaccaccaaccaacaaagctggccacaggccaaaacaaccagaaactactcactattggagtgagtaccattttacttggaaaagtgttgagtaaactgcaagcaaaaatgacagagaaacgatattaccaaataaaaattctgagttgagtcgcagactaggttgtctctttaagacgtttgcggcactgcccaggagtgtgcaagcagtcggaatttgccggtcgtccccaggataaaacagcccagtcttactgtatcggaaccccattgcgctgtaaagcaccgtcgaatacatccaaagatttttgatatcgcggatggaatttaaattttatgaaaaatgtatttttttctatatgaaaaaaatatattcttcccatcagttcaatcgcattatatagacaaatagattaaaaaatcataacgggaagaagaaggttttctgaatcgtggggtgtagttggttgaacgtgtcacattaactgatacgattaagtaattaatttcaattaaatatgtttctcaattaaattaaaaaattaaaaataattattttattaaataatttttctataaaagtaatagagtgtcacaccacaccaaccaaccaacccaacacgactccgacggacggcgcgcgcccgtgtggtgggttaagtgtgtgagccctcatccattcacacaaaattgggtaccccttggggcccaaacnnnnnnnncaaagttgcactctatatacccttgtaaataagggttcatatcccatgtgggactctttccacttcacacacactagaacacttctatattttattaaaatatttatcaatgttccaacaatcccccacttgaatttttaaaaaatatttccatctactagtatcattcaacagtaagattgannataaacaaaggtatctttcgatttgaacctctgcgtagtgaatacgatttagattttactagagtgactcatagtcttgaactctgtctctaacattgtaacacgcaacaaccttttaaagggtgtaattaaaagctcgtgcgttaatggacatgcacgtctatcccagtgtagtgaacgctctagaagttttgcctaaaattttacaggaagctgccccactcccaccattcacataggtgagtctatcaagagtactcccgtagctnnnnactccactccacttggagtatagatctcattaagagcttctattaactcagccttaaatcgctttaggaatttatgcttcttttttcgtataattatagcttgatgtcacttttatcacttcataacttgttattacccattgaacctatttcttgggatctccagtctataggtcgggttgccactacgagtgattcatcaatctaagggca

SEQ ID NO: 20011 - DNA, 4481 bp, Cannabis sativa
ttagggtataaaacccaacagtttcgaggcctccacttgacatctgagatgcagatgtagtcccatcactagttccagtgactagcgtggccccagtctactggctagttgttatagatctttccacactggtagatcgaattgcaaccatcttgtaagtgacttcttgagttgtggttctcaatgaaagcatcaaaatatttggcgcaaaaattaggccaactttcatctcatcaatacatacgagcaagttggccaaatttttaaattaacatataatatatatacatatgttgtaacatctatttaaccaacctcttatattattcttattcttgtattatattttacaatgaaattgtaatacattttaatttgaacattaattgctcatctttgggtcattggacaattttgacactctagcctcaattttagaattttctctcgttacgattttaattaaaaatgaaacatttaattaatttaataaaacattgagagtatgcgtgtaaatctttatctaattaagatttgatttagcaaaataactaggatattggatgtttccataatcggtctaccaaatgtcttacttgcacaaattatttactaaaaacagaaataaaaagtattttatttttatttgtgttctggttataaaaccgcctaaaaataattaatactacgaaacaacatacggttactttcccttacttttcttccgaaaagattttgattctgatgagcttatccaatactctggtgatgtttgcttgtctctctattctattatatcttatcttataatatataataattaaaacccaataaagacgataataaatgtctgcgccaaccgagttctagtttcgattggaactatatgaatcctacgaatttctatgatcggccaagtgggttcgtagatattgcttcgaagcatgtaatccgaggtgggttttgtaaaatgtttcagtatctcggagaattttgaggtttatgagattaatggggatggagtcggtctgagttggcaattttcgggtaagtttactgtattggaggttcatatagctgtcagtattgaacttttaaataattttgttccaggactttgagcttgggacgatcgcgattttgtttcgggaaaagtgtttggggttttgggtttttagttgaaagcaattttggggcatgatctgtcagatttggttaatgttagttgaatggtgttctattaggtaatccgtatttaattttagtatataagtggtgaagaagttaggtactataactataggaggggatactagcggtgaaatctatgtttgtggaattgaatgctgaacttgatttttgtgaatgaatcataagggaattagtgattaatccatgggttgatgttgattgtggtgtctgttaagttaaagtttaagaattgtagagttgtagcaagtttatttggttatacttttttcttcagttgcactgcacgtgagatggctttgtcaagcaaaaccagaaatatgctagagaatctggtaagagaaggatcatttaaatggttacttggcagcagaagttctttcaatgaggagttcgaggagatgggaaggtctccttctgcccgaaagaattggatatcggagctctctcctattgcgaacattgttgttcgaagatgctcaaagtaagcttactagtttgtgtcttctaaatttatttggtgcattttccttgtaagcatctagatcaactggtttcaaactttgttagaaatacatcttgcatttttgctactgttatggctgttttgctttcttcaaattatgataactgttttcagaaataattctgatgcagaatcctttctgttcctacaaccgaacttcaagagagcttcaatgcagaggcatctcattctgtaaagcatccatcacgatatgctaggaactttttggaatattgttgttttaaggcacttgctctgtcaacacaagtttctggtcatttggctgataagaagttccgacgtttaacatatgacatgatggtagcttgggaggctccagctgccgacagcaaaccttcagttgatgtatgtttttggcctgggttttgtagagttgacaataaaattcttatgaatgtgtagatacaattaaacaggaatcttactgatgacccttgaaggttactttcctattccgagttgtatagagagagagagagttcaataatttgaaaactcagtagtatagacccttgaaggttactttcctattccgagttgtatagatatagagttcaattgtcctagactcaaatgcatattgctgctgtaatacttagtaggttagcatccgcaaacatgaaattctttcattgtcattaacatttccataaagtaaaagctaactatagaagtacttttcttttcataccttattataggtcgtagactcgcttaaatgggtcctttattccacatttgtaaaatagtcaaaggtttagatttatggttttccatgtagtttgtcgatagtcactctggtcatctttattgcagaaattagatgaggacatttcagttgggatagaagctttctctagaattgctccagcagttcctgttattgcaaatgtaatcattagtgaaaatctttttgaggtgcttacaacatcaacttgtgggcgacttcagttttccatctatgacaaatacctcagtggactagaaaggtaatccagttacaatatgcattacatttaccacatcatatcatgcctactttgttactttactcatttaattatgtggttgctctaataaagcttagaaaaagtcaattgaacagtataaaattgaattctcaacttgtttgaaatggtcagcttgtattatttccattgcataatcattattacagcagcttgggaattgtttactgagattttcaaaatctaattaaatgtaaactttggaaattaaataattcataagtaactacgacgaaggatttttacgtggttcggacgttaattattcttagtccacgagtcagtatattggtcttataggcttttcaaatgtattacacgtgatgtttacaacatagagccctaactctgtctctctaagtttctctcgaaaaagaagaaagcttagaggatattttggcagagcttcggctatcttttttttgatccccccttatgaagaaatgaaagggtttatataggccaaagtccgggttcgggcatacccgtgacctgtttatggttttgtcaaaagcctgcccactattggggtaaaatacattatatacatgactattgggccccctagaaggtttcttctcgtggagtgacggttccgtacatctgggaccactgttggtgtagggcatttgtcgaataaaggtcacgcctaacagacagtgctcaaaggagccgttggacaaaacggggtattcagaagaggtgcacgcactaccatgctctgacacaggagacaagatttgatcctatgtctaaaaaggtaaatacgtcaagggagacatccgatttccatttcatagtaggcttttaacattccttgtgcatacgatatccgtcttagactctttaaatagctcccaattatcttcctgtagacttaatggatttaatcttctttgggtctcggaaggttgagaaaacttccgggtcctggacggttgcttggtcttgtgacgaggtgataaacattccctagacctaggcctcttccaggctagctaagtctttccgcaaccttccgcaatcaaagaaacttagacgataattgcttagacaatcatctcctatcttttgccatgtgtgtttactccgaaaacatggataacatttaccctaaagcttctggaactctcgagtggcggaagcttgcagtctccttctggatcatcatgggacacttggacacaggggcaattttaaatatgtggaatcgtttcttttcatcaggcatttggcaattgatgagtcaagaactttggtgataaacaacttgaagtgcgcatgtgtcgcccaacctttggatccgtgaatgccatacactcaaagggggcgtgtttgttttagagaaacgaaatggggcagagttatgatttaatgactattagatgtgaatgtagggcccgaggcgaataaatatgatgaaaaatacctcgattccactaaatgggattaaaagcagtctttttaactccccatccgttggatcacttttgtgttttcgccgagacaatcctggcctttgattttgaatcacgtggatcaacatctttcactataagtaggtgtgaaatggccagtgttcttctttttagcatcttcgagcttttgagcaatagccttctctttaccaaagaagaagaattgtaaagaaaaaatcccataaagccaagtctcattctttggtgaatgagtgaact

SEQ ID NO: 20012 - DNA, 2567 bp, Cannabis sativa
atgaaaaatacatgtaaacataaatgacttctaatcttatattaataacaaataagattgtattagaatgagttttatttaggacataaaatcccaatagatatacactttttttgtggcaaggtcctcaacaaggagttggaggttcaatacataccctcaacagaccaaattgctataactgtatgacaaaaggattgtctcattcaagatttcagtacttaatctccaaacttggtgtgaaaacctcaccctctcgtttgagaggtggtgttgagaatgataccttatttagtattagttaaaggtgcttatactaattctatttgagttagttacatttatttttgtgcaatctcaatctgttttggtggtctcccctttaccaacattagagtcacctatctcttgtccattggttcttgtaatcctctttgagactataaatagaaaatgtttctctcaaccagctttaagttgagtttttcatatgtgattatttgtttaaaacatttacaggatggtaagctttgtaggttaattgatttttttttttgtaggatcataggttaattaattggtatacttctgatgttggtaactcataacctttaaatatataaataaagtaaataatatatttattagaattttttttatataaaaaatcatgatttatccgttacaattattttccttttagaaagagtaaaaataaaaacaaaatacgcgtcaacgcataaaagtgatttgaaaaaagaagtaataaatatttttctcttgtacctcgatatttccgtcgaaacggtataaaatgtactccaactcgtgacatttacatatagaaaaagaaaagtagaaagtaagtttttcctcgatatttccgtcgaagcatatataaaatatgcatgactgttggaagaaaaaagaaaaaataaataaagataaatgagtagtagaaagctttgtagctataagtgttttcttttttctatgttgatgatgagggaattgccaaaatgttatggatacagctaaatgaggtataaaatagtttaattttttatgttgatatagtaaatttactttcattaatttatttgagcctctgaaattatataaatttcatgatttatagtatctatttggacaaattaagtttcctattcacttgaatctttaaaaggcaataacatcaaacttttcaacatgattatcaggttattgtggtgttcaccgaaaattatggtttcacaatcaaatatcaatctagtgaagcaaagaataattaagaaggtataagcaattttcattcatttccaattaatgaatatttgaatctattgaaattagcttcatgttttatttttcagttttctttttatttctgctttttctttcacgctttaatattgtattgtgttcataattatattattatttaaggatatattatatatgagaatatcgattaattaaagggatgttccaaagaaaaaatatatgattttttttttttttttgaggaaacgaataaaatatatcaattaaaagagataatttttttaaaaaaaatttaacaaaagcatttcaaaatcgaatttttttatagatatttttacccattttttgtacaaattttttttaattgtattacttttttttttcatgtaataaggagaatgaataaacaacgaaaaataagtgtccgtacttctataagaaaaaattaaaatccataaaattattaaaacgattatagattgtattttttgtcatttttgcccgtctttgtatatactatgagcttaaccaaaggggatcacattctaatgattctagtttaagtttaagtttaagttattgtttgatattggtaacttcctccccttgtcagtcatcacttttatttatttatttttaaagactcaattgctaaacccttgattaaataataataacaataataactttcaaaaatctcccaaaattaatggtttcataatgtattttccactattattattatcttctaagtaattgttaaattaataataaaaattaacattaaaaaatcaatgtgttgtaagactaaaagtttagaaaaataaatattattcctttcaaaacaaaaaacaaaaaaaacaaaagaaaaataaatattataaaatgtaaactacgaatataaatgaccatgaattagatttcttaattctttcaaaaaataaataaacaaataaataaaatagatttcttaaatattccatgatttcattaatttattaattaaagaaaatctctacattttattttagtgcaatggtcacaaattaaataattcaaaggtcccctggtgaatcaaactcaaattaaaacctattgtatgtatgtttggatgatttgaattcattctaaatatggattcatataattttcttaatggaaatatcagagttctctcatcttgcttgatattgtgttgtgttcaaaaaatggaataattaatttgtttaggctatatatgtttgatagtttgattttagaagttttttttttatttttacact

SEQ ID NO: 20013 - DNA, 5025 bp, Cannabis sativa
aaaataataaatacatagaaaaattataataaaaagatttcacaaaaatatcacaacaacataattctatagatttttttcttagtaaaatatggtatacaaataaaatattataaaaatatagaaaaaaaaaaaaacttccataaatatatcaaatatatatttttattaaaaaaaacctaccaaattttgaattataggataaactaaacccgaaataagattaaacgcggaatacgactcctcgaaatgagtatccaaacagagcataaatagaaaaaaacgagggaagcaacggcacattttggcgggaaacacgtggcagtcatatagggtatcatctactccaatttcccgccactgaaaaccctaacctatttcttattaatatttacatatcagacccatttcagacaatctctgtctaaatccaaaaatgagctcttcttcctccattcctttcagatccaagaaacccttgaaccaaatccctcctaagccccaaaaccaaaatctagatctcaaaactcccgagaagccgccggttcttcctcgccggaatgttgctttgtctctgaagcaagtgaggaaagcagctgaaagaatcagtgtaccatcgaatcagaagagttcttctgatgggaaggctcagatctcttctgctcgacggaaaatcgttgactttcccgagaggcagaacacgaaggacgattctgatgtggctgagttgccggaaaggttagatgagatgtctttttttggggttttgttttgggaaatgtgattattggttttgttcctaataagttgggggatttttgttttgcaggtttgagattcttggagagtttttcaataatttgaataattcgattcggttgctcaagttgaaaggttcggcgacgaattttactaatattcgccccaaaatcgagtctttaactgatgataggtatactattttcttttttctttggttgattcattttctcattgcgaagaaattattgtgtaaaaactttggtttttagttagagagatctgtttggttaaagatttgatgaaagattaataagttttcaatctgattgagtttttgtaattttttttttgtcttttctaggaggtttacttatagtcacttggctcagttgaaatatcttttacctgaggtgattgagattaagaagacactaatattcaatgagaaaacgagttgtatgaagccagatcttcatatttctttgaatctggatgcattagagagtgacaagaagttgaaatctgaagatcgtaattcatacctgagaagggtctttcagtctcggcttgtagatttttcaagatctcatcctgaggtatattcatttttactcagtatatgacattgtttaggaaagattgacttcaatttttacgagaaggatatagtttggttggtttttgatatttgttgatcatagttttgctcaatagattagaagttattgtgaaatctatggttttgattagttaatttggaatatcatttgaatgtttattgaacttggtgtgatggaatagtgattgcttatgaaatcagaaagcaatttgggaaaatttatataatgtcaacatcttgtattgagtctgttcccttatgttgttaagctgtttgatctgttttttaggatcttgaagttccgaaaggagagctgccagagccattcaataatctagagcgaggtgttaattcagcctttatcaaagttccgccgtcatctccttgcgaggcagtagatgtgcaattagttggtgaagaatctgataaagttcatgaggaactgaagtcgattcagtctactcatttaaaggtgaacaaagtgtctggttcagcattgctttcgaagacattgtctgagaaacctaagacccaactgcaagcagcagcaagtcatctgtcttgctctttccaaagtcgcttttctcgaagacagagaagcattgctgttggtgacttgcctccaaaatcatccgagccttcagctcaatcttcgggtgatttagttgctgactcatgccctaagacagcttcctccattgaggaagtgaatattggcaacgatttttgcccattgaatgcaactccgagcaaagtactatctgtcctcgaagatggcactccgatgaaaaatgctagtattgagtcaactccagtaaaacctatcttcaataaagaagaagttactccactaaaaaatgctagtattgagtcaactccagtaaagtctgattctacaccagccaggctaatgactgccacacctgcattgcgtccatcaaagagaagttacatgagcccggaagataattctatcagtgacaagttggttaggcgccaaccttgttctaaatcattaaatttcgagagtcctgttaagaataacagagctaaggatgaagacattgatatgaagggtgtctcaatcgataaaaatcttctcgatattcttcctgagaatcttttgcattcggtaagtacatcttttagtaataatcactaaagtacagcactaattctagtcttgttttgattgtagtaataatcatatttttctcattacagattagagaaaaagagatcaaagctatggaggaacgggatccagctataactctagcaaagagaaggcgaaaaatgattgcaagcctacctaagctcttcaacatgattcatttcttatttcagtcaataaatcgatctgttatcacaaaggaagagcttatgcacaagatagtctcaagccatttcgatattgttgacaagagtaagacattagacccgccctttacacgaaattaagaatcttctgttctttagaagcttttctgagcttaaattcttgtacgttcacaggagaagttgatgagcaacttagcttactggtggaactggtcccggaatggatttctgagaagatggggtctggtggagatttgcttctccggtgagcctctaatacatttttgagttatatgtagcaaagtaaattcttaaactaaccccgtattctttatcccacagcattaacaaaacaacgagtcccgagtcaattcgctcacgccttgaagaagcaaagtgaagccattgtcattgtcggttttaatcgtcgaaaaagaaaagtatagggttagagagagttaccccttgtgggaactactagtaagtattttgttgatgaactatttatgcatgggaaacaaaacacatgtgtatgtatatgaatatgatggtgactataacgtagcttgaagttgaatcaaatatattaaagaaagtcagaagaagttcctgtttgagcagaggattgaaattgtagttaaatctaacttggaaattggaatggtagatctttcttttttgttgttgttatctcttaaattcttttggaataataaattagatatttttttatcagcctaaaaggctaaaaaacttcatcttatttgatgggaatataatagttatttgctccttgatccatctatggtttaataagaaaaaaaaaaggttttcactcatttcagttcctagaattgagctcttcattataagtttaattgaagctaaataaactcaaagcataaatggtgcctagctatacaatgaagcaatgcattggaaatggttaataataatatatacataatttgtaatatgttctataaatttttaattgacaattaaaatttcaagaacaaaaaaaaaatctcttaatttttttaacaatttatttttttcaataaatattttgaacactttgaaacttgaaatttggcctcgaccccagtttcaaactcggaccacaacctcagtttcagacttgtacttaaactcgacttaaataaaatcaaaaaataaaaataaaagttatagaacacatttttgttttctgtttttaaaattgaaaaataaaagtggttatataatacgttttgccgattggcttcttcaaatgtttgataaatggagtggccatgagaggtacttgattagtatgctatgttggtcgctttggaaaagtcagaatagcttggtttggaatcaaaaaagtgtagaagttgcaaatgttttagtgttaactaggactactcttaatcaatggaactatgctcaagatagacaatttgatctttcttttgggttgatgaatcctgaagatggcaatgaccattggcaagcacctaaggaaaacacgattaagatcaacatggacgctgcgatcttcgaatcaactactcgctacagctactcgtgtgtagctcgagatcatgctggccgactggtggaggctcgggcatcttgtcgacagggtgctgtaaagcctgaaattgcagaagctgttggtattcttgaagccctgagttggataaagcagcagggctagagtgatgttgaagtcgaatctgattgccttgttgctatacagtccattcgtagctcttctaccatgggttcctattttggtagagttgtttctaagtgcaaagaattgttatttgagttgaatcataagtctatttctttaaagtttgttaaacggtctgcaaacaatggagctcactttctagcgagatctacttgttttatagctgattgtattttacgtgtgagcaatgctcccgtggagttcatttctgtattgatgaataatttgaattaatgaaattttctcattttgtcaaaaaaaaaattatatatatatatataagtattatcaaacatttttttagcggcataaatacttgatttttgtaacattgtaattttgtccaaacctaatgatttagaatttgaatcttacatgtgtcttgtttaagatacaatcgaggtttatattaacgaaattagaaaaaaattacacttctaccaaattcaaaattttgagtatttacgttattatttaccctttcataaattcaaaaattcaagcgagatttgatgtttaattttactaatagatatgttacattaagtgttgttag

SEQ ID NO: 20014 - DNA, 15469 bp, Cannabis sativa
  modified_base (4015)..(4023): a, c, t, g, unknown or other
  modified_base (4446)..(4446): a, c, t, g, unknown or other
  modified_base (4554)..(4557): a, c, t, g, unknown or other
  modified_base (9663)..(9694): a, c, t, g, unknown or other
  modified_base (14656)..(14663): a, c, t, g, unknown or other
atattattctctccaccataattattataacaattactataataattaccattattattattaggagttgtagcagccgtacccgtagcttgagtattagtagtagtagtattcatacgaccgtacggctgatcatctaggttccagagaccactccataaattaccataataaaattcttgatcagctgttattgataaatgatcatacaataacgaatatgaaacggcgtcgtcttgatacaccatagcagccgctggtatgttattattggtttgaatctgagatgagctgttgatgatctgatccatattattattctcatcatcatgctttgttatggctatatgatgattatcattgtcatcatcatgatgttgattaatattgttaataggggtctgtggctggtggtgatggagtttttgcaattctttattgagaagtagttgagatgatgatcttctcttttgttgcttacgagaatatttagctttgtctttcttcttgaaatgtgttctccagaagttctttatctcattatctgttcttcctggtaagtatctagcaatggttgaccatctacacatatacatatgatcaattatatataagtaattaattaagactaagatagataattaaattaataattaaattacttacttgttaccccaaagagcatgaagttcaataatgatgccttcctcttgtggtgttatctggcctctcttaagaccaggccttagataattcacccacctaagtctgcagcttttcccactcctattcaatcctgatatatcatatatatatatgtgtcatgtacatacatattacatattacatagatcatatacatatatatacatatatacaatatatatatatacctgcagaacgagctacagagctccatcttccttcaccattgaagctgacatattcagtaagcatcttatcctcttctggagtccaagggccttttctccaaccttgctgctgatcttgattagtcatcccccaactcattgaagataccattaagtactattattattaatattgtgtctgctctctctattattattattaccaagtcacttcggtccaatgttgtccccaagttcaatgacaacaatcaaatttacaaacacacatatatatacttattgaactacgtacgtgacatgtacatatatatatatatagatatacacccacgatgatagctagtaatattattagtccctttcaataaatttgatttgatatataccttagctgctgatatcacaatcactagatagctagttaagattttgtttgaaaagctttttgaagaatatcgaagttcagtttgctttgagtacctctctctcctttttgatgatcatgatcatcaataaaaccagctccccacattataatatgcttttgttcagcttcagccacgtgttaaaacatggtgaatgaagagacaccttaaattattccttttatccaatcaaactacaccaactgctctgatcttaattctcatcaaacatgcaatgactttccgtacttgctttacaaagacactattaattatcacattttgtctgtgataattaagactgtctttttatcgtaattaccacaacagttctttcaactatagattatttttagcaaattagtccctaataatcacaatatagcaattaattaaagtcttgaatatatgtgacacgaggatttaacttatattaacaatgctacatcacataaacctgatttatataagaaaaatgatataaatttgaaattatctgatctcgattaatgatgttattaatatttagaggttaatttaataactatatttgatgacatagggacttcattatagttgtttcattgttgtatagttcagtgaccagttttactagatctatggtacaaaatcagtcatgctaaaaacactaattattattttaaataattaattaaaaaaattaacaatatatagaaataataaagttgttgatttgagccatctaagaggagaaagctagtgggtagttggtgtctcctcgaaaacggcttctgagccaatgagatagcaacaggtgttgatatactcaatcttaaaatgcttacttttctgtaattctttattggtataatgacttattattttaatctcaaagaagtttctagcataccatttagggtaaatggggtattaaaaactaatgaaagcacaagtgactttggtgactcacctattctacatctggcctctgaatttggactttaattatataataattaagcacagcatattgggaaagtaggacatggctccattggtttactccaatttttttattcatgccatgcctatatataggtattgatggtgacgaaaactatataatagttttttcattaaagttagtttgaaagattctctctttaaaagagttcaagattaattacagctagctatatagaaatttgaattacatttttgctgagatgatcaagattatatatatcaagcttattagtcacacctttttataatatatggtctagttagatggggatggacctctttctttaattatagacgtagtcataattatggaaagaccaaactctttttaattaattccttaagtacaaaaatattgaagctactctcctccaatcccttgagtgagtcagggacattattattagtgctcaatcagctcttgatttatttatggatattatatatataatacttgctaattaaatagctagaaccatacaaatcatgagctagcaatatctaatcttcgtataagaaaacattaattcatgtatagtaagtagtacttgacgaacctcatccaagtatattttcttattatagctaattaatatgcaacatatatatatataaatttgattattaagagtatttctaaatcttctagaatgactaggacattgtgatcaatatcctatatataagatcattatccaataatgctaattttactaatgcgttacgcaaattaatctgcactgatcatcatgaaatgtactctctaatcatgattaaactattttattatattatattattataataatatatatttaattaaaccgatttgatacatgtagaccatataacatgtatgtattcaatctttcagtaaaatctcataaatcaatatttagatcgaatttaaagcttatacacatcagcatacgtaaatatgtatgataacacttcccacgtggagattttaagttttaaagaaaacattatatattgttaaatattatttgctcatggttaaatgaaaattaataaataaatacaaaatcgtacagatgtatagattgtatataaatatttaatagagtttttgttttttttttttttttaacaataaataattaatatagttggtttgtatatagttctcgagaggtcttctttgttaagattctgggattgtgtggttatctattcatccaacgtagacgccattgagtagtttattatatgatgaaacataaaaagtaatgcttttaaaaatacctttaattattagaataataaatgtatataaattatatttgttttacttaattagtcttttcaaatagacaaagagttcatgagccatacgtacgtggctaaaaaacgcaaccgaatttttatgtaattatttgttaagtcttgctccctaaagtaaaataaacaaaataataaatgtgttgcattacatttattatgctaaaattaccgaaaataattgcagtgaacgcttttttttttgtacatttttcctaataaaaaaaatattcaacaaaaacttcattatatatatacatatttttgtatatatatatatatatattaaaatatggttatttaacgatatttttttaatttaatggtactttttacttttcttaacatttttggtaacaatgttaatctattattattattattatnnnnnnnnntattattattattatttaaaagaaaaaaactaagaaaaatgtgtcttgtgatgaaattgtatagagcttcaaaaactattgtggattctcttgcagcaacaatcgtctcttctattgaagaatgattgtctcttctttgcaacaacacttgtgaaaaggaaaagaaaaaattgaggtctcgcccagattttattataagaagaaatccaaattgatgccacctaaaaagataatcaaccaaaaatgacagtaaatccaattaataacgattcagatatacagtttttgttagtcccttgtcctcataggccacatcagatgatttttgaggtctttcctgtacttgtgactaaaatatagtatttaattacaagttattattaattaggtttagttagaacaagtattatgactaaaaatacntttagtcacaacaaattgtaattttcgtgactaatacttttagccatggactttttagtcacaacataagaatcatgatttataattagtcacaagttttgttgtgannnnaagtaagattttttgtagtgtcaatcttttaatatagtcaaattctcgtaagtatatattattattattattacaattaaatgtattagttatttgttattatagtgttttaacttttggtttatttaagttttaaagttattgagttatttaagttatttattatctgaagtaacttgtatttatgatctacttctattatcaattgcattttaataatataagtgttcttatttttcacttagaatgactattattgtttatcaatattgtttatttatattgaaaatatattataaaacttgtaacagtgtttattttaattatgattattattttttattttttcaattaaagtgtatttttatttactttgtaattaaaatatttttttctatttgagggagtatcctcacaagcacaagattctctacttcatgctactaaaattctcctcctactaagagttggtctttgctggatttttttgttttctttataattagttatgttgaaattgttgtcaactctgtctattttttctctgagggaatctttgagttgggttgtttttgtagatctattaggtacttattatttatctttacaggtgtatgtcttttacatctaatgcgaaatagtaatactgtaaaatatgagttagtaagatatgcactatatatagaaaaatgaagtttcttagttggaataaattccttcttatttaataacaaatgtattgtttcacactcaataataaaattggttactatatatattaataaaagaaaagaagagataagttaaggaatacctttttttgtatccattaattaaaaataccctcatattatactttattaaaatctacttacttttacgagtgtgttgcttaatataccctttctcttcacttaagtataatacatgctttacattaacctaaggagtataataaagacattatttataaaagttagtatatctcaaagaatataaaaataaaggtaaaaattaaaacaaataaagtgaaaggtatacaatacaatacctttcaacttccacagaatcgggaaaaggctattagcccatctatacaggcccaaaaagaaaagcttattaagtcatcgcaaccggcccaaatattaatttcgaaaacccagaaaagaaacaaggggaaaaaatatgtggcctatgcaggtttcgaacctgcgaccttcgcgttattagcacgacgctctaaccaactgagctaataggccattttggaagaatgcttcaatcgcacttacataatctgcatattagttgttcggataagataaatattaaacattgttcagttcagtaagagcagaatacaacaatggagaacataacagcaagcgagctagcaggttttggagttgggactttgctcctttgtgccaccattgctgctccaaaggtcgatgctttcatatctgcctctcagcgcaggtagttctcatcttttgaacactcaaaattcaccccttttaaacgctcatattgaatgtttcccataattttcgttttttttatcttttttcgtgtttgttactattgggaacaaagctattgtttttctgtttctttgttgtgttgtgaattgatattttaagttattttgctttgcattgttgaggccctggttcattactttcagttggcttgttaacattcttttgaaacactcgaagaacccaattggggtttcggtgctcttataaatatggaagcatatggctatagttgttttcagcttagccatgctttgcccagaattattatggcattcccttcctgaccatgctattcagtatgtatttagtcttaaactgacaatttcaccagacccagtagagtaaaaattgcaatatttatggggcaaccaaaaggatatgtaatatgtattagatgggaaagaactcatagattcatattttagaccatttggaaatacaagtaacttttagtttaaggtttcatagtgagcactaagggcatgaggggaggagaggagagggacagagaaatagagaaacggtgggagagtctctatcaaaattaatccccatatatcctaactaaaacaattcttgagaaaattacagtttcttctttatgtatttctgtaacaatcctcatagattctattgtttttaattacaatacccaattttctagttttgattgcatataggagaaagttatacttgttataaagaagaaaaagttatggctactggcttatccaaaaccataatattcggctgcttatttgaaggataagaatgaatgtttagcgaaatttatttgagtgctattgaaaatcatctgtgtcaactaaatgtcaaatgtcatgacaactctactaccctgccaacaacctcggcttctttggtcaatagtctctttaaattcaattgctgttaatgattttgattttctttacctttggctgagatttgacaagttactgaattccttagatatagttttgtgttttagtaagttcctatttacttgaatcttacattgcactgctgatcttcttactctcctttctattcatatatgtactgggtgattgttgcaaattttactaaactcaggcaaatgaaactctgaatatatagttacaagtatacttatatatctcttttaagaacattttacatacaattttggcatacatatattgttttagttctgtgtaattatattgcaatctagtttcttgttgtgtttataaggtccttcattcagttctctatgtatgtgcaagaaatgtggcaatctaatttcatattcacttgaatcttacattgcactgctgatcttcttgctctccttctattcatatatgtatttgtgggtgattgttgcaaattttacttaactcagtcaaatgaaactctgaatatatagttactattataattatacatcgcttttgagaacattttacaatacaattttggcatatatatattgcttcagttataattatattgcaatctaatttcttattgtgtttatatgacccttcattcagttctctaggtatgtgcaagaaatgtggcaatcttaggatgatagcatgcacaaaatgtaaaggggctggattaatcaaagaaggcttactattcggtataactttaggggatgaatcagaggtaagatctactaaatgtgtgaattgtctaggcaaaggccaatttagctgccctgaatgctcgaaatcgtcagcttgataatcctcattgccatgtaaaatcattaccccttgaattatttcttcttatggctagagaacgaggcatgcccactgtccagtttgtaccacttgtatagagataaagaagctcacaaactggaaatataaccagagttctccaatatagtctcttgttttgtatactcattcaaatctgattcatatattggtcttacaaagtatgtaccttgaaaaatttattatttatgattgaaatatgtctttttttgttcttatctattctagtgaatacaaccaattttctcctacctatctagccactgtctcttttttgtttgatgaagttttccaatgcagatagttgataacatgtttctgcttataaggtataatgatctcaaagtagttaaaaagtctccatagcttgtgtcatacattgacaatatattgagtggtccaagctccaaagtcaatgtttttctggtttcctttatccgtacagagagtttattttgctgaatatgttttctactaccatgacctgtggtttaaagttaaggcactaacttgttatatcttataggtcttttttgggctacgaaaaaaactacgtacattgctgtgtaggagagaacatctatagtatatagacattttatgtaaaattgctaagttacattggcttaaaataggtccactagctaggtgggtcctttaccttttcacaaatatagcaataacagctcaaacaaccagtaaagttctctctttaaagaggtgctaagtcatctttaaatggagtccaggttagcacatgatatgtttttgtccatagtggaacaccaagttgatcataacatggtggataaacaaaaagtgaagatcatattttggacagaaaagaaacgaacaaaggttgaaaagattcaaaattggtgtaataaacgtggagaaccaataaagggttggtcttatatttcaaatattttggattagaagacattttagaaggcattttctttcatttttaacacttagatggttggtaatcatgcatttttgtaaatgttttggggttctgaaatgtagtattgaaactcatggaagaatattcgacactttcacaacaaggatttgcatatctgaaattgggcaaatcgaatttggttgagattgacgtttgttttttatgtatttatgcaaagctgttgagaagcgacaaaggcacactgagtcccttttttgggtcaattttctttttttttttttaaccaaaatggataagctatatatgcttggttgtgtggtttagaacgagtttggggcacttaattatgttctcctctctgatattgacttagttcttattataaggtgttatgtatatatatttatgaggttgggacgttattatcgccataattaagcttagctatttgctgtacgtctaaggttttgttttaccatatttgtgcatatttacattcgaatgtatatagaaaattacaatgtataaccagtttttattttctattattttaattttagtttttttttattattctttaatgtatgcttaattttataggctattactaatacttggggcttaacatctctaaattttggtattattatttatatttattgctcgtgttttggttaaaattcagtcaatacatactttataaataaattaatatattcatgtcttattgttttttttttttttgaaattatttatgtcttattgttattttaacttatttataatacaatttttttttttaaaaaaaatcttatttataatacaaatacatatctgttattattattattattannnnnnnnnnnnnnnnnnnnnnnnnnnnnnnnattattattattattattagtggcaaaattatctaaattctatgattagtggtatttaaccacacaaattgattttttgttggtaaaatcctcctaacctcacttctgttagctatttacccatttcgttcaaaagacaatgttaagtgtcacggttgacatgccatagtgttcacaagtgtacacgtgacaagtttttagtagaggatattagtggaaaaactacccgaactctatgtttagtgacacttaaccacataaaccaattttttggtagtaaaatcctccaaacttcacttctgttatatttacccattcctttcaaaatgctttgttaagtactctgggactggaaccgtcagatctccccttcctttgttagctatttactcattccgttcaaaaggttctgttaagtgctctgcgactggaaccatcaaatctccccttcctttgttctttctttttcttcttctattgcgacgaacccaccagaccacaacaaacctagtgaacctaacaaaccccttcgactacggtagtattgacgaagagttgtgagagaggggagaattagatcacgtgaggttaaggcgagaaagaaaaatttcaaagaagggttgggtcttggggcttagagtgaggatgaagggttgtgtttgtaagatcggaaagtcgattttggggtttgtttatttgaaggtggctggaggtgacttgcaggagttgtgcgagaaagagaatagaagagagagggagtgggcgtggaaattagggttacatggtgtataaaaaaaagaataagaggaaaaaagaaaaaaaaaactaatttgaactatttttataatttttaaattattttttaaaatatttaatgaattaaaagtacgtagaacactaaaaatttgtcacatgtccacagtgacacttaacatagtcttttagatagaaggggtaaatagctaatagaaatgaggtttggagagttttactaccaaaaaattgatttatgtggttaaatgtcactaatcatagaattcaagtagttttgccaccaatatctcacactaaaatttatcgcatctacacttgtgtacactgtgacatgttcaccgtgacacttaacagagccttttgaaccgaatgagtaaatagctaacagaagtgaggtttggagattttaccactaaaaaatcgatttatgcggttaagtgtcattaattatagagttcaagtatttttctgtcaatatcccttattattattatagcatttttaatgtgtcgtaccgttttttggacttgtctcgtattgtgttttttaagctaatctattcgtgcttacgtgttgtgtcattcatgctagtcacgtcatatcgtgtcatacttaagtatatattttttgtgtcttcgtgccaatgtgtagcatcatttcatgtcgtatccaaatttatatttttttttgtgtatagtcgtgctcgtgctatatgtatttgtaccaattttgtattgtgtggaaaaacgcaacttgcatttagagcactaatagttacaatccaaattagatagtgacttccaaatatactttaaataattacattgaactttgtcacaataaattaccgtggaaatatctcaatgacttggtgtaaaaaatctaagctctcccctaaacccaaaatgtaggacacaaaaatagaaagaagaagaagaatgtatatgtatggatggaaatattaataaatataagaaagagaagggtagaaaggtaaaatccgaaataatgcttgctggaaagagaagagaaggcgtttgagcttgagcttgaccttgacaatgcacgcgtccgacagtgcaagtgacagcaaatagcaggagaagtttgtgcccccactttcccatctcgacacgtgtatggtcactcttcacttacagacgccgttgccaaagcaacagtacttctcttcttcctgtccaatcatacgtcgacacgtaatcagaggagggtgatagctgataagttattaacagcacagtaactttggaaagtggggaactgtagaaagaaaataaatgttgttcttttcttttgtaacttaattctaacttctcattgaaacacgtgtttatctagtagttattcttcagacttgtgggaacaatacttaaaaaaaataataagtaattaagatgatttgattaattttcttttatggcccttttttaaatgaaaaaattgtagtagaaaaattaaattaaatgtccttctattaaaattttaccttgcggcaatcaaaaaatgccttgcgtttcccatatggagtgttgcagtagttgatgatgtacaatgaatacttttataatcaaatatagttttttttttccctttgagttatcataatcatatatagttgaaaaaacatattttttaaaaatggcccatcttcattaatagcaaaaaaaattggcccatctttttaccaatgggtaaaccttcctcatttggtatatatagctgacataatggaaattgacctacttgcctatatttgttcatatcacttttttttttttctttttaataaaatacttctgcaaaaggctgttttgaagaaatgcacgtcatgattactcttggggttgatttcaaactaattaatgtgtgttatactaagttaccaactttttgaatgtttagtattattttattacatagttaaggagcacaaaaaaattagtgatcgtattgcattaggattggtactagctatgctcattaaatcatgtacaaactgcttacattgtaccacatcgtataaaaaataaagtttaaaatcttttacggtcccagttattgtttccatttttgccaaatcacgcaattgtgcgttacagttttaaatttaataattgtaattcaaattgcacatcactatacattacaaagttataattcaataaaataacttaatttttattatatatattataacgttaaaactttaataagattttttattattattgttaaaactttactagattgatttaaatttttattataatgtttgctaatgatgatagtataaatctctcaaattgtaccgcatcgtaccacattctcacagtataatttttgtgattttaagatgtcgcgatgcgattgcaaattgagaaattacataaaccacatatacagtttggtttaataaaaggttacaatccgtacctccggcaccacaatcactcttaattggtactactagatgttactaattggcacttttttcataacaatgatttttttttttccttttgatattgcagaacaataatttctttttttttttttcttcttatttctttatttttagagaatgatactattgatgaggctaattttgctggtagaatgtcttgtaaacacgggcaaataaaaggtattaatttttgcctgaaagtgtctcatgtttccgaaaattgtaataagtaccatgggttttttttttcttacaaaaaaaaaagttttaggtttttatttgaagtttgaatttttggtaaaaataagtcaaggatgcatacgagacggggaattggtgaggagtacatcctcgttttcatcctcacttatttcccatattaaggatggggcgggcaatctcctaatatgagagcgaaaatgggatgggaaaactcctaataataaaaaaaaaatataataaaaatttaaatatattaaaatattgaactacataaaaattaaaatattacacattaattattattcaataaactaattcttatccaaaacacaatttaaaagccataaaaattaaagtcataaaaggatattaatatactaaaaaatacaaacaaaaattacaaattataaaatattattagaaatataatataaatactaaacggtccctgttgggacgaaaaagtgatccctgtcccgctctgtttaacattcggagataaaaaataaatttctattctcaccccgttccctaattaaacagagaacccaaaggaccttatcctgatagaagaaatgtgcatccttaatttttacccttaaattattatcattatcaaatagtactccttaaattttttgttatgttaaataccctcaaactaataaaagtgttgaaatattagactgctatatattagaaatgtgttacatgtggctaatataaaattatgatgtagttaatgtaatattgcaacattagggacatatgtgtaatttaaataaatattaatttaaaatttaatatctttttcttattaacaattaataacaaaattataattaatttattaattattagtaataaaatattgttaaagatttttgagttgcacctaaaaatttgatgtgaattatattttaaattgattttttttttgataaaaatactttaaattaattaaaaaattcacacaatttaataataattgttgaagaataaaaataatgtaactcacaagtatatatatatatatatatatatatatattacatttgtaaattcatacttttacaaaatctccttatttcataattacaatagtcaaatgagagttttttcaaggttaattagaatttttgctccctgaattttgacgtgtaccaaatcatgctccctgaatttttaatatcgttaaaaataccccctgaaccattgagatttttaactttaaggacttttgtccaattttagtaaaaaaatctaacatggatgaaagttcaaggggtatgagttagtacattttaaagctcgaggggtatcatttggtatatatcaaagtctgatgagcatatgatttagtagataaacaatcactaaaatagtaattgaatgaaattagacaaaaatctttaaatccaacaatctcaatagttcatggagtattttaaacgaatttaaaagttcagggggcatgattnnnnnnnngtcaaagttcaggggcaaaaattaaaattagtgttttttcaactatcatttgtatcattgaatttgaatctttaattttgtgtacttctataaattataaatcattaaacatgttgcctcgaggttttattcgaaaaaaataaatcagatgccttttaaagggtcacgatacctctgctttactctcaacttttaaatgtaacgccctacttgtctaagcacgttctaatgattttttaattgttgtgcatgctttactaattaaaggatctctcaaaaatcgtgtcaaatctaaactttaaactcttataaatatacgatcatacataaaagttgggatctcatcttaagagtttataatcatattcaaaatacacttatataaatatgttgctccacgactatataaaataaaggctcaagtcgtctcgagaccaaactcttcaccatttgatatgtacaaccaccctcaagttttgaactcactggtgctcagtttttgtctttcatatacctacatatatgagtagacagactcggtaacaaaggcacaaaatatataacataataccgacttgtatctaggcgtccatacatctatttacaaggctttagatgcatcaagaacgttcttagtagaagtatgacccctgtaccaagtactcgtcccgtactagtgttggtagactgaactgcacctccagtaccactgagtgatgtaccacatgcactatgtactcattctgtactggtattggtaacactgtatcataccctttgaacatcgtatactataccaatgcact

SEQ ID NO: 20015 - DNA, 2592 bp, Cannabis sativa
tagatttgtgggcattttgttattaaaatgattggatcttaaactaagaataataagttgttgaagactttttccgatccacattggtattggcccttctaatctgttatttcctaagtcaagaacttccaattcgcgacaatttttcatggatgaaggcagtttcccaacaaaattgtttttgctcaaatgtaatgtgctaatccaagataaatttccaatagaattaggaatttttcctgatagcttattgtttgacaaaatgagaatttgtatggctttatgtttcgaaaaacaatttggaagctccccagtcaattgattatcagagatatctagaaacgataagtactgataagtaacattgcaaatggcatttagacttgaaaatttatttctggaaagatataatgcttctgctctgaataaaaaaattggtatgggaccaacaaaataatttgaacttaaatccacctcagtaagattctgcattgatgaataatcttccactacttctccactaatttggttgttagaaagattcacaaaagataattgagaagtgaaattccaaaaccaactgggaatagattgtgaaattccagaatttgaaacatctatatgtgatagattgctttgattttgcagccactttggaaacttaagcccaactctacaatttgcaagtcccatatattgtaaataaaagggaggaatccattcaggagagacattcatttgtaggtaattaaatgataaatcaagataatacaatcttgagagttttgaaaaatgagcttcaccaatcacaccttctagagaattctcagatagatccaaaatctccaaatgtcttaaattgccaatactttcaggtacaattccttgtagttgatttagattaagccgcaactctttcaaagatgaaaatagtgtatcatcgacaaataatccagtcattttgttgcagcacaaacctaaatactctaagcaataatgtgcacaagacctagatgacaattgactaagattagggagccatccactaagattgttggcacctgcctcaaatctttgcagtgtacatatattccaaagtgatttaggaatttcacctatgagatgattaaatccaagatcaaggtgttctaaggcaattatgtttccaaaatcattgggtatacaaccttgtaattgattagaactgagatcaagatatgtaagtgaaaccatgttaccaaaaccatttggaatgtaaccttgtaattcatttctagatatagaaatgtatccaaggctagtcatgtttccaaaagtgtgtgggattgaaccatttatgctattagaagaaagatcaaggtacattagagcagtcaaacatccaaaagatgttggaattgaacctattaatccattgtgagaaagatcaaggtatgttatggtagtcatgttcccaaaaaattgtggaatggaacttaacatgttataagagagatcaagatgaacaagattgggaaggaagctaaacaatctttggtgtgtatcaagagatagataattcccagaaagaccaagagtagaaatagattttgaagagttaatgagagaaggaaatgaaggtgctatatcatgaagaccacactcacttaacttcaaatttgttaggtgggggagtttgcatattggttgcatcagattattcatttttgtcaagtccattcgacttaagtcaagttgtcttaaagaaaaaagggtagaaatccaatccagatttcttatagtcaaatcattaccgctaagatctagaaactgcaaactagaaaggtttccaagttgatgaggaatttttccactcatgaagttgttagaaaggttgaggtacaataatttgctaagactaccaataaaacttgggatgtgaattttctcccaataaatagaactaaggcgcaaatagctcaaatattgcaactcaagtagtgaagaacttatatatttaccttcaagagccaacccataatcatcactttggccaaaagttgaaggtgaaatgtcgagcatgatgacatgaccagagttgttgtcgcaacgaattccaacccaattgcaacactctcttttctctacttcactcccccaagaagaaagaagaggagcaacatagtcatttgattcgtagagcccatctttgaacttcagaagtgcttctctttcaacttgtttgcacctgatcatacttgtttgcacctgatcaaatgcagagacatgtctcatgtaaagtaaaatcaccgtgaacacaagaagttcaggagtaaatctatccataatactggcaacaaagttttagttaattccaagaatagatataataaatacaatccttcaagacctatatatagagtagagtaatgtaattattctattcagtagtggaattcctccaaaatttaccaattttactatttcttagtggaatttgacatgcatgcattaattacaagtgctaatattcaactatgcttcaagaatgagtatattatgtgtcaataattcaagaggttgaatgatggatttcaagttttatgtggacta

SEQ ID NO: 20016 - DNA, 3646 bp, Cannabis sativa
tcgaaatttatgtgtaaaatggttattaaaataaaataaaatatatactgaaaattattctaatttaagtgtttaattaacaaaatggcttagggttaaaatagtcaaacaccattacactgcctaatctcgatattccaaatatcaacttatgaataccccactaaataaaaaggttttatgctaacccatgtgataaattagccaccgtcctattttccattgtcactgagaaaaaaatcataaaaattacatatttcacatttaacataagcaatactcttagagtttaataaaatctccaaaattgagagattaaaactctaatacccattttcttaaaatgagacccacaacataaataatcatgataatcataaaatatcaataattattactaattgctttactaatccataatctaatcatgcaatcattacatagccccttcgctcattaaatctaaatgatagaaaaatttctaaaataattttctaaataatggaaacacgtagaaatgagtcatgctctacgattcctattgcaatttgagaacaagctaatggcccctccatgtaagattaactcgctaaaattcacaaatgccaagaagggaactttgacattgttgacatctaagaagggaaatttacaattcgtatgcttcgaagatttaacaaataatttcaaagttaaaaagtctaaaggtatcaagctttggtcgttggaactaagagcttcaaaaatcctaaggcaacttactaaatggcttagtgaacaagggaaagtaggaagcaagtaatataagaatgacaaacaatttaaggatatataaacaagaaaagtttttgttttgaagttattacacatggcctcgcggttaagacatgtttaaattttgcaaaaaggtagaaagtaataaaaagaaagctaaaagatagaaatcacatctgggcctgatcttggacttggtcttggatttgaactgaagaagtatcccaaggcaagtcttgggcaagattcaaaaggtcttcaagcttatcttgaggagggtcctagaggtcttgagcaatattcatagaagaaaccacaacctatgtagagtgttaaggttcatggtcttcgacttgttccttggctgattcctcaaagtcgtgacggccaaattcctcaaaataggtgtcgaaatcgatagcctttaccctttgggtgtactcttctccatgtggtctgagatacttgagtatagggggatcttttttccacaaaatgtgatgaagcatggagtaggacatatctaatgatcgaagatgaaacctctcatcccgagcctctattttggcgatgtgttcagtaacatccctgatagattgtccatcggtctctttgatcctctacatagttgccatagctataaagtctctcctgtcattgggtggttgatgtgtagcttctctccataaccatgatatagtgtcgacatgggcatcactagtcaaacgagagcatcagaggacctctatttgagttttcagttagagtttcagtgaattgacctctatctttagatcctcgacattgcccaatatggcttggatcgctagatttttttaatgaacctcaatttttagattgttgacctcctagattttggtgtcaatggcatgtttttgaccatcagtcgagcatccattttgtcttattcctccttacttggcaaagctcgttagtaagggaggattctttaagctggtcctgcccttccttaagatcttagtcagccttagcttgtacttattgtacagcttgaggtatttgtcactcgcctcttaatcttcccgttctcagtaaattttgcctcatgattagaacggttggcctcagtctcacaatttttcctaacttgggtcatctaagcctccgcctttgctttgattttatttatcttaatagtagcctaggctttaaccttctcaagatcagaaagtaaagctctctttctcgtcatttaattttggttcttggactgaaccgtctcgagctctatgactaaggaccccacttccttagaagtccattttgcaatcaaggtcatatgacacaacaaaacaacataagatgacaatacacaacaacaaaagtaaagaccaaaagccaaagcttacccctactgcctgttgtttcacaacttgagccaaagtgaaagcatcactgctattgcatacaacccacttctccaaagtcaacttacacccactactcgtcacttggtctagaagctccacagtaaaaggcactaggtctttcccatccgtaggcaccatctgcttgccaagggctacaatgtcaatcactagtcctagagcagaagtttgaattccctcaatgatatctcccctcctcacggaataaaaggttttatctctcctttgaatttccacccgttctttcttgtggcatcacctcagcgagcattatgcctctcccaattttgtctttagaattttatggctaggaatggtagacttcataggaagcgtgaaattcagagggagaatcctaggtaaggcagtgacaatctgttgcccttgtggctaattagagaaggtttaatttctttttaaaagctaaatagctcttatttgggatggagtgaccttaggtaggttggggaatgatgtccttagcggttgttgatgtagttgttgtagttgttgtttttgttgttgttgtcattgttgttgttggagttgtgttgatgatgatggtagagaaagtgtaacttctagatgaggaggtgaaggagtagtatactcacaaagatctccttctcctcttggagaacgtttcctgaccaaagcgcggctgaccttcttggcctcccttttggaatggggaggaggggtttggtgcttagttgacatagaagcacccttttgggaagataggcctgtataagctcccatctgagatagtggtggtctctaaattctgttgggtagccctctttgcaaccaaagtaggcaaagcctttgccagggcttgatgtttaagatggcttgcttgagcagtgccgttcccggacacaaccacttcataggaagacaccctagttgcgaccgaagttttttctgtcccagggggagcctgggaacctgggaacctagagccttaatggttgccttcacaggaggataaatttcctagacccctaaaaaagaagaggtagaaggaggccttggcttatgggtcctattggccttagccttagccttagccttccctttttcgttagtgctctcatcttggtaatggactttgtaatcctgtcctcaacgatctcatccttctctcctctagagtttctacaaacatgacacacaaattgttagcaagcaaccttcaaacaaaaaaatttaattgtagatagcatattgcaacatgctctaaaaagtgtgtgtgggtgcaaccattcagtgagaacctatacggttccccacaggcaaagaagattatttcttcccatccaatgaagcttccatactccctaaagttagggaaagacatagttctgaaaggatcatctctaatagtatttggagagtgttgggaatattttacaaagatctagatttactaacaagta

SEQ ID NO: 20017 - DNA, 4325 bp, Cannabis sativa
  modified_base (4284)..(4299): a, c, t, g, unknown or other
ggtctaaccgttcagatattgcttacatggtacacttctgacacaatcccgaaaaatctagcatgttgtcccctctgctagctagacctgagaaaggctcatggcaaaaagaaaatcacattttttttgggaaactcactactttgtcattcttttccccaataacgactcaccccccaacctatcattgtcaacaatattatatcatatggaagattatatcttggcattgggcctctcctacccaacacaatagttcaaattttaatattaaaataatatattttaccccattgatgggctttattgtacataactctagcaaagcctagatcagttcgacccataaatatatacataagagtactactgattgtaaaatttcagatgttcaacgttccatgctctgtcgaaaactaaatcattgagatcaaaaaggcagtaagtcgcagcacctattttctcagtaattaggtatggaccctcccagttattgccaaaaaccccatgtgttgggttgcgagtattgggcatgactttctggagtactaattctctaactcacagacttctctccttaacttttgagttaaaataacacattgggcgttgttgatagactacgactttgacatgagcttgatctttttttttcttctagtaagtcaaagctaagacgttgccctagttcgttgtcgtcgatgttgaaatttcaggacaaagggatcttgcacctatctcaaccaggaccatggcttctacccataagatagcaagaagggggtctcatcagttattgatcgaggacttatgttgtacgaccataataattatgacagttattttggctagacacctttttttctcttcaagatttccattaatggtatgtttaagtattttgttgactgctcagtttgcctgttgctttggggataagcaactgcagaaaaagctatttgtatccataattcatcacacagagatcgcatttctttacacttaaactatttaatattgttagaaattaatttataaggtatgtcaaacctgcatattatagctcaaaacacaaactcacggagtttggcagcagtgatggtagcgagtgcttctgctttggcccatttggtgaaggaatcaactgcaacaatagcgtattttactcctcccttgcctttgggcaactcacaaagtaaatctatgccccaaactataaatggccatggactggtgatggaattcaaattactcgatgggctatgaacatatgtagtgatacgctaacacttgtcgcatctcttggcaaaaatgattgtgtacacatgaagtgtcagccaataataccctttgtcgcataattttaaggccaagtattttccaccagtatggttaccgcatattcttccatgtacctctcggaggatgtagtcgcattcatctccattaatgaattttaagagtggttgattaaaactttgatggtagagtttttcatcataaataacatatcgagccgctcgatatcgcaattttttggctttggccttgtcttcaggaagtttgtcagttttcagataagtggtgattggagtcatccaggtgacttgaccgtcaacatttatttgcataactttatctcaatcaatggtgggtttatcgagtatgtcaatgagaattacatcaaataatttagcttctcaagtcgagggtagtcaggccaaggaatctacatgggagttgtaagcaaagggtattcgactaacaataattttcttaaatttagataacaactcacaagtgtaggcgagttttatttggtaaggcaaccacctcgtgcaaggtactctcccttgacttgacaaacaatgatttttgaatcgttgaatgcttcaagatactcgactttcatttcaagcccaagcttcaaacctgcgattaaggcttcatactcgatctcattattagaagcattaaatcctaaccttaaagtcgtgtgaactttgaacttgtttggacggcttaacatgatttctcctcttaatttttcactgtttgaggttgcgtcaacatatagtgtctagcccgcaccttttagaacatgtgggtcgagtcgcttttctgttatggttgctacatgttcatgaggaaattcaagaataaagtcaacaagggcttggcctttaattacggattgcgggttgtaccggatatcaaattggatgagctcaattgaccatttaagaaggtgtccaggtgtatcgagcttggctaagacttgtcgaataggataattagttaatacctctattatatgggcctaaaaataaggtcacaactttttaaaagcaacgactattgcaaagaatggtcccagttgctccatttgtggataatgagattccacttctagcaagcatttactcatctaatagacaggatattgtctaccttggtcttcccgaatgagcactgagctaatcacatagtcaacactgtagattgacaatacttctctaggcaacgacttgaagagtattaggggtcgccccagttgtatttttagagcctaaaaagcttttccacatttttcagtccattagaatttcttatgccttttaaaatctaaaaaaattatgtacacttatcagaagatcatgaaacaaaacgattcaaagcagcgaccttactagtgaggctttgaacttctttgggattagtaggagatcgcatctttgctaaggctttgatttttgcaggattggctttgattccttgctagttcaccatgaagccaagaaccttctcaaaacctacactaaagatgcatttgagcaggttgagtggcatcttatattggcataagattctgaacatcgagtctagatgaacgacatggtcggtcgcgtgttgagacttgaaaagtatatcgttgacgtatacttccatagtcttccctaacaaatctgggaatatcatgttaagtattcgatgatatgttgcacttgtatttattataccaaaagacattactttataacagtacaaatcttagtctgtaatgaaggaggtgtgctcctagtggagctcgtacattaggatttgattgtaccccgaatatgtgtccgtgatgatgagcagctcatgacctacggtcgcatcgacaagttggtcaatgcttggtaatggaaagttgtcttttggataagctttatttaagtctgtaaaatcgacgcaagtgcgccatgagccattaggttttgggactaggacgtgattagctaactagttcgggtaaaacgattccttgataaaactacacgtgagtaggcggtcagctttctcttttagcgcttagtacctcgtggggtctattttgcggtgcttttatcgtactccttacacatcagggttgatgttcagccaatgacaaatgaccttgggcgatattccaaccatgtctaaatgtttccatgcgaaaacatctaagttctatttgagaaaagtaaccagcctttctcgcctctacagtttagtttagaactaacttttacaacttttaaaataattgatatgtacctcaattattttctcaacagcttgtgatgtgttcgcgtaatcgaggacttagggatcaaggtctagctttttcgcatgaggaacttcctcaattttgaatgattcatgtcatgaagacagcgcctcaagcatgtagatcatgttgtacgattttttcttttctcaatcttgaccgcatcatgtacaaaataactttttattttttcttaaatgattagagaaataatattattttttaaaataataattattagttattgatattaaaatattatttttagtattacttttcaattaatgacataataataatattttttaaatttaatattattcttaatattaaaagggaatatacataaattatacaaaatatatgtgttgtctcagtttacttatatatacacataattatctttattattattatatagatctggttttataaataattattattaaatgcaaaattagtttaaaaaaagaaatattatttatttaaaaatatgcttgttaataacaaatatatatatataaaagataagatgatcgctttcacaaatatctatatatataaaggagagatataaattactccaaacacttctaattattctctccttaattctttcacttttaaattttttttagggtaaaatcatgaaatggcattaatatctatgtgatgtgttaattatgattatnnnnnnnnnnnnnnnnttgctgggcttggctcacgggtgctc

SEQ ID NO: 20018 - DNA, 2953 bp, Cannabis sativa
tctctctctctctttttttctctctctctctctctctctctctccctatatatatttcaatgattttttttttttcttgctttcaaaatttagctgagttgatgaataaatatggcaaatctccatctactaaaaaaatggaaaaaaataaaaatttacacccctgtttggttggtgagaaaataggaaagaacatgaacagaggaattttaatttagtctcaacttggttgaacaaatttagatcaaaagtccatttggggtccattcagctggttgaatttaatatcctgatgctttaagcgcatagagagtgttattttagtttataattgttttttggttaagtgactctggtttattcattgcaggaaacatcatctgcccagtacatcttgcaacagtatactgcagcgtctggggggcagaagctccagaactcaattcgaaatgcttatgccatgggaaagctgaggatggtagcttctgaatttgaaactgctacaaaggttatgaagaacaagaatgcctccagatgtactgagtcgggtgggttcgtactctggcagatgaatccagatatgtggtatgtggagcttgcagttgggggtagcaaagttcatgctggctgcaatggcaagcttgtctggaggcacacaccgtggcttggtgcccacactgcaaaaggccctgttaggccattgcgtcgtgcacttcaggtgatcttttgtgtattcaatttattttgtctcttttctgttgttttgtaatttgtcatttttcttaaattttggctgttattcaatttcagggtcttgatccacgaacaacagccagtatgttttcgaatgcaaagtgcattggggagaagaagatcagtggtgaggattgctttatccttaagctctgtgctgatcctcaaactttgaaagcgagaagtgaaggccctgctgagatcataaggcatgtcttgtttggatactttagccagaagacgggccttcttgttcacattgaggattcccatttgactcgtatccaatccaatggtggcgatgcagtgtactgggagacaacgattaattctttccttgaggattacaggtcagttgaagggatcatgattgcccattcagggcgttctgtggtgaatcttttcaggtttggcgagatggcaatgagtcatactaaaacaaagatggaagaagcttggacaattgaagaggttgccttcaacgttccaggtctctctatggactgtttcattcctccagctgatttgagatcagggatgattggcgaaacctgtgagctccctcaggatgaaagaggaaaaggtgctatttcaatggcatcaagtcggtccaaagttgccgccttggaaaagacacgatgttaatgtggataatatgatttggaaaatggaaatttgacaaatggtaggatcctttggctagggcaattgtttatactggtagaaagttttagttcttacacttttaggagttatcaagtagggagtcttagtcagattttttttttctttcttgactttggttatgcctctattaatctgtaaatagagcataattgttcacaggttcctaaaaccaagcctggatgaatctttatactctcaaaatgcagaatccaacaagggcgttggagctcgactttccagttagggatagagcaaatggaggttacatttttagttttccttccatgaatgaagaaaatggtgaagctctggtatagcagcaaacctcttattaaccttgatatagttgtcactaatactcttgactgtattccagaagggcagtataaggaaattgccactggattgcctgagttttttctttctttttttttacttcagctaatgttttttcagttctactgttttgggttgtgttaatctaaggattgtttggttgatgtaaaactttctcctgggtctggaaatgactaaaagaggggtgttttttctagatctgcggaggtgaacagagtaggagagagcatacactctttacttttcttttacttgttttgtaaacaaacttatctggcaacatgggtctctcttgttgaatggtctggccatgtgtaccttcaaaatgtttaatgcttaagaatatgagatatgataaacagcttatctttcctcaatgttagtaaaattgtacagttttttgattaaatgtgttaaatttttttagatcttatctcattttttttctttattctctcctcatcttttattacaaaacatcattccatcatttattcgagttgtggggtcattaatatttatttataatatatgttcttgaatgttgtggttaatacatttccattctactctctgtattttttcttcttttcttatggtgctttacagcatctagtgttgggtgtttgaaagttcagtgacagtgtacagtggggttaccttttggggacctctttaatctttatttatatatttgttgccaaaggcccactaaaaccttcttgatggggtcactaaaactttattagggcatcactctttttcagtcataagtttgaccatttgttttggacagcaaataagattaaactaataatgtaaaatctatatgggagattaggtttggaattttcaatttgtttgcatcggtttgtggtgattatacttgtttgtagtgtgtaaaaatatatgattacagcaaagcatgataaggggtgaaaagtccagcttccaagtcacacaactctcccccacgtgacaccctcatcttccttttcattactactcacttaccttgctttgttcccgagtagtcaaagtccaaattcatgagagacctcttttaatgtttttatatttatttactttgtttttttatagttggccttataattggggagaggtctatatagtacatcatacatattattatatg

SEQ ID NO: 20019 - DNA, 4897 bp, Cannabis sativa
cctttataaaaattaatttaagttaattttcttaaaatattagaatgtatctataactttataaggtataaatatgatatattttttttaatattaaagtgtatctataattttataggtacaaataaaacatctaatcttaacttagttccctaatgaaagaaagatgttcaactaacataaaataaatctcacttaaaacatttaaaaggtaagtcaatttaaaggtaaaataatctatgagcaaatggttggttatcatagaaactaataattgccaacatttaatgtattcttttataaactatcataaatgaattttggagcttaaacaaacaacaaaatatcccaaaaaaatatcttatacaaataataataattatttttattattattaaaatgggcatatgcaaagtcttaaactatagttgtacaaaccaatgaaatagcaataaataaataaaataaaattaaaaaaagaaaacctaattaggatttggggctaactgattaatggtgaaagagtttgagctaactggattcgatttgacagagatctgtacttggaagacctatacaagacagaaccagagagctgtactgtactagattctttattaatggcagaaccctttcttgtaatcacttttctgctcctccttcatttccttatttgatttatactaaattttttatggttttaatttgatttcgctatcatttctaattgtttgaaagtactgggtaagcatcttattaagttatatgattttttttgtgtgtggatttgagttggtaaacagatgaagagcttaacttggtcatggttttgtgaatatatacataaatgtgtaacctttaatgggttggctttaaaaggatcaaagataatgaatttaacttagtattatattgtttatttattcttcattatttttttttcttctaaatttgattaatttatttgtcttgtaataataggatcaatgaaatgtttttatgatatatcataaaaaagcaacaatggagcattcatcagctatgaaatttccagttaatcctgaagattataagctgtatgaagaagtgggtcaaggtgttagtgccactgtgtatagagctctctgtgtcccattgaatgagattgttgctatcaaaattttggacttggaaaagtgcaacagtgacttggtatgtacctgttatgtattaacatttggtagaatatatgtgaatctgtgattgctttactagttttggttagacttgtatctattgtgttgctttttctttcagtgatagattttttatttttgaaacaaaacaacatttcttagtttattgatttcagtattatgatccatctttcatcatgactgaggttgttataagtttatagttatgcagttatcagtactgtatcttttgttgattttgtttttgcttgtgcatggatgttattgtctgaacaggatgtcattcgtcgcgaatcccaaactatgagcttgctcgatcatccaaatctactgaaagcacactgctctttcacagctggtgctagtctttggattgtgactccatatatggctagtggatcatgtgttcacataatgaaatctgttcaaccaaatggttttgatcagcctattatcgccacgttgttacttggagttctcaaagctcttgcctatttacattcccatggactcattcatagagatgttaaggtatctgttttgctatctgtaggaacttttgcagctatctttaactaactgcattgctgtagttaaacagtaattagctactgagaaatgaaacacaaattcatatagcttgtgagcctcgagcactgactgctgtagtaaaatgcgtttggtattttcacttgcttatgtgtgaaaatttcataaaatcctgtcatgtgaaatttatccatgtttatttgatatctgttattgttggtcctttatactcaagcattcattattttaccttactactttcatatctgcaggctgggaatatattgatcgatgcaaagggatcagttaagctagcagacttcggtgtttcagcaagtttgtttgataatggtgatagacggcatgcaagaaatacttttgttggaacaccatgctggtatgaattacaccaatctacttaatataattatgtatatttatactgaattactgtgcttaatgcattggactcaaccccaaatttgagccttattcttattaatttttttctacttatgtcttcaaacactatccacaggatggctcctgaagttatgcagcaattgcatggatatgattttaagtaagtatatcattcatgtaatgtaccccttgtacaccatttggagagcaatgtacatttagccgtgcaaaaatttaccattcagtagagttttatgcataaacatatggtgcttatatatttttaacatccataaatcggaaaactgaagatcaccgtcaataaaagtggtgatattttgatttcagtgaatgaacacaaattttcctatcatgcaggaatttcagatgatatgactatgtttggtttacttactaggtttatcttgtagaattcaaagtgtctaaggtttgttttacatatatgaatatctttatctatttcatttatacagagcagacatttggtcattcggaataacagctcttgaacttgctcatggtcatgctccactgtccaattatccaccaatgaaggtacatttcacgattctctgaaatatttcatattacttattacccgtgtatgcctaaaatatgaacttcaataacaaaagtaaataatgcttcttaacaataatgtaataatgcatatcatgtacttgcaaatcgataaattgtgtggtcttttcttctaattttgttaatttattctttggatatattgttgtgtaagtgtgccattaatgctttgttctttcaaaatctctcttcatatacttttaatttgtgctccacagtttgctgaaatgatttaggcaaaattttcgtacttagtttggaatgatgtttgcttttgagtaaaaattattttgcttatctaaatcatgccttttttttctgcaggttttactgatgacccttcaaaatggaccacctggccttgattatgaaagggacaagaagttttcaagtgtaattcccatttaatctgaaactttattgaaatgctgaattggtcactatactgagataactaatctattgcagtcctttagagagatggtaactgcgtgcttattaaaggatccaaagaagcgtccaacatcagagaaacttttaaattatcgtttcttcaaacaggcacgttcaagagagtatgtagctcagaccattcttcatggccttcctccacttggtgatcggtttaggatggtgaaggttgatgctgctatatttcaattttactgagtatttatggcattgtattttatattatcttgcatgtattaacctatatctgttttccaggaaaatgaggctgctcttcttgcacaaaaaaaggctatggttggagatgagcaggttttttttttttctttctttctttagggcattacatctctgcaaaagaatgtgtatctacactattctatgcattaaatacttccttgcttaaagcttgtattctttgcagcaagagtatatacgggcaatcagtgcgtggaatttcgatttgaatgatatgaaaaaacaggccgctcttgtaagtaggtcaatcctttgatctctttttccctcttaggattaacttgagaaagcattttttattgtaaaattgccaatctataatctattcattcactcataaagttgcctttcatttccagattgaggatgatgattttatttccagtgctgaaaatcacgagtgtataagcaaacagaaggctgaatatgataaattagttcttcaagaagaaacaaagcttatggaaagttcaaatcatttcaattctgaaaaatctggacaattcaagaaggtaataatatcatctcattttgaatgaaactcttttcatttcattcaaacttaagtgcccataatagatagatgacatttcgagattatgattaatctacttgcacttttttaggacgagtgcagtgatcttaggaatcttgatggttcacccgcttcatctcccgtatccttgcaggcacacaagtatgtaaaatgagtttggttgttttataactttcatgtagcgcgtgtgcgattctcaacatttcttcagctaatcatgcaattatttcatagtttttccatttaatcttcgcaaccatacttattctgtctgtcaaggctttaaattaataatgacctaaatttaagtgttctcggcatcatgtgttcttttttttctttttttgtcactgctgttaccatcaacttcatattattttacgctaatttattttctttattcttgtggtatgactatggaaaaattgattcagattcaaatttggaaatatttagtcctattgagtgaatattgcagtaatgttattacaattgtcttagttatttaaagtcatttatgtatttgtttcctttgcagagagcactgtacacatcatcttgagaaagataacagtacgtctcgatgtccttttttttcgttctatactttttaaagttatttcttttctttacttgtgtaagcagttttctgagattgatgcaggagagaatgtgtcagataaattggcctccccatccaaggggcagtttgctgaaaacaagagttccattcctaaggtaagattgtgctatttcaaaattaccataagctcatttgcaaaacaatcaagttgaacctttgatattctaaatcatacttaat

SEQ ID NO: 20020 - DNA, 1797 bp, Cannabis sativa
taagtactactataaatatgtgtcatgccataaatacgatgaaagttcaagatatatcaaaagctactaaattacgattaaattttctatcacaagtataaaaaaaatatgtatcatgtcatgttataccataaaaaaaaatataggttatgtcgtgttctatttagattaatgtcgtgctttactcgcatcaaccaattttcttataggggctaaaattcgttttttacttttctacattttatattttacgatgatgagctaattattatttttcgtgtcgtgtcgtgctcaaactcataaattcgaatttcactcaactaaatgtataaatctaagttatagtgaaagtcacaaaaggttacaagtgcttgtttggaaggctttacatcttaaggaatgtaatttttaatgaagatgaattctcatttaaatctgttttttttaaacaaaaaaaacaatcaaaaatacctgtgtttgtctcttgtccctttctagtctgcatcttccaccattaacacaccagctgccactcaatttaaacctcaaaccatcagtcaacaaagtcagattgatagtgttcatcaagactcaccaaacagaataccattcgttgactccccttcaagatcaactacacgtgaggtaattaatactgatcatatgtctgctaatcctaatgtatctaatagttcactaggtgtatttgttcaacaaaaataagagctttaccatgagaatgcaaccatgacgaaaacatcagttacaaatcatactcatgacatcactactttacaacccacacaccctatgattattaggtccatggtgggaattttcaagcccaagacatatttgagaaattcaaagtggtcaaatatatgtgaggaacctagttctgcagaaaaggcattgtagcacaaaagttagagaaatacaatgaatgatgaaaatgttgcactagtcaaaaaaggcaccttgacactagttgagactcacactacaccatactcgttacacccaagaatgatgaagatgtatcacgatgttaaaacattgtactgtgtctgggaatgaaaagtgatgtggtcaattatgtattgttgacacagtttttcgtcaacgaatctaagaagatcgtaaacaagaaaaatgaacacaagcactagttaatcaaagtaaattggtttgtgaaagaaaatttgacaaaaacatgcaaattttatagtggttcacccccttttggcggtaatatgctagttcacttagagtgttattgatctcaatacttgagaagagtactccaaagttcaatccccaagtgagtttttagaaagagatagtgggagctcaagagaatgatttcgttagaacctaaatcagggtccttttacacttcactcccccttatataggttttcatctaggacacgcttaaagtttaaaatatcttcaccccataagcacctttttgtaactatggttaggttaggtttgaaatacaaaatgataaaaaaaatatcacattttaaaataaatatctaaaaaaatgattaaaatttaatatatcttcaagatcatgttggtaagtcatgataggcacatgctgttgacgtaatgaagttgaggccccatttggcctgagatgatgttgaggtccccatctgggctgaggtgatggaggcgtgaggcctctttgtgaaaacccccatttggtatgagatgaaagactgagttaatgccgagatgacatgatggcgaggctccacttttggtccagacgatatgttaaggcct

SEQ ID NO: 20021 - DNA, 2638 bp, Cannabis sativa
tttgcccaccacccaaacacagttttccctaatgaattcctgcgtagaccaaatccctctggccaccgcagaggcatttccaggaagactcgaagataaaaagcaattaaacttacagtacttagaaccgagaacatgtgtccaaagagccttagaatccgtctccaacatccaacctaacttggcgatcaaactgaaattgacatctcgagcccgccggaatcctaagcccccacattgcttaggcttgcataacgtatcccacgcttttaatgccagaaatcggccctccttactctgacccgtccaccaaaaatgtctcaagaccgcatcaatttgattggttatctttcgagggagaacaaaaatcgacatgctataaatcgggatagaagcaagaacactttttataagagttcccctcgcagcttgagataaaagacgagccctccaaccttcgagtctagccgagatcttatcaagaataaactcaaaatcgctgctacgattgcccttaagaaaaagcgggtttccaaggaatttctcttctctccccatctcctccaagcccaacaagctttgaatctcctcacgacaagctcccgaacagttcttagagaagaaaaccttcgatttctgcatattcatcatctgaccagaccaattacagtatgtatctagagatttcaaggccccagcaacattaccttgttctgcctcaagaaagataaggagatcatcagcgtacatcaaatgcgatatcgggattccccctctactcaacgagtaacccctcaggttcccttctgactctgctctagagaatagccgagacagaacctccgctccaaggatgaaaagatatggggacaacgggtctccctgtctgagacccctctttggaacaaaagcctttgtaaggcctccactaagcagaacttgatactgaacagaagacaggcagtgcattatcatgttgcagaaatgagaattaaatccaaaccccttaagaactctcataataaaactcaattccatacgatcgtacgcctttgacatgtcacattttatacttacaaaagcctttttccccatcttccggttcatgtcatggaaaacttcattggctatgatcgaattatcggctatccatcttcccttcacaaaagccgattggaaaggggagacaatcttgtcaagcaacacacctaaccgattagcaaggattttagcaataattttgtaggtggaattacaaagacttatcggtctaaactcgtcaaaacgactagcgtggagcttcttcgggatcaaaacaataaaagttcgattaacctctctgtcaaaactgccgttagtgaagaactcccggacaaaatggataacttgattccccactatatcccagtagtctttaaagaacttgatagggaaaccatccggacccggagatttcagcgcaggcatctcccaaacaactttcttgatttccacaggggagggaatttccactagcagacggttctcctcatccgaaacacacagatcaagtagggagttgaaatcggagtcaaaacacgggttcgaagattgatacacttctgaaaactggtttatgaagaattcacaaagactttctcgcccttccacccaactgttactatcatctttaactgcccagataaagtttcttttccttcgcacaacaatagaggcatgaaaaaaacgagaatttcttgaactcacaagtacttgaactcttgtactaaataaaatagaataaaatagaataattttttaaactctctcatagtaaattattcaaaaaaaaaaagtgaaatgccaattaattatcactattgtagggcatcacattgggaaaaaaaaagttgaaatttctctaaatgtcaaaaatgtaaatattcatattagttggtaggcataaaggtaatactttcattataattacctcctaacaatatatatttataatgataattaaaaaaaaaaaaaaaaaacatatccaatagaacaaaataaaccgttcaattaaattgaagtttatgataagaagaaagaaagggtagtaagaaatggctataaccgcgtgaatagaaaaggtatgctgactgatttggattaatgtatatgcactttttctctttttttaaactatagaacccaccaatgttgtctccttcatcatggaccacaattacaactaaacctttttccttttttctttttctttttctataaataaaaccacacaaacatcttaccattaatccaatcaaatcccacttctcttttttcattctctccaaaaaaaattatggctttaacattacgttcatcaacttcttttcttagtcctaaggacaccataggcttgaaaacaccaaatcatcatgagttgttttcttcaagctcaatttgctttggtcaaaccaagcccattagagcaaagaataattcaataatccaagcaacaactcatcatcaaatctcacatgaaactgtcttcacaagtgtagagaataagcaccaccatgcatttacttcttcatcacctcatgctaccaaacatgacacaagagtgcctgtttttgttatgcttccattggacacagtgggc

SEQ ID NO: 20022 - DNA, 3100 bp, Cannabis sativa
gagcatgctcaaccacaatttactgactgaatttaaatttttaactaaacaaatctttgccatttattatttctgtcttccagatatgattatgagcacaaacatgcttataacttataaggcaacaacaaaacatttgagtagatgatctactttcttacctgcacgggcaagccgatttacccatccaggaataggctttccagtaagctgcatgcaaacttcactagtaaaatgattgcaatttttggcaattaaatgataagtgtccccatggtattctcctgaaaggtgttccataaatgatcgaaattctgaagcagacatatcaatgctgcccaacaacactgaacgtctaaaaataaatccaggacaacttttgggttcaacctcaaacaccccactagaagggtactcatgggctccaaagccgaactccataccatgtgctgtttatccagaaatattacaattgtattaggtttaggacaagtaacaaaataaaaggaaggcgtgaagaaactatcaaaacatacaagcatagaatgaataaaaagcaagaactagaatttctgcataataagtgcatgtaagaacctaagaattgcaattaactactttctaaacagaataagactagctgaggcttcattcctaacaatagtaaggaaaacaacagtttaatactaccttaggcatgtataccacatgtgaaaacttttcctgaatcatgtaaaagaaaggagtaacacattatggtttaagcttaagatggagactcatggatctgttcgtattcgatatattccccacctttgtcctaaagtctttgacagctcaaacttttagctttatgcttgtgaactaatccatgtcctgtagaaagccctaatgagggacaggagatcaaacataagtttatttcctgttgttttaacaaatttctccagaaacacctacaaaactggagctcttttgtataaccccacctatagaaacgcccatcaaagtttccaccataaaacaaactctaaaatgaattcatcacctatcccttttttttctccttacaataaatgcacagtagaataatccatactcaaacctccataatcgatcaaaccctgattgaagtacaagtatcaactcaagaaaagtcatgacaagtattggtttggacagttcttgggtctaacatccacaaaacttactgacttccatagcaagggaagccaggcaggagttgtactagactcaaataaaattaatgacacaccaagttcaagccatatgaagacacctaaattaatgcgttggatttcaaacgtgaaagctttaaaaactcaaacctagaactagacagaggctagcactacttaaaatagacccatagttcaacttagtccaagtaataaaaccaaggaaacatagcattcgctacatacaacacaagcccacacatacatgccccaagataagaagaacatcaattcaaatctactgctgctatcatcttatcaactatcaatgatccaaaaatacaattagtaattataatttcttagatcttaacagcaatataggcaagacacctgataccgacataaaatctatacacagttttaccaaatcaactagcataagatctctagttaaacatctcaaacacgcttaagctttcaatatcaaaccaatatttgcatatttaacatcagtcgtaataagcaatttaccattttactaataatataaattgaaaaacaaaaacgaaatcaagaagtcacattgagatgagaacttgcataccttcgatgcccgaatggtagatcccgagcccaaaccagtaaaggtagttatttacaggggttagatcatatatattgaggtacaacaaagctcgattagctttaccattggccgagctcgagcctgagctcgaagaaaataaccgcattgtaccgaatccccaccctcaaattcccccactctgctcaagaaatcacaacctcatcgtcttcccaaaactcaagctaagacaatctaatcgaattccaaatcaaaccccaagaggaacccaaaaagaaaataaataattaaaaaaaaaaagagcacccaatcaaaacagaacccaaaaccctagctcaaatccgtcaggttaccaaaaggggaccagacaaaaatatcaaaatggaaatggaaaaagattgttttcttcgttacaaaaatgaaagctttattgggttcgttaatggaatattcagtaaaaaaaaaagaatcatgaaaattgaggtgaattatggatttggggaaggagtggggatgacggtaatcaaggtttcttctgctcttttttctttttcaatcaaaagcaattcaacttttttttttattattattattctttttttaattttttgaaaattatttcaagtttgtgttctgatttaaaaatgactgtttttggagattatgatgatgtcctgtctttggtcattttccctgttatactctcttcttgaccactatgtctaatcttttattattgttatttaatatttgtgtgctttacatttaaatgaatagatttcaattatttgttttatttatttatttatttattatacttctattctagtcatggatgaattggatttgtcagaaggggaaaaaaaagaaacatagatggtgtggagggtctgccacgactttataataaatgcaacttaagatatcgtagggactagggagtggagtgatcttctcaatttcctccaacaagtttctttgtcacatacattaataccaatttaaaattttctttttcaaagggattaatgggattcctagaaaaatggaatagagatacattagcaaaattaaataaaaagtacataattttttagatgaaccctgtggttgctgaatgatctttccatttgtgcttaatcttcattgtcagctggaggcaatctgtctttatgtgtgtgattagcatcttaattaagaaggaccatctgagaacataaaaaaaggtttgagcttcagcgtaaagaggtgaggcaaaacccaccatagaagatgaaaaacatactattgggtt

SEQ ID NO: 20023 - DNA, 2262 bp, Cannabis sativa
tggacccctccaacacaacacgcatatttcatcacagctaaatgcaccagccgggaatcgaacccgggtctgtaccgtggcagggtactattctaccactagaccactggtgctttgtgaatttttgttaccaatattaattattgtatttttttgtttcaactatatatctaatttttataaaacgtttttgatatttgttattgtattttcgaattcagagtaagtatgtcgaactttgttgtgttaagctaacagaatttgaaacaataatttatttttattaattttaatttcaaacattctgtttcattcaaaaaaaaattaagcattctgttatttattcaaattcaaattatttcagatactattattttaaaaatttgttttgagcggaaatttacctttccatcattttctaaacactccattttaacttttctaggtataggaataaagatgttgagaatcaatattgagtctcatgatacctacagggaattgaatcaagccctgtcaaagtcttgtgttatttcaatgaatacagataagaagatgaatgaagtgatagataaaattggaaaaatgaaagaagataagagatttgtaagtattaccctcaacaaagccaatgaagtgaaaaaatttcatgaggacacaaagaaagcgttgctcattgagattttgaggttttgtggaatcatggaagccaataattcattgcttcaacttggtgatatgggatggcttcttaagttcatgcctgatagaggagacaaaacccaaaaacaaatggaaagtttaaggaaaaagttacagtattttgatcacattgaaagaaaggtaatgaataccttatttaaagtttaattgaaaaagagaaagcctttttctcttcttgttttgtttgtcctttttatatatatatgactcaatattatggacattttcaatcttgttcctaataatgccatttcactattactatgtgtttattttgttttgaaatgatgaataaaaagttttttctaatgtcatgattgaaggaatggaaaggttcaagacaataaaaagctttttcttatgtgttttaagtgtagttttttctcatgacaaaacaaatgtaagtgatgagattttgctatttttggatggttttagaattgaaagcatgtgatattcaactacaaaacattataattctcctaaaacaatgaagctttttaacagctactgattcattaagtaatacatagcttcaaaacattatacatgtaaactctccttaggtagtcttaatttgagcaattagaatgaaagagctaaaaaaaaactcaactgggtaggtttaaggtctaaatttgagcaattctccttttctcttcttgtttgtttgtcttttgatttttgatcaatattctttttatttctttccaataatattactacttcattattgttaatcattatatcatagattgataaaagaaaaactagttgatggcttaactaaatcatttagaaaagtaaaattgaatggttcggtaagaaatatacatgtccataagagtgtaaatggatcatgtcaaatttgatccggttcgtcctgttagatcagatactcgaaccaacttattcgaataaactaactcctttttttacaattttaattccgagtctctggtgcgggtctctaggtcccaatctccagtccgggtcttcggtccaggtcttgggtcttcggttcgaggtccaagtgtccgggttcgggtccaggtccaagtcctagtcttaattgaattttttttggggttacattacatacggaaatttctaacttttttacttttttttttctctctttgttgaacggaattttttcaaaaatactgttttttttttcaaaaaatactattttataaaaagttatcaacttttacctaaaatttaatatttttgtaaaaactcctttttcgaatggcggaacaaatctaattcgagatctaaaatattcgaatgtttcgaatcagaaatgatccatcacattagagtaccaatccaatccaactaactaaatgaatatttttgacagacatgcctacttatctaaaatttctattggtgctttttatgttggggagttggtcccactgtggcagcacttcgtttttcttcgataaaattttcacttggaggaaaaagaaaagcctaatttcaaagttaaaccaaaagcatagtaaaatggaagtctcaaaaacagtt

SEQ ID NO: 20024 - DNA, 3664 bp, Cannabis sativa
ctttatttcccactgcagaacctttgatctgattatcagatgtttgtgtagatgtttgatcaactgtatttcgatcctctaattgcatatcaggaaggttcttttctgataatttccgtttccttttagagttctttctctctcggttttccacattttcagctttaccctgatgtttgctggcttgctgcatgttcttcccctcagttttactcaggtcctcatctttcttagcttcaagaggttgaacaaagattttaggctcaggctcttttatatcttctttacctaatgtggccacagtttctagaacagaacccttggtctttctagtttttatctttttacaagactttataggtacatcagttgccttttcaccacaaagatcagcactgacgtttacattttgtatttttagctcagttgtattttggctatgtgagttaggcttgtttgacagcactgagcctttctttgaggctgaattctcttctaccgctccttcaacccgactaagtgaaacattcttatgcccagattcgcaaacatccatttgctgatctaagggctctttgacagcaagagaagcaatccgctcagcattaggaggacaatgactctttaaatttatcactttgtctgctgcacttggcgccttgtctacacttgctccactttgatcttcagcatcaagaaaagaagcagaattaaaataaatcatcagaaattttgtttcagttatatatctgaagttgtctagtaacacaaatcaaatgaacttgtttcacatatcaatataccagacaaggctcacctaataatgggagtgcatgtttttcagctcctgggacgatgtcagattgcgtctcttttgtggagattaccggaagagttataccatgtagagcagatgcagtgccaggcttctcacctaaacttttatggtgaacttctgcagtgatgttatagtgctcatccttccccaaagatggaacctcagcaccaactagatcaagtttcctttttgattttcttcttctcttattttccgtcttatctgcaggcttgcaagttaaaccatccaaagaagcattttcatttttattcttgttattattcggtacatggacatcatctgctcctgggataatatcagattgactctccttcgttgaggtttctgcaagagttatgccatgttcagcctgtgaaggagcagatgcaatgctaggctcctcaactaaatttttgcggtcaacttctgcggtgatgttacaatgctcctctgaaacatgcttcctcaaagatggaaccccagcaacttcttgatcaagtttactttttgatttctttcccatctcattattcattacatggacatcatttgtaggcttggcagttgaatcatccaaggaagcattttcatttttattctttttactacttgctacatggacatcatctgctcctgggatgatatcagattgcttgtcttttgtagaggtaacctgaagagttataccatgttcagcctgtaaacgagcagatgcggtgtcaggctccccacttaagtttttatggttaacttctgagctgatatcaatatgctcatccttccccaaagatggaatcccagcaactagttgatcaagtttactttttgatttcttcccctttcccttcttctttcccatctcattacttacatgaacatcttttgtaggctgggccgttgaatgatccaaagaagcattttcatttttattcttttcattactcgctacacggacatcatctgctcctgggatgatatcagattgcttgtcttttgtagagatttccggaagaattgtacaatgttcagcctgtaaaggagcagatgcagtggcaggtacctcacctaaatttttatggtcaccttctgcagtgcctaaatcatcattcctcaaagatggagcctcagaaaatacttgatctttatttgtagatttcattccctttttcttcttttttcttgagtccttgctcactgcatggacatcatctgtaggcttggcagttaaaccagccaaggtagcatttgcaagttgatcaatttttgtagcttcttcaactatcaaattgctgcgctccataatgtcattcatagatacaaactctggtttagaggtctccctaccagaatcaatatttttttcttgtaaatgttccatcttgcgtctttttgcaacttgatcagattgcaattcttctccaactaacttgttgcgctgctgaaaactatcttgcttagcttcatcacttttggtgctgatacacaacttctgagagacaatatccggcttagaggtgtctttacaagaatcaatatttgtttcctgtaaatgttcaagcttgcgctttctattagcaacttgatcaaattgtgaagtattagtattgaagccatagcaagttaataataggttgttagaatcaggattttggagaagttgttcctgatgatgcttctttacaaaagaagcatcaacactaagaaaccatgtcttcttggccttgtcaaaagcatcacttacgagcatataatctggtaagtaatagagttttccaaggcgctttacctgccaggtaaacaaaatatcattgatgcaaaccttgtcaaaaaacagaaaaaagatcagaacagttaactgtgcaaagaaactcaccttgagagcatgaacaactatttccccaacattagtgaagcacaatctgtgttctttctcaatcttccctgtttcataaaacagaagaatcattcaacattatatggaaacaataaagcacacgaacaaatcaccttaagagaagtaaagggtttaggttctaacaggttaagctttttttattgataaaaacattaaacttgattttctacaagaaaggcataaaatgcaaacttcagagaacagactaaacacattcaaataatcggtacttactacttagttcaattaaacacatccaagaaagccaaatatcaatattttctgaaaaataaaaaataaagaaatagagagaagtaatgaaggttatacctttgaggtcggaaacggtgtgaagttcagagacgaccatggcgaagtgagtgtcgaggctggtgtctatgaacacggtacggtcatccgaatgggaggtgtcggtgagtttcaaagccattgattttagaaccagaaatcctcggaggcggtgttgttgtggagtggattcgttcaacaccggccagtacggccagcgaaggagaagatgatcgggacagacgcagaagacggtgatgagatgagaaggaggctaggggtacggccgagtacgagagaaaagaaacattcttacaactcgcccgcttaaaagggtttgggtttcgactcagctgatgctcgtacgatgaactatcatatattgtttttaaaaaaaaaattgtgaagtaatataatttctagtgagtcaaactctcttgtgttttaatttttatacatttaactctcttatttttgataaaaaccgcacaaaagacagttatatttaggggtattcattcgatccaatacgtatttttttagtcaaagaacatccaatccgatccgatccgatcagcataagagtttaaatccaatccaat

SEQ ID NO: 20025 - DNA, 1208 bp, Cannabis sativa
atttaagaatggaacttaatttaaggaatatattatttaactctcatttaagaatggaacttaatttaattaatatattatttgactttcaacaatataattagttattatattaaaaaatagaacttattttttttctttttagaattatgcaagaaatgaaaatagaattttatatggtgcaaatttcaattaagaaaaaaaaaagtattccttggaaaaaaaaccttaaaaaaaaaaaaaagtattccttggcgaaaagaaaagaaaagaaaaaacaagtactgaaatgactggatcaaattgaagcctcaaagatcggcttcaagccttcaacccttttggattttctttgaaaacatgatgtggcaggaaaactgaatttttccaagctgagagtgagttcgttgaatttcttggcaaattttcaagaaatctattgttcagttcaactttccccagtaatctctaaataaagataaagattatttatatacaaaaagcatcttcagcctttccaaatacaagcccattttctggaacaactaacaagcaataataaagctttaatttcctaaaaaaaagcacacaacaaagcttattttgtgaaaatagttattgtagtttcaattcataacttagacgaatactaaattggtcatttgcatagtgaagctcttaatgcttggttttaggcttcttcacaatcatcacagagcagtgagcatggtgagcacaatagtcactgacactgcccaaaacagccctgcagtaatcaaaatctcatggtcaatatgagtaccatatcaatctccgattaccaacctaaatgcacactaaacaaatcattgtaatgtgtttgacagctgaaaacgacaatgaaaacgcttttgacaattgataaaaaaaaaagcgtcttgtttatgtggttctcattagtcaagatgacaacaaaggctacatattatatattagtccgaatacacacttaactaatcatatagtatttggtaagattacctctttattgctccatagccatgactgcccacaaccaaaacagatgcatggtgtttctctacagtttcacagaggacattccgagcatcaccttccataacctccaccaaaacatcattcacctacaaataatgcagaaaaaatatcatacaaatatcctgaatcaactataaattcatgaatttgtt

SEQ ID NO: 20026 - DNA, 3435 bp, Cannabis sativa
ttcttcctctaatgacatctctgtagcatcatgcacagatttcatgtacctaaaatctgtaacattattttttcaaaaaaaagaataattgttaatgacataatttatatgatatatgtgtcaagtactttttttattattaccaaaatattttctgcatattaattagaaaattaattaatatgtatacataccatgatcggatccagaggaagccaacgccagaacctgctgctggtgatgaaaattattaacacataaaattattaagaatagagataaaatataagcagcaatgaatgataccatttctgtattattctagtttttctctataatgtatttatattttatttgtatatatatcattaatgaaagctctatatttatatatataggaaacgatatggatggcatgcatgcaaattcaattatatgatatattcaatttaaaaaaagattcttaatcacgtgtgaaaaaacagttagatagatacaagcacgactaattttttttgcgtcgggtcttaaaattgatcgacccctatgctaccgacgcaaaattgagtaaaataggcgttactgaaaaaagatcagtaagaatgttagccatcaattttaaatcggtacttactactacaaaaaatcttatttttagtccaacaaaacttgtgattaaaattaaaaaattgtaactaattataaataataaattttatgttgtggttaaagaattgtaactaaaaatattaatcataaaaatcacaatttgttacgactaaatatttatgactaaatatttttttgttatgactaaaaattatatttaatcacaagaaatttatattataactaaaaataattttttttagtaactatagacatagttcaattttagacatgtttggctatcagtaacctctaaccgacggtttaaaactaacacctatattgaatagcattgggtttcttcttttttggaagataaggcaagcgactaaaatgatttaggcaaggttagatttgatagtgacatatgaggacaggataatgtttagtccacactcataattgtcttattatataatgttacccattaatggcttttgtcatcaaatgccattttatgtccccacgttttttttaaatcatttgttcaaaatgagtacctttaatcatatttcacaatcaggtctatgattaaaaagtaatattttatatttaaattaatttaaattttgacatattaattaatttatttatattaatatatcaactatttttgttgagtatttattttttaataaataaaaaattaattgatatgtcaaatttagattaattaacacgatataagatagatttaatgcttcagtagagagaggtattaaaaataactttatatagagtcattttatttaaataggtgtcattgtttcattttatgtccatatttaattttatttcctaatttttttgtttttataattatttatcaaaaatactcatattcccccatttttttttttttttttgcattcttctttgacttcgccattagagaatttttgagtcccaacttctatttttctttaaaaaaaaatcaaagttcttatttttgattatagtttaggttgtttgataagtaatttttaagaactttttagagaaaaaaaatggaggagaagaagatagaagtgaatgatagttttttttttaaaaaaaaaaaaaaataaataatatatagtgtttttaataaataattatatatgtaaaaaaaataagaaaataatatttaatggacataaaataaaataatgacacatattaaaaaaaataattttacgtaaagtaatttttaatacctctactcaagaattatccaaaattattatctaaaaatggcgagagaattattcctacctttcttcccaatataaattacaattacatatataaactattattgtaccaaaatatcaataccaaaaatcatatcatgaagttctccaacatttcaaggtctaaaatactattactatttcttcttcttcttcttctccaaaaaacaacaatttcttcacaaaatttccgagactaagtcccaccggagataggttgttcctccacaaccccgaaaccctaatttcgggggcttcgattttcgatgatttcgaaacgtttttctacaaccaaacattggatcatttcaattataggccagaaagttactcaacttttgaacaaaggtatttagtgaattccaaatattggaataacaatattaacaaattaggtccaatatttgcttatcttggagctgaagagcctattgatcaagatatcccagatattgacttcctcactgataatgctccttcctttaaagctctcatagttttcattgatcgaggtaacaattaatttatatatatttttaattttatatatatttgttttatttttatatatttagcaatttttatgttatatataatgttgatccaacaatttaaattattgtagaaatctttaaatcattagttttattaaatgtggtgattctttagtttattctaatttttcaaaaattaagaagaaatataatgattaattaaagagttttttgttctttgtatatttaaatgtaatttcattgtgcttcaaacctggatactttgcatcagaataagtatggatctttatttcgagaaattaaagatgcgcagaaaaaagtagttcaaatgcacaatttgcaaagtaaaagatgttccagcgaaggatctcagcaattggagaataaactcaatgatctgttattaaaggaggaggtcttctggcagcaaagggcaagggtccaatggttgcaggctggtgatcagaataccaaatttttccacaagaaggcaaatgcatgaaggaagaataatacaattcgaggtaattattattgtaaattaaatatagagtaaagtatagtttggataagaattttaatataattgcaattggatgtgatttacatgtgttttaattagggcaataaatagattgaatagtttaactagtgatctttcatgagtggcttagaataggttgaggaaaggtgtttcaaactcaaatcattaaggttaaggttatgtaataataattatgctaacatacttttaaatataggttatgttcttaaaggtgttatgaattaacttaaatagattaggtttgatggatacaagttacatcattgaggcaaagtatatatagaggaaatgacgtataaaggaatatgagttgttagcccataagtcttttataaatcaaatgattaaggttattttggttgtacattttaggttgatttaatgaagatcatatatggtgtacaagtaacgatgccataggtgatatcacaaaaaattactattctgcactctt

SEQ ID NO: 20027 - DNA, 3631 bp, Cannabis sativa
cattactatcgcgatacaggaagtgaactactataaatttgttgtgtctctcttataattacttaactacttatttattctcgccaatctagtgagcaggtataacttaaaagtttaatctagatttctgaaaccataaatatatattaaagtatgtgttttaattatagatatctaattataaaaaataaattctcaaaaagaaatttgactttgttttttttttttaaaaaaaaaaatatattgtaaaagttttttagattatattattaaagataattttgagcttatctcaggaaaaaaaaaaaggataattttgagctacaaaaatttggtatgaaaagaattattgaagagtaagtttatatttgatgttacaaatcaattagtaactttttttttttttttttaatttattggcgatacaatttagcttgaattagtattataataaattgtgttgtacatctattgtattaaattatgttgtacatcatattttgtataatgttatatgaaattttgatttatatcaaaatatattatgatgtaccaaacgaacttaataaatgctacagaaaaactagctattatttatatcaagttgaacccaaaattagtgacgaaactccgccactaagccaaacaattggtggtacattggtttaagtgttgaatcacatgaatgtttatgatttatattatcttcaattgttggttaagctcagcaatgtgtaaactgtaaattatcatttgggatcgacagactgaaagttaatcgagggttactgcatggctgagcatcaaacacaaaaaactaaaatgcatataactccgaacatatttcatggctggtcatcaaacacaataagcttcttctcttattctttttctttttcatttaaagaagcaaattataactccgaaaggctagtggtaagcaagagtcacctcccagacatgcaaaaccctccaaaatgctaactgagaatgcagaacagtgagcactgagattacaagacagtttcatattcgagaaggagaacaatgactcgtcaacaaacataaaatggcttccaaacagggcagcgtttggtaaggaaaagcctgtgtttcatatgtgaagacaacctcagacaaacataaccagagatgcaaagcccggagcaaatagataaaacaaacttgaatccacacaattcagcttcaaagtcttgggccttggcagttccactgcaattaagtagaagactggtagcaatgcattcaccacagcaatagtccctgtcccattcttaaatgcagcatcaaagtagactccgattctaccaggccaaaggacgaggatcagatgatgtcgagcgagtccaagcactctcttagccacctcgtttatgaaaatctgtggatggaaacaatagagaacaatggacacatcctcgtgcaactaaagataggtcctggtctctcagcaaaaagttattgattgtactagttatgaatctcaaatcggagtaagttgaactagcaaagaagaaaattaattgtttttagaccaaaaaggctatgacttctatctttaatattaaaatttgaaaggaaaaaaagaaagttgacattaaactctattaagaatttaagccatagtttccagcttgggggctgcacattctgcataaacagggtgcagcacatgaccatcctttggctcaacatgaacccacttccgaccgctcagcttgtgtcgttcaaactttacaacaccttctttcagagcaaaaagggtgtgatctcttcctatgcccacataatttccaggatggaaacgggtacccctctggcgaacaattatgtttccaggtatgactctctgcatcacaataagaaaagaaatataatgttttgggtttaaaaataaagagttctcatttcaactatttgcttttggttttaaaatataaatgaaaagtgtaaagttctgaatatgtcacttgagataacttccaccgttcttttactgataaaaaccaaaaatgacaaaatctacagctatatcaagcgaaacccctcagctctacattttctcatagtatcaaaacaaacagcttctcacctctcctccatatttcttcactccaagatttttgggcagtgagtctcgtccattcttagttgatcctgcacttttctttgtagcccagcgcctgaagaccaaactcaatccttctccagaaacatctagatttttcatttagtaaacacaaaaagaaaggcattagaacaacatttaattcccaactacagaatcataaagtttctagtactagtaccaacaatatctgatatgataattagaaaaaaggaaacaactcctaccagtagcacagttgtaaacaggaggatttgaaaccaaatgctttagattcagtctactacatattgatgctgtaaaattcatcattttgaaacctgaagcaaaatatgtaccaaaaccaaattatgaaaactgtcatcatgttgaaagtttaagaaaattaaatttgaagaatcattataagccaaaccaccgagagccatttttatgttaacagtgcctgatttcagtaatgatatgcccaataacatctacattcaattttcccaaagttacaaatgaacgtgaacctcacacctcattttcaatttttaacctattatatatggggctatctaactcttttggttgtgctttaaacgaatttttcaaaaaaaaaaaaaaaactttaacagaagtgtgaattactcaaataaaaacaatacatactgagtaaacagattgttgtgaaaagttgcatcccatgcaaaagtaaaaataagaaactcttgtcaattggttagaatgtgaaattaatttcagaataagaaaaggtataaaatactccttacatagttagtttaattatctaaaatatgagcacagcataaaagaatcaaatcagtataatagcatagtccaaaacaactaactgatgctcttcttctgaactatttttcacaggagtaccaataatctattctcatctcaactctgagcgtttaaagaacaaaaacatgttgatttaattgctttatcactgattagagagtataaataatataacagtacataaccatagggggaaaaaaactgtaacggagagaaatcaaaaaattgtgcaaagggaaaaaagaagagatgaaagctacaaggaaagggaaagaaagaccggttgttctctaaccacactcaaaaccgtacctgtccagccgataagtgaagcgcggatggtaatgaaggcgatcagttaaagaaggaggttgatagtctagggtagcgctggtgagttagaaagtagaaacagcattaagccaaaaaggccgatagagagagagactgggtaacggagagagagatgaaagcaggttgaaagatagaaggatgaaacaacctacggttttggatattatcataagtgggcttatgatatcgggctcagtccaacaatactacacttttatttaaggaaattagactgtatactttttttatattgttctcttttatttttatctctttttttaaatattgtactaattttacctctatcacttt

SEQ ID NO: 20028 - DNA, 2731 bp, Cannabis sativa
aaaaattaagtaattatttaaaatatataaagaacaggaagcccctttcttccaataactctggtaccatctgctaacattgtgcattattaatttgggggaccgtcgctgaacagtaccatctttatttttcttgatacgaaacacccatcgattatccacaatgttcatgtcaggagtgcgaggaacaaggatccatgtcttattttttataagagcaaaaaattcagaatccatggctgctttccacttaggcattttcagagcttgaagagcatttactggctcgcattcagttaataatgcaagtggtaaaggacagaaagcatgaaaaatgcgtggtttgtatataccagcctttgcccgagttatcataggatgagaaggtttctgaataggagcaggagataatggtacctgtggaggtgaggatggagtatatggagataatggtaaatcaatgtgaagcggggtagtagcagaagaagaggttttacctgactgagaaggagtagccaactgttgtgaagtgacaggagagggcgaggaagattctgcctgaagggaagaagaagaatgacttgcatcaactgcctcagcactagaaacaggttctgaagtaacagtaggaatatatggcagccattgaggatattgagagggactgattggtgaatcaatgcaagcagtagtgtaggtgaaaccattggcaaatggaaattcaaactcatcaaaagacacactactagctatatagacacgacctgatggatgaaggcacatatatcctttatgacttggactataaccgataaagacacatttagccgaccgaaattggagtttatttgagttgtatggacgaaggtacggataacaagcacacccaaaagctttaaggaacttgtagttcggggtgagatgaaaaagcttttgaataggacacctatagttaagaatgggagtggctaagtgattaatgaggaaggtggctgtttgaaaagcttcccaccaaaaacgagcaggcatactagagtgagcaagaagagtgagtccggtttctactatgtggcgatgttttcgttcggctctaccattttgttggtgtgtgtggggacaaggatgacgaaatttgatacctaggctttgaagataaggttcaaaagttctatactcgcctccccaatcggtttgaaaggttttgatagtggtattaagttgtctctcaacctgggttttaaaaattttaaatgtggaaagggcttgatctttggttttcaaaggaaaaatccaggtatatctactaaaatcatcaataaagtgtatatagtatctatatccttgtctagatgttataggagccggtccccatatatcagaatgcaccaaatctaaagcatgttttgattccttaactgttgaaggataagatttatggtgagctttgcctaattgacaactcgaacagaaatgcaacttagaaggaaaagactttttctcattgattagaacatgcttgagtacattaatagagggatgacctaacctaagatgccataactcagactcattaggtgaaagagtaaaacaagattcaacagaagactctagactagacatatgactgttatttaaagtaggggcagtgagacaggttgaactgctactggaggaacttgctaatggtgctgtgagttgatagaggccattgttaaccttcccttgaagaagaaccttcttcgtatccatgtccttcaaaacacaagaatgaggataaaatttagcataagcatgattatctttagtaagttgagacacacttaacaaatttttggtgatagaaggtacacaaagaattttatttaagtgcacagatttggaagggtgatttgttttgagaatagaacaaccaacatgagaaatatgaagagattgaccattaccaacagtcaaattagtcttaccatgatactcagtaggagtttgaatattaccagcattatcagtcacatgattggtagcactactgtccaggtactatgggtgtcatcagaggtagttggatagctcgagtttgcaacaaaggcttgttggttagagtttccagtatgattgatgctggctagaatgttggttttggttgtttttggatcgactaaaggctaaatcaaatttgtgttcacactttgcagcagggtgatcaggtttgtagcaaagttgacacactacatgcccttgatttcctcgaccacagccatgtccacagcctcgagaagtaaaagttcttccactacaagagttattgggaggaaagggctttctgtttcgagcaacaaagttagcggaaggaacattcagattgataacaacagagtcgtattcttgtccaagaccaccaaaaatatataaaatcaaatcatcatcactgaaaacctgacctgcagcagttaaaccatcagcaatggttttcattttaagaatattatcatggatagagagggatccctttttgagagattgtaattgaaaacgaaactgaagtatacaggccctagcttgagtagtgaacaaactctcaagaagaacccaaaaatcacgagagaactagcagcaaagcacatgacccaccatggcttctaaaatagagttcaataaccaactcaaaatggcttggttagttctaatccaaagaaagaattgagggtttacctgtctaggtagaaggggattt

SEQ ID NO: 20029 - DNA, 3178 bp, Cannabis sativa
  modified_base (1584)..(1584): a, c, t, g, unknown or other
attattattattattatctttctataaactaattactattatatatataacttgataagtttaaaaacaaaaattaaaacctaagtctccttctcctttgctctcttatccaaatcaaaccaccaccaccactattttcttcttactcccttctgtccagaccagcttcttaaccttctagtaatagatagaggtgaagcaagtggaggttagagcttaaggtaagtgtatattctattttaatctttgaaagcttaggtgttaaaatttgattttgtgttttgtggctgttatggagtttgtgagcgtttagttttgactttgaggtgctatacgattggttttaatattaatttgataggtttgctactgttttgaggtaagagccaagtttgagcttttaagctcaaagcttggtctctcgtggcgaattttgattgagagcatgatttagatttctcctacatagagaatgttatatggataatgtatgattgttctctgaagtttggcatgatttggttagattctggtgggattttgagaagttgaaactcgacgtttcccattcttgtgaaaacagtagactgtttttggagcagaaaaaaatggtccgccatttttggtatttttgtgaggatcaaaattcgtattttggtcataatttttcacccaggtgtctattttaaatgttttatataccgttttaaagcttgtgaagagttctacaatatggtatatattttcgagccagagtataatttggtcaagtatcaataatttttatttgtttgggtatgtttcaataccttatttatactatttctctttttctttttttctctctttcttatttctccctcttccctcaagctttaaaaataatttttggtcacgtcattactcgaatgagctaaaataataccattgtaatttactcttcaatataaatattttaaaatgtaggaaacatatattttttttgctatttaaccatttagttatcaatataataattagttatattgttttatactttttttaaatttttttttacttattattcattttaaaattttattaattgaattatatatatattattatacgataattaaatagctttcaaaataacaaaaatatacataaaataattggtatataaaaatagtagcttgttatattacatgataattttattagttttttttttaaaaaaaataaggttaattaaatctattttaaattataatctacgtattataacttaaaaagatgtatacaaataatttttagaggtaactaaaatgtatttcaaattatattatttaaaaatgaaattttttataaaagaaactaattgatttcttattaacactattactaactaaaaaattacataaaaacgcaaaaaaataaaaaataaaaaaaaaatctgaaaatgtcaaaaacatattaagtgcgtcagagttggttgacgtgacacatctagtaaggttattattataaattagatgaaaaaaatagggtaaatagcggcataagtactcaaaattttaagtttgtaagcggcataaacccaangtttatttttagctgcataagtatccaatgtttgtaaaactgtaattttcttctagttttgtcagtatagactccgtttgaattttaaataacatttggaagtaactggtactacatctttctgtctagacccaatgatcaagaatttagactttatatgtggtatgttaaagaaaataacagagtttgtattgacaaaattagagaaaagttacagttttacaaacattgagtacttatgctgctaaaaataaatattagaattatgccacttacaaacttaaaacttttggtacttataccgtcatttaaccaaaaaaatatacattatatattgtaaacttataagaaataaaactgctatttaaggaatataaattttcaagtttattactaactacaaaaagaaaaaaagcctatagttgaccagaaataagttaattattattacttgtatattattaataggaagcacagatctgatccaccgtaaaatttaaaatgtgttttctaattattttattaacagtaaaatagaaattaacaaattttattcatgcttaagatctagctttaactttaagatatgcatggagttattgaccatgcaataatactgatatttcaagtcatccataactgtacattttaataccaaattacatcacaaataagttgtcatttccttaataatggattattaattttgcacgtcagtacttgattctggtataatttattttttaagaaaaagagtgtaaaattgtacatgaaagtaaaacattgcatttgcatctttacatgactacaatatattaatttccatatcaattcatcattagaaataaaagttaagttatcttaaaagatcaattatacaagtttgggatgtggatgtttttgattggtagagactacgtactttataagagaaatatttatataaatacagaatgacactgaataatgaacgcatgctaaacaagaaaaagcaacaacatatttattaaaacaataaggcaataatgtaaaatgtaatgacttgaaacaacgaagcatggtgtttttattacatgaattgatcatcgatttttatctaataaaatagttttttttttttttagaaaataaggtgttgtaactttctctaaggcaatatctatgaaactgataataattataataattactggtgacatgtaggacagtgatctgaaagttagttttataatagatacatcttttttatatatattttgagagaacataaaatattaattattattattattatgtatatatatagcggtagatcgatagattatattggtggcccatctataaaagctttgctctccaaaaaagcgaaaatggactacactttcacatgtcaaacttgtacttatggtcctatattaatgcatgtttgatgttaacttgtaacgcataattattatgaataaatgataagctagctagctttggcaaaaagcttatgtggttaataaaggagtaaataaagggatttttatgtgtatattattccatcgtgtgattgttttctgactcacttgaaattgtaggatgtaggggt

SEQ ID NO: 20030 - DNA, 4230 bp, Cannabis sativa
  modified_base (3359)..(3367): a, c, t, g, unknown or other
ttgaaaaaaaaattaaaaaaaaaataatatatagagtaattccaaaaaaaaaaaaaaaagtctagccctgttactcctatatagcaataagaaataattaacaaaataatttatggttagattacattctatttatgtatatttattttcacttacataacaaattacaatatttggtatacattataacacatatgtaacattctaatatttaaggcgtgttgcgtgtttttattgtactaacgtttgctaattaaagttttgacttagaaatttgaactaaactttctaaaccacacactcgctcgttagattagcaaaaatgaataagtagttaattaattataagagagacacattaaatttatagtagttcactctctgtatcgcgacaataatgaagctacatctacttcgagtttttatttctcacgagatggtattaccgaaaaagactaagtgtcaaaaactcttacctgtaagtagttctctgaatgtgaaaaatgagcttatagagctccccttttataagtaaaggatgcccacaaaaatagaagaaaatacaaataagatgtttttgactattgatgatgatctaatggtgaaaattagctcttagtggtgatgaccatttattggagcccgacgagtcccgctgcaggtaactcggagcttattttcgtaactctcttggggtgaaattcaacgacgatagcttcaaaattattattggagtgtgggacgtgacttgatagagcattgaattagctttgaaaatgcaagttgaattgcgtcaatcagatcaaaattgagtgagatatgattgttttactaaagacagttcatgactcagtgctcaggttgacatgcgcccaggttgacatatgacgtcaacttaggcactaggtaagtgtaaaaacatccaagggatatactttaagatgcctaagtgatattttgacatcacttagtcagtttctgtgttctagcaaagctggtcactagctctcgaagatgttgatgttccacagaaatgagagactcgaaactcttcatttctgaatgatttggaaatgagaaatgcaaagttgtgaatttgatttctctgacttcatggatatttgctattgtaaaaaactagacagacggtcgaaatggcatcataattggataagtataacccagtgcactgagccatttgtcaacctgggcactgggtgcttactaccgagctcctgggatctcgttttttatactttcaaggcttctaagcttgaggacgagatctgtttttgactattatggattcaatagttgcatcaaatttgacatttgagtaataaaaggcaaggtcctaggttgattgtcaacttgggcgatgggccccttttctaggagcttgagtttgtggttttctccccgagctagttttcttaatttttcattatttatgatgatggaaaaaattcctgaaacactttttattgaacttgattagaaatagcccaagttgacaatatatcaacctgggcgctgggcccagccctgggagtcaacctaagcgcaaggcccagtcctagatgtcaactagggtgttgggtcctagttttgccccttcaaaaattttgtttagtccccataaaaaaaataaaaattttgtttatacatcatactttatgtaactttcctaatctaaaattaatggaagaacaaaacaagttctaattttgtcaaataatattgaccaaaattgaaaaataaaataagttcaagaaccaaatatatttatatataatatatatggcaatgatgtttttattttagaggtaaacagattaaccaagagaaattgagaatggtttatcttccaaaacataactatacatacatatataatttggcaagctataactctcggactcttgctgcatctagttttgttgggaagaaatatggatattcttgacaaagttttgagtacaaggagtttgagtagagttgtatataaacttagacactcctataaatgtataaaaacagagaaagagagagattaagtagtaattttttaattgtaggccaaatatggtggtaacaaggcaattttcacatattttattttagttaactgttttttgtttagtaaaacaaagtaatataggtgacacttttgtaatgtaataatataaatcgaaaattgcattttgggaacatgggaatttggattaaaattttgtcggcaacaggcaacaccagtagaaaattaagatgaacagtaaatcaaatggtaaatcaaatggtgaacatgacacgtgagcctgctcccattaaccaatgaaacatttatggaccacaaaaatggtcattggtcagggtccactacaagattgcctctccatattgaatggtggtaagctcaaaattctgagactcgccaaatactataaataatactattctatttgtagctcctagtttagtttaacattccaaatcagatcaatattaccaaacgagcttattaaaactggtaaaataatggaaaaccatacatcaattaaggataaaaaagggaagtaaaatcatattattagtagtggttagtaagtgatttgttactttaaaagtttgtcttgtgccattgccatatcaaacaagaagaaaaaaatagataaagctactttctggccccaacgtagcaaaaatagacatatgttatcaaaattggaaatatataatgggcaccgacatctttttgggaattttaaattttcggtatattaactttttttttttttggaattttaaattttggtattttaacaatttaccatgaaattatggtattgtaataagagtgggaagttgctttttgaaattatggtattgtattaagttattttcagatgtaaatattgcaataaatttagtaataaataaatgttatatttattataaggaaattgttattaagcatgagtggtacctatctagatgtgttattttgtaattggctagcgatacccctaaaaattattatattaaattatatgagacccgatacttaattgaaccaataacgaataagaaggtgctagacaccactggtaccttttagtatttctcttattataatatttgttattttgctttaatgcacattagcattttatgttgtagattatgataaaaagcaaaatattattaatgtacataaattaaatatttaaaaaataactaatgaaaatattgtaattaaaaataaggtaaatactattttgcactttgtattttgcaaaagttaccaattggtccatctgttttattaaatgacaaaatagactttgtattttttaaannnnnnnnnataggaccctgaattgatttttttgtcaaaataaaacttaataataattcgatctagaaatgttatgaaaaatctggttacatgtttttgtatctgttcatgttaaaaattatcttaaagcttgttatattaaaaaataaaattgttgaaaattgagtttagggttttattcttaccattttggaaaatataatgttcattttgtcatttaacaaaatagaattctagttggcaacttttgcaaaacacaggagtcaaaatgtgatctcaagtatttataagagacctactgagtttggtacaattgtgtatgacattaaaaagacctctctgtcttttttagatatttcattctcattgtattcaaactcataatgttatggctcattttttagctcgtattgctttatcttttgatgtttctcaagtttggtggcctggtttacttttcgatctttaagactatctttttgtattgtatgcgactcttttggccttgtgcctttttttaaataaaattattgcttctttaaaaaaaaaaaaagttacaataaataagagaataaaataaaattgtattctttctattctatttcattattctcaattgaactccttccaagtaaattgataattgagagagtgtaagaacaaagtaatgactagaaaaagattgtgtcaatcaatgccctacgtagtaaggtaaatttttttttttgaaagaaccctactcaataaggttagagtgcttatttttcagaaccatctagctcatgtggtcaagggtgcgtacgtgggaggtcttgagttcgagtcttaagtcgtgcaatacaattctcggtttaacgttttttggttttttg

SEQ ID NO: 20031 - DNA, 4189 bp, Cannabis sativa
tattattattattattataggtcctttgttgcctcatgtacgtctttatctttaatttaatgggccaaagtaaaatatatatataaccaaaaaattgtaaggaaaaaagatttggaattgagagatatatattgttatatttgttgttttctaagtgaacaaaggcagtcggaaacatcacctcagtttgtgttttctgtcgtcttttagatgttttccgagaaatatatatattattttgttattatattgggtcatgatcatcagagagagtaaaataatttcaacagattatatgtaataagttgtgatagcaaatttgtagaaaaatctcgaacaatctaatttgaaaacattatacaatattgtacgtatcctcattttttaattttttttttttttttgaaatttagctaaaatttattagtcattgtcaaaaataaactttgaaaggccaaacaagattaatttgtattggagacaagtggtgaaggtgaatatgtgtgggatgttgctactaaatagaattgtggataagatgaatacataatgtttacttgaaaggatagagatggtagagttatgaatatcctctaatgaagattgttaggttaactttagtttaagtttcgggtcatttttttagggtattttttgtttttagttttatgactgttttatgcttgattctctttatttctggtccccggacattcaaattagaagtattcgtgagaatagagtggacaaaagaggaaagagtggagaaaagaactaaagtcctttttctggcaaagctcgtcgcggtgaccgttcttcctagtcgcggcggagaatgggagagagaaaattaatttgagatgtcgtggccgccgcgactacgggtttggtggtcgcggagaagccttcttgacgagttatgagcaatttcgtattttcacgaatttcaaaaggaaaactttactcatttaggggctcgtgatttttttgaagattattcaaaattggaaacctagaacagagaagagaacttcaagagccgcttgtcgcgatccgaatcaatttctccaaccagttctttcttctctcttaaatttctacgatattttttgttttaaatttgattatgggatttgattatggtgattatgaactaaggtgacgtttggttgggaggaatgaaaacataagaatgggaatggtgaatatgaatgaaatggaataaaatttaaaaaacataaaaaaaattgataaataaattattaaattttttttctcatcatgcattaaaatggtctttctttctattttgaaatggaatagacattccaccaaaatagtggaaaggccattccattggaatgacattctaatattatataatatgcaaccaaacaaaagaatagaatgaaaattgtttcttttccattacattctatttcattacctccacataaactcatatttggggagatgatgactgttgattgacattatttcttaacttaatgataattattatttcttctttcttgattgtgaatttatctatatttgagcttaatttcatgtttgagattgatcaccttaggcatgttttatggtccaaattcaaaatgtgaaaagtgagttttgggaatactaaaattggataactagattttgatgtgaaacgaaagtatttgcatagcttttgtgacatttagattattttttaatgcagatcatatgttggtctatctcagagatcattagataacacatgatttaggacctaaaagatctgaaaagagttatgttaattctataatctgtcattcacattaaaaaagaagaatagtaattagcattaacaagtgaataattttagcaacgagatacttttccctaatttctcatctttgattaaacccttttattacttaattttattttctggttttctttatttttattattcaacaaaattattagttaccaaacagcaatacgagtctaatttagtggtattcagtttaatttcctgtgggatcgacctcacatgtgtgagtactacttgattacgtgcacttgcgtagctgtttataatttgcataacaaagatagctggtattagagataagtagtgaaggtgaacagaaaataaactagtatatgactgaacaacaaatgaatcattgtaaatacacaattaacttgggttactctgtgttgtcctcttcgattgagagagtaaaatggtatggtcatgtgtggggattattcattgttttgaaacatcgattcattttgtggctggcaatactagatcggttatacactagagaaagactaatctgattcaaagttagcctaaaatcatcatgtcttgtgttgtgggcttcatgttgaggataccaagcatcaaacttttgagtgtttctatagtagaagatgtttggatattgtgggctttgatttttagagagaagctctgacttgtgggtagttttttgaatatgaaaaataagctaagggagctcttttttttattggtgaagaagatccacataaataggaataaaataacaaaaaatataaattggatatttttgactgtagctaatgatctaatgatgaaaattagcttttaaaggtgatactcattttttggagcccgacaggacccactgagggtaacatggagcttatttttcgtaactcccttagcggtaaaatttaagatcgatgacttcagaattacaattgaagtgtcacacattacttgatagagcattgaattagattcaaattgaaagtttaatcacgtcaatcgaatcaatattgagtgagttatgggcattttactgaaggtagttcataacctaacgcccaggttgacatccaccgcccaggttgacatccactgcccaggttgaaatcctagcgcctaggttgacatatgacgccaatctggatgctaggtaagtgtaaaagtatccaagggatgtactttatgatgtctaagtgatattttgacatcacttagtctatttttgtgttttgacaaagcatgtcaccagttctcggagatgttgatcttcattttgaagtgagtttcccatgttggaaatgagaaatgagaagttgtgaatttgacttctctgacttcatggatttttagttattttgaaaaactagacacacggtcaaagcagaatcagaatcgaataagcagaacctagcggaccaggccatttatcaacctgggcattgggtacttcattttgagctcctgagaagtcgttttaatacttccaaggctcttgaacttgagaacgaggtctcctaccccattttttgaccattttgaattcaatggttaaatcagatttggcatttgaatgatcaaaatcagtgcaccaggttaattgttaacctgggcgttgggcattcacaaaaaattatggtacacgagagccatatatgtcacatacaccttgatatacgggagtcaagtgttaccctggtatacgggaaccagaagttacatggaaattcaaatatttgcacacctgagtatttctatgatttaatgaaacgttgatgttatctttaataacccagtttctaaatcctgaagtgttagtgccaatgctggttagtacattaagttgatcaactacacatacagactatttgcataccaaaattaagcactattatgatttgatatataaacacttgaggtcatacaagaatataatgaccaagtttataaagctaaagtgctactgcaagtgctcctccgcagatcactaatagtgaattaattgtgacatataaacattaaaagggttatttgtagtagtgaatttgttgaaataaatctccacatgcactgtccagatcaacattgtttaacaagaaatacaaagtattaaaccttaggggccttcggcctctaacaacctactgtgacaaaacttgtagttggttgcaaagtttgttaaaactgttgcaactaactcccaactctctcttctactctacagttatacatacatgcaaatcaaattgaaaaatagagatcagattaggaaaatttagagaggaagagtgaaacgccctaaataattaggcacgctacccaaaatgcttatgaaaccctaattccctaatcgggattactaattaaaatagcgcagaa

SEQ ID NO: 20032 - DNA, 3908 bp, Cannabis sativa
aaatgttatttttgatctttattattaggacacaaaacccaacagtatacacctaggcagcatgcaccatgccgtttaggtatatgcctcccaacctgggtagcatagtagtatcctaagttcttcctggggtacatttcatcaattataagtcatttttcaaagaaagggtaattcaaaaacatcaaatgggaaaaagaactaaggctagaagttccctaatgtggagcacacacctgggtgacatacactatgccgccgaggtacatacctcacagcttgtgtgatatggtgatgctcccatgtgactttggggtgcggtttcctgatatcaactcatatctcgcaccccatgatctaagaactatcaaatcacgcttagtaactcattttcaaccaagtcaataaataatatgaagattccccctcctaggtatggctcagggtagtatgcatcatctctccaggattagacctgggatgcataaatttaaagtatgaaggaataagcttcatcaagatactctaataactccacaccacaaccctaacgcttagggttcaatcatgagacaaagcatgcctcacaagaaagaaacacaatacagctcaaaatcgaatagagagtatatgtccctccttggtgacaaacacctatgctaccctcttagaggtgaacaacaagctagaataaccacatcaaacactcaagatctaagctcacccaattcccaccaaccaaggaagctgattggggtgtaaatttgtgcatttaatgttaattgtggtgtagattttatgtaagtaatgttgattgatttctttttcgctataaatattagacttccatcaactaaaaaaaggttcagaactttttttcgtagaaactctgctaaaatacatttgtaattttatctattcttgagaaactcacctaggctaccttatgatcttgagttcagtatgtaaaaaaaatacagccaaaaggagagtaggatattgccacggaaattggagtcaaacctctataacaaacctggtgccacctttactatcttttctttcctatatacttttacttactttttgtgactccacgtcagttgacccaaattcgagttgaaattttggtactttcattgatagcaaagactcaagataccatactgcaatatcctgagattagtaaatggattagcagtcctaatcaaaatgaattaactatatttgagtaattatattattatataattatttatatgaaatttatttgagaattatcgcatttaatttaagttcccatttatgagttaggttaggagtatttttgtaattttgacccaagaagggtaaaattgtaatttcaaaatttattatgctaatagactatattattatatagtatgtttatattttcttactgcatgtaatttttgacaagttggtacagttcagtcacaaccgagtatgttgggcccacaccgagttcagggtctaaaattattttattgtgtgattgtgtagcataatttattagagaatatatgaatgtatttgtgtaagcgtaatgtctaaatttttcttagttgtcatttatgtggattagatgccttgtgggcaaaatggtcattggaccaattttaccaaaaatgagttaagtcattttttggatgaaatataaagtgaaatagttatttttttagtttttggaacacttccactgacctctctttctctgtaacctctcttggcaaagttttgatttttatgttggatttggcgtgatttgagaggggggggggattgctgttagagcttgtaagaaccattgaggtagtaaactatccctttgttttgtgtaaattctgaatttaagttctggaagttgcgtgatgattttaggagttaactttgttgccaattttatgagtttgagtaaaaagcttttactttgttctttttggaaattttggcatgagttgtgtgattttaggattttaaagcttgaattatgtgatttaagctcaaatatttatatttttacgcatgggtatgttttgatgtagttaacacctattattctctatgttagacttgtgaaccaatttgatgatttcgatgaagtttgggttgagtttgtgcattttataagcttcaaaattggatttttgggtttttcaaacctagtcgtcacgaccagacttttggttgccgcgaccaaaccttacgggaagcattcccgatttttccagaacttgttttggctataacttttgactcctaactctgatttaaatgttctttatatcattgtgaatcttgttttgagccctactatttggtctagagttggactcttaattgtgaatatttatggatgtgattttttttggggatttaaccctagtttgtaaaacctgataattgtaattaggattaccgacacttggtcagaatcacctgtggctcaagatttctccacatacattggaaattagttaagatagagaaataatcacatagactatagtgcagtggtgcatttttatgatatttggttattattatgaaattgtgacctagagttattaccctaagtgtgtattattataaatatgtaataatttgttaattgaatatctgagtagagttatgtggggaaggcataactaggttagactcagtaactataaccgagaaaaatcctagtaagggcttaaatataaaaagacgtgtgagtgtaacacataagtctatgctaaatagacatttattatagtgatattattatatggaataatgtaatataaagtgcggtggcacagtatatatacacgcagcagcgtactgtgtgaagtgtaattattattataattatcatgctgtattattttttgtatagttgggcattggcttacaggtgctctattatgcaagctagggtaaagtagtgtcgggtcagccatgagcaaggccgacctaagcattttgggggccctgtgcaaaattttaaaattgggctctttaaaaaagatggtgtacattaaaactacaattctattactagcgtttttttttaagattcgttcataaattttcaattataaatttttatgtatgtatgtataataggaaaaaaaaaagaaaaaaaataggccttttctttaaaaaataaaatgggccttaaaaaaatgggggccttgtgcaatggctcaagctgcctaatgcttgggtcggccctggccatgagactgaggatgttaaggatgacttgtacatgttccggtcaagatagaccacaagggttgggtctaataggaattgtatagaaattttattttgccgcttaggtctgcctataaaaaataacttgtaatatttttaaaataattttatgggatcccaaatatgtaactttaaattattttagtttaaagtaaaatacatatgttaattgcaagttatttatttaattaagtgtattatttattttaaataacttggctaatagaccccaattaacgagattagtagattgtaatcacgacacatggtgttcctctgagtaggacgttacacataccctctctaataataattttgaacactaggagacccagtcaagagctacgtgaagtggacacttctgacctaccagagcatggacaaactgccactaacttagctgctaggaggggttataaacctctattgaaccctacttccacggtaacaaggactgttaatccagttactatgaaagcagggggtgaaactaccaccacaagggcaaagacaagtgttttgccactgcgtaaaccatccacatggattcaagagtcactattctattttctgctggggtggtactagggtcccaaaaacttgttgggtttatgccctaaata

SEQ ID NO: 20033 - DNA, 5683 bp, Cannabis sativa
aaaaaaaaaaaaaaaaagacctacacataacagggtaaccaaagtagaagaacatgatccaacagagcagagcccaaatcaccacccctcattttctggacaattttctcctgtccctcaaaaccaaccccttttaatttttcttctctttacataacagaacaggcattaggattttcatcactgaaatactgaggagggtaggcattataggcattaggattatagatattagcattaggaacagaagcaatactaatattgttattataggcatacatattttccataccataccttggttgtggatagtaataactaaactcattcttcttaagctcaacaacactattttcctcaacaacaacaccttgatcaccttcttctttcttttctttcttctcttcttttccaccctctgctgcaggtgcaggtgcaccctcaccaccctcaccaccactaccttttttgtctttgtctttctcaccaccttcttcagcttttttctcttctttactttctttcttatccgagtcttgttttactatcactgcatgttttcctgttctcttgtacacgtattcaaccaacttggttggatccaatgctccctttactgttacttgtgagctttttagatctggttcagctgattccactcctgtaataataatcataattaaacaaaattggatctagactagacactaaagtagtggattgaattgagggaatctaaatatttttttattagtgtaaaagaatgtattgattttgagaggatttgttagacagtgaaagctcttaatttttattaattttgcagaaaaagatccgtttcatgctgtcaatagatttttatatattaaaaaataaaaaaaatcttaaaactttgaaaagagaagaaaattgaaggaattgattgcatgaaagtgaaaaatcttaacctttcattctcattatgcgctttttgatttcttgtgcacaagcttcacaatgcatgtaaacttttaggaccactgtcacgattggaacctgaaacatcaaatatcaaaaatcaaatcaaaccccattaaagaaaatgaaaatcccagttgaaattttcttcaaaaacagagagaatttttttttaaaaaaaaaaaaaaaaaaaacctcttctttcttttcctctggtttaggcttctctttctcttcaggctttttctcctctgttggtggttttggaattggagaaagaagctcaacctgtctatgactcttcctctgaaccctctccaataccttaagtggatcagctttctctcctttaacaatcactttgtgagttttacaatcggtagtcacatcttcaacccctgaaaaataaaatacaccaaatcaaatctccaccactaaataacaaaactttaaaaaagtttcaaacttttttttaaaacggtcacaaaccttcaaaccctttaagacagcggcggacttttctagcacaaccttcacaatgcataaaaactctgagaacaatctcttgtggcggcggaggaggcggcggagcttggtctttggaagcttcctctgttttcttctcttcctttttctcttcagctacaggagccggagccggagctggagccgaagccggtttctcttcctctgttttcttctcttcttttttctcctccgccggttttttagcctcttctggttttttctcttcaactttcttctcctccggtttcttttcctcctaaacaaacacaaacccaaatatcagaatcatccccaaaacacaaaaacaacaataaaagccattaaaataaacaaaaagcaatgagtgtagcagtagtacctctcccattatcaactcttttgagttaaaagctaataagcttaagctaaagtggtttgaagttcaaagctaataaaaagacgagtttttatgggtggaaaactctcagaaagataagctctctgtttctctctctcactcaacttgtattgcaaataaagctcttttctttcttttgtagttttttgtttgggcgttgttatttgtagtagtaatatagctattaacaaaaaaaaaaaaaaagaagtcttttttttttgaagagtctctctcttctctgctatggcagactataataagagtgtgaggaccatatatttagatctaaagccactggtttagctctatcagaaaccctcatcatcatcatcatcaccatcatcgaagctatggcatgacgtggcatttaataagcaggcacgtgcgatgggaagagggctgtgctcgagacaaatagtttttggcttttttggcttttttattttttttattttctttttattattattattattttgagaatttactagaatttattctggtgtgtgaatctccttcctatatctcctggtcttgctttctctgccgttcatctctttttgatggaaaaatgttgctgaacaataaatgtacttactttactatactttcaaatttggaaaaatgagtaatatgtttgagattaatttggaaataatagatgcttcctattgaatttttgagattttattttcattaattgttcacagtatgttgtcctataaaatgagatacttctttttgatacttaaaatagataatgttacaaacataaaaataatacttttaattataaaaaaattgagcattattattatgtgaaactatgtatccaaattaatagtttataattattatcattaaagtaaaataagttaagccaatattaaattgaatttttttatttcaaaacactttttttaatattttatgaaaatttacatagtaacagaataatttaaatcctaattcaaactcacatagtactttacatttcaaccactaaaataaaacaaaaataaaaaaaaaatattaaaaagtaaatatataaagtgatttctctattaaaattcaccatttatgtattctaataaattctgtgttcaaacccaaagtatgcacaaagtgtgtggcgattattaagcaatataaatttcaaacaaaagaaatgcagtgagtactctttctttggaaatcagattttagtaaggaattcttttgtgaaaaaaatagaaagggaagaaaaagagtgaaaattatttctgcatttttcaaaatagtatttttgttgttcattttctaatttaatttgtaatgttagctcaaattttccattttttcccacaattcaaattccaaacagtaatatatcattaattattttaaattacaaaaattaaaaaaataattaaataattaaattaactgataaattaataggaaaatatacaaattcatagtttctctaatatatctttcaattcaaatctaattttgtataaatatattataaaaaaataatatatttattaccctccaaacatcctattattaaatcccaataaatgtatatatcaaaaaagaaaaaaaaaatagctgatagataataatggtaacacagaatgagtcttacgttcaaatttatatgagaataatgctaaagagatataaaatttaattattattactttaagcgttttaattatttattccaaaacatggtttccgttggttattttcttatattccaaaaatatatatataattttcttttaatatgatttttttatgaatagcagtttcgttcatgcatgtattggaaaaagaataattattaaaagaaacaaaaaaacaaaattgtacagtaagaatatttcacctttttactgagtcaaaaatatgagttatgaaatttgaagaagttgagatatggaagaatccagcaatgaagttcagttacaatttttctatcaaacaaaatattggtcataaatttccctctttattattcgagctgtatgcattgctatgttaggaaagattttaaatgagaaaattaattcgttcctatagagtataattgcatagaactatatataataaatagtaggtttgaatttttattttatgagaaattctttgaagaaaaatgtttggaaattaattgaatataggagacattttttctttattttaatttaatgataaacaagcaaggaccgcatgattagatcataaaaattggacccccacacatataaattggatataattataaagattaattacaagtatattatatatacatgtttttcctcatcaaatcaatcatattaatttaaaggttttacagttccatgtgattcagtacaataaatataaattttctggtgattttaatcattatagggtatcaaattcacatgccatggaacttattgcaaaaaatattgatatatatatatatatatttacatgtacaattaatattatttattatcttatgaagtatcacttcacaatttccagaaaaaaaaaactacaagaatcattacttatgtgtgattaattagtgttggttgaaagttaatgcacacctacaatctatctgcattagtttttaactgtgaccactacttaaaattcaaaattcccaattgttttacactgtcgggtaaaaaaaaatttaacggtctataaaaccgttgcctatacaagcatcgcgaatactgagtagaataagagacgatagaaaaatgtcagtatatataaaagaattctcgacggtttaaaactgtcgattatagtcgagactataggccacggtttaaaatcgtcgcctataggataggcaacggttaaaacttggcctatagtatagccgacaattttaaatcgtcgctatagtggattttccaaaaaaaaaaaaatcatcaccttcatcctcctcgaaaccaagatgagaatttcgtttgaccttaaaattcccgaatagtcgagatatccggcgatctttgatatacaaaaattttacataaatcccaaaataaaaataataataaagaagttacgagaaagagtgaacgagagggagaagactgatcaatgctcgtggtggttcgtgatcgtgcatttgtctttggacaagagagagagacagagagagacgagtgatggtagttctcgtggtagagctcgtggctgtggtcgaccatggtggagcttgaataggctttcgtctatggtagagctcgtgaaagagaaagcgagaaagagagagtgagagacaagagatcgatattttgaaaatgtagagatttaaaaaaattaaaatgtaaaacgtgttatattagagcaaggaaaaacacattatttgaattttttttaaaatttgaactaaaaactaacggttaaaaactgtggcctaacactataggcaacagttttaaaccgtagcctatactatatgccacaatttttaaccgacgccacctctccttatttaaaaaaaaatcacaatatttaaggcacacttcaaaattatcaagaatacatcacgagtgtttaaaatcgtcgagaatacttaatttttctcgatggttttaaatacttaattttttaagcgacggtctcccagaaaaaatatttttaggactgtcaggaatagtggtttttttagtaatggacacaaattgctactattccaaaatagttcttttgcatctatcaatacttaaaataaacggaattgattaatttaaaatttttccattagtgtaaatctacaaaactttttctcag

SEQ ID NO: 20034 - DNA, 1488 bp, Cannabis sativa
tgatacgtagttacgtacttaaaaactagtgaaactgacatacaggcggaagatggtgggagtgggcaaaaagaaattgttcatcaaccgaaagtgtcgcttataagcaaaatcatttaactcctatagacttggacgaagaataagcaagattatctcacgtgtcaacaagcccccaccaattcggagtagagaccgtccaggtgtgtgtacatagatttcgtatacaacatacctacaaactcaattaattagttcatttttttttaataaataaaacacaccccgaaaataataatacacacccaaatgaggaagctaagtctgatttgggtccttgacccttttgtgtggagaaatttggacctcaaattgttgtctggtcaagattcaatcaccttcaaaatcacccctcacctctcccccacattcccctccaccttactcgccccaaaacgccttattttctccctatcgaattccaaccttttttccttcctttactttgaatctttgactacaaaccccaaaaaaattcatttttttttttggatacccacctctagattctttatttccattggcgggtagcttttattttattgagctgtgccttaagcagttggtgatttcgaacatcgttttggctgaggaatttcatcaaacagtttgtcttcgacattgaacaatctaattttttggggaggagggaatggtgggggctttagccttagtgggttcatcggtggtggactcgcatacttgtccgtgcttgtgcgttgatgctctgccttcgacgaacatgaactttaaaagtgttggagatttgggaaggaagcataccgttaaggcagctgctgggtcttcttcttccttggatttgagcagctcgttcatcgattctggccatgaaaggcggcgtttgtcggcgatgaaatcgattccggcgggaattgttattagtcgaagttacaggaaccagaagaagagtaatcggcggcggaaggtggttgttagtgaattgggtggccaatatgaagattcttttgaggacgttaaagtggtaagttgatcttgtctgctttatattcttaattaaaaaaatataataaactgttgttttgccaaagttatgcaaggagtaaataataatatagtctatttcaaaaaaaaaaaaatgttataagctgagagcaaaaatacataaagagaaatgttatagctattggtctaattaaatatagggttacatataatttaatataataacttttagatagtatcgttagccaatcacaactcgacatgtcgagaaggtgttagacactactggtgcttaataacaatgctcatatataaatttagtgcattattactagacatttatgatctatgacctaatattacttggtctataattgattaatcattttctgtaacatttattaaagtataataagtgggatttattattgagttgcacgaata

SEQ ID NO: 20035 - DNA, 4786 bp, Cannabis sativa
atttccgtcagtagaatagttactcaagccacaatataatttgctgaaaaactcacgactaaatagaatgacagcaaagatataaggtcgtgatttgctataaaatgcacatccacctaccattaggggtatccaaaaaatattgtttgatataatttaatgtgtacgatttaatcttattcaatttacaaagtacaagtatttatatttgcgtgattagattagattagaaaattttaaattcaccttaaaaagtaatccatttaattcaatttggatatttatatatataattaatatttataaataaataatttaaaatattaaataattataaatggcatttatgtttttccaaaactatatacttaaataaataaaaaagagaaatatatatgatatacaattaaggttttttttattcaaaatccaatatatatgattaattggcaattggttattactatagtatatggttatgctatttttctaataaattgtaactaattttagtttagttggtaactaattatttgattcatcataaaataagacttatatattgatgaagagtcaagttaattataaattatctcaatcaaaagctcacaaaatcctaataaactttagaattaacatagataatgagtacattaataatcataatatatatacacacatttttctttttaaaaaaagttatgtcatatatatactcacctaaaaattttgattatgacaactttgtttaaactaactagttaatcaaaattcaatccttaaccaagtctagttagtataatataatggttattttacttaagttttatacaccccttgataaaaattgattaaagagaataaaaccatacacacacaaagccatatatatagcccatatatataatatctcaacacacccaataccaataccaaatagcccaaagagttaatagagaacccaacaaaaggaaaatgaaaaaagtagaaactttttcacaaagttcttaaaaagctataatccatacaactacttagagacatacccacctctaaccaaaatgcttttctcccactttacacaaccaagtagacccataagaaagatacatatacatacatagatagaaaaatagaatagaagaaagaaaccccacatccaaacacacccccctattcatccatccaaacaccatatactttagtacaaaaaagaaacaaacaaaagaattttttcacatattaaacatttctctcactcactcactcactcactcttgctaagagaagtgtgcaaagctttctctcatcacaactatcaaagtttataaagaaaaaaaaaataaaatagaaactccatatcccacaaaacccacatgcttccttattcttacaaacccttttcatcatcactcccactactaccaataccatattctcatcttcttcaaaccattcttttaaacttagtttaaattattcatctacttcttctttctttctctgatctgagatttgttcttagaagagaaaatgattacactattggatttctaccatgtaatgaccgctgtggtccctctttatgtggcaatgattttagcctatggttcagtaaaatggtggaagattttcacaccggatcagtgttccgggataaaccgattcgtggcgcttttcgccgttccattactgtcattccattttatttcaacaaatgatccttaccatatgaactttagattcatagcagctgatacacttcaaaaactcattgttttagctgttcttggtgtttggtctaaggttagtaaaaggggttgtttggaatggactataacactattctccttatccacactcccaaacactcttgttatgggtataccactcttaaagggtatgtatggagatttctcagggagtttaatggttcaaattgttgttcttcaatgtatcatttggtacactcttatgttattcatgtttgaatatagaggagctaagcttttgatttctgaacaatttcctgatactgctggttcaatcgtgtccatacacgtggactctgatatcatgtctttggatggtagacaacagttggagactgaggctgagattaaggaagatgggaaactccacgtcactgttagaagatcaaatgcctctagatccgatattttttctagaaggtctcagggtttgtcttcgacaaccccgagaccttctaatctcactaatgcagagatttactctcttcaatcctctcggaatcctactccgagaggatcgagttttaatcataccgatttttactccatgatggccggtggaagaaactctaatttcggtgctaatgatgttttcggtatgtctgcttcgagaggtcccactccgagaccttcaaattatgatgaggatattggcggtggtggtggtcctgtttccactaccgccaacaaaccaagtagatactacagtcacccgcagccaggtggtgctgcgggtggtactggtactactactacttaccctgctcccaaccccgggatgttctcgccaaccgggtcaaaaaacccgaccgctaatgccgccattcccaatgccacaaagaaacccaacggcactaccgcaaccggtacttttcttatttcaacatttttgtgcgtctttcaataaaatttctgaatccgtcactgattattcttacgactaatttaaggccaagttcaaaaaggcgaagaaggcggaaaagatcttcacatgtttgtatggagttcaagtgcttcccctgtatctgatgttttcggtagccatgaatatggtcctcatgatcaacaaaaagagatgagactagctgtttctcctggaaaaggtttgtcataatcatttctctcaatttttcttttttcttttcaattttacataattttttttttttctattttttttcagttgaaaatcgtagagagaataataataataatcaagaagagtatgtagaaagagatgatttcagctttggaaatcaaggagagattaacactaataataataataatgataatgagaaaggtgttgatggaaatggaaaagggaaaataatgccaccaacaagtgtaatgactaggcttattcttatcatggtttggagaaagcttataagaaacccaaatacttattcaagcttaattggccttatttggtcactagtttcattcaggtacacatacactaaatcttatataatatatatataatttttttttttcaattttataatatatggagaaaccccatttaataattttcaataaatatttatttatatatatatatttgcaggtggaatgtaaaaatgccagccatagtagctcagtctatttccatattgtcagatgcaggacttggcatggctatgttcagtcttggtcagtatatatattattaattttaaatatttatattgaaaaataaaaaattaggtcttccgaatcgtgatttcggaccgattaagatatttcttaatagtccaaatgtaccacatggttcggaagctcgagatgaataataacaacactcaaaagctttcgagcaggttcggccttaggcatacgtttagcgattcatttaaattaagataaaatttgagtgtgccacgtagttcggaaactcggataaatagtaagactaaaaaagagtaaaaggagaagtttagtgtttacttgaattttgtcctaagtttagtgtttgatttgatgtaatgggttgttggtggtagtgatgatgatgatgatgatgatcactatcacaatatgatgatgaaacgtctatcaaataatatgacttgactgacacagatgatgcagtagtgtagtattattattattattattattatcatggctctgtttatgggcatgcttttattattattattattattattattattattagaaaaatattaaaatatattattagtatttagtattttttttgtgttatattgttattggtataattaagtatcggttcatataatttaaaaaaataattttaaagaatattgctaattaatttaaaagtgatgggagcatcttttataggcggcattttacgattagttagcaatattttccaaaaattatatggaactcgatacttaattacactaatatcgatatgacattaagaagagtattaaactctaatagtatcttttagctaatagtaatgagaaatgttaaaaggcaccagtagtgtctaacactctctatgtgttaatatcactattgatctagctaagtatcgagtcccatatagtttaatataataatttttagaaaatatcgctagccaatcacaaagcgacatgtttagaaagtgttagagaaacaccactgatgtttaatagcaatgctcgatagtaatgttgttattaatattattaataaatggaaaatggaaaatgtgacaggtctttttatggcattgcaaccaaggatcatagcatgtggaaattcgatagcaacatttgcaatggctgtgagattccttacaggaccagctgtaatggcagctgcttccattgctgttggccttagaggtgttctcttacatgttgccattgttcaggtctctctctctttttcttttacttttacttttctatattatcaataatcaataatcaataataataataataccaacaaacattaacattacctttttcttttcttttctgctcccttcttctgacacaacacaacccaatcctttt

SEQ ID NO: 20036 - DNA, 1343 bp, Cannabis sativa
ttttcttactaagtctaacgactcatagttgtgttttgcatgtgtaggcatgggcaaggctaaagctgagcagccgtgagagcagccggatgataggcctggagtgtatgatcttaaggacaacaggctatattttaaatagtcgctaggcgacaacttttgtattaaatattttgtgttacatttacaaatcatttaaatatgggatcctgattatgtaaaagatatttattttcatttaaagagtaattaagtaaaagttttaataaattataattttctataaacctgtttatttgcaaacgttgcattgtataattattattaaatcacgataacacacctaactagtaggtgttacattcaatcaattatttcttctctgaaattcaggttttacacggtcataaaaatagatggtgcttcaatccattcaagcacattttcatagaagaacaagctaatctacaacatagtccaacatgttctaaaatagaatgaaatcaaccttaaattttgaccccaaatgaagaaaaccaacactaaaacaagtccacgaagctcgtttcccttgttaatataagctaataaagtcaatgccttgaatccatatattccttccaatatgaaaatcacaagactcatattccacatagcagtcaatttcaagtaactttttaacactataccaaaacatataacaaacaaaatagtgcatgcaaaaattttaggctcaacttttcttaaaagcagaaggtatattactactagccaaatcaatctgatgagactacaagaagagttgaagacaacataaataagtgttgcatagctttcaaatttttttccatcaaaagttatttgaatcatatcctctaaagatgttgatgaagtccaaattaattagtatatatatatcaaataattatatatacttacatttaaaattttggaggaaacttgacaacattgtattactctatacaatctaattttaatagtaagatagttttagaaaaatatgaataaatcttttttgttaatgaatgttaatcatatatttagaaaatttgttagcttttctacaagtttaataagtcttcagaatttgtttagttaagtgttgttttgaaagtgaggaagatgatgagaatacaatatggccaacccagccaaccatctttctaatataaaacatgaataatttttgtatcagcaaagaaaagagaaagagttggtgtatccctccctcatcgtttagaaaatggtgtatttataaataggtcttcgaactatttagggtggcaaattctattatactttttgtatacagataatgagtt

SEQ ID NO: 20037 - DNA, 2040 bp, Cannabis sativa
agaatagtactagacactacattttactatttttcatatttttaagacttaaagtagttgtagaatttagttttgacttattttcgagagttactttcaatctttctcaaccattggatcttgttatttaatggtgttgattgttgatggaaatgtggactacaagtccacttacttcactttgatattcaatgggccccatttctcccacctttattttttttctctttgcccctttttctctttcatttagaaaagtacacaaaatcctatgtggaatttaccattcattacaacattgattcaagactaactaccttatatatataaaccttttgtcttctttacattaagcaatgattaattaatttattatttcattaaagaagttattaatacatttgagtcacaagtagttaaaaagttaatttcttttgtagttcttctttaagtttgatccaataagtacatataatggacttattataaaaagttaggatgatagtgctcatatatacactaaatattccccataatatacaaacacaaagaaaactagctcttcttatttgatttgataaaccatgtattatatttgtataatttcaaccaaaaaaaaaatgaaaagaagagcattaaagattaaattaaagtaacaagattcctcttcctaatttaagttttgaataatgatacaaaaaaaaaaggtaaggtcatattagtaccataagattggtcaacaagaattattcatcacaaacccaagtcaaattccatgttactattctctaattggtcaaatatatatttagtgcataaattaggtttatggggttacctacattgcacattaataataactttacattggtgctaagcttcttggcatcttcatggtggaaaattattaaaataaaaatgattttttaaaacaataaatatgtatatatatataattagaactgatctattcataattaataatgaaaaaaactaagcccaattatatgtgtattaaggtttctttaatggttttagttttggtttcttatttgagtataattgtacaattcctaaatatatatttatattaatttatagatctaagatatggcttttcattttattttattaaaaaaaaacaaaaaattaaggaatatttatgtcattagtcccccaacaacaagcttctttctcactaaaattaaaatgtatatatattattattcaaatatgagtttttataggtttgtgacatggttgttcatgtcttctgattaattgtatgtgtagtatgtatacatatacaataaatgagtaacaacaactaataccacatcgatttgtttacatttttgttatggaatttgtttttatataaggatcctatcatttaaataaaaattaagaaatttaactttcaataaaaataaaatactaaaattaaaagagacagaattttagctgaatttaatggaactaccacttgattccaaagtagattcacaacttattgatttccaagacctcttcaaaaactatgatatggaaaatacttttttttagatgtacaatcaagatagattttagcaaaacctataacatagtagattggtcttttcttgaagagttattaaaagctttatgctttaaagctaggtttataaggtgaataatggtatgtttgagatgtatctcttattctcttatgataaatggtaggactcaaggtagttttaaaggggagaaaggattcagacaagaagaccctatatctctcctgctatttgtactcattatagaatatcttactaaaagactccaattggaagctcgagaaaggacttttagatatcatccaatgtgtaaaaggttgcaacttaccagtttgctctttatgatttcacctccgcttctggtttgatagcaaacaatgctaaattccagatatttttgggggagttaaacatcaaaaaaaggaagctatcacttagattattcagtttgaaaatggtcaattttcccttaaatacttagggt

SEQ ID NO: 20038 - DNA, 2754 bp, Cannabis sativa
  modified_base (1588)..(1592): a, c, t, g, unknown or other
  modified_base (1690)..(1699): a, c, t, g, unknown or other
tgaataaaattttatgtcaatttagttggtgtttttgaggttaaacatgaactcctcattggtggagatgttaccacaaaggttaaacaaactcaccatttggcaatggcatctacttaatcgttacaagatctaaaagaacagaatttaacaagtgcgtagtgttttaatgaggtaaagagtttatagtaaggtagtctatgatcttattgcaatcaaaccaaatacacaaagaactccactcttctggtattgctactagccaaggccaaccaccattgcatcagatatgactgttgacacaaattccatcaccgaaacaagttgccgacacaccacctatgctgttagcaaacgagccatctgtgaagatgtttattgtaccaggaattgagacagcaatgtgagtataggctggttagccatcttccgaatcagaaccactccctaagcgtgtaaccccaataatcgtaatgtgaagatgtaccatcaatatcattacccacttggcctgcagtcttccatttaagttgcaccactttgttgaatccctctttcatgaacttctttttggaagtagactcacaaaattcttcatactctgccatcttcttttttatgtgagctattcttttgttcattattgttcggatatcagtttcaagcgttaaacttagttggaggtagaagaaatctcttgtgatctcctctagacttgccttgagaaaacccagttcaaagtaggtgtgcaactgtacaaacttgatgtggtgataccaatattgaagaagatctttagtgatgtctatcacccatgtagtatgcatctctttcattgctttacatataaggaaataacacatgctcttgaatgcctttgaatacccgcaacgactaccaatatctccatatttgtgaagcaaatttttgaaaacaggaactaattctaaaggtatgaaataaccttcaatgtcagcaatttttagtgctagatcactaggctttattttcatactcctcttcttatagatcttaccaaactcattaaaaatatatgacatgaactcagtttcagtaaaactagagaacgttagaatctcatcaattttttcatcttcagtctccaattgagtggtcatttcactctcttctttttcctcatcccatgtaaaataagcttttaacacgaacaattcatattcacttaattgaagtattaaatctttcatgctcaaaagagatgtgccatgctctatctctccccatccaccataatttgtttcctcacaaaagtcatatcccaaggcttttagctccacatcttcaaggtccccctttagtacatctataatctaaacaaaatcaagtaatacacattattatagaaagttactagtatgagtactatcatattttttttccaaagattttggttatttacatgaggagtgctaattacaacctcctattataatctcttagtcaacttctacgttcaaaatcacatgccgaaatattttttttcaattattttttcatagcagtattcattaaagttacaaaatcatccctgtaaatttttgaaaannnnngaatagtttacaatattgaaaacagagttcctgatattccagtttaccacgtgtgttaaaaaaacttcaaacatgttttcggcactgtaaactattcnnnnnnnnnnaaaaatttataggaatgatattgtaagcataacgaataccccgtgaaaaaaaaatttgaaaaaaaataattccgacatgtatttttaaacatagaagttgactaagatattgtaataagaggttgacggtagcactcctctatttacattactaacaatttgaaaaaagaataacaaaataaacatttttttaactctcaatgatatatattcttaactatacaaaaagtgttgtccactcactcaacttaaaactatgtatggttaattttttttttcgaaatgtgttaagaagtatatgtgtagcattactctttgaaaaacacacaaaagcacatgtcataatgcgaataaagacattgtacttaaaatttatctaaaatattctaaatataagcaatacacaatttaattatgcaataaagacactgtacttaaaataaattcaaatatatttggggtgcatttaaatgtactatgttaaacatgttaagtaacaaaacttaatgtaattagaaaaatgaattgcagaggaaagtgaaactacaaatctataacaatttgtttgtgctaagaatttggacaaattaagtgcaagataatattgttcataagaatagtctattgatttcacgcctctaatcacaaagaggatgcggtattattccataaactcccaacaaccattcggttagttagtttgtctttaactaacttaactatcaaataagacaacttgcatattggtcccttggcctatataaagagaactactcctctcatttcataacaagaaaaaacacaatgtgtaagaacaaggagtgaagtcaaatacaagagaaagacacaatacagaaagagagagttgttattagagtaaaaaatggagagagatatttgagaaagagagggctgagattgggaaattgtattgagcatcattgttgattatgttggctcggtagtcgggttagtgagttaatgagtgttgagggattacaccatggatgacttgctatgattatttccttgtagctcctgagattgatatctct

SEQ ID NO: 20039 - DNA, 4082 bp, Cannabis sativa
actaccctttgctcaattacctacacaactataatttatgctggctgttggttcccttacgttgtagatttccttgctctggaaaagctactaagcaaagcaaatttggagttactccagctaaaggctcattgccccttgagaagctgagtgcacaagctggcaatcctggtgaacccaagtcagacgtggtataaaactcgtaatttatatgcttcctgtgtagatttagtactcatttatgtatttgtgtacatgtaatgtaattgtgcatttgcttcatccaactgttgattaaatatcaaaatactgaaatcaataaaatacatgatcttttacttggtctaatcaatttcaggctctgtcagctaaaatatattctgcgctacgcaagctccgatctagtcttgttaaacaagctggagaaggatttgcagcacaccacatatttcagtaagctgcattttgtttttttctagctttgttttatatgggcatgatatggaagaatgatgtggattggtacactcgcttgatatgttgtcgttttctttcatttagcaatgctacactgcaagcaataggcagcagaatacccaaaacaaaagaagaactccgtgaaataagtggaattggcaagtaagttttgtaattttgtttataatactgattagccaacggacatgttaatcgtcttttttgttttccctttcctaatttagtgttaagctagccaagtatggagatcaagtacttgaaaccattgaatctaccataaaggagcatatgaaagacaagaacagcagcagcggtcacgacagtactgaatccgcaaagaagaggagagctggtgagcagagtccaaatctggaggactatgaatttaatagcacaggtagatccaagaaaatggcatcaaagaggcagtccaatgtgaccaactttggtaataacatggagcaagataattacaaccagtacatagatgatgatttagatttcatagattgtgatttcgacagtattgcatctcagatcaagactaatcaaaagaacaatggcggaagggtgctaccttgttggtcaacacctggtaacgtttgacaaacatggtctcttagaatatgccatgaataatagctaggctaacaaacaattgtaaggcattgctgacctttttgtcagtaatatttatttctaaaggaaatgcattgattgtgtccattgataatttgtttatatttttctttagatgtttatctcgtgttgttttactcatcttttctcactaaaattgtctatgatgagatcatgaaattatgtcacaaaatgcttcacccttgttttatacattcaattgttttttgtttttgtttttattttttctgaataacttaaaaatgctttaagcttgatcacattcacctgctgaaagctccacaatccattccagtcattatctaaacaccattttgcaagaaaatgagcaggagcattaccaattctacgaatctaaaaaattgaaaggttaaaggaacacaagtcaagtaaaaagaaaaactctaaccaaaaccaaacaattctatcctattctagtataggttcttgtcttagcctacaaaatcttgagccacctttgcatcccaacaccatctatcacaaatctggctctaatattacttgcagataaagctttgatatcacctgcctcatctctcactactactaatggctgttaaatctcctgtaaaagcaacatcgacattaactcgaacatggtcaagcctcttagacaaaatcctgctatgattagaatgctcctaagagacatttctgagtcaccttcccatgttccacgaaggttttctcaaaatgtttcaccacctcaagaatagtcatcaacaccgcattatgaaaattatcatgtctaagccaccatatataagaagaagtagttgccgcagaagctgataattcaaggctttccaaagagtcctccatatcaaaggcgcccttgaagtgaaatgaaggctctgcatttctaatcgaccatttgctagagaaccagatgcaggaagaaaaagtatacttttagaacacacgcagtgacgaatcttcaccattctcccacacagagtgatctggttctcttccaaagactattggtaaacgctaccctattggaagaacatctttgtaaattttccgcgagcagttttttttttccataaatttcaatcgcgaacatttattcaattatcataattttatcatggagtcatatgaacagttttagtttctacggagcctagagttccacatcttcttgtatacaagttctaccacattgaatatagcttcactcaaatttcaataggctgacttcaaagtggagtcgtcaatgttagaatttgggataaggtgaatggagtttcatctcaaaattaattggcaatgagaggagtagccaattcctcttacatattctattatctttccacacattagcgatgtgggactatctaacagtccacaactggtttccattaatctatcctcatagaccgaagtagagattggggtccttaaattccttagtttcccatacctttttgatcacatttaacgcattatgtggcagggtaccggaccagaagccagaggtgccaaaatatttgttcataatcacatccgtccaaagaccattaaagcctgaagcaatttgataacacaacttgatcaagggacaaaaatttatatgcttaaatttccttaaatttgttgttttaaatgaggttattagtgtttgagatttatggcataaataaaatttaattttaatgtaatcttatttaattatgaataaagttcaaaacaatatatttggatcttatcatttgctttgttcacatgtttgctttcatgattatatgtttaatgttctattaaatcatgaacatataattattcacaattatagtaatgttatcatagtggaaaataattgtgattatatgctttaaacttatttcgtcttgagatttatcaattttaagatgattaaacatttagctaattgtattgcttgagttctttgagttgtttgttaccagcttacccgtcgatctaactcatacttacatcttgggaactcgatgttcaattaagtggaaatgttaattatagatatgaacatctataccttttatgttttgtctagaagtgaaattacggtttcctttgagcttgtttaaaggcgacaagtgataaagcgctcatttcgttaattacattagtttattaaaatatcatttacaagaaactaagtgtttaaaggatgaaatgcatagaggggtaaaataataattttgtcctctctcgatgtagaccatctatagaggatcattgattattgtgatcgtaacaatggataattcatgcgtatctatacatgtgtataaagcgttctatgtaatcaagagttcaactctgaatctacagtggagtcaagagaaattaataagttagaaaatttactcggtaaattttggattatttacaccacatactgaaatttttaatttttttatttttttactgtgggacagaattctttttaaaaatactgggtaagatttatactgtatactgtgttaagtttttactatggttgttttttagttgttcttattttgtgttctactgttgttttacaaaaatatagtatttttgaaaaaaattctgtgtgacagtatttttgtaaaagttaacccaaattttagtatttttgtaagttttcttaaattttagatcaatttattgagagattaaattcataggcccatggtcctaggtgataatatcaccttgatgtctcaattacctgatttatttaatcaattaaaattttaaaattgactttgtcatattttagaattttttattaagttggactgaattgaaaagataagggatatgtatatttatttatttttttttgagtaaaaatcataaatttattaattaataaattcgttcaaaacaatagaacgcactttagaggaacattcctccaactgaag

SEQ ID NO: 20040 - DNA, 3459 bp, Cannabis sativa
taatttatggtgttaaatatttttcttaaagtattaattattcaaatattattcttttaccataaattattgaaaatttatcaaaataaaacaagtgaaatatctgttataaagagaacttatgtacattttcatataatagaaaaaaatggttataattttctagaattttcaataatttttatttactaaaatgagttttatttatattttttacagtttaaaatctccaataacaacagggagtggcacaagtttagctggatcagaacccgggtctacgggttcggtaaccgggtcgggttctggaccaatacaagaggcttcattggctagttcatggctagcaaatatggcaactggggattcaatcaaaacccaaaatagtttagcttttgagtcttcattggttttggtcatgggcttgattctctcatttttgcacttgtgattaagattattaagaagaataatttggttactaaaaatgacttaaaattatttctctcataatttttttgggacaaaagaaaaaaaaaattaacatattgagtatggtgaagttgagagaatacagattggaaagggaaaccaccaattttcaaagtctataaataattcatatttaatttaataggaaaaaagatgtattattgtataaagtataataattaattaataaaataggaattttcttaagctgcttttctttcttaatataatatatttttctcctttttacaaatagttattaatcaatatccccttgttctagtatgtgaaaaacaaaaaagaataaaggattaataatttgggttaatttgttatttttagactttaaaaagtggaaaaatgaagtagggtattattggtaaagccaagtgggacacatgcatgtgaaatgagattttggcttttaattactattttttgtgcacacaaaatatatacatgaagagaaattttatatggtatcttaagattttgaagtactaattgacatattattattcatgtgtttaatattggattttagatttaataaataatgtgtatgccaaaacaccccattatatttgaacttgtctcactctagtgtgaattaatgatttgttaaaacttgcataaaaggtttccttgcatggatgatggttaactataaggtagtttttattattattatttattttatttttttctaatgaaaagatattatgtctaaaaagttagaatagttaactcaaatgagatatttttaatgagatacatattatggtaattagaagttaaaagttggtagatatttctagtagtgaaatcattattgcagtgatgaattaatctagtttaacatctactaataatgataaattaataataaagcaattggctcctagccaaaatcccattattcaaaacctaatcatagataaatcaatttagtgaaaggtaataataaattttgagtaaagagaagaaattttgaaaacaccataacatacaactcatatatataaatttgatttctttaagcaaattataattaaatgataaaaaaaaaagacacaaaggatattaattgtattcactcacaatatgataattaaggacaaaaaaaaatagcaaattacaagttgtggaatggccataaaattctgcttttttcatgctatcataattttttttttttttaaaaaaaaaaaaacaataaaaatgtcacacttcaaattccaatgattaaaaaaaaaacttgagatgatgccaaccatgaaaaggagtaagatactaagatatatatacatgtacatttatataagtagagcatgatgatgagtaagtgattttttcaatttataatcatgaattagtaagttgaaaaggatagtcactacactaactctacataattttgcatatatatataaatatatcttctaatactatgataggacattaataaatatcaattatcataattaaaagaagtgattattattattattactctaattaattaatcttggtttcaaatatctaattaagcaataataatggttaattatttataaactacaaatcaataattgtgactccaaaagtgaagggggatcaactctctccaaaagttgatgatgaaaatggtccaaaatgaatgtagtggtaattttgagattcttggtaaaggggtgtaagaggttattctattccttcaccaccaactagtgtctagtgtgtggggaaatatatagcacaaagtaaaaatcataaagaaataaaaagaagaagagagaatttaaagaaagcttcatttactttaattctccaaagaacaagataagaacacaaacatatggtaccctacatctatatattactttatcatcatcactttttcatttttgtctataatttattaaccaaaatgtgacattcgatgtattgtgattcgtaaaaaaaaataagttgtgtaatttcacatcatgtgagaatatattaagactgtgtagatttaattgaatgatttaattagattaataattactgtctatgacaataagatgcatttttttttcagtaatttttcaatgttgatttttaaaggagtgtagcataaaatgtgcatataaacttacatattatattctatcaataatattattattaataatattagttataaataggaaaaatatccaataattttactattgattgtggacattctatatataaatacttataaggtattttagaggtaacataattatacaattttcattgtattttgcttgagaaaaaacaaaaatttaattgatcttgtataaagaacttaattgaggcagaatcttttacttttgtgtatttttttacatttttcttttagtataattaatacatgaatgatatcatatctttattaataacaatgaatcaatgataagatggagaaatcatgaaataatcgatcaaaatttaatgctttaaaactttgcagcatcttttatatataaatatataaatgtatatattatatataaaacaaatgagatcaatttaattaaagagtctttgacggtcatattttaaagctctagaaagtgactcaatttttgttcagagataaaggaattttatgtcaaaagttgcagtgcttctcttcttcatttgatacccttttacatcaaattgttttccctttgcttctaaaaaaattgtgacaaaattctttttctttttgtatagaatatttggtgacaaaactcaaaaatagtctcgattttcattgtttgtagtagcggaccttgtataccatataacaatagaaagattgtcgaaagaataaatttgtatttgagaggatttttttctatacctatgaatcttattagactaaaaataatgcattagaagaatcttttttggtcttccaataagctttggtttcggctcaccagggta

SEQ ID NO: 20041 - DNA, 8606 bp, Cannabis sativa
aacaatgagatactctattttgttcgagacaaagtgattcaaaaggaaatttttgtgcaacatgttcctgccaatcaccaacttgctgattctctaacgaaaccaatctccaactctcaattttcttttctacgagacaaacttggtgttgtgtgttccacgacactaagtttgaggggacctgttaaggatcataaaccagctgagctggcataactattatcaacttgttttcagttagttactttcaattaagggtagttggcttttctgttattttgttgcactgttcttggtttccttctactctatttctctatgtataaaaagatctctatatcatttttccaattaatgaaaaatagatatttctctttctctttcgttctttagcttcaacaaacggcacctaatctaattcttgaatgcgcggtaagagggtgaattttttaaactcttgctatatgtgctcacttccctcggatcggtctgacataggaagatcttctcttgaagatcctttgtttgttcaatgtgcctcttggatcagctgagaaataagagtaacacattaatacaaaattatagctcaaaacactaagcttcaaagatattcaaataaaaaataaaagaagacatgatcacaagaatgtacatgtatgtaatattttatatgttagtgacatccctatggatagcttttacacggtcaaaatacacagagaaacatacataaaatatctatcaattaaaaataactgagagatcaatgttgctgtatcgggtaagaaatttgataaatcagaatgcagtgaacttggacttgaatgcatccaaatttgtaatttcctttgacttatggaaaaatcaccgtacttgctaggaaataataatctcataaagtctaagttatcagccaagataacacactattagagaaatagtgtatatattcaattttttacaatagaaaaaataaaacccaaaggaaaaagtaaggagaaaaagaaagagataaattgtgaacttatgtcttaagttattttaaaataatcgaataaataggtcctggacactttaatcctcatctattttgaaataaccaaaaacacgtattattttaaaataaccgaaaacaaaagtcttcattactctaacccatatatataatgtggaggcctatgtgactatgtcttccattatttcataatgaccgaagacacaagtctataaaatcctaatattatatctgaaacactcatttcttcttttttctccagccattttttaataaaaaaatattgcgatcactgctcctaactctctattttatccatacaccattgtttatcctcattttttcttttaaatcttttaatttttctcacccaaattcacatatacactataaaattaatttattttagaattttaaggtaaaatgggagtttaggccaacaattttttagggttttaaaagaacgatggtcagctaatggcagtaattttgagggttttgaggttgtctcttagctttcattgaggtgtaaattactttaatatatgttttacattacattgcactttttttttttttaagtgtgtgatataggattcggatacccacagtggtggtagaaaaattgatggtggtggctggaaaatcaatgaaagtgctcaaaaaatttgtggttgtgattgaaaaatttagtaaacatttctaacatttaattctatctgaaaataatattgtttaaggattttattcttgaaaacctattaatattgtatataataggattacgtgaatttaaagttagaaaaataattgtttaattttagagttttttggattttacggctcaaggtagtattaaacggtggctttggtttagggtaataaaatatcgtttttttaagaaattaaatacttatgccttctgcagttattatgaaataactaaagacataggtccactatacgtctttggtattttcgagacctgcatgtttccctaacgagtgttcggttctgagtttttttttttttttaactagagatagaatagcgaaaaaatcagagataaatgcaatttttctagttgtgacagctaaaattgaattaaaaaaattagataattagctagatttttttaatattattttccataaatagaaaaataaataaaatctactaacaaaatattctctaaaaccctaaagataaagtcaacatcgaaatataatcaagaaatgtaatcaaaatatatatatttcttgaaaagtaatattgggaaaacaggatctttcaatattctaagaactaaaaaataagtttttgttagttttatggtactaaatcaggtacgcaactaaagaatttatgattatgattatcattgtaccatacatccaagatcaacatatgtgtatatattaaactaaaagtaaaaaatgaaaagaatatttacctcttgatgcctatcaaggtatccttaattttttttacgagttgtattcttttgagttgattaaaaactcacatcgtagtcttcaaaggagtagtgtatatgagctactaggacaaagtgtatatgaagttcttatttttatttcattgcatgagcaagagcattttattttgtgatagagagaaaaagtttttttgataaaaaaaaaaaaaaaaagtatctttttaggctttcaaaaaaattatgtgaaaattttattctaaaatttttttaagaactttgttatatagtatatttaaataaacccaataaaaattttatttaattaattattgaaattaaaatatatttattaaataatatttaattatttgaataaataatataatcaaattcggttatagatatttacatctaataaccaattgaggaaatctctcaaccacttgagagaatatctcaactactttttaaattcaaatatttatctaattaaactagttatttaattaactcaaaaatacaaaaccaattgggacaccctacactagggtaggcgccactcttgtcttaactaagacaatgatggtgatggtatcttttgtcctgataattttaattttttttttcctatttaattaatttgagggtatggtgaggtatatatgggagggtatggtgaggtatctaccatgtgtaggtcggtttggattgtctttctaaacaaagtttaattacttgggagaggtagggactcaacttgatcaatatacttgattttattgtgatgaataaaatttgacatattccaatattattgatttataaaatgtttgaaagatttaaaactttaatatacatgttttcatgactgttctaggaggcactgagtgccaactatatttttgtacaattatctatgcagtttatgattttttttattttaccaaattttaaccgttctgccagcaaaatttttaaaataaagagaatatgtacttttgctattctagatgcttgtatttgattttactgctgagagccatatttatcatttttttgtgaatattgttgtttcacgacctagtctctgtgcgcactcagcgataggtgtgaggcctagaatctacacatgaagtgaattgaatttgagccccactattttagtggttatcaagcttgattacccaataggatgtcatttttatgatttgttgagagctaaggttctagtggatggtgtaatatgtatttgaagcttgagttttggtgtctctattttgtttatacatcatcatgataataacttttgatttctaaagcttatcatcagggttttatataaattaaggatcttttgatattagttgttttctaattaggctttataagcccacctcctattttcttttatttcatgaattcaatttgatgctagtagatgagaatgttttcgttgaggaaaataccgttattagtttagttatattctagttattaaattttgtttgaaaattgattttgtatttaaacttgaatggaattgtttgaatgacttaattatctatttacaagttataggaatgaggaatgatagatgttagatactattttgcttgattgacttattaaatctatttattttgtgactacataactgtggtgatattattattttttatatatatattgataagtgattctattttattttaattattttctttttattatagaagttattgtattattttaattatttattttataaatttttgtaatataaattaaaagattatttgtaattattaatttataacaagggatatttgactactgatcaaataatggatattacatatttgtcataacttaagactagctcgtgacaaattaaatatacaattattgattattaatacactattattaattacaattctttagatgattgaatgggatggattagcaaaagcaagaatgtgaggatccctctcaaataaagccatattttctttgctaagagtcaacgaaacctccacaccaccattcttggtgtccatcaacttcaagacattttcaatggaactactcggtctccacgcccaaattggctttccccacccaaagttaacttcatagaaaccaaaattacaccagctattgcaaagaaaaatcatgttgttattcatatcatcatcaattcctttaatcaactctactacttccctacaccacctaccttgtttttcaccattattattactatactctttaatagctttcctcattttaaagaccaagtttttaagttctaattcttcctcattattatactccacatgaaccacataagaccccacaagattcccactagtgttttcttggatgggcttaaccttatcccgtacgttcacaagttgagacaaaaaagaataatatttattattagaatttaatgagttaatcatgagtttatttgatgatgcattaatggcacatttccaaacaagggcagaaactacttcaaccctagtagggttcttaactctttcactactagctttcgatttaagaacatcgatcttagttttatcaaacacgtacctcttattaacggttttgatcattaaagattctatattgttgttgttattattatttctctgatctcgtggcagtgggaaccaaatactctctggcgaaatgtcaaactccttaggaacggtcaaagtaaagcgttgacctgggtttgaccagttcttcaagaacatgcaaagcgtggctgcgtcggctaacttgtgggacatgcatagaccaatagctaatcctccacactcaaacaaagtggcttggacgagcaacaaagggctcgtggctgcctcggctgaccttgtctttgccggaagaagccgctcgagaaggcgatcctcgttagggttttcttctagaaaggttgagagaatggttttggatttggcttcgatgaaaatggctccttgatctgtgcattcaacgatgttggagttgttaatgttgtctatttttccagctagtgggacatagctagttaatgcttcggatagagatttctttaatgttgtaataataatattattattaagagaatgatcggtactactactgatttggtagaaaagaacaagtgtggtataaactggtggagctctttgatcaaataacgaaagattgaaggttttgaggtttggaggagttggagaagatggttttatgttttctctactaacaatctcaacatgaagattattctccattcaattttttttttttttttgaaaaaaaaaataaattcttctgaattaaggtgaggttgtagctggggtattataatggttttagtcttatatatatttatttatttatatactagaggcatcaacgtgggatgcacgttttttttattgttgtttttgtatttttatttacgccaattatgtacaatcacggttttaaaaaaataccacttacaatcaaatataactctataatcataaactaataaattacacatatataagaactcaatccatgaaattaaaaatgaaaacacatataggaacaaatttggcttaatcttctatttgtttcaatttgatttcagaaacaataaatagtttactctcaatctcaaaacatagatcatgagatttatcccaaaattccatttgacttatgaaaatatctaaataaattcaagttactttcttaagtaagcttaattgaggtgcataagtgcctaacaatgcccgaaaaataaatagatttgacaaaatttatgtttattaaaatatttatttatattatattatcaatatcatatgatttttatgtatatagttatatatggaggagctttccatctataatatttgttaaaataagaattttaataaattgatgtgactagctattatttaaaaatgcaatttccatgaattttcctcgactctcaatcatatgtgtataatgaatgtgatgtgatccagccttctaccaaaagtgttggcatgtgattaaagccgatgtgactagctatgttcaacgtttctttgaaaatgggtggtttgattcagagtggtatggctaatgtggtgctcatcccgaaaaagaagaaccccgattcgatgaaggacttgaggcctattgctctttgtaaagtcttgtacaaagttgtaacaaaggtcatggaaaataggatgaaacctttcatggatgcaatcattttagactcccaaagcgcattcatacctggtagattgatctctgacattgtgatggtatcttttgaagtcctccattatctaaagcgaaaaaggaaaggtaagacgggtttcatggcgctaaaacttgacataagtaaagcgtatgataggattgaatggcctttcttgaaagctatgctattgaaaatggggtttactcatagatggatcggtctaataatggcttgtgtctcttctgcaaagtacaaagtcattcatgggtgtcatgaaatgggaccaatcactcccactagaggtattcgtcaaggcgatccgctctccccctgtttgttcattctgtgtgcggaagggctgtcatctctcttgcgaaaatatgaacaccatggttatatccacggttgtaaggtagctaatggggcgccccgagtttcacatatgttattcgccgacgatagctatttgtattgtaaagctactttggaagaatcaggccgcattcaggaattactccgtaaatttgagctggcatcgagggaacaagtaaatttggcaaaatcttcaatcttctttagtgttaatacaacaccattggtgagaagtcaagtttgtagtttcctaaatgtctcagaggcggctgaaggaagcttctatttgggtctccctagtactatgtctcgcaacaagacaattgttctaggattcctaaaagacaaggtgtgaaagcggatacaaggttgggaaggcaagtttctgtctagagcgggaaaagaaatcctcgttaaaactgtactgcaatccttacccacctatgccatgagtgttttccttcttcctttggaggtaagcagagaaatagagcgaatgatgaccaagttctggtggcaaacatcgaaaagttcacataaaggcattcattggatggcttgggacaagttaagtaagaataagaaagggggcggtcttggtttccgtgatttgcgggattttaatttggcgatgttaggaaaacaaggatggagattagtgtctagacccgactctctagcttcatgagtgtttaaagctagatactataatggtggttcttttctcactgcccaactcggctcaaacccaagtttcgtatggcgaagccttttggaggctcaagatttagttcgaagtggtacaagatggtgtgtgggtaatggacattctatacctgtgttgggagagccttagttaccagatgcaactaacccccatgtgattttaactcacccgtcccttgctaatgccactgtggcaaaccttatgtccatggagaatgggggttgggacaatgaaattattgaagatctctttgaagtccgggaccagcaactgatcaagagtattcctcttcaagctcccacggctttggaccaattttgttggactttggagacatctgggatttactctgtcaagagtgtatatagcttcttgcagaaggagaaaggctactggtatgatgattaaacttcatccttctgaaataaattgtggagtttgaaagtccctccgaagatagtgaacctgctgtggcgtgcctgtactgaatgtcttcccaccctcgttcagcttcggatcaagagggtggtaagttgtgtcctctgtccgttgtgtcaggccgaagaagaatccacaatgcactgccttgtcacttgcacggtggttcaggaatgctggaatcgcgtgggaattggtactacaactacacgagcaacgtcctttctgtaatggtgcagcagcaagttccaagttttgagtggatatcagcggtgtacaatggcagcggtctgttgggccgtttggggagcccgaaataatcttgtgtggcagaaaaaag

SEQ ID NO: 20042 - DNA, 3064 bp, Cannabis sativa
  modified_base (316)..(322): a, c, t, g, unknown or other
  modified_base (1848)..(1854): a, c, t, g, unknown or other
tattccctcttcttaaaagacttcatttgtctgaatgtcccaagcttaatgttgggtttccttgttatcttccatccttggaacatctcattatatggtattgtgaaaaaatggaggttttggttccgagaactactcaacagactgtcacagccccaccctctcttatgaagatagagatattgcaatgttgtgtgttggagtcacttctagaatggggatcacactccgaagttgaggaaatttggttgtggaacacaaaagctctttttgagaaccgtagtaaatggaatctacagagactctcatgtttgannnnnnnaaatatcagtgggtgggaagatgaatcgtttcctgacgaagggctccttcctatcactcttgagaaagtttgcatccgattttccagcaaccttgagaccctaaacggcaaggcctttcaacaactcacatctcttcaagcattgcatatccgtacatgtgaaaggttgcgatgcttgccagaagaagggctgcctacttccctttatgaattatggatacacagttgttctttgataaagcaacggtttgagatagagataggagaagattggcctaagattcaacacattaaagaagtgttgctggatggtgaacgtatcaaataaatggtaactttaggttagttaatctcaaattcagttttatttattatcatacccactaatcatcaatgatcaatctaaatatcaaattcattctcagtcttctaactgattgcatgtgcagaattgatgatgatcattccctttatgtttatgaatgttgaagaatcttatacagaatttatactgttgtttgtgtcactttgaaacaatttgtgtatttggatctcaagtttgaaaaatagattgatcaaataatttgttcttgtttaccagttccttattctaagtgtggcaacatgtgctcaatccaacgcattggagcagctcatggagtttcttgattcccaaggaatcattgaagataattacaataaattagtagtagagtcatcactagattccaaaatacaactttttatgttaaagctctctcagagtaagctggttcccattcaatgataatattattaattacaaaatcaaattatttgtatcaccaccacatgcatttcttcttttattacatgtcccccaaaaaagtaaataacaaatctttcttacatttaaccttacctgtaatgcttaagtgatcaataaaatatatgataagtgattccataatacaacccactaacacagcagtacgtgttaaaatatatatgattagtgattaaagaaagatttgtctactaacacagctctctaattgcttaaacaaagcaaaaaacaaaaaattaaaaaagcttagaccaactgttctgtacaccaccactaccagacaacaccaagtacttctctttggaagtttaagtatcgaaaatatgttgatgtggaaagaatggtcatttggtaatgaagctattcttgaagaaggtcaaatattattccctcttcttaaaagacttcatttgtctgaatgtcccaagcttaatgttgggtttccttgttatcttccatccttggaacatctcattatatggtattgtgaaaaaatggaggttttggttccgagaactactcaacagactgtcacagccccaccctctcttatgaagatagagatattgcaatgttgtgtgttggagtcacttctagaatggggatcacactccgaagttgaggaaatttggttgtggaacacaaaagctctttttgagaaccgtagtaaatggaatctacagagactctcatgtttgannnnnnnaaatatcagtgggtgggaagatgaatcgtttcctgacgaagggctccttcctatcactcttgagaaagtttgcatccgattttccagcaaccttgagaccctaaacggcaaggcctttcaacaactcacatctcttcaagcattgcatatccgtacatgtgaaaggttgcgatgcttgccagaagaagggctgcctacttccctttatgaattatggatacacagttgttctttgataaagcaacggtttgagatagagataggagaagattggcctaagattcaacacattaaagaagtgttgctggatggtgaacgtatcaaataaatggtaactttaggttagttaatctcaaattcagttttatttattatcatacccactaatcatcaatgatcaatctaaatatcaaattcattctcagtcttctaactgattgcatgtgcagaattgatgatgatcattccctttatgtttatgaatgttgaagaatcttatacagaatttatactgttgtttgtgtcactttgaaacaatttgtgtatttggatctcaagtttgaaaaatagattgatcaaataatttgttcttgtttaccagttccttattctaagtgtggcaacatgtgctcaatccaacgcattggagcagctcatggagtttcttgattcccaaggaatcattgaagataattacaataaattagtagtagagtcatcactagattccaaaatacaactttttatgttaaagctctctcagagtaagctggttcccattcaatgataatattattaattacaaaatcaaattatttgtatcaccaccacatgcatttcttcttttattacatgtcccccaaaaaagtaaataacaaatctttcttacatttaaccttacctgtaatgcttaagtgatcaataaaatatatgataagtgattccataatacaacccactaacacagcagtacgtgttaaaatatatatgattagtgattaaagaaagatttgtctactaacacagctctctaattgcttaaacaaagcaaaaaacaaaaaattaaaaaagcttagaccaactgttctgtacaccaccactaccagacaacaccaagtacttctctttggaagtttaagtatcgaaaatatgttgatgtggaaagaatggtcatttggtaatgaagctattcttgaagaaggtcaaatat

SEQ ID NO: 20043 - DNA, 2616 bp, Cannabis sativa
aataataataataattaaaactaaaatcgttgatacttcatattcattaaaaactttaaatgaccattcacggtcattattggctgcacaaaagaattattattttttaattattaagaatatgggctgccataatacttaaattttttaaattattatgctttaatacttaattttattttttctgaaaattagtgggaaaaccaacccctaaattcaagagggacaagtgtgaagatttttaatattttcagtacaaatgtgatgaatttagtgtcttaatatatcaatattcaatagtagtaaagttttaaatttatattgttattgggataaatttcaactctcccgtgagaaggactatactaaagagaactcgcagtatcgaaaagacctcgcaatattaggtaaaaaagatctcgcagtatccaaaaaggtgtctcgcatattgaataaaactgtagtgtcaaccagaaagagtaaacacacaccaattaacgaaaataaacggtgaagcattcaagctccattatatcaaacgatacatttgttttataatcgatgttgaaattttgtatttaataatcatcaatttattatttaattaaatacaaaataataatattggcactaaaatagttattatgtaattattaaatacaactttataactgtagaataaatcaaaaactaaaatattgtagaaaaataaaaacacacaatatttttttacgcggtattaataatccttgcagattattactagtccacgaaatcacacctagatataaaattcattagatagatctcaaaaacacaaagtaattgacttatgcatatatagactctctcttattatatgacacaagcttgatgtatttcacattcaagtgctcaaactccattcgatctgcttgtagagtgcttgcttcctctcgatgcaagacttgagaaactttctcttgaaagcttaaaaaactttctctcgaagattgacactattgttctttttctttgtagacttgattacaggctctagacataccaaatacataaacacagaggaagaaacgataacctctcctcttcacaacaaagatactatttttctaataatatgaataattttcaaagtcaataaaggagatgctaaatctagttgccaaaatatgtatttataattaatatacacatattagacaactcatacgcagtctgaataaggtcacaactcacaagaaattttcctaaaaagatcttcaattatccaaagaatttctactttttacctacaaaatcgtgagtagtaggtgtgaccttttttttttaataaaaggaaattcttatttcgatttttttacacaagatctgatcaaattaattaaaaaaataaatattaaatcagaatataataaagaacatggctgtaaaatacaacacaatacataattgaattcttaattaaaacttaccaattgtgtcaaactttcttaatttagaaaaactcaacacttaattcacctttaatgaaatgaataaataaaagatataaatggaataaccaatacaccttagttgaaaattttatacacaaattataaaatatttttgtcaatctaaatatgccaaaaatagaactaacaatcttcgcttttgacactttaattgacacaataattcataagaaaaaagcttgcataaagtgttagaaacaaaataaataatagaaaatatcccatgcatgaatgcatactaacacaaaaaggaaacaacttttaaatgaaaaagttcacaaaccacaaataaataactctccttgagttcagcacaactactccgcgcgagtagtcaacaacaaaggacatattcccctctttgtctatcaaagattctaaaaataaagcaactgtagcaacagtaggcttgataacaagagtagaaagtagagacgttggagtagcagtgggggaaccatgagtaggacacctcaaaccaccttaggtactcttgtttttcgccattgatgactttgaaacttgaaaagccctagaaataactcacacaaagagagcaaagaaagaaagttggagagaaataaagtgagtgagtgagaggggctaattgtgggtaaagtaaggagagagtgggtagtgactaaaaatagatacaattaattaaattaacccacaatattagaataaaaaatgaaaaaaagaaaataatcaaccttcttacccttcatcttccaaaaaaaaaaaataaaaaactaaaaaaaggaaataaaaatataatttttcagttaagatgattgtttctaaaataaaataacaattaaatacacaaaactcacaaaaaacataataaaccagaatagaaaactaacatctcttcctttaattaattagaaaaagataaaggaaaacaaaattaaaattttcaattaacacatgttttcaaaatatctcataaacatatgacaccccaagaattaaataaaaaaaaagaattaaaaaataaagcccctaataaaaaaacctatttttaatgattttcttataaagaaaaaaaaaatcaaaacactaatagatataagacaaccaatcaaagtcacacttt

SEQ ID NO: 20044 - DNA, 2329 bp, Cannabis sativa
tcgtactcgcagtctagatcttcgtttttctcttttgttctactaagcaagccactgagaatttgttttccgtaccccgaaaaattgctcaaactttgccacaagctcacactactagttggccaaagcagcagggcaagaagggtaaaagtaaatagtacaatgtacctgacatattacagagcaaatgggagtttaagaacaagtcaattaaagcataaagtcattcatagtttttacaaattaacactgggagttaccatatgtaaatgaaaatttgccttggaagaaagcacagctgagttgatattgcttcatcaggacttgaagtgtttgaaagtacaatattagtagcagacaacaacatgaaagaagggtacaggtttccctgctgccaacttacagtccctacagtgtgctgcagactattgttagcgatatatcacgccacaataagagttacatataccgaataaagtgggtgcatacctccattacaggcccggatgttgacttatgagttatagtgcattgatcatgatcgtgacctgacaagataagtacctgaaaagaagtacatgttaatgattcctcaacttgaacataaacttttacatggacacagtataaagtatctaaaatcaataaattacttcatgcttcttcattacaagttgagaccatagttgcacatgaggtcactatagttttctgcgtgtctatctatagtgtttcaatatctgcctaaagtttgtaccggggccagcttacatgcacaaaaaaagaataaagtacttacaggtttgatcaactccagtaagaagtctgatgactcctcggaaatgtaattctggtacctgtttatttgaaatgaaaatcaattcgaaagcatctatgaggtcaccaactcaatgtactctttcatgtgcacatttttgtagaaaaacaacaaaaataatcaaaccttatttctccatcagcagtgcgcgtcactcgctgaaatagtaataaaagagaataacaatcagacacatgtaaattctagtgttgattcacaatcactctacttgcataaatggtatgaaagaaaaagaacagataaatcaatacctggttgataactggagatttgcgattaggcccacaatatgtcaaatcccgtcgatacaatggaatatgtgtcaataaaacccttggataggaatgaacatctaaaacatgcagaatacataaatgagttactaatattgtaatcacacttaataacactaaataaggataagtcaacagtctataccacttgatacattcttgacaaagtctagagacgatgaagctcgattcttttgatgttgtgctgtggatgatttaccattgttaataaagggatctagtcatctatattctaatacataaacatctaaatgccatcagagcagtagtaaatcattttgcattatccaaggaatgaaagtccaaggtttttctttatttgattttttcttcaattaggcgttaagtgatgctacaattccatgtccagaaaaagcaattgctttgctgatgtcacattcatcattattacatttgaatttcagaattctaacaaaagttgtataatggataaacaaaaaaaaaaacagttgcatgttcttttttaccatctaaagtttgggcatcaatggcgataaattctacttttcctgctgtaaatttgtagtttctctttccaaattcgtgttcataccgctttgcaacctgattagaagtagagcaaggtgtataattaacaaagacaatgagattgcatacatgtcaaataatcacttcaagttcctaattatgagatcaccaaatttcacaatacatgtggcactaaagacccaaggatagtttgaaaaacatgattgtatgtagaaataagatgcttaattacctctggactatgagtgaagatactctcatagccaatgtcatggtttccaggtatgaagtagaccttgacatctctatgctttccttgcttatccagataaaaaatgtgcttaaaacggcttaaagattcctgccatctaatcaaacaaatgttaatggctaatttatatcgtgaatgtagaagaaattccattagaaaggttttcaataaagtgaacctgtagtaccaaacattttcaagtgatgtttgaaaagtagagtaggatttgataactttttcataagagttttgataattctattatcattagagagcatagtgagaaaaattaattcaaaagccacattaatccacccagcataggataaactagtctcattgagaaaattatga

SEQ ID NO: 20045 - DNA, 2011 bp, Cannabis sativa
atatatattttttaatttaaattttgtgctaggagtttctattttaatggtacaataaaaagtgttacaatatgtattccttttgttcctaattgaaagtaagagtcattttcaaaataaaaaaaaatgaaagtaagagtaactaatgggtgaactggttagaaaaatacaaaataagagtataatttataatttttaaaaagtatacatcgtatagattatttaatttatccaaaatagaggggtgtttctgttattatgataatagttcgatgtggataagggtttcattattaaaaaaaattggaaagtggatatactggatagagggtttgaggaaaacatttcatttttgaaattctactttcggtataagtagttggaattatttatttcataattatttgtgttataaattcagtcaaaggggaacgtaaactagatattatagataaattgaattctgtatgaacgtttgtttggtgaaattccgaagacagagccgagtagttgttgttttgtttgatttgttcatcctaattattgactatctgataagaaaatggtaacattaataaatgaaggaaatactataatatatatagtattttttttttgtcaaattataaaactatatatactataagaatagtaaaaaaatacgcaaaatgtaagaaatttcaaaacttgtgtttatatttccaaaccttacgtagaaggagttggttgttcgagttacaattttcaaagggtaatattggcctcgtaacataaatgaatcatgacataagtatatgcgtacataaatatatattatatgtatgtagttccaatttcaaaaggtaatttgctcgtttagtcataaaataattaagataaatatataatttgcttgtaaaatcaaaattttcatacaagttagaaaagggtattccaattatggggctaattagaaagccgtatgtagtcaagtatataaaaatctatataaatattattaatatatttaaatcgatcgagatcataaaaaacttgtaacctgtgtgtatgtgagagggtggcatgaccattacctaacacacaaatgacaagaaaaattgatttaatttatttaattgaggcatttccccctaactaagctacatgcataacacatttttttatgattttttgctatcaagataattgtttatttaatgtatggttcacaccagctttttccttttaattagtgctaccctatctatcaattctatatgtgcttataattagtgagagcagccactctaagatcaccattattccagtatacctatactttattttttttaatcaaagcactattcagattttccaacaggaacattatttgattcttgccttttctacttaggaacttgggcgaaacaaaagaatgattcatgcacaaaggggatgctttaagtattagaaaaaaatattcttttaattagcccaataattagaatgcattgtgtcttgtttttttttttttctggttagagaaagaaaaagaaagaatattataacacctaatttcttttatgtggcaatttatattatagttataattatcatctcactttttttaagaaaaaaaaaaattcaaataatcacagtgttaatcaaaatcaaagcttaaattgtagttattagttataccatacgcatacttaatttttatactggtgaaactttgaactgtaaacttttttaatcttatttttaacattataaattattattattatttttaaatacctactatgaatgcaatatacacagttaactgaattagattataatgatttaagtgtcaaatacagaatccttatacaatcccctctgattttctagctaagtactatcataaactgtcatgaaacctttaattaattttttaactctaacctttgtcaagtgtgagtgtgtgtgattttgcttgtaaaatttccaagttttacactgaccacgctcagtacgtagtaccaaa

SEQ ID NO: 20046 - DNA, 5879 bp, Cannabis sativa
ggccaaacatcacaaagatacctacgcataatataaaaaataaccaaacaccatttattaacttacctgaagatatggaaacacagagtcataaacatgtaagagaaactttgacttcgacatgaacctgaaaacaaattaataatatagatctgtaaggaaaataaaagtaaattattaataatttgtacgggaagctggatttaatattctttttagtattaatgattgtcaattaaagtgccattagattcaaacgaaaaattcaaaattgatttttcctacaatgggggagaatttctcttgtaaatgtaagaagatacaacattactgaactgaactgcaatatcaaaagaaaaagaacttcataaatctgtcaatacaatcaaatggctctgtcctgcagcttgatattaaactagcaaaccattcatacctttgtatcagacggaaacaaatatagatctcttcgatatccagctcaatctttaatttgacatactgcttgacaacctccgaaaatttgtttatagcttcctgccaacctacatacccaggggcatctagaataccctgacattccaaagtgatacatcgtagaactgaagataaactttgatttgaccctgacttgtaatacatctccgcaagtgtattcaatattacacaattattcacgctgaattcatcaacccacttgggaggacttccgacccagaggtcgcagtttgacatagaatcagttgattcaagattattttcaacctcatcgatatttaatgattgttgtggatatggatgttctgaattagggctcaaggaagaactcaaaggaagtcctggtaacctatgtgcaggaagctgctcaagtatatcgactctcagttcttgaggcaattgttgtaacaccgatgcatctacttgactcaaagatgaaggcattagatcagtattctcaagatctggtctgagaaaatcatgagatcctcccgtagaaggctttaagtgtggctgttttacctaacagaagatacaaattaagttaattatctcatcatttttaaaagcaaaactactggcctaccatgcatgcaatcaaggaaatataaaacatatcactcagacaacagtatttggcggaaaaatttctgatgcatagtacaaacatatatatgcattcaaaattacaaacaaggagcataaatattggcatacactgacatttttttcatcattcccaatgacacttgctcactacatattacaccccttctgacacaccctcctaaaaagggtagcatttcctttcctctgcctctagaagaggcttcaacaaaaacaaaaatcaaggagccctagtttagggggaaaaggattctttctgatatggtgcttttctgctgctacctgagtttgtaagatttatcctaattttttttagggtaaatgcacttgaggtccttaacaatatacacttagatccccaaccttgtttttatttttagtgtttagttccttaaccattattttttggttcaatttagtcccaaaggtttacattcaaaatctgttaaaaaaaatgtcacgactacagctgaaaccgagatgaaaaagacagactctcaccagagagtacaacaacgacattgacgagttggctgtgggtgggtaggtcctcaacaagccatttttgttttggaagtggtcgaagaagcctttggaatgacataattcatgggtttttaatagatttcggatggaatatagcatttgggactaaagtgagccaaaaagtaaagattgagtacctagacactacataaaaaaaaacaaagtttggagcctaagtgatatacatggaaaagattgaagaccccaggtgctattaaccctttgttttactattatttacataaaaattgatcagattttcaaactatcttcttttctataactattcacaagcagaaaatttaaaaaacagaaaattttctgtgtttactttctgcctaggatatggccaagcaacaacctagatacattaagtcaaatcaaggaagaaagaatgaaaggggaaaagtttacctcatctttacttgatatttggcttgatgcaccagattgtgaagggaaaaaaggaagaaagaatcaaagtagaaaaatttacctcatctttacttgataatttgtcttgaagcaccagattgtgatggggaagcctttctccctcgttcatttttcctgaataaatatgagaacaaaaacatgaagcatcacaactgaaaaaggtaaataataatgaagaaaaattgagcttctgtaaggctggtacctttccctttgcttttacttttagcaacaaaatcaactaacttccctccataaatttcatttagttctgaaaaaatatctggaggaagattctcaataactccaaaatcaagatgagaaaaaggtggaggtgcggaatttgagttcaagctagattccccattagagggcttattatccactgagttcgtaacaagtgtatcttcatataactgtccacgaactccatcagatctcagtccctcacaatctgtaacatgggcatcattcagtaaattgatcaagaacaaaattcctttgtaccaatactgcctataatatataggtaagcaacgataaaatcacgagacacaagacaataatacctactgccgtcttcttccctggtacataatcacatttttctgaacatacggaggaagatttcaaccatgacttcaaagagtttttctcggatcctttcaaacagtaaagataatgcccagtttagtgatcagatagaaattagtaactaccaatatataaaaaagatataaaccctttttagtctaattgagcgccacaagaaaaaaacttgagtgtaaaatgagtaagttcatatgatttgtaacttgtaactacactgagcataggtatgttaacaacaattataattaagcaacgtaccctgcctacatgaatctgcattttcaagcttggaaacttgcaagccaacacccctaatctccttaacatctgggtataaaaaaatgaacaggtcaacgtaaaggcatggaagcaaagcaaaataataataataataataataataattcattttgcattcttaataatcaaagatagaaaaacacagtaattaattcccaaaactacaggaagatcaatatatataattattttgcttctttgctagggagagctcaataaagttgcttcatttaaagggagagctcaacaatgttctaatgtggaccggatgttttgacaagacatgagcccatagacacagaaaatctggacatgggctagactcaacatgatatcgtagattgtgcaaggcttagatgtcaagcacaaatgaacaacacaacacaacagtcaacacatcaataagcactaacaaactgactcgaaagcttgaaaaacctaagttaagctccataatttggcattaatagtgataatacaatacttaattgtaaattatattgtaagttaaaatgacaataaaagtgataattttgagtatctgtaaccctataattaaatataataaaaaccattttaaattatttgtttataaggtttgtgagttacatattagttggtatacaaattctaatcattattaataattataataagtctcattttctgaaaacttataaactgattttctaagaacattaagtagaaaaactctagtgctctaacattcagcaactttaacaatgcacctcatgctgcagttaaaatattacctacgttgaacatcccaaatagctgttttgttattctcttaagcacttcaacatcatcagtagcaactggaacctataaaagcctttattgatgttagatttttagccccaacagttgaaacataataataaagaaaccagaattatgagcatacactgtaacccacatatttgcatattttctaaatagaaaataattcctgtaatgataacatcttacagtaagagaatggctcaaattttcacaatctccacaacccaaatactttgcaggctcctctgcatccttccgcctctttttaatctgatatagtgaatgtcagtttatccgtgcaccaaaaacagagaaataacaactctcataaatttaaagaacataagtcttcctagtcaacatcttaatagccttcagtaactaatcattagaataagtaagaaatttgagaaaaagcaaatactttaaggatgaatgtgcgcccctgcagtccacatccttgcaagcgcaatgagacctccttgcaaaggctccagaggaagttttgactctggaaaaacaagtgtcaaaacttttcaaaaaaacagtaaacctaaagtgagatagtaaactaacatcttttggatcattaaatctcacaccccaattcacttcagctcctatggacttgctttcctgcatattgcaaattaatttagcaaagatgaaacttattagacatatcaaaagatcgaagctaaattgataatcagctgttcttctaggtgtggtttgaaaacagaatggtactgcacagataaacatgcaatttcaacttgtcaatttctcagttatgtgaaaggcaacaaaatggaaggatggccacattaaaatatggaggactctacagaaaattaagaaggcaaaccagatatgttaatgcagatatatgtagtcagtcgaaatcatgttctaatctaacctgaatgatcccaacaagtctagtatctattcccctactataattccataacatctcccctgtttttgctccaaagtccttttgaagacattcctgagaaagtagaaacccaagcagcaaatcctttattaataatcacagaaattagaatgatctcaaattgtggagcagatctcctgaaaactaactagaaaagaatacctttgagattaaacatagctgtccacaggtatgaacattttgcttcttcaacttctcttgtagaacatgtcctattcctggtagttctttgattggtagttggcgcaagtaatcatccacctaaataccaaagtttaaccatgaaggtatttacataatattctgcaacatactaatcattggaaataacatgcactaaataaagcatccattaccaattacaagatgatgaaatgagagaataaaatgtgtgagaaagatgaactaatcatccattactctatcatgacataaattacatttgtgacatagaggctgcagcatatactaaaccactcgttaatcaagccattgaagtccgatatcaagatatattgagtaccttctctggaggaatataacactgcccatctggtttggcatttctggtggcaaggcgagatataagcatattcccacctataccagcacttgcagtgcatccagttgtctcaaaaatttcctttcttatagttgaagctaaaatctcaggatcttttccttctaaccctgtaacatctaagaatgcttcatcacagctgactgcctacatttagaattaactattatgttaataaaggactagtaagaagtaaactatgagttgcatgtagaggatgtgttacagaagctgacctgtactttcttgcaatgcttgtgcaatatgttatagaactggtcagcgacctgcagattttatcaatgcataaaataatgaaaataaatcacaaatgaatgaatgaatcatataaatactgaccaagcgaaatagggaaaaaaataagaggaaaaagtgcacacacattcctacataattcagatttgtaaatgataacatatgattaattttcgaaagtaatgtagtataaga

SEQ ID NO: 20047 - DNA, 1565 bp, Cannabis sativa
gaattggatcttttctcatccacagcctaaaagtgtacggactctgtcaatcgtcggtagagttcttaacgacattggcttttatcaggtatatatatttgtaaaagttaccgatcactaactttattgttttgctatatgacaatttggctatatattttgcaaacaagaagataaaataataataccctgagcctaattttttggttgaattgtttttttattcgaactatgtaccctaaacttcttattccttagctctaacaactgtgcctcaatttctattttgttcctaactcgaaataagtttgaacaaaaatcgagttcaaggaaccattattttccattttgtagggtttaattaagtttttcatttaacaaaatagaaattctaattagtaattttttaaaaaaaacaatatagtaaaatgatatttacactaagatttattatacctaaattagcaatttatttcttaatattgtcaggactttacatataataaatttctataatgtttcaatttttcgaattgaaattcaaacatcgtgttaagaattttcactacatgttaatgggcacaagtagtatttgtaacttcactttgtgttaacgaatcaaaatctacacgaaatgaataggtgtaattttttttttaaaaatgagtttggatcatttccgagtagtatctgtaactctaaactgtttttctaaaggaaacaaattgtcaatgcaaactatttgtgttaggtgcaaaattatattttgtcaaacaacattaatataagtaaaatatgtgctatttaattaatttataattttatacattgtatatgttgcagtggagggaaaggagaacagagaaagtagatttctcagctgtgaattgttatataaaacaatatggtgtcgaagaagaagaagcaatacaaagacttaaagaacaagttagtgattcatggaaagatctgaatgaagagtgtctctatcccaacaatatgaatatcccaatgccacttctaatgcgagttcttgatcttgtacgcatgaataatgaattatacagagaaggagatggttttacaagagaagccttcatcaaagatttgattgattctctcatcatcaatccctacatccaacaataattatttatataatagggttttattaactcgtatcgataggaagggactattataactagttaagagcactctcaacagtttctttactctattctttaaaatacatcaccaattaaaactccactttatttattttacctcaaacttttatactatatcatatatcaacttctctatttttttttcttaatatcatttaaatattatatttttaatatattttattcattttatattaataattcatataatatgacacacatatatgaaaaagttaaagaatataatattaaaatatgtttaactcaatgaatagtacttatctctatatttagcaagcactattcattaagctaaaaatatgtaaaatagctaaggtttacctcacttggttggaatgttagacttttatttgg

SEQ ID NO: 20048 - DNA, 2614 bp, Cannabis sativa
tcttttatggatactttaggcggttataatttccatttcatgacactcagatgatatcaacctttcactttcctatacattggtgttcatagatgtcacataaattcacacaggcgtgcttctttaagtttttcttcttctacaatattattagctgcttgattacttttttctgcaatgataatcatggatgcatgtcctattttttttttttggatactttaggtttctttgtttttggatactttaggtactagttatggatgaactttccttgcgcagattttacagcagaatctgaccatgaaaaagctccgtggtcatgaaataaaggtacttagctaaataatttatatttatcactgttggatatttttatcatgcacttaaaacttttctactctgtattggtgtgcaatatattgtgcatgttgcaattttttgcagccttattttctcacccatgtgcttgctgccacttaccataatctgcgtagcttggaagatacaaaaatgtgtctgaatcttcatttaagaatcattcacccaataatgaaatgtatcactagtttctgctcttagatcttctcattaattctattgtttactttgggaatgcctgttatgaaagttgatttgttcttgaagattaactattattcccaatacttcctcatctactttgtctaatcctacttttgtttttcacttgtttcttgttgacaggctaggcattgggattccttctataatttttacagaaacacgacagataacaagtttgcttcctgttatactacatctttctttgcatttggtcattttggtgaaattaaggatagatgccactaattttagaacttttcgtgtctttaatgattataaagattagttcatcttagatattttatcaattatctataggtggggcactccttatttgactagggatttctttcacatcatggcatcaaagatgggagatcaggtactacttgtcatagctgaagaaggggaagaaatggttgcaggagctcttaatcttataggaggagatgctttatatggacgcctatgggggtgtcacccacggaaatactatccaagtttgcattttgaagcttgctattaccaggtctggcaatgactttcattatatggtgcagctcgttgcaatattttagtatcatgtggctaataattagtttgagaagaaatgtaagtaactttaataatgcttatgtgttcaaatttgcaggcaatagaagctgctatagaactcaatctgaagactgtagaagctggagctcagggtgagcacaagattcagcgtggctatctgcccgtcacaacttacagctcccattacctgatggatgaaggtttcaggacggccataaaagactttctggaccgtgaatcagctcaggtaagagataccaattaaacattttaaagaaactcccacatggtaggcctgttaggtatttggtactatataagtaaaaaaaggttatcttcatctctcattccttctcagtgttctcacttggtttggctttgtcccaaaacaacccaaaatgctcccatcttagccaaatttccaagcaattgtgcaaataagtgattattattttcacttcttcctcactttgattgttcagtatcagttttgacattcaagattacaaatgtcaaattatgatttcatttttctctgctatttttcttctcgctaatttcaggttgccagtttagctgatacagagattaatcttgcaggttaagcttgttatgaaactattacatgaatctggtcccttcaaggagggtatacatcaaaatcatcaatatatgtgagggttgactacagatgagtcagctttatttgtaacagattgtagacaacttcttttcttcatattgatagttaaaaaagcaaaatcactttaggctgtaaataattaaaacattatgtaaagttcatagtttacagtgatgtaaaaaaacccatgaattggtctcaattatggatgagaatattgatattaaagggatattccaatgttttggaaaattcgaattatatatggtgcatttcataacattttttcacgctttttttttttttttatttatttatttttaataagaagtgaaaatattttttttgtaatttttaatttttaatatgagaattaaaatcttgaaaatttttgaataaagaaaatgtcactttcaaaaaactttaagtagttttttccctttaattagagtttatttgtatttttttcatctatattttagactccgatactggactcgaagcttggcccctgaacttggaccctagtccctggaccttggacttgcactgtagacttcaaaccctggcctcggacaatcagacctcaaaccccaaacttgaactcgaccctaactatgaccccaaacctggtccactttttctcacctcaaattcttattcctcatttaaataaaaacacaaaatataaataaaaataaaatgtacagaacacacttttagttttggaaaaattacatcttcacacataatataagaaataattactcatttatcgtacaaatttta

SEQ ID NO: 20049 - DNA, 3962 bp, Cannabis sativa
tctctctctttcttctctacaacaccaacctttcaaaccctaacttcggatgcgaacctcaacctcctcccatggctactactgttcgaagatttctccctcgtcacttctccgttgacgtaactttttctatctttcaacctttttcttgttcttgatatgtatgtaattctattctattctgatctgatcttcatttctgtttgattcggttttgctctgttgcagagaactagccggatcttttcgttatctggacttaaacaaggtttgtgctgattttctttatgaatgcgtgatggttttaaaagattttagcacaagttcagttctgtttgtaattgcttgaattgtgttgaatttttgagttgaagtgtaattgtgtacgatattttttgttcttatgatatcttgagaaatttaggattgggaggaagttgtaggagttatggcgtgattggttcttcagaaaatttgtcattgaaatttgaagatagaagtagtgatagttcatttgaagcagaaggtgtcgttcttgatgacgaagtacagaagattcgtagtgtatttgatgctgccaagaagagtttcctcagtacttcggaggctcttgcgtcattgccgaagatgcatcccgaagcgtttaagtcattgccacagatgaatccagaaggtttgttaatgttttcttgcgttcttggatgaatgcttatagtcaattagctaatcagcttttaaactattatgttgactggtgttacttattgatattagggatttatgtaaataagaatttgagattggacaacattcaagtttatggctttgactatgactacacattggcacattactctaaaaatttacagagcttaatctacgatcttgcaaaggagcatatggttaatgaggttcgttttttttttctttttgaatatatatatgctaaacaaaaagttttgatctacattgtgtatatgattgaatgtaccattgcttgtggtttttcagttacgatatcctgacatttgcatggaattcaagtatgatccaacttttcccatcagaggattgtattatgataagctaaaaggatgtcttctcaagttagacttctttgggtcaatcgagccagatggatgctactttggtcgtcagaaggtacttaaactctccaatatatattcgggttgtctagtgcattctggatctggagtttggttgtgaaacaactgctaatcaatgtttacgagttaaatcttcacttggatatatacgatgagaatatataaggcatctaatataagatttcagcaatgacctccacattgagccttgataaatttggggtttgttctccaaatccgacatcttctacaagtggttttatcatcaaatctaattgtcaaagttcctttcaagaaacctttcctattttggatggttgttaagttcggttagcttttatagtcttaccaaatttagtaagttggctctgtataaaatgcaagaaggaaaaaatgccttgtgagttagattagctttaacattcaaaagaaagaagatcaaagcgagagtttacagaacctaggagtgatgtcattgcttggctatgaaattttgttgacactaaaattgtcttttagcatttgtaagtaacatttatcgtgatcactcatttagctttaatttttaactttgtcttaaattagagtaagatgttaaacaaaattattgatgatgcatcgccagtgaagtttgctagttaattttatatcttaaattgtcacattcaacaataatttttttgcattaatcaattgaggtattatcctttggtgtgattgttaatttctcattttctatgttgcagcttagcagaaaggaaatagtggaagtttacggaactcgacatatcggtcgtgaccaagcacgaggtcttgttggcttgatggacttcttttgctttagcgaggttagtttattatttttatatgttaccgatcgatatctgccgaatcttactctaagaagttgcacatgtacagtgtaaaattaccacatggaacatttgtttctgcaatatgtgtaacaggagctaggacacaggactctagatggacttaaaagctcattacacaattcagggtccaacgaatattaaattgcagaattcttaattatgccaagatcaagtgcaactcatattcctagtgccaatgaactgttttgtttttaataattgctatgtaaaatacttgattatctatctgatacaaacttacacaactcccttacaggcacaagagtttagtaaagtaagtgaatactgagttggatttgcttgtcaaatattttagttgagttggtctttgtgaggcaggggaagacattttttaacaagagaaacatcattattctacaaaatataaaaataaaaataatgttctctagcattaagagagttggataaataccttggggaaggaaaaaagtcccttctttctctcctccaagaggaagagggatatgacggtatagtttatttaagtcattatatgtatctactttttttgctgtcaatcagaattctgtaaagattgtttattatcttgatgcatacatgtttacacatggaaggtaaaaatgtacgaaatgttaagataattgcatgcaagctgtgctttgttgagtcttccaaatctcttaagattctgtccatatgaacttctaatggtttgttttatggctacttcacaggcatgccttattgcagatattgtgcaacattttgtaaatgctaaactggaatttgatgctagctacatctatcaagatgtaaatcgtgcaattcagtatgttcaccaaagtggattgatgcatagaagaattctttctgatccatgtagatatcttgtaaaaaatgtaggctcttactagacattatgttttcaatctatgtattcatttatcttttgttcgatccatgagttatttcacataaattattttgtgttgtttgtactatatctctttcttggaagcattttgtgatcgttgaatgagtattaaattttcaggatcagctattacattttctgaagatgctcagggaaaaggggaaaaagcttttcttgctcaccaactctccatatttctttgtgaatggtggaatgcagtttctgttagaggtaatttaccttttattgtttgtggagagggaaaaaattattagaatgaagaaagagtaaactaggagacctaagtcacaaaactaatgcctttatatttctggagactggttactctattatttatatatatatatatgtatatttgaacaactgattactttattatttaacagcgtttgataaagatgcaaaaccagtctcatttaaatttgaatttatcagctgtttaaacttgtgtagcttcaagtttcatgcatttactcaactgatgaatatgtagtattttttaattagtttaaaaagtttgcacagttttccattttgaagattaaatatatgtgtgcatatgaaactacacatctttatgtatatacatctgtgagaattaaaaatttcagggtttatatatttattttcattgtttctgtaacccttatcatcattgggctgtttgtgcttctgaaatattctaagcttactctgatctatgatatgatttaggattctatgggtgacaaagactcgtggagagaactttttgatgtcgtgatagcccaagcaaacaagccagatttctacacatctgagcatcctttccggtttgcatctttagcttgtttatttatctatctgcttcatttttccttatcattcatttgtgtattaaatcaatattgaacttcttctttgattgattaccttgaaaaagaggatgattgtgctgtaatttttttcttttttctcttttgatttgtgattttttttttt

SEQ ID NO: 20050 - DNA, 8833 bp, Cannabis sativa
  modified_base (7266)..(7278): a, c, t, g, unknown or other
  modified_base (8342)..(8347): a, c, t, g, unknown or other
ttaaatactattttaatctggatattacatcgatggattccattgtcgcctgagtcctttgctctagcgactgatgcttcggtggtataaggcaggggttttgtcggtttgggggggggggagtgatacaggatgctacgggtgtggtttggttggcgtgatcatctagtgtataaggtgatttctctgttaatgtggcggagttgcttgccattcggatgggtctgtctcttgcacttcaacatggttttcgtatctccattattaatagtgattctacaatggcaattggttggattaataagcttcacatgaattttagtgttcagtctattttattatatgtctattctttattagttgttgttggtggtggttcttgcagtgttgttctgcgttcggcgaatggtgttgcccatacactgacaacctctgttactagtttatgagattatgtttggacagatgcttgtccacgatttttgagttcttctgtaacagcggatttaattcaatgaattatgtctttttcttaagaaaaatagatcactaaaattatattttctctattttacaacatgcttttacattgtagcatacatgaatttatttatatttttctctacatcattaaattaatattatttttattttttacactattaaaataataattttcaaacatatatacaatatacataaacaaaatattatttatatgttattaaaataaatttaaagaatgtactattcattctctacatgtaaagtaagttgtattgatttgagtgcatatttattttacatatataatttaaaagagctgatgaaagccctttttttttatcatatttagttaaaaaaattagagaatctttattataaagtgctctgtattttaaatgatagaataaattaggagtattcttaattaagtaaactaagtaagacctaattaagatccgatatacaattgcactaataatgatattatatcttacattggtgtcaagtactataaatgtcatttaataattctctatttaattaggaggaaattattataagaaaaaataaaaataaaactagcaagagttaaaagtagaatatgtatagatagcaatatagcttgtacaaaaatataatggagaaaataatgattgaggataaaaaggataggtaggccgataaggatgccttatgaaacatatttttaatttatttatttatattttactttacatctgagaaaaggttttattttattcaaatgggaccttttgtagtactaatttattttggctgaaggtggatatgaatttcatacaaattcattggattggaggacaaaaatagactttgatgtacattcgaatttagtcccaagccttctttatacataaatatatatatttaaaaaacttattgactttaattcaaatatttttgtgatgatatggtaggtgatggggtataattagtgtgaaaaagtatattgtataattaattatgatagtgtttggttaacatatatttttattaatattttaattaaaaaaaattaaaagtaaaattttcgtgttctataacttttgtttttttttttaaatttaataataaaaaataaaaaaaatatattctataattatttttatttttttaattttaaaaacaaaaataaaaaatgttatttataattattttttacgagtctaggttgaggttcagggtctaaggtctgggttaggtttagagcccgagggtctgggtcgtggtccatgtctagggtctgagtttggggtcggggtccagtttcttgttcgagtttgggtccaagtttaggccagggtcctattctaatccgaggctagggttggggttagggtcttggtccggatttaggttcgagatcaaagtcgggtccatttccaaaatattaatgataaaaatataaatagattataattaataaaaaaattggttaaataaattttgagtgacttttttttgttttaataattttaaaattttgattctcaacattaaaattagaagtgaaaagtaaatttatagaacatatttttgaaaatatttctatttttctaattataaaaaaaaaactaattaaaaaaatattaaattgtacccaaagcttctttgctttacaattaataaatcagcctagttcaattgaaaaatacccatagtttttctttccaaaaaaaaaaaaaaaaaactacccatagtttttattaggggtgttcaacaaaatttacaaaccgcccacaccaaatcgaataaatcgataaaaaaaatataacccaaaataatataataaaataattataattttatgttttcagtaatactgaattgattacaaatcacatatgttttcttttttatatttaattttttttagtgacagtatatattataattatagtagatattttagctattttaatttttttttaaataatttactgtgttaaataaatttcaaaataatcaattaatttcacgcatataaataaaataaacatgtttacaactgagtatttaaattttatgttcggtatagtaaaatattttttattcttattataatcaacataaatatttatatttttttaaaaaaaaatttaattctcatattaaaaatagcaacaattagtcttataagatcagggttttatttaaaacgaaactaatgaaaaaaaaaaaatcaatataaacgctaatatagataaatgaaaatattctaagaattgaatgtaattttgttgtaaaataatcacacataaccattaaatttttaatgataatattaagaacatcccatacataaatgtagagcattgttatgagacacttatagtgttatatatactacaataaagtgttatttctataattagttagcgatttttttataatatttattaaaataaaataaatgagattcgatattaagttacactaataatgatatcatccttcataaataaatatgttaggtactatataggtgcccaataatatttttcataaatgtatggattcaagtcatgactttgtttgtaacaagcaaagtaatcagaaaaatgcaacctgttggactaaataaaagaaaaaccaataagaagaaagtgggtttagataagaatattaagatattaataagtgttattgagttgatgccttatgtttttaataatataaattcaatacttttttttaataaaaactttatcttttgaaatcataagtaacatatcatcatgtcaatacaataatacaacacaaatttaatataaattattacgagttaggatcataaaaatatacatatgtagaattgggttgaaccatcactaataattattaaaattggactatgatctagtagttgtgtaacacgaaattgacaatttaacatatttatattcattaaaattattgatttatagtcaaattattatttattttataaaaaaataaatctaaagtagaaagaattaatataagatagtttatactaagaattttgttcaaaaatatattgataaatgaaaattttacataataaactaaaaaattacaaaaatatgttaacatagagaaatttttatttttacggtctgttctttttattttttcgtttttttaattattttatagttatttataattgatttatagttagtgtgacttgtggggttgatttttttattgtttttgtagttattttttactttttatttgagaaaattgtatttttataaagaaaaattttagactctaaaataataaataaaacataaaaaaaatatatttttgaaaaattccttgataatttaccataaaatatgtaattaattaattttatttatttaattatttcaatgagtcaaataaattgatacaatcaaagatatagatacaaaaattaaatatatgataataatcatgttgatcacttgacgatagttagggttaaaatttcttgatttaagattaattgattattcatgtcaatatgtatacataatataaatacaaatatgacacaccaccattaattactacccctaacatatggtactttgtatttaaacaagtatatcttaagatatttttttttataaaattacactaaatataatatttattcaatttgtcaaaaccttattaaaaattatggctgatagatattttaagatattaattggtatattaaatctctctaaacacagtagcatatgctacaaataaatttattttgggttgaaggttttgagcttttgtgggtatgaaaataccctcaaaagagaaaaaaaaagaaaaaggaaattaaattaattaaaccactaaaaatttatttttaacctttttagttatgtttagaatatcaattatcgatctgaaccttgaagaggcatttatttccatagggctggctttccaatgcactgatcatacagctagctaccagaacaaaaacacagatcttccccttaaattaatcataattattataaaataccctaataataaaaatattaggtattgcttaaattttaatttaatatatcacactttcattcacacaagtgtttaattttttttttttgttttgaacaatatataattctttcacactgttttggtttggggtatgaaacaaggtttttaagccaacagaatgaaagtttgcacattgtataattaattataaaaatacaaacaaaataataaataataatattatgatgtggcaaaaaaaaatgcaatatttgtgttctgtatattttatatataacacgcatttaattccagtatttcaactcacacacaaaccatgcaatacaacacattttgtcataccaaataaatccaattccctaattaatttaaacacaatctctaattttcactatattggatatagaaaatacagtttgtttttatataaaaattgtactgcatagaaatgtgtagtacaatttgtttttaaatttaaaaatgatataaaatctcatatcacaaagaaagaatacaaaaatcatgtttgtacaacaatattttgaacacaagcaacttaattgaggtttaaagggtaatgaatgagattgaaagtaaaaaacttaatcagaaaaagacaaaaagaaaatggaaataaaagtggggtacgtggcagttattgagcaatagtagtcaaatcgcttgcctacacttaaatcgtccttcttactgttctcctccatagctgtagtgggtcccaccaaacccccaaaacccattccattttctttctctttctctctttatcttctctatttatttatattttgcttctcaatcaaattaacaccaacaacaacaacaacaacaaagccatataatagtctagtctctcttcttcttctctactaccaaacgacactaaattccaaaaacgacattaaatgagatatggtgggactgagtatattattggaaggtcatcaacatgagcagagtagtagtagtgttaataataagagcaataagagtagaagtagttgtagtagtagtggtagtggtaataggagtaataatagtcctcaagttattaacaaaatcaccatgatcaacacaaatcaatctccttcttcttcttcttcttcttttgtttacagaaactttgcttcggtttcctctgttcaaactccaacttttctggaccattgttttctctgcaagcagaaacttttgcccggtaaagacatctacatgtacaagtaagtccaacaacaacaacaatgaaaacgacaattttttttgtttgtgtattgttgtcgtttacttctctggtttttcaaatttccttccttttggaaactgcatgactcaagagccaacaagtttcggtttttatgtgttgggttggttttgttggctattttgagtaaaacccagatcatgattttcgaaaatatggtcaaaaaaaggttgtttcctatgtggggtttgtgtatacatatatatataatattttatatatattgtatatgtgtttgttattgcagaggagacaagggtttttgcagcgtggagtgcagaggaagacagatttttatggacgaagaagaaaatctttacaagaacaactgttcattgtcttccatgaaaccctcctcttcttcatcatcatcatcttcatcttcttctggttctcggcaccggaaaggcacggctggaaactagagagtaaaaaaaagccagttataaaaattggttttttactctttcttttttgcactttaaacctgttttgacggttttaccctcggttgattttgtaatgactgtaatgccctttgcctcctactatgaagacaaaagagtcctttaacttgtttattttggtgtatggagattttggggttggcctcctcaatcctcatcatcgtgtaatctctgtgggttcccccattcccatagtttaattatcagaaaaacaagagaaaagttaaaaatgattttaaccttttttttttgtaacggttcaaagggcatgtatggtattttattgtatgcttaatgagaattaagtgtagttgtttattaattaattacctttcttcttcttcttcttctttttgataaatcacctaccatttatgttacttttggttatggtgatttgcacaattccctttagtggagaacataatgaagaaagaattagtacttagggaacaatgtcatggtcccaaaaataatggaatttttttatttttttttaaaaaaaaagagataaaaagaaaaaaaaaatgtgttaactcttgagagaccattagtttgtcactttcttttgggtttggttttgttactttttttattttttgtagccattctaatactttaattcctagttgtacttttgccctttttattaggatggtacctgaaggtccactcaattctattgcttctaattacatttacatagacttacattaatacttactgagttactgatggataatcaatggttcttatccttaaccaccttttaattttgtctttatatatatctatgttatgaatagacaaaaaaaaaaaaaggacagagtaggaccaacaatgcttttaacttaacacacattttcgttcttgaggtttctaaggtgggtacgcctcattaagaattcaagattcacaagcatggtaattttggtcgttttgatcattaaagctattattattattattatnnnnnnnnnnnnnattattattattattatttctcactataaaccaaaacaaataaataggggaaagataaaatgtttaaagactaattaggatttgtgttttaaattttgacatattataaattgtcttttaattttttaggtcatcaatatgttttttttaattattaaaattgttggattcatatacttttatataaatttggtaatagatgtatcatgtagacagaagtggggagcatgatttaattcatatcaaagttcagataacacataaataatcgtcacattacattaagcatctctcagtaaaattttacgaaattagatggagtttttaaatctaataattttgtttttagttttggaagaattttaatagcctaaatgtggaaaaattacaattaatagtgcaaaatcgaaacgacaatcaaacaattagcaatgacaatattaccaaacacaaggaatattctctctcttttctctgcacctttctctctctacccctcaacttttctctctcaatctcaaaactcgattcgatcgtcatgtttgaaaagataagtgttggtggtgttaataggttaaggattaagatcctaaagtcggtggttgcaagaagcgaggttgttaagttagttaggcaataaccaactcttctttgagcgaggtctccacgtcagcataagtatgatgagtgcatccaggagtgtgtatgaaggcttccagaatcacggagtaaagcactcgctgaaaaaacttccctgataggaaagtggcagttggactcgactatctgagactcctttcctagagaaacaactagccatcatcctaaactcctttccgaaggaatgataactttctcgaggactacacttggagtggacatgatggtcattcaggaactccctttcggatggcaaccatcattccacaagacctttttcaaatggacaagtaagcagtctgggaacatacttccaggagacaaataacttttggataccttttcatttagatgaactataccacaaattctacctagttacttcaaattaaaagtattaacannnnnnaagaaagaatgcaaccatcatggttggtgttcatctcagtatactaacttctgagaatttatcaagttcaagcaatgcttgaagctgttaatagttaagaccttagttttaacattagaaagattaacttttattctgacctttctaaatcaaacaacccttcttctatcttctctctaatccagtagagtcttatatctatatgagttgcccttttcatgataaactaggttattacaaagatggatggatgactggctatctgaatacacattcactccccatttgatttgtttcaattcaataagaactccccaaagccataacgcttccttgaatgctttcgcaatacccatgaattgtgctttcatggtggaaagagaaaccacagaatgtagttgggccttccagcttatacagttttggtttgtcaagaaaacgtaggaaatagttgattttctggtatctttgttcgaggcatagtca

SEQ ID NO: 20051 - DNA, 1560 bp, Cannabis sativa
ttttcttaattctttctttaagttattgtgtgggggacttctccaaaaatgaattcatcgagatgtaatttagttaaaacttaggaattagaagagatgattctccatcctagaaaaatacataaataaacaagtccactagtagatatagccaaccaagcatgtgatatatatatttagagataactccccaaaatggaatgtctcgcataaaacaaaagttttatattaatgttaactatgctcaatgccaattggtagattagagttcgaataaagagtcacactgtgccaatcaaattagtaccatgtccttcaattaaatatataattactaattaataaagttggtaccgtacgtaatataatcatgaactgtggtatacgttgcatttcatcatcaatacatacttcatgaatttattatagaacaatttaaagaaaaagaaagacagaaagaaatataaaaacttgtaaattaatctaaagttaatgtgtatatatttctcattttttttctctctctctaactacctataatggctaataaattttgccacaaaattaaaagatatgggctaataataagtttaactaatctccaagtctatcaaaccttaatatgataaaatgattttgtcaaaaataataaaataaaattataatatatttaaactatatataattaactaaatattattataactagaagcaaaaaaaaaaaaaaattaacatactgtaattgactacaaaataaatcattatttagagcagcaacatttttattaaaatacaaagttttcaatcgaaaagcacttttttttaaaaaatcaataaaccactctttagagctacaaactcaaaagaatgagagaaggggtacaagatcatttattgatcaacgacatcaatcataataatgttctgaatataatttggataatttagctatcaaactttactaaagcaacaagggtgtagggaacaacattttaagaacaatgaaaaagactaactaaaaaagagtaaaattaaaaccacggagggactttagcccatatgtaggcttaagccctcactcaaatatatacatcaaaattttcacatgtagatatatacatatattaattcacttcactaaatttattaaagcccgattcacaaaagcccttactcaatatcttaatcacgattcatgagcctactctcattctaatcaagcccattttaaaaataacccaatacaaataataaaaaaaaataacactttattaaaaaaaacaaaataatactattgtttgacttaatatttattcaagtccttactcagtcaaatttctcgcttcgccactgattacaactaatatcccgaagaactaggccagagaaagaatccaaagaaacgtgattattaaccttgcgttttgataggtaaaatctatactataagtgtatgtatcgtttttagtaataaagttcctaagcatgagtatcatcagggtcggccagagggtggggcagccggggcctcggccccaggccccacaattttggaggccc

SEQ ID NO: 20052 - DNA, 1533 bp, Cannabis sativa
ctcttccttagaaggtaagaacaatgctcaagaaaataatggatgtgaatcgaagaaagacgagtctttgtccaaggacaatcgagcactggttgatgacaataaagctcagaccctaaccggggaagatatagatgcaatgcgaagagagggtgtaacaggtgatgatatagtggaagctcttattgcaaatagttctacatttgagaataaaacattgttttcccaggagaaatataggattaaaaagcaaaagaaatatgcacccaaagtgattttaaggcgcccagttactcgtagtatttgcgaggcttatttcaagaaatatccttccagaattgggttcttgagagttgatactttatctcttttactgtcatttgctaatatctctgcaaattctgaagcccttgtggttgatatggttggaggtctgcttactggtgctgtggctgaaaggatgggaggtaccggcacaggtcaggtttgtagtacctaccttggtaaaacaccttattctatagagatagttagaatattcaactttggcaatgatatttgcaagagtattctaaaggcttctcttcaagacctgatgactagttccagttcgaccgagaatgggagcttagatcaaaatgataatggtactggtggtgacgattcttctaacatgaaaggtgttcaaggtggcttattagatcaaaatgaccaaaccccagatgggacttctcaagtaatgagaagttgcaacaaatctgtaaataaagctgggcagaaagcacctaaagaagcgattaaattgtggaaagaaaatgggttttccagtctaatagttgctgcaccagatttggatacctggagtttagttaaagatctcttgccccttttgtcaaattcagctcctttcgcaatttatcatcagttcctgcagccacttgcaacttgtatgcataatctacagcttgaaaaaatggcaattgggttgcaaatctcagagccttggttacgagaatatcaggtacttccttcgagaacacatcctttcatgcagatgtgtgcatttggtggttatattcttagtggcaccaagatatgcagcagcagcagcagcatatagtaatagcttcatcgaatcgaagcaagcaataatgttaaattctaagtgccatgtatcatcacaaggtatgaggttcgagtacccttctgggtatacctggtccccaaatattgtagggttaggttgaagatgttagtttcaaatattttttagaaaataatgtatcatcatttttgttaatcttatcttagttaccttgtttttgaccaaaattgaacgaataataatgttattttactggtttaactgatgttattgttatgttctgtgtaccatatgctatttctaatggcaaataatttatatagtttagtgtaatatgattataaaattgcttattatggttttttttttgttcataatcatattatctgtttgtaccctcactatacatcaaatttaatacaattttt

SEQ ID NO: 20053 - DNA, 2018 bp, Cannabis sativa
tgtttgattccatgcccgaaaaggatgttgtgttgtggaatgtaatgctcaaggtgtacttggacatgggtcttgaagaagaagtactttatctcttcaccgagtttcatcgaagtgggttacaccctaatgatgttactatgtgttgtgttatttctgggattaacaaacttggatttgataagtgcagtagtaggtatctacagcaggttcaagcatattcaactaaattatctttgtatgaagatgattcagatgcatacatgtggaacaagacactttcaaagtatcttcaagtgggtgaaaaatggcttgctattaattgttttatcaatatgattagatcaaaggtgaagtatgatgttgttactttagtagttatgttaagtacaatctcaggtacacatgatctagagttaggaaaacagattcactgtattattgtgaaatcaggttttgattctgaactttctattgcaaatagtctaatcaatatgtattcgaagttaggttcggtttattttgctcggaaagtgttcaaatacatgaaagatttggacttaatttcttggaactcgatgatttcgagttgtactcgaagtggtttagaggaggaatctatgagcctatttaaagatttactggatttgggtgtagtacctgatcaatttacactagcaagtgttttaagggcttgctcttcacttaaagaagggttatcccttgctagacaggtacatgttcatgcagttaaacttggtaaagtagctgatagatttgtttcaacagcacttgttgatgtttattctagatgtggaaagatagaagaggcagaggttgttctacacaaagaagttgaatttgacttggtttcatggaatgccatgatgtttggttacataatttgtaataagagtcacaaagcattggaacttttgagtctcatgcataaaattggagaaagggtagatgagattactttagcaactgctaccaaagcttctggttccttggtagcattggaacaaggcaagcaaattcacggtcatgttactaaagtagggcttggtgtagatttgtgtgtcggtagtggaatcctagatatgtatgtaaaatgtggagacatggtaaacgctaatatcgtgttttctgaaatctctgtccctgatgatgttgcgtggacaacaatgatatctggatgcgttgaaaatggtcatgtggatcgcgctctttcaatttatcatcagatgagagagttcggtgtccaacctgatgaatacgcttttgctaccctagtcaaagtgtgttcgagcataacaacattggaattaggaagacaaattcatgcaaatgtgataaagttggattatgcctttgacccttttgttgggacatcattagttgacatgtatgccaagtgtgggagtatagaagatgcctattgcttgttcaaaaaaatggatgttaaagatgtcaccttgtggaatgctttgttggttggcttagctcaacatggagatgttgaaaaagctcttaaccttttcaaatgtatggttgataatcatattgagcctgataaagttacatttcttggggtgcttttcgcatgtagccattctggtttaatttcagaagcttatagatatttcgcttccatgcataaagattatggcattgagcccgatgttgagcattatgcttatctagttgatgccctcgctcgatttggacatgtaagagaggcagaaaaattgatcgcatcaatgcctagtaaagcttcaacatcaatttatcgaaccctacttggcgcttgtagaattgaaggggacattgaaactggaagacgagtggtgaagcggctcttggccttagagccatctgattctgcttcatatgttcttttatctaacatgtgtgctgcttcaaattgttgggatgaagtgagtaatactcgaaaaatgatgaagagaaaaaatgtgaagaaggattcaggttatagttggataattgtgaaggaa

SEQ ID NO: 20054 - DNA, 4347 bp, Cannabis sativa
  modified_base (4208)..(4208): a, c, t, g, unknown or other
tgcttttgtttcgtaatttgatgtggtaattttgttttctttttatgaaaccattaggcagaacaagaaactgatgaagtttatgctcggatcactttggtgccagaaaccaatgtgagtcttttctttttataatctttgttgttgaaacttttcatttagaacatgtaaaatagaagaaacaatttttatggttttgtttcttccaacaccgagcacagagttgcgagtaatttactcgtagattttgattttgagcggctttggtgaattttacagcaaacagaaccaacaagtcctgatccatgcgttgatgaacctgcacggccgaatgttcattcgttctgcaagattttgacggcgtctgatacaagtacccatggcggcttctcagttcttcgaaaacatgccactgaatgcttgcctcctctggtattaaacttcccatggattggatactattctctggcatgagcatgctggactttgtttggcttttttgtttgcttatatacctctttaatgtttttaggacatgacacaaacaacaccaactcaagagttggctgctaaagatcttcatggctatgagtggaaatttaaacatatatttagaggtagtgagatcaaacatgtattcactaattaatttacaggtttaaactatatatcatttgaaaaaaattacccccaacgaagaatagctagtaggcatgttgaattgcttgtaaatgatagttgttcttgtttggttgccgaataggccaaccgagaaggcatttgcttaccacaggatggagtacatttgttacttccaagagattggttgcaggcgatgcttttgtgtttttaaggtatgtgcacttgtttattcttgtgtttttcttagtttaaatttggtggaattattgttagctgattagctttgttatgtaacaaaatttttgaaggggtgataatggtgaactgcgagttggtgttaggcgtcttgcttgtcaacagagtctcatgccttcatctgtgatttcaagtcacagcatgcatcttggtgtgcttgctactgcttctcatgctttcaatacccggactctctttgttgtttactataagccgaggttggagaatatcttcttttctttttttctgtagatgttcctaggtgaacattgcattgtaagcagttaactttgtaagttttccaggactagtcaattcattattggcttgaacaaatatcttgatgctatgaacaataaacttactgttgggatgcgctttaagatgagattcgagggtgaagactcacctgaaagaaggtatttacagttatatattggctattgatgatgttaattgttttccagtgaataatgagttctaaactaattttctaggttcacgggcactattgttggggttggagatctatcttcacaatgggctaattcaaagtggcggtctttgaaggtataaaacaattattttggcccaagtttctgtgtatgtttgcctctcattaattttgtgtgttctgttttagattcaatgggatgaacatgcttccattccaagaccagagagggtttcaccctgggaaatagagccttttgtagcttcatctgcccctctaaacctaactcaaccagtaacaaagaacaagaggccccgacctgttgacattcctcaatctggtatgaagaactatattgtaattttcttttcaatgagtggatgcaatttacgattgctaaaatgtacgtgttaattgaattatagaaattactctcaattcggctgcctcggctttttggtatcaaggatcaacaacacagtcggaattgacacaattaggtagctctgctgatgtccaaagctctgatagtcaggctgtgtggcctttgaagaataaagatataagtaacgggaactattatggctcaatgtttcgctctgaaggtatctggccttctcctcatgttggtatttctttgaatctattctcagaatctacaggagatgccaagactgtttctgcaaggtctcttctttctggttgtgactcctctatctcatcaagggtaaatgaccagtatgaaaatgtcgcaaagctcgatgcttctgtaggttgcagattgtttggtattaatttgacttgcaattctcctccttttccatctcatcttgagagagaatcaccaagcttggttatgccagctgccgtatctgaagttgataagtttcacaatcaagtgataacaaatctcacaaaggatcagaaagttatgtccgagtccccccaaaaggacacacaatgcaaacatagttttctttcctcgagatctcgtactaaggtaaaaacttctttgatttgttcacatacagcttttccaagcaggtcttgtctaattgtatcaacaacacatttcattgtctgtttagaaggtgcaaatgcaaggtgttgctgttggtcgtgccattgacttaaccacgttgaatggctacgatgatcttatcgatgaactggagaaaatgtttgaaattaatggagagctgcgccctccaagcaaatgggcagttgtgtttactgatgacgagaatgacatgatgcttgtgggcgacgatttatggacgtgagtaacttgaactaatctgtctgtattccaatattttaaaactaatggcattgcaatctaacttttccatcatcattttccaattgcagagacttctgtaagatggtgaaaaagatcttcatatattcaagcgaggaagtaaagaagatgagtaactttaagctgcgtggatcgtcggttgagtgtgaagggaacactattagcttggattcggaacatagagctgaggcctaatgatagaagttagtttgggttttatagtcctttatttctcttcttttttttttttttttgagggttagttttgctttcttagagccttgactaggcagaagaatgaaaatggttgttgaaggtggggttctagtgtgaaggttagcttagctgtttaagtcctttcgttgaaaagtagagcaactacttgaaatccggggttctgtgaatactcttttgtgaagtgtgttttgttttgtttacataaatcagtttacatatttataattataattaatagatatcatgtttgcatataaggtatgattctgtcaattttttttcagtattattttgtttctatgttcattttcatcaagtggatttaagagaaacatgtatatttatttaatttttataaatatataggttttgtagagtgttctgtctcacttagatggactaactattgaagagaatttccctaaaaataatgatagtaaagataataaagccaatgaatttgcaattcaattgatagtgacgtagaagatattgtctgtctgtctgtcggtttgaaattctcagcatccaactaacttttatttattttatttttatgtgaaaaaagaaaaataaataattaattttaatgttattaaatttagcagtcaaatatagtgtgctgctgattctgttaatacctgaggaaagtgatatatatgcaagtcatagtgaacttttacatatattctttcaataattctcattttaatagttgataaacatatttagaaagcaaacacttgacataatttgttttatcatattggaaataaaataaaagcccgagtaaagggactttctaagtactttctaatcaatttcaaatgatttgtatgattctattatatgataaaaaaagaagaaatagaaaaaacaagctaacacagaatgaatgaaacatagttgattgagatgcactttattagactcggttggatggattaccaaagtgatcttggaattctgagacatcactggtccttaataaatgaccaaaaaatatttgcacactaatattttattttattttagaaaaatataattaaaaatttttattaacgtgatttatcaaactttctaaaaaaaattctattccaaaaactatagcgttgcttaaaaaaaaaactgaaaatcaaaactcaatatatctactcgaatgaatcaattaagaatatgccgaataaggctaatggttaaatgctgtgttctacttatactcaagatcaattgttctgctaaatcaaatcatgttatgtcatttatttctacttcaaacctttatatatatatatatanatatatataaatatatatgtatctgtatgtatgtatttttacttatagatgttctatatttttttaaagatattagaaaattcctttgttttattagctagttaccataatggtaaatttcagatataatggctataat

SEQ ID NO: 20055 - DNA, 2602 bp, Cannabis sativa
ttattaatataatgaaccagaatgttcagttcagcctcctaacacaacaacaaaacttcccgaatttctagcaacaaaaaagcattacctaagctgcagatacttgcaccctgtagctattggacttctgcggaaccacaacttgcagacgagtattttagcaagttcctcctggaaagcatcactgttgagattggaacctgaatagactgccggtgataagccggaggaaggtgaggatgacgtcaagtcatcatgccacttatgccctgggcgagtattagtaaagctaagcataacgaaaattacatcaagtaaaagttcttaagtcaaattcatgatccctaaacataaattttgtggtcaatgatggctattatgaaaaaatttctaatcaagatacacatatatgagttacatgagaaatgttgttttaactaaatacttttggtagcactgagattcaattatcaagtaagttgcagtctgaatattgcgaagaaactagattattagatctaccaggaaaagcaaaaacacatactgtaacagactactatcaagaattgcaagaaggaactcgaggacataatcttttaccttctacactctagtgcaacagcagtgtagtagctttcaaatgttatataggtcagttgaaaacaggactcctgtactggaatacttatgaggaccactgtggaaacaatcaacaacttgtagaatcattcaattattaaatgcaggcaataggattacaccatgtgctgcaagtagtgaatcaaatgctgctgcgaagacgctgtttcatattgcaactagctacaagcagatctgtctcaatgctcatggatacatagctcatgtttaagtgtcacaaaacaattacaggttaaaaagactaataataaatcccccacgagaagataaagtttatatgttattcatacttactttacatagggtcatggagaatgttgttttcactaaaacatccctgacacaaacaaactaatgcaaagtaaatgttatgactaaacaaaaataacttagtttctctccctatttctcctccttgatacttcaaacagagaaaatgtattcaagctagtaagagaacgaatttccaaacatgataccctccacaaagtaagatctagaacaatgccttgatgttctttgatgcaagaaaaaggttctcaaagatgagacctttttgctcttaatcatacagggccccaaaaaggggagtaagcaacgtgaactaggatattctagccatgttgacctgatctctttaagaaaccgttgactcacatagtcggatttctctctttatgggctagcatagctcttatttgtttggacatgggacctaggaattaagttgttttcactagagatttattatgttcatgggccgggctgcatcttttgttttactaagcattgactacagacaattaagaagggatgaattagctaatcattctcaaaattaacaatgataaatgtaaagacctgacaaaagtagctgacatacggagaaaaagaccattaacatatattgtatgatgttgatgttgtaacatattaaaaaattaatagcatatcttaatagaggaatcgtgtgggcatgaggtatgctatttagctattattctagtatcacaacgagtagagaaaatccaaaagaaagaacctcttgttcttctctgaactcatagtacaatgcattataaaggttgacttcatctttgaagacgtgtcttcttagattaaagtttatcaagacccttcatttcaaacccattaagttaattttatacttgtccaagtggttttaaagaaagttcaaacgatcccaattcagtattttggtacccaactatgtctatcaacctaacccctaaagtcaacttcatctaattccgcaattgaagcaaaatcccaccttcgaaatcttgctatcttccaaggaaaagacatgggaaagtccaatcttataagtcccaacccaaataccatcactaccaaccaagcaaacaaattcacaaaagcattggtgtatgagctagtaggaaggaaccaccttaaggaaagtttcaataaaacgagagaattgcacaaattaaataaaaccaaatcaagtaacctactaggattgatataaagcaactgtgtacaaaaatttacttgaattcttttttaaaagagaagaaatctacaaagcattaacttcacgaaatttctaaaccatataaaacaccagcgtactgatcaagcccgttcttgttgaaatagacctctctgattttctggaaggcatgtaaggtcagcaagctatcagacccggcctggtggctctttccaatgacccgactcacattcaggacctgacagacccggtctagcccaccgtaaaggctcgcgcagtatctcatgagatgtttcacatcgaagaccctggacccgaagaacaccgtcacgagcttcagaaaatcagccaactcatcaggcaaaagacgccgagtcaacaccttgacaaggtaaccaaaatcataggcgctgtggaacgttgcccaactcaccaaatcgttgc

SEQ ID NO: 20056 - DNA, 4273 bp, Cannabis sativa
tgaaggattttctgcactgatatgttggcaaccaatattgtctgctcattcttatcaatatggtttttcataccttattggcatttgttaatatacattattgttactgtaaatttgtggtaataaaaactttatttatttatttttttcatgtatactgttacaatttttgtagagaaatgagtataaacaaatcaaattaatcattccctgataattaaccaggaaaaggaaaaatcaaaacttacacacaataacaaaatctcacatgaaacaaatgtcatcacacaatatacaattcaaccttttcattcctataactctaataaaattcaagccaaataaatagaccaaaaactgaaataaaacataccctttttggccttttggagatacttcaacctcctagaataaatcaatgtaatatgtatgtatatctataaactatagatgtttttaagcactacgtttcaacatctcttgaaactcaagaagagacttttctttctgaagcttcatatcttccctgaaattgctaatgaattcctctgctctctcatccactcctcttagttgcggcgatgcagccaccaccgccatccacgcctcttctacgctataaatactctgtttattattactactactaactctttttatatccttgtctccaaccgctacttttttacccttatcattctccttactattatcattaccgctcgttccagcttcatcacgatgcatagtaatattattactagtgtttctactaacaatattactcttcttaatacccgaggcagaggtcgtggcagaggcagaataaggaaagagctcgtctatgtgtatagcagagaagttgttatagatcgcctgattatgatgatggtgagagtagttgtgatagaaacgtcgatgagaggaggcggccgaggaggagatggatcggaatttggtggggagaaaggagtggaggatgtaaaggaggtgatgacatgaagttttgatattggaagagtgtttgttgatgagattaatgaagtgaatgatgttgggttggagtttttttgtgaaatttttccatgctctcttagccggagaaagcttcctccttatgttccacctagacataattagagagtactaatttgtttttggttgatttttgaagattgttatgtatgtatactagtgatttatatatgaatatatttatgtaagaaggtttggtattggtttgaatatttggttaggtttgttgccacttggggtattgtaaaaagaaaagtagaatgaaattgaaattatgaggtgtttttgtgtgtgtgtgtggtcaatgggggaaatcactcattactttcggcagcattatattaagaggcccctctttaattagctggagccaccaaaacttggctcctaagtttgagattattgacaaaatgtatataatataatgtatttatttttggtaattatgaaattaatcatatagaaaagactcatatattattgaatggtggtggtggtttgaggtggggtgcgattgattcccttgttagctctagtaatcaaaatgtccttttcttgtaccttgtgcataacatgttacatgtttattccataagagtgctaattagaatactttgttacaacctcttaattaattttcgtgctcaaaattacatattagagtattagagtattcgttatagtataatattatctatgtaaatttttgaaatttttgaaataaattatagtatcgaaaataaaattcctgatattctaatttaagtgtctaaaaaaaccacaaacttatatatatttagataaatatatagtaagctagctagatagtagttagtttagtttggcattagaaatatgaaataactaaattaaggtgctttatattataacacaaaaaggaaggtacttttcttagggcggatggctaagccattcaaataatttaaatacttttatttgggatgtgaatgtgataaatagttggcaaatgaaagaagttggctttccaagttgtaaagatgactaaattaaaaaaaaattaataactttctttggttgggttgggacttgggagtgtgtaaaaggagagaagaacaaaagcaaaaatggtgcttttgttgaatcacttcctttccaagtcattctaaaccatatatgcatggtttcgattaagtctcatgcattatttcaaggtgaaataaaaatgcatcacctttttaattagttgtgttttacatataatataattatataaagtagtgtaatattttaaattttaatatataattaaattagtcaatgcatgggttaaatgtaagctaatccaatatatatatatatattatttgcataaaaatcattagccgccgtgtgtgtgtgacaccttattagtcatatcaattgatacatgcatggttttaattttaattttagttaaataaacattgttgggagtattaaattatgtaggctaatcgattcatcgacaactacctcaagttcccatcacagaaatttttttatttgtggggtattgaattgaatgcttttgcttgtttatttgggagcattaatcaatttcagatttaataagttgtgatcatataattaataaaactctatcatatcttattctccttgttcttatccattttagatgtaggccgaaaaacccaattataaatgcattttatttaatttgatatactttgaccaacaatatatatataaaaataaatacaagtgttttaatttacaatacattttctaaaaaaagatgtagttatttatttcattttagagaatttttcagtcaaaattattttatagactttaatacatgtgcatattacaagtttaatttattatgtcatatataagcataattatgtgaaggaatcatgttttcaatttataatttagaaaaaaaataattacaagatgtttatttgaacttgtttaattggttctacaagagttgtacatcctaattatgaggctgatgcaagtgttagagttagactatctaattagcaatatacatatcttaattaaactagttgtggttatgacacctgatgggtaaagagattaactttatcaagaattgatgattcctcgctacaacgtaatttttttatgattaaatgtgattgttagtaacaataaaaagttacttatgctgactaaaatatattattcaaatacaaattgtcactaatttagttttaatcacaataagtttgttacaataaattgttatttttgtaactaataccttcaaccacaaatcacaatataaaaataaaaatttataattattcataatttttcatttttaattacaattatacaacttcttttgatcattttttattgaaaagttaattagaatccacttggtgagtgagcaatccctctcaagcattttcatttgagttgctcttaggaatattctctttttatatcctactcgtgatccagtgatcggggtgacactatcgattctataagccaattcgaatctatagttcttgctcttgtttaatatatgtttaagattagttttgggtgtaggcagactagtggttaggattagaaatttactattttacatataattattataaaaataacaaattttgtattggcacataatacttgtaaaaagtgtcaaaactgaaattcaaattgagatgagccacatgcacttgtattgtttgagaatgaagactgaaaataatcaaatcaaaatcagaagctcatagtttataggtatatgccgattaacaacattgggtaacatgtgctcatcatgctcattgtaatgggctggctagcccactactatcaccctctctggcaacaagttgagtccaatcctcatccaaaccatggacattttggacccaaacaaaatttctcaatattttaggaattattttaaaaaaatacaatatcaacctcaaaattataaaaatacggtggtacgaaattttaaatattttaataatttttaagattttatttatataaaatacagccttttgatatattttttattttacccttattattttgttgttgattttttgttatttgtctcttattattttgttgttgattttttgttatttgtgtattgttttttatattgttttattttgttcttgcgtttttcttgttatttctttgtgtttttatataactaggtgattgttacgtgccaagccacgta

SEQ ID NO: 20057 - DNA, 1904 bp, Cannabis sativa
  modified_base (63)..(66): a, c, t, g, unknown or other
aatggagaagaagttcttttaaaattaaaatccaaacactaaatgaaaagctcaaacttttannnntcttcttctactgtctaaaagtaaaagtataagttaggccaaacaagcccacatcttttaaggattaataagttgaggaatacctctttttttatccattaatcaaaaataccgtcatattatatttcattaaaatgtatccacttttgtaagtagattacccaacataccctcaacctccacttaaatttagcacataatttatattaacttaaagggtataattgagacatcatctataaaattatgtatattttaaaaaatatagaaataaaagtaaaagttaaaatatgtaaagtaaaatggatatacaatgtaattttctgtaagaaaaaaactattatattatatgatactcagaaatttttgtatacgtaaaaggatatttttgtaatttttttagtctctatactccaattgacaaaattttaacaaacatcgcccaccattaatgggccaagttgaatttaggacaaggaaacttgtgcactaatatattaacgataattttcatttttggttttatagcaaaagtttacaaaaatatcaccttttttattatcattttgagaatatatatttaaaatataaaaggttggaaaatataggaaaaacaatataaagtatctgattacccttaatttgtaacttgttaatctaagacgtaattgatttccctaaactgtcttcccattatttttatttgaattttttccataaaatattttttttacaaaaagaaaaaaaaaaccatatttttgcacacacagtgtaaaaataaaatattatttcaacttaaaaggaacttgtggggattaaaaaaattttgccacttttattctcatgtgttatttgatatatacaatgggtagacgttggagtttttcttttaagatacaataagttttatttgaagttcttcactatgagatgtagcaagttacatagaaaattaacgaagcacaaatgtttataatataatatgatagttaataccatcgaaaaaacctaaaagagttacattcaacacatacacattacatctaaaatttaagaaaaatgctgaagtgcattttagggagtcctacatgctctgttattagtataaataaatattaaattttacatatttaaattaaaattaaatataaaatccattactaaattgtagtaatagtaatatgatatctatcgggagggattatatgcttggttctttagaaagttagattgttatggcggtgccatttttaatgggatgggaactctcgtgacctccgaaactttagcagttggagcagcgtccacttctttcgggtcggcatgcactaactccaaccaagcaaatgtatcatccattagaaggtatataatgacaagagaaaaacaagacttatttatagaagctatagacatatctataattagcgtttccactcaattgtacaatcatgttcccaagatgtaaatattgtgccaatccaattagtcagctttaacgaataagtcaaagaatacaattaatatagttaagccaaaacctaaccatctcaggattgagatcttttgatctaagatcaactaagtgatattgacttagaatagatataacaataagcttatgatttttttttcggggtaagttaaaaaatgcctcttttattaatcaattaaccaaatttacctctaatttttttttatttttttaattgttgaaacatacctccatacctctctttttatatgtattgtacccaaaatgtcctgacataaggtagtcacatggagagtatctttaagtgaaaggggtaaaattggtacaatatttaaaaaaagag

SEQ ID NO: 20058 - DNA, 3467 bp, Cannabis sativa
aagctgtggcagtggatggagtggtacgttttggggcacgatcaggttcgaaactaactactccctttcttggaaccggatcttcgtcattcaacatcggtacattggcgcatctacacttctcagtaatgaggcatgagaaaaataatttcccctttacccggtgtgcacattcaaagatctctttcgctatcaccttgcctacattaatcttcttccctttcacgatgcaatatagcatccacatcctttcccgactcactgtggagtcatgtgacgtaggcagcagagtggattgaaagaaattatatagacacttgatatcgtgcttcagatcagtccagttgaaatggaacacaccatgctcgtctatatcccactctgcttctaaagtggccaattagggcacaatcttgtgcatcagctcatcagtgagcttacaactatctttagagaactcataagtcacatttttgagctggtagtaatgattgatgtctctatcggaaaatttcactttaacctccaccataatctcagctggcaattcatgtgccaaaaactttgcgtaaaattcccttaccacttgaaaaactgctgaggtcaggtctttacatagttctaaccatttcctcttttttatgttctctattagccaaggcggcatgctgccaaagttatcatcttctactaccatcccttgctcgacataaaattccttgtggcgaactaagtcacggtattttttttagcaacttctgaaacaaatttttcagcttctcgagcatctttctgtggaggcttatgagcacaatgcttgatttttggcattatgtcctttgatttagtaaaattcagccacacaaaatcttttccaacagtcccaatccacacaagtgtactcacaacataaaaaaatttcaatactaatccaccacaacaagattcaaatagcacaaacaagattctgattacctaatattcactttagcacaatccattatacatttttcagaatccaaaaattttacctcgattttctgctgtgttgaaactatcctgtgtgattgcttcgggtctaatagtgaggtcgtgtaaaatggaggggtcgagctattgattgtgattgatgcttcgtgtgggactggtggtggtgctcgacagtgtcttgctgctgaattagttacagtcctccttgagtggcttcgagtagcaatggaaatggagctcgtgaaggtggtgttcggctggtgttgaagtttcgtggtggtgggtgtttcgtaggtagaatggagatggttagctgtttggttgctggcgtgggttgggtgcaatggtcgaggcgattagttctgcgggtacggacgaactggtctcagtgcgcattttatgcagatggaaatggagctttggcgatttggagtggggggaaatagttgctggtgtgcggatggtgatggtcgaaggcaggtggtttgggcaaaatttgattcgtgatggctgggttggtgaagatggagatgcggctagggctaatcagaggcacaaggttggggacgatggtgttgatctgtggggcttgttttttttttttttgtttttttttctgatgtatataactatattcattaatactaaaattaaaagaaagacagataaaaaaatgaaaaaacatattaattaatataactatagtctattgtattgtttgttttttttatgtatataagatattatatctgcatatatttatatatatattacccctcaatcaatgaaatgatagttccaactccagtatttttagaacccagtagttgcagcatcactacaacattgcttcagcaatttcatttttagccatccctgcttcaaaatgctgaagtgttgctgattcaatgctgtactgggacttactgcttcaacataccaatctgctcacaccatattgcagcagtccatttttttgtcgttccattctttgcacttacaatcaagatcactaccccatttcaagttcattagtaacaagaaaattaggattatatatatgtagttatataagtatttatatatgtatatttatatattttttttcttttttttttcaacaaagggtggcacaccccaaacttaattgtagatacatattttattttttttctttcaaggggtagcagaccccaaacttattacataacatatatatatagatatagccttgttccttcactctctggttgcccaaatgtgattcactaaagccatgacaactcgaagtcattcttcctcaagcctcttctaaagtgatggaggtctttgctcgattaacctcccctctgatatattgctttagtcgctgcccatttactttgaatatccttccaaattgttcattcttgacatccacagctccaaaaggatacaccttgacaatggtgaatggtcccgaccaaagagactttaactttcccagaaacaacttgagccttgaattgaataacaaaacttgctgcccttcttcaaatacccggtgttgaatcctcttgtcatgccatctcttggttttctccttgtacagattggcatttcataggagaaaaacttcatctcttcaagctcattcagttgcagcatttgggcttctccagcagcttggagatcaaaattcagcttctttatagcccaaaaagctttgtgttcaagctctactggcaagtgacaagccttcccatacaccaatcgatatggggacatacccaaaggtgttttatatgctgtccggtaggcccaaagagagtcatctagcctttgagaccaatccttgcgactaggattaacgactttttcaagtacacccttgatctctcggttagaaagttcaatttgcccgttggtttgaggatgataagcagtagcaatcttgtgctttacattgtatttcgctaacaaggcagcaaaaattttatttacaaagtgagtaccttcgttgcttattaatgcccgtgatgttccaaagcgagtgaaaacttgcttttggaggaatttcatcaccacttttgagtcattagtgggacttgctactgcttcaaccaatttagagacataatgcactgccaacaagatgtgtagattgccataagatgatggaaatggccacatgaagtcgattccccaaacatcaaaaagttccacttcaagaatgcaattcaatggcatttcattccttcttgaaatatttccaactctttggcaacgatcacaacttcttgcaaaatcatgagcatccttgaaaatggaaggccaatagtaccccgattggaagacttttgctgctgttctttgtccaccaaaatgtccaccatagggagaagaatgacaatgctctaggatgcttgcaacttcctctttcggcacacaacgccgcattatgcgatccgcacactgcctgtacaagtaaggctcat

SEQ ID NO: 20059 - DNA, 3599 bp, Cannabis sativa
tcttagcagttctcttgctataagataccctagaatgctcaacactctaagacatgacaaatgaatattggtgaaacacatagccatgtagaatgttgggtataactctctagaatttctctgtgtaaaagaagctaattttaatgactttttaaggaagagattcttagaaaactaaaaattgaagtggaagtacaactatataagaccggaatacatgagagatgcatcttttacctaccaaaattatagagaaatgctaaaaaacattattggtatctagcacccttctacgtgtcaatatcgctattaatataattaaatatcgagtggtttaatgtagtacattttaaagaatatcgctaactaattgcaaggcgacaaatctacaaggtgctaagcaccactgataacccaataacaatactcaaaattatatgtgcagacaatacacacttattattatcttatttatacaagcacaatctaacccttgatatcttgatacctcgtcagttgctgtattaggttctagtgatttcagcaaaaacttactgtaattagttgcaagtccatttgattatatgtaatgattgattttcttgttacatatattactaggaatttgtagggggtaaaaggattaaattgcaccattcttagtttcttacattataaaagtaaagcaaaagtgattaagaaatccgatctaccataaaagaattacaaatgcacaagactttcctctgaatactaaaactcataagcttttaataaggtaaggcgagaaagcatactcgattactcttaaagacaaaagatgatgcccctgatgaagtttcacttaaaacaacttgaacggtcgatcctctataagagctcttttccaacactccaggagaagcttgcaaaatatgaatcttgaaaccaaagtcagaaaaatcaataaaggctgtacccaaagaactggctgatgatgatggcaagtccaagagcaatggctacaatggaagacgcccatgtaagtttctcggtgattctgggaatcctatcctttaatgcctgactacatgatcctatgaatactgtgtagcttcccatggccaccacagtccctaccaaaaacattatcagaaaggcagcaccagccaagcgagaaggtaaagcaagagcaggcaagaccatcatcagtgcatctggctgtagcccatggacaattccggtggcaaaagtagcaaaaccaattttcttcttaccaagtgtggggttttcaagtgcttcataaacaccaacatcacactccccattctctaatgcaacacatggggtagggacttctgaagcttctctaatgcccatagcaccaatgacaagaagtgtaaggcctactactcttgtcccccaagttcgaataacttcaatatgaagccgatccttgagcaacagaaatattaatccaaaaataacctgaccagcatcatgcccacagccccatagagctccaacagctgcactttccatccaggaacgcccgatagaaagaggggccaaagcagccagatggtcaggccctgataaagtgtgcaagcaaccagcaaagaaaccagtccatgcactacttagcagttcagtccgaatcagtgtccccccaactgctgcagcagcagcaggggcacctgtcttagctgcagtttgaaaagttgcaaaagctgcaggtgcgaaaattggttgaattaagatcataatgagcgcagaaagcataatgtatgcccctacagtaatggcctgaaacatgtttgcaatatggaaatgttttagcaccttcacatagttggatcaatgatcacatagaaagttaaatcctggtacaaagaaccgaagatcacatcaaacattaacctatcaacaagaatttttctcacccccataggtcagcaaacaatatgtcctaaacattcaaagaagaaggtgaaaagtactgcaaatagtagttgaaagcataaattaggtacttgggtttaaatccaccattatcacaaagttcatcattgtcttgttcagctaaagtacagtttacccctaattttcacaaagattctcaccaaccaataattacaaagaaaagaatgaaacacaaatcgtacttcactaaaattcctcaacgatgagtatagattcttagatataacttatttctgattcaacaggagaaaatcaaatgaatcaaagatcagatagcttaaaaagtttacaagcagcatgaccacccaattgccaattctaaattttccaatctgtaaacgaataagtcttcaaaattattaggcaacctctataattataatctcaaatgagaaccaaaagtcaaaattatcggggttttccaggctaatttctcaacaaccatacataacaaaacccttcaactaaattgcccaaaatctcatctctttattgaaattgcatcaagacattaacagacccacaaaagaactataacccatacgatcgatgaaaaatacattatcaaaataattcgaaaattaagaaagtgatgtctttagtggtaattctactagttgtaagcatatgttcggtacttggattctaaatccacaattatcactaaattcattttccgttttgttaatcgcccctacttttcacatacacgttcaacgagtaatcaaaacttccccaaaatcttatttcgacattgcaattgcaaaataaacaaagacaaaaccacaaaattataaccgcctacgttcgaaatacataatatattagcaaatttactcgaaaactgaataattcagtataaaattaccttgctcttcccaaaagccccatttgagatctttttgagattccgagattccggcactgacccatttgaagaggcgtccgaggaagaagaagacgaaaaacagagagcatgtaaactgttcgtcggcgtagagaaagaagagaacgaagaagaagatggaaaagaagcctgcgatgaaccatcagatttgcagaacaacgagctgagccgccttaactcggggcgtgaagatgggagaagattgagtttggtagagtcagtacgaccgagtcgagggagtaaaggagaagggttggaatggaatttgaaaggggttggagacgaagaagagaggagcctttccatggcttccttctctctctaaaactctctcctccgtctctgcaaacagtagagagaaagcgaggtggttgaagaagaagataaagtatgggtaacagaaaactcacaattgaaaatttatttattttattttattattaatttttcaatttatttatttatttttaaaataaacaaatgaagtggaaaactggaaaatacattcatcctcaaaaaatgaaaaataaaaaataaatacatacatactcaataaaaaaaaataaataaataaataaattcacattatatttgaattaaaaaattataatatattccaaaactaagtaacatattttatttatcaaaatattaatcaattttgtcaatgaaatttcgcttaaattttaaattggtgctctaataatttttttttctttgcaaatttaca

SEQ ID NO: 20060 - DNA, 2162 bp, Cannabis sativa
tagctactgtcatgaatgctatatttcttcaagcaacaatggagagcattggcatcccaactcgagtgcagactgcattcagaatgtcagaagttgcagagccttacatacgccggagggctgtgaggcatcttgagaaagggagagttgtaatttttgcagctgggactggaaatccatttttcaccacagatactgctgcagcccttcgttgtgcagaaagtatgttggggtgtgtttttagtttttagaattgtgttttcaaaagtgagaatagaaaacagttttttgtcattttaaaaatttaatggtgtttgggtaatattttctaacaactatttttagaaactttttagtaaaaaaaaaaactcaatattctacaccataccacgacatgaacccaacaccaccctggaccaaaaccggccccaggaccctgacctgggacccaaaccagaattcggaccagaacccaggacccgaacctaaacctcggactcttgtttctaaaatatttggccaaacgcaccttattagtttttaaaagtttttttctggttttataaactgaaaacagtttttaatttttgaagccaaaagccactaagtaatcagttattgaatgctctattttattgagttcctccaatacatattataatgtcaattgatgatatgtctctatagaaattctaaaattttcttttctatttatttattttgacaccaagttctctttaaactagtctgttcaggtgtgtagtagtcctatttatttcaaaagctagtgatttggcctctgaatgtgttgtgaaaatgctttttttgttttgatatttttgaactgattagtagcattcaattgttggtccagttaatgcagaagttgtgctgaaagctacaaatgttgacggggtctacgaagaagatccaaggtgcaactcaaacgctcgtcttctcgaaaatctgacttatcaagaagtgatttcgaaagaactatcagttatggacttgactgcaattactctgtgccaagaaaataatattcccggtatcttcagttgccactatttaactttgaatagtatatcagtattcttgctcctgtaaaataaaaggctaaacttcattcaatttatgcagttgttgtcttcaacctaaacaaaccaggaaacatctcaaaagccatcaagggagagaaggttggcactttgattggaggaagaaagaattccgaaatggcaagtgcatgagaattcgctttttccgttctaaaattgtagtgcagaagaattgagagtagattattactgaatctagttagagatgaacttggattgggtatagtatgaaggtttagttttccttgtaaataatccttgaggaacattaggaggagaatagtctttttatcttccaaattttggctttcatgtatttattttcatcctacttaagtttgatatatttattggagcttgtaatcatttccaccaaaaatgcacacgctttgacttactccaaatattagacgaacagaatagaccctagagtaaaatattgccacaataagtggctattaaagggacaagttgggcttatattatttttgtcatattattggtgactaatttcgtctttatcacaaactgtttagtgcagtgacatttatggcatgtttggtttagtgtaatgggaattgtaatgaaattattattaccattatattatttgttttcatttttaaacttttataatggctttacattataatggttgtattgtaattccggttacatcataaaactaatgtaatgataattacattgttagaaaatattttttttactcttttttattacttattttttttaaaattttaaatattacaaataataaaactaagagtatttttatcaataaacttattttatttgattacaatgttctttatagagttaaatcaaacatcataataccattcctataacaattattattctattatattactattcatattacaattactattctcattacattatatcaaagcaaacaccaccttatatttgtgctcacaaacattagcatttattagactttaattctgatcttaatgtccatttgtttaatttacactatgaaaatactcgagataa

SEQ ID NO: 20061 - DNA, 4860 bp, Cannabis sativa
tttagaaccgttatactattctcacactacaaaaaaaaattatctttagtgacaactttttagttacaacataaaaattattatttataattagtcacgacaaattttgttgtgactaaaaaaatcaaattttttgtagtgtcatatatattaaatatatatttacaattacatatatggttggaagaaattttaattttatatggggcaattaataactggttgctagtaaagttaaggccattatatatatacagctaatttttgacaaatacaactaaggaataatattattcttactaaaagttctcatcataaagtaaaggaatttatgtatactttttaattaaagataaagaagaaagaaaaaaacaacccattttacattcgatcttggttgtcttgaatggtatagagatttcaaattagaataaagtaagatatgttacttatatattatggtttatgttttcttataagtgttattctagagatatatatacaaaaattgcacaaagtttttacacaatgacctgtatttctatatatgaggatcttattatcatttttatttgtctagtttagatttttttttaattattattattattattattaaacttgcagtgaaatagagttattgtaatgccatactagcttagtatgttacggtgtttttattatgctaatctttgctaattaaagaattttaaacaaaaaagtgtttttgataaaatttcaataacaaatgaaactttactaaatttatatcacgattacaaaatatttaccattcgcgatcccgaaatgtatttttcaaaacatacataaaatacatattatcgcccgataagcctgtgtaatgtctgtaataaagttgtagtcaaaatcctggctaaccggttgagaagggtgcttgataaaattatttcccctttccaatcggccttcgtcaaagaccgatggatcgccgaaaattctataatagctcaggagataattcatgacatgggcaggaaaagaggaggaagtccggctattaaatgcgatatgtcgaaggcgtatgataggctcgaatggacttttgtggctaaggttttgaaagcctttggatttgatgatcggttctgtggcttaattatggaatgcatctccactgtaactttccaagttctggtcaatggaggcctcaccaaatctttcaagccggagagaggattacgacagggcgatcctctctccccgtatcttttcattatttgctctgaaattctttcgagacttattctggaaaaggaaagacaggggaaaattactggttatcgggtgtcaaacaatggtccttctgtatcccatttgatgtatgctgatgatacgatcttcttcactagagccgacatttctgaggtggacactcttcaggatactctgaagctttattgctcctggtctgggcagtgtattaatgtcaacaagtcgaagatttttctgtctagaaactgtgatccgaatcttggtattgtcctctcggaattcctgggttttgatatcatggaaggggatgaattctttctgggaaatcctatgtttattagtggtaatcgtgcgaaggatttccaatttctcattgatcgtgtgaggaatcgtatggaggggtggagggccaagcttttatcccaaacggctagaacggttctcattaaaaatgtcatctcggccattcccatctactctatgtcgattttcctattgcctaagtcaattacggatgcgctcgatgcccttgtaaggcgtttttggtggactggtagctcggacaggggaagatttctttccctgctaagttgggagaacatctgtaaacccttttctgcaggtggccttggaatccgtaagttccatgacattaacttctgtctgattgctaagctgggctggcaacttgcgacgaatgtgaacttgctgtggtgtcaaattatgttgggaaaatacggtttactaggcaacttttggggtggaaagattcctagaaatgcctctagggtggcccgtggcatatggaaaacgagagattttatccaggaacacagtatttggattattggtagcaactcgagggtcaatttgtggcagggatcctggtcttgtgctgatggagtttacataaccccgggtgatcttaatcctggagtcgtgagtggtataaccactgggaatttacttaatgagggggagtcttcatgggataggagtcttattactagactgtttcggcctgatgcttgcaaccaaattcttgcttctaatctatgggaggcctgacagggattctttgaagtggaaatcctcttcttctgggaatttcactcttaagaatgcttattgggaccttcattctagcaggttctcctccgatatgaattgccgattgctttggaagctccccatgcatgatcgtcacaagctcttcctttggaaatgtctaagagaatgccttcctttcagttctcggttgggagttatattcggcaatgtcactggtaaatgtgccctgtgcaatggggagggctttgactatgatgttcacttcctgtctcaatgcccaattactaagggactttggttggctagcaaatggaagtggaaggtcgagaatttccctcttcactctggtgtagaggtggttaattggttatctagctttgcaaattggtgttctgggggaagtttggaagataaggatgaatttttcatctttgcgggagttctctactacaatctttggttcttcaggaatgactcctatcacaaccatatccaatggcctctttccgagatgataaagagggtttgtcaggaatttcagtcccactggaaatgctatttggacactaaacgcagcagtgaaggtggttcgaatccgattcggtcgagatgggccttgcctcgaccaggcagaatacgggtgaatgtcgattttgccactaacaatggaactggagcgttgggagttgtggttagagaggcggggggcaacattctttcgctctttgcgatgaaaaccccgttcctttctatttcgcatggagagttgtgggcggtcttgcggggtctggaggtgatttctcattttggctatactgcggcggatttgttcttggactgccaatctgtggtgattgctctttcaaaagcaacctctccccactggaacgttcaggcgactttttctaaaaccttaaccttaatggtatccttgtctgtttctccgatatggattccccgtaccgccaatcaagcggctcatgtgctggctagttggggtactaaccatgattgtaaggggttcctaaatttgtgggaggtgagtccccatgcactcaccaagatcttggatgatatctaaataaacttaaggtttctcagcaaaaaaaaatggtgtcgccaaatgacaaccaaaactacgcttgcgctgtcttgaagatcgcaacccttcaggtctaaccatttggatatgtacaatctttaccaagctcgtcactcactgttgttcagctttcacttcgcatttacctacacatggacacatatttgtaaatcgatagactctataagaaaaatataaaatatacaacataaatttgacctgtaattaggcgtccatacacctaattaccgtaagtctactacccgcgtccaacacataactaagtacagttaaccataataccacacttcactaagtacgtactctagtcgtactagcattggtctcattaattcgtactttccatattgcctaacatatatttaacgatatcctagtgcaactttatgtacaccatagtgttatttttgatatgttaatctaattggcaatatatgctatctgatacccactagcatcactatatattagtgttattttcgaaattcgactatgtgccacaaactgacacgtatctgacaaaaagaatgtgaattgactcaaagagtataataatgatgacgtatcattaaatgtaattaaatatctcgtcccaattaaatataagtttgatagataatgttaaaactcgttgactgtgcagtcttatgcgagacaaggataataactattaaactgatgttgacgagacatatgtctgcctcaagatacactcagataaatatacaaggagaggataaatacttgtttggacagattaaaagtgacaacactcaaccgccttacgtcacacatagcgcgaagatcacctcgcagtattaatataccaataaagggatacgacgacaatgaattattttctaacacttagtattttttttccatcaagatggacaagaaggagaactcatgtctgacgagacagaaccttctaagtcagcataaccgtctaatggataaaaataaagagcggttgggtagttattatatattatcccatgtgtgattaaatgaaatgtggggattgtccacgtttcaatagtagttataaatgaatcaatccccaaaagaataacgaccaacttatatttctataaatagggacagaatcaaggggaaaagagacgacaaatttgagagagaaaagattgttattcaaatactaatattgtattatgtactcaaaaaatatccctaataataaagattcgtggagtatgtaaattttaactacaaaaccacataaaatatctagtgttattttatcatttattacttatttatttctatagtgaatttattacaaaaaggctattaatttggttaacaaaaatctgcattaatagcttggtgctttcattgagagccttggtgataaaaaaaactctgaaaaatccctccttataaacaca

SEQ ID NO: 20062 - DNA, 3346 bp, Cannabis sativa
tttagaattgggagttagttgcaaaaaactggtcacttaaggaggttatgccgcaaattaccctaaaataaaatgcatgtttggttagagtttgtattatagttattattacttaattattaatttaaataattataaattaacctaatgcaattcaattatatcttttcaatatataaaatttattctagttttaaatttatttttaagaaaatatatctaactaattttattaaacaataaaataagtaaataaatttagatattttaataaaataactaataaatatgttataaaatatgattaattaattaaattaacgtttaattaaaatttatataaaataattattatttaattttgttgataattttaaattaaatttaaatatttaaaactaattttcttttttttgtaaaaaaaaaataataaaagataattaattgattgatgtaacagtattagttttaaccgttaactttaacgaatcgttaaattaaccgttagataaccacatttaatataagagagatataagataactattccacgaagattttatttccataacttttgttttcttaatttatcaaacaatttataacttttgcttgcaaaatcaaaacggagcctacattatagccacttccagatgatattcaagcacaaatcaaagaaaattaaaaccccataatagaaaatttcaagtcacttcttagcatatttaaaaaaaattaatgattaactcattaaaataaattgacaaacctaatgagaaactcctgttgcaccataaaattcttgaatttgaccatcatcaaactgactttctgcgttgagcaagtactccgtgtcattacaatgataatcctcatagttaagtggtccgtaatgctgaggcattgatggaagcacaggtgggggcagtggcattaatgttggaagagaattaaaatagtcatcttgatcaaacccatcatgatcatcattattattttggatttgggtttgtgaaactattaattggcttttccccttacccatctcaatcttttcatccaaacccttgatcttagcctcaaagtattgtgccaaacccatcaatgaatttttggataaaatagctagtttttcatcccaattcatgatgggtactcactttctcttcgagttttcttaacttcttccccaacatattagagaggcctacttcactattctttctcttctttgactctaatttttcataataatttgaaatgacagaatgagctctaatcgaatcctctggccacacaaataacttcccagtggaatcataacacacaacacaaatttgagattcacacaattcactaaattgtctagcttttttcatcaatgtagcttttctttcgaagaaaactttatcattcttcataatttttgaaagagagagactgagatagacagaaaaatagatagttaggaaagaattgtaaatagtaatattaatggcagaaaggatttatagacgtgagatttagggtcaacgatagatcgctttcctacttagaaaatatgataaatatatttaaaaaaatcggatagcatttttcctattttattaacaagttttcatccttatatcaccgcagcacataaagtctcagaacttacttctctatgaataaatatattagatatttaaactcttctaatgcatgtactcttctattaaaagatgagaaatataacattttgaacattaatttaaatatttatatatggatttaatatctataagtatttaaacaaaagaatattatatcatagtaaaataccttaatcttatccaagctcttgaggtgcaatcttggtgttcaagaactcatcaacttattttagagtttctttcctgtcctgtcaacaaaaccaattcaggttaaggtgtctaataataatacaaagaaactaacttctataagttatattggcttcaagtacaagatctacataaatgtagtagatatacacataattgtaataataataaatacataatatataatccccaaaagtaccccagatctatttttgtgacctccacattactcaaactcataatataataaataacaataatactccaaatccaaaaactatttaaaaaaaataaaaaaaaaaaatagaaaagagttgataataagaaaggagacaagagatgagaacatggcatggattgtgaagttgccacatagccaaagttgcatgctgatccctaatactatgcagccacgcacctatttgatctttatatatattcatatcagaaagtagaaaccttataataaattttagttggaaaatttttcaaagctcgaagggtctttgtccactataggtgtatttgctaccaagcattaccggtactctgttttactttctatatatactttcgtgtaccaaaagtattgaactctttcttttgaataaacatattggcatatatatgtatatgtatatgtatatatatggcctgaataaaataatgttttattcatactaacctaccctaatgctacattgatccctacactgaagaataagaagaatagtaaagtgaaggggaaattgtgaaaggcaatgggaattgagaattgggtacctggaagatctggtgaccaaaacgcggggctggtctgaagaagataggacggaagagagtccttcgctcaaacgagatgtgctagaagaccccaaatttgagtctcttctaatattgcgaataatgttctgtaaatatttttcatcaaatgaaaaatggtgaaaaaaaaaaacatacaatcgcagttatatagacatacataaatatggaattttctgtgaaggtgagattgagctcttaattacacaaaaatgagaattatcaccggagaccctttgaacatgcttctctattctcaccggagaagaaggaacaggagaaatctcgatcgatcgttggtatatagtgtagcaattaatgactttgttaccgttgttatatagcgtatcaattactgactttgttaccgttggtatatagcgtagcaattaatgactatttaatgcacctgtcagtatttaatgatgtatttccttaatgacacacccacgcagcagtctctaattggcagaagggatcatgagatttttactttttattttaaaattttaaataagatattaaatgattaaataaaaactaataaaatatataaaaattctcgcactctcttaaaatagatatattgatgcatccttatctattttagcacctaaaataattttttagttaaattttttttcatggtcatgtacgtt

SEQ ID NO: 20063 - DNA, 2537 bp, Cannabis sativa
tgcctagcatttctctttgataaaaatatggtataatcacaagttttaatattatatatctacactgatagattatgatggaggcagatttaggactcgcagatgcttatattaatggagatttcacccttgttgacaaagatgaaggtctactaaatctctttttggtaaagaactctatgtaggatttttaattagtaaaattttgacatattcaattgataatttaataacttcttgttgagcttgattttgtagatatttatttccaatatggaatcaaagtcctcagcctcactaaacaagaaagggtgactaaaatatgtgataatatttttaataattaatggaagattgatactagtttttatctcctaaaactcaatagggttttacttgttgttaggttgatgagggaatggtggagtcccttgttgttcacagctactattgcctcagccaaatatttctttactcatgttttaaggaaaaatactctaacacaagctcgcagaaacatctctcgtcattacgacctggtaaaatacttatgatttcgtgaaactcgtatcaagttaattggggattttaggctaaaaaattaagttggatttttttttacatgaaaaaattataattttttatatataatgataaaaatttaaaatataatattttaaaagcatcttgaaaaacaaattaaatatatttttagaaaacagttatattttttaataaataattaataggaaaaatacaaaaaaaacatattattttaaaaaataaatttgaggcatctttattaatattttgggcttggtggggccttgagcgtaagcccctactagcacccttagagtatctccaatattttattttatctatcttccacattatttttaattaacactcttacttctaaaaacactctaatgtataacactctttaaaaatactataattatgatctcacatattattattatttaatatatatcataattttttgctacaataactttttagtttcaattttttatttgcaactttctagaatgacaccattttctctctaatggtatagcatctcaatattttgttatgtaatatgtctacctcacgaaacattctttaaaattttaccattattggagatgctttttgtactaataactggccgttattcatgttcaaatcccaattttgaaagaaaacttacaattttttattgattggtgttagagtaatgaactctttgctctattcttggatgagacaatgcaatactcttgtgctatatttaaggttagaaattcaaattcccaaatgattttgtagtaatgctctaaaggttaattttaacctataaactaatttataatttgaattattctagtcaattgatgaagacttgaagaatgcacaaatgcgaaaaatgttaattctaattgagaaagtgagtatcactttttcatacacattaattctataatataatgaaaaaatcataaaaataattttatttaatttccctctttgttttttcaaaatgttatccaggcaagaattgataaaaatcatgaagttcttgatattgggtgtggttggggaagtttgggtattgaaattgtcaaaagaactggatgcaattacactggcatcactttatctgaggagcaattgaaactagcacaaaagaaagctagagatgctggccttcaagtatcaaataattattatttactaatccatttttactatcaaaataagagaaacaaaaataaattataataattatttatattttgaccaattctgtaaacaggaaaacattaaatttcttctttgtgactatcgacaattgcctgctacctacaaatgtgacagaatcatatcttggtgagagtgaaacaatacatagagataagcacaatatatagatttatgagaaatgttacaagactagtactttttcggtattatattgctattgatataattaagtattagatttcagatcacttatagaaagtgttggatactattagtgtctaataacaatgttgggtaccatatgaacattgtgtccagtaccttctataagtagcgtatcatgattaattagcgatattttctaaaagttattttttaaataatatgagactgaatacttaattacaccaataacagtatgacaccgagaaagatgttaggactaataatgtcttttagcaattctctttttttacttagtgtacatgtgaattggtgtaatatatgttgcattttgtagtgggatgttagaacatgttggccacaaatttattgaagagttttttagttgttgtgagtctgttttagcagagaatggccttgttgttctacaggtaataataagaaaatgatacttttatttttctgtattaatcttctaatttattatgtgtttcaattaataatactttaagggctcgtttggaacgtcgcattaggtcgtattgtattgtattatattgaattagattatatatcatatt

SEQ ID NO: 20064 - DNA, 5095 bp, Cannabis sativa
tttgtgattaaaaaattaaaaaaacaaaagtgttaccaaacgacacatttgttaatagggatatttggtttgcaattatatttgggaaatttcattaaaataagaaaaaaaaaaatttaccacatatctaaaaatatttctcaaaataattgatagcaatctataattagtttatttttacatacgcattctacccctttcaattaaaaaacatctctctctttctatctctttagatctaaacagaaaccccctgaagccctaagttcccttcccgtcattttcgccaccactggaagtccccccaccaaagccctaagttctttcagtgccaccttttcttctcccatctcttgaagccccaaattcaaaagcacacacgccttatgattcttacatgtcctcaccgtcaacaacacactgaactagtgtcttaaaggccgaaaaccaccgatccttatctgttgtcgccactactgagcagatgaaccagagaacaacaatctgcaacaattttttattattatttttacaactattagcttttatggcagtgaatactttgataatcctcacatgtacagattaattgtaggagcattacagtatctcaccatcaccagaccagaattgtcatatagtgtgaacaaagtatgtcaattcatggaaaaaccacttcattcccactggcttgctgtcaaaaggatactttgatatgttacaggcactatacactatggacttcatctcacaaagcctcaacatcttgaaatcaaagcctactgtgatgctgattgggctactgatattgatgacaaaagatcaacttctggatttgccattttctttggatcaaatctcattgcttggaagtctcaaaaacaacataccatttcaagatccagcacagaaactgaatatcgaagcttagctaatgttgtggctgaaattgcctggcttcagtctctgttctctgagcttcacattcaacttaatcatcctcccactgtttggtgtgacaatctgagtatggttttgctcactgcaaaacccgttctccatgctcgcaccaaacatatcgaacttgacttgtacttcgtcaaaaaaaaggtttaaaattgacaaattattgtcaaacatgttccagcaacagatcaacttgtagatggattcacaaaagcaatatcgagccaaaacttcagtcattttcgagccaactcaccattgctgacaccaccaatgctgagtttgcgggggagtgttaagagttgacagttgtactttactgttatgttagttacacaactaactaactttctattagttagttgttagctttcagttgtaactgttttgtgctttgttactaaaactcttgtataaatattgtacaactgtgatcaataataattgagctctttcatgatatctttcattttcttcatttttctcttttctctcttttctcagttcttagattttctttactgttagtgttgtttgttcgatctcaagtttcaatgtctaggagattcaactctcctcacacgtataccttaaattgtatagtttaccatttaatttgttatatttcttgtttatagttatcaacattgagataaaaaattgggcacgagacattttttttttgggatgaagtattttataagtggtcgattgagatcacctaataacacaaactaattagccgagtacaataaaaactagttgaacaaagcaactagtcttttacttctacttgtggaaatctataatgattattttcaaaatttatgctgaaaattaattatagtttaaatttaaaattataagaacacgaagagttcacatgggaagttggtcacatatctatatttattagtttaattgtgtgatcgtgattggtgggttatgcctaacttcaatattgttaactcatttaaccactgtctgctgcctagacttaattaagattctctttgcttgttgtacaagacatttacttacttgtattattcatttcattcattccctaattcctcttccttttatatatcattcacttcgagtatgaatgaactcacaaggcaaacactgtttagtaaagagtagagctctagtaaaaacatatgataagaatgccaaaaattaaagtaacttctaaaaaaattaaatctatttatagagagcaagagcaagatacaaaaagaagattcaatacaagatctaaatattgtattaaatttgacaaaaaaaaatgtatatttgttgcaatatatcaattcacaacagcattaattttaagatgcaaaattgcaaattataacaaaaataaaacatcattaattattatcaataaattatttaaataatagttaataaaaatatatattaaagtttattagagcatctttaatgaagtgttataaatatattgtatacacatttttagtttatgtttataaaactaaactctaataattgtagataatgtggtttaaatttagcacatgctaaaaattgtgtcaaatttgatacaaaattaaaatatagcatagattaaattttacactacaataaatatcatttttttaatttattcttctatcactcattaatataacaaagctaatcttacacctaatatattggagtcaaattataaatttgagtgaaatataacattagctcattttttttgagttaaattatgcacaaattttacatcctccaatattagagatggtctcattaattattaattatcaatgacggtaattaaaagattgtatgtattatatgttaaattgggtccccctgaatcacttgttacgtacaacagtttaacaaaaaagtaaaatacaactaaggctcgtgattctcactcaccagacataacaaacagcaactattctaactgaattagttcttcaaatttttggtgaagacttggggggggcgaatcctggatattcctaggatttccattaatcattcggatcagattgtttggagggatactcagaatggaaggttttcagtcaagagtgcctattttgcaaaccagaaatacagatttaatccttcaagagacttatggaagatgatttggaaaccaggaatacatccgagaaattctattttcatgtggagagtgcttaatggagcaattcccactagagacaagttggtgttcatccatgaaaaggagtgcctcttgtgtggtgatgaaacggagagctgtatccacttatttagagactgtaatgtgatcaaaactctctggttaatgggagagtttcctatctattgtactaatgttcctggtgagacaatgcaggagtatgtggagaatttaatagccatttttcccagttctgaccgaagttctgcaatcaattacatgggctgtctttttagtgcaatttgggctgaaaggaacaagttgttttataaaggaagctctgttttcctccctctaattcttcaacaagttgctgctcaatggaaagacttctgtagttcggcctctgttgcagatgttcctgtctcgactgttattaatccttgcaggaaagtcagcaatgcctcgatcgtcttgatgactgatgcctcttggaaggaaggagcagctggtcttgctgcggtggtagttaatggggaaacgggtagatgggctatgtgctctgaattctccactgccttctctgccctggaggcggaagctaaagcagttttttgggcacttcaatgggcgtcttctgaagggtggcaagagattcatgtgatatcagattctcttatagttacacaggctttaaatcaagggagatgcattccggattggcgttttttgaatttgtctctatcaattttagacttaattaatagttttgtttcatgtagtttttttcatgttagtcgtagtgaactttcttttgtcgatggtttggcgaaaaatgctagaatttctagtgtgaatgcctctgtagtccaaggggagggaattccccctgtggttcccatctttagctcttcttaatgaactattcgttcttcaaaaaaaaaaaaaaactgaatttctgttacaataatagaaattcttctactcaactactgttgaaattaaacatctataaaagcacataacctcaccaatcgtaagtaggagagagcaaaacccagattcttgtgagacccaattgtagagagaggagctcccatgtggagctcagtgagttcatgtaaagaaaaatacaaagagagttagtgagagaaaatacagaaaaagaagaagagagaaagaactgaaataccagtcaaagttgtgacttagatttcttacctggtgtaatattcttcaagtatagtgcagatttgagattgttcttcaaggcaagctcaaagaggacgtacccctagatttaggacgaacctctataatccctgtgtttattttctctatttcttttattgtgatgcgtattcttgtgtttgtatgatgttgatctattatctagggtttgattgttggtaatatcaatctgatttgatcgagaagggggaatttgtttcctagggttctttcaaagaaagaaagggaggaagaaatctggttttggatcttaaggttctgggattggtttttgagctagggttgactcaccttggttctttttgttgctcaggtttacgacaaattgttttggcttaaacgatttgtcgtgtggacattaacgacatgtaatttttaactaattggtttcaattattttggtcaattttaatcctgtcgttttttatctagacattgagttggtgtagggcatttttggaaattcaacaaatccaccattatatgttaaatttgacataagattttttttttagggaataatttgacacaagatttagtagactatggctagtttattctcaatcttattgttttatatagactaagaagatgaaagagaacaatagtcatttattatggatgaacaaataaagcaatcatttgatggtttattgtgaaattccatattttaatattctcagtttaattatttaattaagtgattaattaaatgcggaa

SEQ ID NO: 20065 - DNA, 5002 bp, Cannabis sativa
atgtatacatggttcaaccccagggttttgaagacacaatcgaaccataccatgtttgaaaagctacaaaatatatctatggtctaaagaaagccctaagggcctggtatgaacaactctagtcaacattgccgtagtggaaatgtgaaaactccaaagcagacccttcattattcatgttgaaccaccctggctgtgttgatggtcttaatttatgttgatgatataatcatcacaaggagcaattctaaggaggtagaacaatttatagatcagctcaacaagaccttctcacttaaatacttaggtgcattacactacattcttggaattgaggtttagagataaaactagtctatatgtgtctcaaagcaagtatatctcatggttttcagaaagagtcaacatgagcaatctgaaacctagtcctacccccatgatagcactgaaacctatgtctatacacgatggtgagcctatgacatatccttcacactacaaaagtgtacataaagctagacatttcttttgtagtaaacaaagcttagatagtttctaaagtgtcctacaacaaatcattggaattcaactaagagagttctaaggtatctcaaaggaaccataagccatggctttcatatccctccaagtgatagattattcctcacaagtttttcagatgtcaatttggcatgttgcttagatgatcgatgctctatagcagggttcaatgttttcttaggagattctctcatctcttggtcatttaaaaaaaagcaaaccattgttgtaaggtcaagtactaaatttgagtacatggccttttctcaacgtgctactcaactctcttgattgcaagaattactcaagaaaatgcgatctaaactccctgccatacctataattttatgtgacaacatgagtgcaagtacactagctacaaaacccaatttatcatgttttgacaaaacagattgtcactttctatgggacaaggtactcaagaaatagctagaaatacgatatgtaccttcacaatcagattgtcattgcttgacaaaatgactcacacacactcgattttagttcttagtagacaagcttggtgtgaagcaatcaccctcacgcttgaggggtgagttaaagaaaaaatatgcaagggcatatcaatcttagtggtgtgtgtccaagtttgttggagaataagcaatctcgaggcaatcattgccagctatcctttccttactgttcgcatgaattttgtaatattcccttgttagaatgattgtgtacatgtaaggtaaggattgcattgtacattttccctttgattacttttttggctatgaatgagaagcaatagtatcaatctcatttgagctgatcaaattaattctgtgcattttttctttaaactttactcataaccatgtgttgtatcctctcttcgttgaaagagagccaaaatacgaaggcgaacccaaaggcaaaaacctcaactatcaacaaatcctagcagagcccaatcgtttcctttctcctgaatatcaaaattcatttaatcaaatgaattttaaagagtatatattgttcttgtagtacttttaccagagtggatcgatcattcattaaatagattttcatatatactgtacgtatatggcgtaaattgatgggggcagaattaagagccacttgagttgtgtgagattagatatatatataggctacataaagccatcaaatgtcgactgtgtgtctccaatatagggtgccaatcactctttctctatttactttcaaacattgttttagatgtagggggttttaacttttgtgcaatgtgacagattcatacataaccagttcacttaaaaatataaattttgttattgattcattctatatagaagttaatactggatcattattgaattcattctatggaaactaaccacaacaaatatggagtattattcaataggatccatgaataaattatggcattgtgtgattacaaatatatatagtattttatgtatttaaatttaaattaaatatccttacaaaaaatatatattaaatcattcttatataaattatctatataattttgtaagaaaatatatataaaattaaatgtgatccgatacttgcaccaatagcgatattgacacataggagggtgctagacaccactagtgccttgttctttattgtttctctatatataattaggacatatgatcgatatacatacaagtgtagttcagtagtgtattgtatagttctgatatttattatatttttctctaattaacttcagaatataaagatgtgtctcagctcatcatctgagaattctccatctgccatcttgaactattctaaaagaacaaagcgatcaaaagttcaagtccagagactttaactcatataaatatatatttatatatatatgtatatatatatcatatctaccgtactgatcgtttgaacaataataatatatatacataaatttatttatatagcaggagaagaataagatgtagtgatgaagagttagggtctgtggatatggagctgatgaatttgaagctttatttggagaaccaaaccatcattgaagagaacaagaagctgagaaagacagctagccttcttcacaaagagaaccttgctttgttctctgaattgtagaagaagtttcctaataataataacaattttgatcactagttccactacgatattccaccagtttgattaaacatttcttcctcttctttcttcttaaccattaatcaaatattgatataaaggaagaaataaatttagtcatttctttctgttaatatagatgtatgcatgcaataggtttatctaattatataaatatatatgtgtttatataattacttttgcatatttttctttaattataaatgatcaaaacctctgttttcacctgcggtggagagtttcttgtttggactttcccaacaattttattgattatataaaaacataacatgtgtagtatgaagcagatagtgctcatgtatatgcatgtgcgtctttaatgtaaaagaaattgtcagtgattttatttagctttttcttattgagtgttatatatgaagtgataatgactctattatatgtatatcaatcaaagtagtacaaacgtgaccaaggaaagaacacagatgaagctattcattataattaagccaaagggggataatattttaatggtactcgtatgcttatccaaccagagaagcttcagatgaatcctcttgcttcaaaaaaaaaaaaaaaaatacacagctaaatgaatttggaattctccgaaagtacaggtatacatacatacatacatttatatatatatatatataactgaaagactacttgaatcattccacttgcagccatcagctaattcacaaagttaagaaaaaaaaaaataggaagcttcatgttgtctcatttttcctgcaagaacacaaaatcattacagtccagttaaccagtttgagaagcttcttcttttctctcaatcaaaatcaatggagttaattacgtaccaattcatttaaaatgaagcaattcatcatgtgttttgggaaaccatatagatggacttcatagttccttggaacgctcttctgatgatttgtatatccgaaatgcagctaaacacattgtggcattgcctaaaactgtcaaggctgcttggagagcaaccagtacctacagcaacataacaccaaaggtcatttcaaggacaataattactcattccatcttcaatccaacttttacaataatttgataaaaacacatgattgatagttaggtaccaaaaaccaaagccaagtcaccatttttaatcatttgcatggtatcatatcatcacaatatatatagttctaaggatgtaaggcgttttcatgtgcagactatagataagtaaatgcatatcaaagcacacacaaaaactagttgtgaataaggaaaagatcattcaatcttcttacctcaagagactcagagttataaaagaaatgccatgtacacgcacaaaatgctcccccaagcaggggtacctaaacatatcagtggtttaaattagtgaaattaactgggaaagctatagataaaacttcattctttatataaatgtgagcaaagataatcaaaaatccaaatctaatcgaaatttccaagctttttaaaagaattagaagaataacccaccataccccaagaaaggcctttccaagattcattcccagaaatttctccatattgccataccaaagccattgctgtaatccttaaaccaaaaattcaaaagaattgttggaaacccattagagaaaaagaagaagataattcgagaaatactcaccattcaacaacactggaaacatgaacggcccaagtgggaagagaaagggcgttggagggctcactgagttgaaaagaacccaactcggtagctgaagcgggccccataagggtaagggtcaagcccgccccgactccgagtagacccaccatggcttttggattctgaaggaagccataagtagggtttcgtggctgaactggaggaggaggagtcagttgggaacgagtagttggaggagagagagaaggtaaagctttgagcgtgggtttgagagagaacaagaaggcattcattgccatggcaactggaagactttcgatgcctgctgtgcttggtgtgagcgatatgaaaatttagactttcgagggttgaaaagatatttcagcaaaagggcgcttttccaaaattacataaatttacattaaatactaatttttttcctaattttatatttatactttcacaaatttttttttacatttatactttcaatacttaaatttttttttctttttattattatttacttattaaaacttgaaaaaaaaaattattttccctctctctctctctctc

SEQ ID NO: 20066 - DNA, 3679 bp, Cannabis sativa
  modified_base (3246)..(3252): a, c, t, g, unknown or other
atttcgagacatactgctccaattcgagccaagtgtacaggtccaaaactcctctcaattgaagggtacaaaaatagctgaaaaacaagcatagcaaaccctagaaaatgatagaacaatgattaatgttagtcttttgaaaaaaaaaatgcaaaagtcctaattaaaacaagattaaagtaaaatgatgatatattaaacatgtcgtgtttaaaacaatacaatatttgttctaatggcttgatctattgatctcttaccaatatgctcccaagttttatattctagtcaatcgaatttcttacattcttgattatagtctattgaaatgaattaaaattgataagaagttggtcaatgatgctcaaatatgtacttgttttgaatgcctacttattttttcttatcggtatagataattaatcaccagccgaattatggttagagctcttatatgtcttaatcttatattgaatgtagttaatatgaattttgtcaacgtgtttcattagttaactagagcatgttttacttctaaaccacttgccttgaatggcataaatgtataaattattaaactaatcacttagctatcaagacaaatggtattctgtttctttccgaactatcactcttatagaattttactctctaaattattatttttttaaaagaaaatcctcgaaaaatggcgtacctgaaatggcaagaacttcaccaacttgttcacttgaatagctaaggcccccatacttcttaggactcacagcccataatggaaaaatcttttttaagaagaaaaagttactcaataagatgtaatgtttaataattaagaatattatgaattattgattaaattaattacctcagaataagccatgtcttgaagttggaaaacacaatacaccataatagatgacattagaggccaattcttgtaaagactttgttttttaggatgattacattttcccatgtcattaacttcttccaaattttcttcatcttttttacaatgaaaatgaagtgtttcctataacaaacaaataaatacaatgtaattaattaagcctcaaaatttctccttaattaatttagattacatataactaaatttaacataccggcagccaataacacaaaatagttacaaccaaagcaaatgttgatatgaccaagcaaggtaaaaagtatggaaatctgtcatttcacaataataacatcattaattatttttaaccataaattagaagtgagcttaattagtatgaaaataatatgtattggaatagccattcttacctcccaaatagagattctttggaaaatattcttgggaacttctctgcaggctttaattcaatttaatcaataaacaaaaaaaattgcattgttttattcttcaaagtaataagaattattatgttaataattatagagaggattctttattaatgcaaatacaatataataaccaaataactaaaggaatcttgataatacaaagttaaaattgttattaagctctattagagcctattacgatattgaagtggcattttatatttaactatattctataccagttattaaattaaattacagtgatattacatgaatggatattagacagtacacatcactgcaggcctaattctgggctaagacgggctagaccatgcttagggtccacccaaacctaaagactccaaaacttttatatagtatacttttatgcatcgaacaaaataatatttttttctttttttttttgtaaaattttgtgaaaatatacccaataatactcacactcactcagggctggctctaggctaaggtggattaggcccgcgcctagggcccactaattttaggggcccaaataaaaatttttctaaaaaaatatacatattttttaataatttttaaaaataccatttatctttgtagtaagagctcaaaattttttttttacttatggcccatttcaactcagggtcgaccctgactccacttatgatatgacacaatattttatatatatacaaaagatgcttcaacaatgcaccctcttaaaagatgtacaccgatgcacctcttatctgtttcggtatctgagagaattttttagtccaattttctgatgattgtctacgttgtagttatttaagacaacctgtaaattttgagacatttgaaaaaatttaatacgccaaaaatagggttcaaatagtcaatcgcgcgcaagactcttttattttatacgcgtgaaataaactgtttgaactctatttttggcgagttaaattttttctaaatttctcaaaattttgcaagatgtcccagataactacaacgcagatgatcgtgagaaaaattaaattgaaaaattctctcagatgccgaaagagatggggtgcatcgtaggcccatttttactactgctgcctttatgccatttttcaaaaagaaaaaaaaatagtgatttgattccaactatttaaagtgcattaatttctgttctgtaattttagagaataggtgggattctcattgagtatacttaccacaactatttatgtgacagtgaacctttttttctttttacttattcacaccacaatattttaaaaaataaaatatccccactaattattttgtgcaccatacaattttaaaccataaaatatttttggtcggccttaaaatttggtgggttataaaaaataattatttatgagctcctatcttaaaaaatataataattatatatgagctctaagtagacacagagctaatatgcttatacctagaattgagccttatctccatccaccatataacaagcaatgctgtattagcctcaccacttctatgaacatgtaagttaagtttttctcatgagaatttagtgtatattatattgtataactaactaaaaatttcttgttctaaataacaattactaaacaataataattattatctaatatttaaaaatactttgtttttttaaaatatcctgtattttaaaatataaataattactaattactagactgtataattataattattattattattatttattataatagttatacctgtgccagaaaacctccaagagctggaccaattactaatccaattccccaagctgtgctaatctgaaaattatttattctttctatatatcaaaattattcacaacactaaaattaagaaaataataataataannnnnnnaaaaaaaaaaaagaaaaagaaaggctcaacttcttactattgacattcccaaagcttggtattctttacgacaaatttctgaagcatatgccttgaaaaaattcataaaagagaataagaatattaataaaaatagaacttaataaaattcattaggagaatatattttctttttttctttattcaactcaaaataattttatttttcggattctattttttacaaatattttttttaaataatgttgattttaccttatttttccgtaacagcaacgaaaacaaggttagattttaaaataatggaaaaacaacactatgaacttttgtaaaaaaaaaatcagtaaaaaaaatgtgggccacattagcccaaaactagtgggccctcattttgtgttctttattgaccaaaatgatggcaaaagga

SEQ ID NO: 20067 - DNA, 1926 bp, Cannabis sativa
tgatccccaaactcaacaaacccattattattactaatattaccattataccccccataattgaatccattattcaactgatcatcattattattactaatcatatcattaaaattgcttagataatcatgagagtacaatgctccaccaactgagggaacaaacccaccgccgacgatattctgctccgggaacgccgcagcagacaccataaacgccggagataacgacgatgtcgatgaaagaagagaatcagttgaggaagaagacaaagcattattattattattattataattattaatagtactactgctacaactcgtagcagtagtactattaataccactaccaccgccacaaccaccgctaccgaaggaaactaataataattctctatcatcattacaccacaggccgccgtcttccgtcatggtaggcggcagccccgaaagatcagtagtcgtggcggtggtggtggttgtaataataggaaagaatgtagagtgatgattatctagagaagagtataaatattcaggaattgaacccattaatataatttatatataaaaagctttattgtgtgttttttctttttatttttggggtttattagatttatatatagagagagatggtgtggggtatagtagtgattatgggtggagtaaccgggcaagttgggcagcccgtaaagggcagggcagggcagcttaataattaattatgattattatattaaccgtgtgtgtggattagattagtagtgatcgatgattaactgccataattaggcaaaggcaattagtaactaataattaataagcaaaagctactatatatatacatatataggttttgcttttgtaagtagctattattaattaactgattaaattaattaattaattaattaaagtgttgttttacggatgaactgaactgtagaaatgatctgtctctatatagtgtgagatagttggatttgtagtactgtaaacgcgtatagttgtttctactgtttatttttcactatatttgtttttatataaatatatatactaacacactatttttttaaaataaaaatacatatattattattaatttatttcttacaaatatataccctaaatgttacactatgattgtactttaatattataggaaatttatgcagtagatcttgtttggtagactcttaaaatgtttcggtgtttagaaatttttttagtttttattttttttatgatcgtgtatgttatagctatttaggaatatatgtaaatttttaaaaaattctgaatagtttacaatgttgaaaataagattagatagttacatatcatgtgtataagaaaaaatagtcgcttgtataataaaatatataaattcaatttttggtattgtaaactgctcagaattttttaaaaatttacaaatagtcttaaataattataacatacacgatcatgaaaaaaaaaaattatactaaaaaatttttcgtaaaaaatactcttttgaaagggtgtactgtagatttatccaatattatatacatacaaaaattctttggtttccaaaaataataggtgtatggtgtactttttctttgtttttatagcttagtgtagatgattataattttcatgttatttacaagtcttcaaaataaactatttgattttttttttttttttggatacattaaaggggaattttatatatattattttttaatttttttttaaaatttaccatttgagttatttcaatagttgctctagtagtttctatgtaaattgatatgtgaatttttattacaatttaaattgttccgctagttgttatgtaaatttttatgtgaattttcataaatatatatataaagaaaattactttaaattataaaaaaaaaaaaaa

SEQ ID NO: 20068 - DNA, 6550 bp, Cannabis sativa
  modified_base (6251)..(6256): a, c, t, g, unknown or other
caaaggcatcccaccaaaatgaaagaggtaattgtgcttgtgcaagaagagtaaggcccatatcagtgatgtgcctatgttttctttccaccctaccttgttgttgatgtgtgtgaggacatggatgtctaaaaatgatgccaagttcatagagaattggttttaatggtctatattcacgccccccccccccaaatcagcttgtatggattttattttagtgttaaattgtctttcaatataggcatgaaaatgcttaaacattgattgagttttagatttattggtgagaggaaaaatccatgaaaaccttgtgaaatcatcaataaaacatatatagtatttgaaaccttcaggggaaggattaggtgagggcccccaaagatcagtatgtactatttcaaagggagcagtggtactatgtttggaagatggaaaagaaaattgatgaagtttaccatattggcatgcatgacagataggtaaagtagtggaaggaatgtgcaaaaattgtaaaactttattcaaaacttgttgattgggatggccaagcctattgtgccatagatgtacaagttgagaatttttggatgttgaaatagaaacatcagtattgctggtattattacaagtagtagtattcaaaacatgaacttgagacaaagaattactctttggtgcaacaactggtgaagtgggatttggagaggaatgagacttgtcaagtaactgtggagtaagttgatacagtcctcctttaagagcaccctgaaggagaggggtcttcgagtgattgtccttgacaaaacacaaatcaggggtgaattcaacagtgacattattgtcacaagtaaacttaaaaatgcttatgagattctttgttatggctggaacatgaagaatatttttgagataaagtgattttcttgcagctaaagaactatgaccaatgttatgaatagagagggaagaaccattacctacaacaatcttttcttttcctttgtaggttgtttgctgctgaatattgccactatcttgagtgacatggtgggaagccccactgtcaagataccaagcatcatcatcttgatgtccattggaagcaacaagagcttggggagggttttgacttgagttgacattagtttcatctggaccattataggagatatcaaagcgtcgatagcatttttggactgtatgtccagttctcccacagagctggcatataggtttattgttggagtagcctaggccattagtctgtcgtccaccatatgagtttctaccacgacctcgattgttgctaggaccatttcgactatatgagttgggagggccagattgggttttcttgaattgagtgtaatttgctgaggctccatttaaatcgacggtgagttgagtctgatttgcttcaataaacatttcatgattctgtaacatgaattggacttctgcaagagtgatcttttcccttgtcgtgagattaacaacaacagattcatactctgttccaagaccagcaagaacgtaaagtatgagctgctcctctgtgatttgattaccagccgcgcgaagaccatctgcaagattcttcattttgagaagatattcatcaatggctaaagaacctttcttggtagattggagctgattcataggatgaatctgtctagctctagatgccgtcccaaagatttgctcaagtgtgctccaaatttcagaggcagtggcacaattaaccacatgaccaatcatagatttagaaatagtggacattagccatgaaagaagaaattgatctaagcgcatccatctattgaattcaggattgcttaccatcgttgtggactctggaggttgacggatgcggggctggggatgattttgattgagcagtattccttcgaggtcgtgagcacgaattgcaggaagaacttgggatctcgagaagaaataattgtttcgattcaggcgaaggggtgggacaaacatggtggtgggaacaatggattggtgagctgtattatcggcagagaaagacgccattgaagtaccttcagctctagtaccaagttgatttagtaagaacagagtaaagaagagaaagaaggaagctgttgttgtattgaatgaataattgagtgttacaaaactagtatttatacacagcttaatagagcaccaactgaataactaactaacagaatataacagatataatgacaacctaactaaccactttcagtgacattatcaacaataatgcaggcaaaaactaaaattggcaattgtgaggtttaataataataataagacaaaaacaaatacggtaatagtggtctttttaccactattataagtttataaatacctcaataataaatagaaatgaggatcgactgaaaaactctttgtaatgaatatattaatatagtgatttgtggactaaggctcattattgtcccaaccatgtaaaaaaattgtctcttctaatattcattaattacttcatactgctctaattattggttaccgaaaatctcagtcaacaataattatttaaaaaagtaaatgggccatatacaaaaatttatttataaataaaatagtatattaattaatatgatgtatgagtaaaatagtatatggcaaatgatattataaatatgaagacaaaaaatattgtgtatatgtcattaaccacatttgtttaaataatagtaaaataaataattaaaaaaataattataatgtgggcaaaaactaaaattagtaattgtggggtttaataatcataataaaacaaaattactatagaaattgatttattaataaatctaaacatttatctgtaacgccatgatgcttaggcgcgctacaatgatttttcaaataacagactatcttgctaatcaagggttttctttgagaatcgtgtcaaatcaaaacttgaataaaattaataaattttatgaacatacaaatgtatatatattatataatcgagatcccgtgctaaaacttctataaatattttgaaaatattttcacaaacttgtcacatagcgactacaaaatatatcccaagaagtcccgagaccgaacactccagattgctctatcttgacatgtacaatcattacccgagctcggaactcactcctgttcagctttcgccttcctttacctatacagaaaagtagaatctgtgagccaatagactcagtaagaaaagcatacaacaaaatataaataattgccctgtctaggcacccatacacctatccacagggcttaccaaatgaataagaaagttcttaatggttggtgctattgaccatgatattacccactaccagcactatgatcacactgcgggattggcactgtgttcatactgctatgatagcatcaatagcacccaagagtacaattggccatgatatcactcttaaccagtattgtgcacgtactgccgaaccaacacaatggctgtgtcgctatgatagtgccaattaatactctctggggtaaatatcacacttaactagtacgatgcctgtactgccgaaccgacacaatagttgtgccactatgaaatcacccaaaacatatacaagcacaaacacaacatgcatatataatatgttctatactaatgttaccttatttccgaattcaagtgttccgtacgacctcaatgaaaaattacacgctgaatggaggccctatgtcacaacataaaattgataagtgtttaccctagaacacttgtctaatgctcgaaaagaacctaaggtttttctactgaactttgtgatgaagacactctaaaataaaatacattatttggctctagtttatataccatattgtagagctcgtcataagctttaaaacggtatatagaacgtctaaaaaggacactcgagtgaaaagttatggccaaaatacgaaaaatcggccttccccgatacagtccaaccggaattcctgttggaatagccctgaaccaaccagaattccggttgtctgggcagtttcaacacaaaaattctccaactttaagcctccaaaacctactcaaatcttccccaatcaccaccaaactttccagagcattaacatataacatattaaacatattctacagctcaaacacaacaatacactaagaatttaaaaagtgccattgttgagtaagctttgagttcttggaactcaaatttgctttacccaagaattaagcaccaaaaccagtaaaatcagacctaaaacaaccttacaatcaacacaaactaatcacatatcaatcttaacttacacaacagcaaaatcaccaattcaatatgcttgaaccaacaatttctacacaagaaattattagggccatacctcactttctccttacaagagcttctgaattcccagtaagaatcaaacaaaaaaatctgaattgaaccctaatccttggttccttcttagttcgaaaaggaaaaaagaaaggagaggttctaagtcttttcttgattttctttatttttctctaaatgataaatctaaaatgtaatgaccctatgctgaaactaaatgtggccagctgtccaaataaaaaccagccacctaagccccttagtgagattactaaaatgccctttattccataagttaaacaataacaagcttaggggtaaaatgatcaaaagccataacccagctcaaaatcgatattaatttatcacaaatatttattccactaagaaaaaagttttagagttacccatgtgactctaacggccatccattgaattttctgtcgtcgccgagcaaaaattataaaatttacataatgcatatttaatttaaataatactcttagagtttgataaaatctctgaaattgagaaattataactctaatactcatttctaataatgagacccataacataataaactcatgcataattataaaaatatcaataattaacgttaattgtctttactaatccatattctaatatgcggtcagtacattatctatctagccattagccacatttgtttaaataatagtaaaataaataattaaaaatgaaataaaatgattataatgtaggcaaaaactaaagttggtaattgtggggacaaaaacaaacacaacaataatagtctttttaccacaattataagtttaaaaatacctcaataataaataaaaatgacggtcggctgaaaaactctatgcaataaatatattaatagagtgacttgtggactaatgcctaactgcgtaaaaaattatctcttctaatatttattaattactttataccgctctaattattggttaccgaaaatcccgaacaacaataattatttaggattatttgtgatttttaggaaattttaaaaattaaatgggcgacatacaaaaatttatttatacattaaatggtatatttttttttttgaattaatcaggagatttattaaaactcattcaaaataatagaacgcacttgagaggaacaatcctccaactgaagcacacaacctatagagaaacaagagtctcttgccaagcaatgagtcaacttgtttgcagatcgtttaacaaaacataactcaacaaaaggtaaagccaaaagtaaatccctaacatctataacaataaaaccaaactgtgaggcaataaaaactttactttggactgcttggacacacaccaaactatcggtttctagcactacattgtccaagggatgagtcgcaatccaactcaacgcttctttgatgcctacgatctcagcaatttcgggttggacatacccaccattttacttcttaaaagcttctaccatggttccataatgatctcgagctacacaacccattccaaaccgaccctcttgctcaaataaagccccatcaacattaactttaatcttgtttaacacaggtgcaatccaacactcacaatttcgtcctcattcaaaggagacaacgaaaggcccttcctttcctgagcaaatttgtattgatcaagcatgattctagctaatgttacaatatttgaagcaagccaactcttcttttgccaaacaaagtcattccgcgcacgctaaataacccaactcaccatcgttgcttcctccatttcaacttcgtgccccctggtgaaaattcccaacaaccagctgctgaatgttacagccccagccccgacgtctactatgctnnnnnnccaagcagcctttgcaaacgagcaatccaccaacgcatgttgaatagtttcagtactagagttacacaaagggtagtcggcgttgacaggaacgtgtcgtttttggagttgaaaacaagttggaagcacacccgaagtagctcgccataaaaaaattactgatcttaggaggaacttttaatgaccaaagccgcttccaaaaatcagttttggcatcttggcaccaagcactcttagattcttgcaagaatttatatgcacttttaaccgaataattcccacaagtctaaagtc

SEQ ID NO: 20069 - DNA, 5325 bp, Cannabis sativa
ttgtatatgttggattgtatttttcagatgagtgtgtcaatcttctattatgtaataagttattcattaatctttctattcgaaaacacatgttagtttttcaatttttttatggtattgtttgttatgcttacaatatcatctttgtatttttaaaaaatttcaaataatttatagtgccaaaaatatgtgaaattttttgaacacgtgtgataaactagaatatcatgaactctattttcgttactgcaaaatattcgaaattttttaaaaattacagcaataatactataactataacgaatactgctatgaaaaaaattaaaaaaaaatattccaacatataattttaaagttgacttagaaattgtaattaacactttaattatgatcctctatttacaatacaatattatcaaagactattatttattacaattctatatttgatactaatttgtatagttattttgtaaaattttactattcttaccataaactcaacttcaacctcaatttcaaatctcatttttggtcctaggctttggaccccatccccaaactctcaccgcagattgtggtccgagcaaggttcgatgtttggggttcgatatccggtacgtgtctgagttttcagattcaaggtccggggtcggttggttagggtcttggtccagggtaagattttgaaattgggtctaggtagagttgggttcgagattaatacaatgtaaaattttacgatttttataccatataacaaacgaactctaagtatatataggtcgggactttggtgttgactgaaagatcatctaaattctaagttataaaatgacattttacgagtaattaataattatttgtaaaattaatttagatacactgtatccgtattaaataaaattacaccaataaacaataactatataattttgtatatttgaacaatcttttttcatatttgcattaattaatgcagtactgtgagccaagatattcatttaaaattgcatttaattttccttagaaaataaaacaaccaaaataataataacaattaatgctcttgtccattctccatcgcacaaaataatacgtgaaattaaaagaaaaaaaaaacattaattacattacatttatatctgacagtggtttggcatgacaatcaataatggagacgcttcttcaatcttcaacgcattaaaggaaacctaattaaaccacacatatatctattactattactctcagctagctacctattctccaactccaaaccatgatgcttctatatatgaaccaaaccatataaacccataataattaataattaattaaatatatttatgggtctatttatagcagcagccaaacatacacattccataaagttttgaccaaacaacatttaaataaataaataaataaaactagtttgttctagggaaaataacagccttgagaggatttttcatgacaacagtaaaagcaaaagtctcagttggatcaggtggcgaattgggtagtggtaaccacttaaaagcctgaaccatcttagccaatagtaagttcacatgtaatgtacccaaagtccaagctggacagatccttctacccgcaccaaaaggaaccattctcacacttttggttccagtccaatccacgtcctcaccatccccaccttccataaacctctcgggtcggaactcatccgggtctttccacatatccgggttttcggtaacccaagccgtgtaaaactcaacgctagcgtcagccggtatattgtacccaccaagttccgtatctttaacagccgcgtgtgataacaagaaatggctcggcgggtgtcttcgaaacgtttctttaataatcgccccgagatatctcattttctccacttcactttccgtaacgacgccgtttttaccaaccgtttcaactatttccttgtgtagtttctcttgaatctcttggtttgtgactaagtggaatagggcccactctaaggcagttgcgcttgtatctgttcctgcgttgatgatttccgaaactaacgtcaccagctcttcttctgagagccgtccacgaccaggagcttcaagctgaaagagcgagtcgatgtaagccgcgccggctggactgaccatttcctcgttaaccttagcaccactttcgagaaaagctttacggttcctcaaaagtgggaccaaacactcgagttgtttttttctcaactctttagcttctcttacactaccacgaaaaaggggtgtgagtaaaggcaagaaatcagggagtttaggcaaagttattaacataacatctttgagaatactttcgatgcgtttaattctttcttcagagatttttgcaccaaaacaaagacatatcaaaacactacaaatagtgagtctacagttactcattacttcaacataaccaacttccgaagcctctttatatatcctcttcatatggtactccatagcccagtgtctaatccagctgcactgttttatcctcgttgggttaatgagttcagtcacgaaattacgcctcaaagcgcgccaaagcggaccgtactcggctgagttgatggcgcatttcccaacgctaaatataagcctgataggtgagtcggctggtcggcttgcaaactctgggcctcgttggaccagggcctcgtggattaagtctgggcttgttacgataatgagagttcgttggcccatttgcatggtgaatattgggccgtattttttacgtaaatctcggacgacgtagatgaagtgacgtcgttcgaggatgacttggattaggttcccgacgattggccatcccggcggtccaggtgggagattttttggtcctccgccgatgacggagcaacgacgccaccacacacggaggaatattagagccacgaagagcataagaatatctatatactccatagtactatatagctttaaaattctcgatctctatcaaggaaagatttataaaacgataatatttaaaagttgtgttgttgtaataactagagagagagagagagagaaatgtgaattggggaaaaggtggtgagactatgggagtcttatataacgtgaaataaagttggtttggggaaaaattagaagggagagtgaattcaccatttaaggagctctatctaccaaaactactcctattcaatgcgtattcaggtagaaataattgacgctggtctcaatgtaataaattgataattacaaatcgggttaattaactattttttttactaacctttgaagagagaaaaaaaaaagtactttttatttaataagccaacctgtaaatttttttacatatatatagtaattccacacaatttgatattactataaatcatcaataaataaataaatgttattggtaatttaagattaggacacaaacatttttagtttagagtaataaatcccactctctaatattgatattttcgaaagggaattcagaaaaatgaggtttgcaatttgtgagtattagttgtatgtaaattattgagtaattgagttttaatttgcctcttaataattaatggaatcctaactattacttttacgactagctactttgaatatatggtgccgtgtgtacgtgcaaatttattaaaaactaatgcatattaaaatttgggtttttttttttttaattttatttttttctattttttacactccaagaacagattttttttttttgtattcttataaaattttacataaaaacttctattgcaactagcgctgtaatttaaattgcaataaaaaatcgtgtagaaacttctatgtaattaaaacgataataattaatacaaaaaaaattgtgtagatataatatgtgaaggaacaacaataacgtggaagttattacaaaattagtctacatatattatttatatggattggagatgtctgcatgtgggatctgatttccttatcgttttgcaataaattaataagattgacttttttaaaaaagagtaatttttaatattttcatgaaatctatattttttttgaggggtatattatatatgtatatgctaaaaaaaataattgaatatggtcggccaccatgtgcatgtaccagcaacttttcaggaagaagctctatcaattttgcttccgttccttgctttataaaagccaccctatataaggggagctgacgcaataatattaattttaaaattttatttttgaaaaacaaatttgttctataattaattttattttttaattttaaaaacaaaaaataaaaatgtattttgtgaattttatttttatttgttgtttttatttaagttgggtatggggccggcgtccgggtcccacttcgggtttaggattcaggtctaaggttggggtcgaggccaagactggagtttgaggtctcgatctaggtccggggccgaggtctgggtctagattcgggtctgggtctggggccgagaccgagtccgagttcatggtccagggtttgggcttcaagtcgagtccgaggttcggttcaggtccatggtttgagtccggggtccgtggtctgagtttgtggtttaggatttaggttcgaatcgggttcgtgtcgggtccaaggtccgggtcggggtctaggttggggtccgagtccaaaatattgataaaaaaatatgtttaaaatttttttgaaagtgacttttttttttgttttctcaatgaaaaaaataaaaaataaaaataattttatagaacatgattttagaaaattatttttacttttctaattttgaaaataaaaaactgatgaaaaaaatattacgaaaggcacttttaaattagttaaattatatatatttttttgaaaaacttattattttcattaattagccaaaaaaaacccgaacaacatgtataaaaggaaggtattgaaccatattccaaaccacctcattttgtagtccaaggcctaatctagcatgtttatgaacaattttctaggaatataactagttaattacaaagcttggggcgaacaataatgagtattttataaatcttaaaacatctccaagaacagaattaaaattgctagaaccacacagtttatccacaataattttacaatcaggttgaataatactaacaaacattctaataattagttgtaaccaagtgagtgcaagaagaatagtgtttgcttcaacaagaagatgataccatttattggcttaacaatacctgccctgatattattctgctcatccactatttactcttcttactatcaaac

SEQ ID NO: 20070 - DNA, 4837 bp, Cannabis sativa
aagaattttaaaaaaataaataaaaagtttaaaattattaaaattaaatatattctcaatattaaaaataaaaataataatgttacaaataatatattattaataattatatatatatttaaatcaatataaaatttgtataagtttaattaatttaaaataaataatattaatatttgtatatattcataaaattaactctaattaaatttaataaaatattattacatttttaaaatattatattaaactattaataatcatattttaatttatgtagtgtagaaacaataacattactcatgattatgatatattgatatatttctacatatatttttttttaaaaaaaaaaggctagatagatagctatgatttatatatataagctatatgatggtgtactagtaataaaaatagaagattttgaattaatttgaaaaaagatgtgattaattatatatagtgaaaattaattatataattaataattaagaggaggaaaggagcgtggtgggatagtcgcgaatcaacggtgttgggatttgtcggggaagaaagaagccaaagatggcgaactcatgacgtcacttttatgtcaccatggaccacacgtgccgaaccttccatttatatatacacacattattacacggtaattttttttttaaaaaaaaaattaaagtcttatctgctttttttctttttctttcttaagaaaaaatatatgtttatcattgaatctttacatgtagatcaatctatctatataaagttaaattaattatttgtgtttacgtacgtacatacttatttttatatacgtgtagaatatgtcatataataaagttatgatatttttaaaaaaatatatatattttatatgtttgagcgattaattgttcttcttaagagctggttaatgcttctagctagtgcatgactttgcaagtttgcatttgtttgatattttattataattaggtatatttaaatatatattaataatttaatacattaataatatatatatatatttgtgatttgatgatatgtgatcctgcatgaatgaatcatccttatcatgatcatgatatgtaattaaggttttttcttggaagtttagggttgatggatagtcttataagttatattaattgactcattaattaattaataattatacaaaaataaataacactattctcaaaagtttttcttttaatttcttctcaccctttatctgactatatatagtacaatctactttgagttaggtggtaaagataatttttattgaatcaaatatgtaattattattttggtaaattatcttatcccttttttctgaaaaaaaaatagctttactataaaaacttactttatatatatttatataaataataaaacaaatgctatatacaagggttaatttgcatatatccttagtataaaaatgtataatatgcaaaagttctatatcatttgttatatgaatacctatatatatttacacacaaaatatatatccttgattttatattgcttacaaataggtacattattagttatatatatataagatttaacctataattacagtcatagcaaggaagagaccaaaaagaaagaaggattatgtaactttattagatatataatcaataattatatattattaactcatctatttaacactaagtttggtaattacttagtaggagatcgtgtagggaattagggatgggaaggagaggtgggagatatctgtttaatttgtttggcaagagagattaaatgagagaaatgaaggtgaaatgatatataacaaatccacccaaatttgcaatttggaatttctttattgatggaaggattagaactttctttcaattatattgtaaattataaaaatatcttccacaaatattattaaagctaattaagattgtttttctctgaactttgacatatatatataactaattataccttgaacatttatagtcgttaaaaattgtctttaaattattgagattgttggattcaattttaataaggaaaaaatttaacatggttgaaagtttagggaacttaatttggtatatgtcaaagttcgagaaacataatttggtagatattaaagtctcggaaatataatttagtacatggacaatcataaaattagtaaaattaaatgaaattatataaatgtccttaaatctaacattctcactaatttaaggtaaatttttaaaaactaaaaaagttcatgagatataatatggtatatgttaaattttaagagataaaaattttaattaacttattaaaaaataattaaaaagataaaatagtaattttataataaattagcaattacctatccttattcataccaaacaacataaaatataccaaacaacaatgaatgattattactctctcttccctaccaaacatagtctaaaactcatctatttaaaaatggaataatgaatgatttggaaactcctaaaaggaaattattattgccctacttggcttataggcatagtttaaaagttaaaaagaagaaagcgcgaaagggaggaaaataaattattattattaattaaagaataaataaaaaataaaaataaaaaagtgataagaaatcacatgcaaatacagaggaagtaaaattacacacacagcccacgtgtacgtggcagaaaccaattaaaaagattttaacgagtccacacagacaaccggattagccagtgaaaaaggcgcgttggaagaaagtgggtcccagaagagggcggtcgtcgagcatttaatgcaaaaccaccggcccattcctcatatagtccgtacacatggtttaactggcaggtgccggtcaaactcatcccaggtgtaggaggaagaatggaatacctccttaagccaacctgttctccaaaatcccaaccccaaaatatataaaacaaaacaaaatctattcacacacacacacactattactatagtctctccctctttctctctctctttttttctcaaaaataaaaaataaataaataaaacaccaaacagtctcccttctctctttctttttctctttctttgttataaaacaacttggagaacaagttttttttttctttttcgaaaaacaaaaagaacaaagagagagagagatcgaagaagaagaagaagaagagaatatgtgctgctctttttctattgatctaaattaatatttaatatatatataatatatatatatctcatggacaagaaagaagaagaggtcaagaacaacaataattcgattaatatggcaaattcatcaacaacaggaggaggtgcagtattagtagaagaagaatatcatttcaattctactttattcgataataataactatcattattatttcaataataataataataatagtattatgctacaacaacaacaacaagcatcatctttggggtttatgaatttactgggaatcaataatattaataatagtcatgaagattttggttcatctttattctactttcctccaccactacaagaagaagaatccaataatgataataatatgttgatatttgatgaccctatcaataataaccatctacttgggttgtcaccgccgccgccgccgtcttcaccgcttcctccaccttcgtccactgttccctcgccatctccagcttcaagcacagtgttgccggaaacttctgaggttttgaacagtacaactccgacgacgccaaactcatccactctttcttcctcgtccaatgaagaacaaaaacaaaaagtagtaccaaatcaccaaggggaaatactaactgaagttgaagctgagacagagcaagatcctgaaaaatcatcccacaataataataacaagcagtaagactcatctctttctctctctctctctctcttttttgggtactgtttggtttattattataattattattattattatgacatttaggctttaggtgccatttcttagtcacgtctgtagtaccacttgtgttctgatttaactatcaagatcatcttttgtgttaattattattatgtgtgtggggttttggattttattttgatatatatatatatatgtatattgtataggttgaaaccgaaaaagaagaaccaaaaaaggcaaagggaaccgagatttgcgttcatgacaaagagcgaggtggatcacttagacgatggttacagatggcgtaaatacggccaaaaagctgtgaaaaatagcccttatccaaggtctatatacatatatatacacacacattatataattaatcatcatcatccatgccaatcttcctttaattacaattacttattattaattaattatctttattatggtccccaaccagctagcttgctataatagattataaatttgagttacccataactcaattaataataataataatgaaatttgattctctttttcttataatgttattaattatatatatatatatatatatatacactactactacaggagttactaccgttgcaccagtgcaggttgtggcgtgaaaaagcgagtagagcgttcttcagataaccctaccatagttgtaactacttacgaaggtcaacacactcatccatgtcccgttacgccacgtggcagtctcggaatttctccggattcccactcattctttccctccgtttcttacggtggagccgccgccgcctcgacggtgccgatgttgccgagtcatgatcatcctcatcatcatcagtaccggccctatagctcattgttatc

SEQ ID NO: 20071 - DNA, 8793 bp, Cannabis sativa
ttttttctctgtacatggaaagttcgtactttctttctgacaccccaattttctggaactgcaccaaaacccagctctgagacaaaactatctctccaataatggctcctccatctcctccaacgctcatgcatctctcttcatcaccagtcactgtttcatcccttgtaccaatctcacttctcaagtcttcatcgtcttttacttcttcctccgatcatgtccaccaccgccgattttcctctcttggggttgcagtttcttcttcttctttctcttttctgctctctcaaacgcaaacccatttacctttttcatttctagagaccagtcgaagcagcaagaggacgaagactaggaagctttgtgtgtctgcagtgtttgagcgttttacagaacgagcgatcaaggctgttatattctcccagagagaagccaaagctttcggttgcgatatggtctttactcagcatcttttgctgggtttgatcgccgaggataatggaaatgggtttcttggatcaggtatcaccgtggaccaggctcgtcatgctgttcgctctatctggcgtcaccaaattcctgcagaattggatcccaattccggtcctgctgttcaacttcccttctccattagcaccaaacgtgtgcttgaggctgccgttgactattccagggcaaggggtcacaatttcattgctcctgagcatatcgccataggcctttttacctccgatgacggcagcgccgctcgagtcctccagaggtaaatattatatatgtacatatatatgtataaattagagtttggttgactcttcattttagttctttgaatattcatgtgtgtgtgggaattggccatctgagagtcaaacacattatggatataacatttcagacacgaacctaacattaaataatttaagttggttcatgcggctggaaattcctttgattacggaattaccaaaaatatagaattagaaaaaatttccattctatgaaacaaaaaaggccttaatatccgtcttaactgaaaatgcatgtattatatatatatatatatatattaatataatataatttgaaggcatttatagaaaccttttatatctatcccatgatcacggaaacaattgttcattcagattaggggcaaaagcaaacaaattggctgctgtggcagcgtccaaacttcaaggggagcttgccaaagatggtagagaattgtctggagcatcccaaggtttgggtgaaaaatcttcgtctgacaaagctactgtcacaagattctctgggaaaacaaaaggtaagaaagaaacctctttgtttgttctcagtttctggtttttcatttttgctttttgaacacctggaggacagtgcaatctaacaatatctgtacttgtcagagaaaagtgctttggatcaattttgtttggacttgactgctcgtgctaagttgggacttcttgatcctgtcattggtcgagatgtcgaagttcagagagttgttcagatactttgtcgcagaaccaagaataaccctattcttcttggtcaaagtggggtaggaaaaacagccattgtggaaggattggcaactagaattgcagaagaagatgttcctggttttctcttggttagtcatttcatacatgatctgtcatgcttattcttctcgttcttacactttttttaatgtgggtagttagttctacttaagtgatgaagctatatgtaatacattacattttttatttttattgctcttgttttctttcagtcaaaacgcgtaatgtccttggatgtagcactgttaatggccggggcaaaagaaaggggagaattagagcaacgagttactacacttatagatgaaatacaaaaagctggtgaacacatattttgaattctgtgatgctctgaaagtcttctatattgtttcttaagcttgaaatatcttgcattgtaggggatgtgattctttttgttgatgaagcccacatacttgtcgaatacagcaccgctggacaaggaaataaggggtctggtcttgatattgctaatctcttcaaaccatcacttgggaggggccaattacaggtaactatttatatttatttaggctaatttaatttatttgctttagtagattaatgagagtacacttataaatatatatatatatctatatgtcatattatttttagactattaattgaatgggtggctttgaaattacattcctttaattgatttaatatttgccacaatctagtagtgttagtaattttatccacatatgtgttagattgcttaggttaagccaatattttgttatttgcagtgcattgcatcgacaactgctgatgaatacaggctacactttgaaaaggataaagcactagcacgaaggtttcagccagtgtggatcaatgaaccaagcaaggttaatctcatttcctttattctgcaaccaacagttgtcaaccatcgagtttgttttaatcaaatattatggaatcaataatttcaggatgatgccgtcaagatacttttaggtctatgtaagaaatatgaggcccatcacaactgcagatatactctagaagccataaatgccgccgtgaatttatcagcaaggtatatttctgacagataccttcccgataaagctattgatctcattgacgaggcaggaagtagagctcgtattgaagctttcaagaagaaaaaagaacatcaaactagcgtactttcaaaatctcctgatgagtactggcaagagattagaactatgcaggccatgcatgaagtggtaaggatagtcattacttttgttccatataaataattgtttacaaaatactgatgttactttttcaatggaagcaggttcttgcaagcaagttgaaaagttttaccactcgtggcatggatgatattgatgaatatgattcagactccattttaccaacttcatcaaatgatgagtatgaattctgtcccttaaaatatgtatgatagtgatagtgttaaattaatagccctgtacatcccatttgccaaaatttctgcctaactattttcctaatgatctattagacctccagtagtgggaccaaatgacattgcaaaagttgcttcactatggtcaggaatccctgttgagcagctcacagcagatgatagaatgcttcttgttggtctcgaggaacagctaaggaaacgggttgtgggtcaagacgaggctgtcattgctatttgtcgtgctgttaagagatctcgtgttggtctgaaggatcctagtagacccacagcagcactgctcttttgtggccctaccggggttggtaaaactgaactaacaaaagcattggctgcatgctactttggatcggtaagtgtttatacaataattacagccatctgattccacttggtaaggtggtcattggtgtgtaactctgtttctcattatcacatatttagttgtaatctgtgtatattggattaatgatcttgttctattatttgcatctgccataaacacaggaggaagccatgctacgccttgacatgagtgaatacatggagcggcattctgtgagcaaattaattggatcaccccctggttatgttggctatggtgagggaggagctttaacagaagctattcgaaagcgtccgcatacagtggtattgtttgatgaaattgagaaggcacatccagatatatttaatattctcctccaattatttgaagatggtcaccttacagattctcaggtacgacgtcacattatcgatttactgacatcattgacatgagtggggttcactttcagcaaataaagaacaaaaatcattgacatgtgaatgtatgtacaagaaatgtcattttaagtgaaactttaaagtgaggcataatattaaagcaacaaaagttcatatgcaaaaatgaaactagtcttcagttactgctgtctgaatttttccccctgctagtatctttatattagtcatttcctgatatttggctttaatagggaaaaagagtatcatttaaagaggcattggtggtgatgacttctaacattggttcgtctgccatagcaaagggtagacagaactccattggtttcatgcttgatgatgaaccaagttcatactctggaatgaaagcgattgtaatggaagaactgaaagcatattttcgtccagagttgctcaaccggattgacgaagtagttgtttttcgtccccttgaaaagcctcaggtttgcaccttcattgtcacttgtgaaaacagctctctgatactgatactgtttcttcaatagttaataataattactcctttttccaactcacccttgtacatgtttttcaatccagatgctcgagatttttaacatcatgctgcaagaggtgaaggggaggctggtgtctttaggaattggcctggaagtttcagagtcgatcaaggacctcatatgccagcaaggttacagcaagacatacggtgctcgagctctaaggcgggagatcacatcagtaatcgaagacctcttgagtgaagcgctactagctggaggttacaagcctggtgacactgccattattgatttagacaacactgggagtccatatgtgacgaatcaatcaaacccaagaatgcacttgtctgatacaactcccattttgtaggtagttttcgttccaagacggtcttactcttactcttacttacaggtaacaggcaatcattactatagtttccttttcttcttccccacccctatagttgatcgaggtgggtctcttttttttttttctctctttctttataattaagaaaaaaagtgtaattatgtacagcctcattctttgaagcatatcggtatatagataaaatttactgtataaaaattggtactcatatttttatattcaaagagaaccagctttttgtttaacttgattgatttctaagagttggaatacgagtaatctgtatgtaaattttgtaaagcaattaagaaaatttcttatatataatatatgtcacaaataataaagcaattaaaacaatttgttatatatgtgacaaataataagaatatacaatttacacactggcaaaaaccttcggcctccactcccatctaccaatatagaacaacaatcaatagattaataaaaaaaaaaaaaaaaaacaaagaacgtagtagaataaatatatggtgtcaacccctcgatttctatccaactcaaaacaattacgaagtaggaatgaaaacatgtatttataggactttttcttgggtatatatagaaaaatagaacaaaagcttccgtttgttatgctatcccattctcattccaattccctggtgtgttctgatgagatactaattaaggcgtccaaccaacgtgccaagatgagccagttgtaatactagtagccatgctattagcattagagttagtgtaactgctactgtccaaccccaatgccgccccatctggcatgtacgatggccacacgaaagatggcttgaaaggcggtacatggggaaccgaaaccgaccctgaaatgatctgaatgatggcctcagttgtaggcctttcccctgcattaggatgagaacaagccaaccccagcagcaaaagcctctcagcctcctcctcagtgtagtcactcccaagcctctcatccaccgccttgagaaggcagccttcccggtgcatccaccatatccaatccaccaaagagttgaagctttccttcttggtccacggcctctcgccacaaacaagctcaagcaggacagcaccaaagccgtacacatcagactcgcgagtggccctgcctgtgtggaaacactcaggagcaatgtacccaagtgtgccaggtacaccatcgaggtgttggtcagcgtaagaagtgcgctcgttgtcgatggcacgcgccaggccaaagtcacctaggcgagcgttgaagtgagcatccaacatgatgttgctggccttgaggtcacggtggaccactttcagctcatactcgttgtggaggtaatgcagggccgaagccaccccagttgcaatcttgtaacggaggttccagctcagtggctcctgatccgggccacagaagaggtggttgtctaggctgccgttgggcatgtagtcgtatacaagtagcaatgacccgttcttgtggcaccaccctggtgtaccatcatgcatgcataatgatatcagtaatataattacaaaaattcatgaacacttttcaaaacattaaatgcaactactttctttcacaaatgtcaaatcatcgaacttagtatggaattggatccccaatagaagacagatattaatgaaaacattaatgtgtagtgggaaaagacaaagattaggaaataattaccgagtaagctgaccaaatgtttgtgacgaagacgattaatgattgttaactcagataagaaatcatctttgcctttgagattttccctcgagaatttcttcactgcaatttcgactctctctttaggcaacaaacctctgtaaaccacaccaaaacccccttgacccaatttacgtttctcatcaaaattattcgttgcttttttcagctcactgaaattgaactcccttggagtccccggaaggctcttcagagcccccaaaatcgccggatccgacgccgccttcttccgccgatatatgtaataagacaaacccattaatcccaccaccagaatcaccactccggccacccccagccccactgctattccgatcttctgtcctcgattcccttctccgctaatcagatcatcataacccggtagtttctccaccgttagattccatctcagcacgcaattaagctgatacgagtccccggtggatgcggcgaaacccaggtaggaattttggttgacgaccttactaaggtctagatcagccgtcaagaggggtttactgggtctgggttggatcacgaaactcaagtctggttcctgtttctgctcggccaggaaaacgctgagccgtttcgaaacgccgtcgtattgaatccagaccatatgtaaacgggtaccgacgggaacaatctcaatgccgaaatcggagagcttgacggtcttgatagacttgactgagtttatattgagacccaaatggttatcatccgggtcgaagctctgcttgactgtgtcgagctcaacggcgacgattttgttgctgggattgccgtcagtggtggcgttggtcaaacccaggtactgaccgctacttccgggaggaaggtcaacgttattgggagctataagaaaggccaaaccctctccgggagtcttggacccgttgacccgaaacatgttaaacagaaatgaagtgttgaaagaggccaccttgttggaagactcatcccagagcttgaatgattggttgaagaagattcgaccggcgcggttggccaaggtgaagtttccggccgagtcgggagtcacttgaagagcgccgttacttatggtggccggagttagtacagagaagaagttgtagtaagattggttgaatggcccgaactctttctcaattggtaactccacggtcgccgccgccgcatcttccggcggcggtagtaaaagtaccagaaaaatgaccaacctccaaatcatcatcgtaataatgctttgatcaaattagaaatcaaaacaataatttatatatatatatatattccttaaaattaatttaaactgacaatgctatatagctagctaaaaattaatttagtgtttaatattaatagttataaatttattgtttgatattatatatgcgtagttcttttctttttaatcaaagaaagaataaaatggaactcaacttggctatgggcatttgaaattaattatttaattcaaaggtttgaatggagttttggtctcactttcatcattctgaaactctaggaaatttcctctcattctttttttttttttttgagaaactgttagtctcattgtttagtcatattttataatatataaatgcatgcaaatgcaacttgcatattaatttaaaaaaaaaaaaacatttttgtgtacataaattcttccaatccaagctaagagaataaaatgaaaaaaaggaactaatataccagatcatcaatgtcattgtcttagtagataaagttgattacgcataggattattattttaagctattgattagtgtaactaattaatacaatactcatttaattatcagaaattattaaagtaagattaaataaagcaacctgatcaggttgtttactatctggataacaatgtagactagacttgttgtaattggatataaaattaaattaatttaaattattattgttaatattgaaagctcaaataatcttacactatattttgtcaactttagttatagttattatcacaaccggtgttaagtacgtattttgtccagacattaacattttcgaatatatatataaaatagtgcttattaatttaagcaatcacatggtctgactgttctcttttgttcaaatcttattattataattaattatgattaattatttattactatgattgtgagagagagagaaaaagaaagagagcataccatgagatctatagctttttaatttataaacaaaagtaaaataaagtagaattgattgggaataaattcaacacccaaaagtctttttcttatctttttgatgtttgatcgtgt

SEQ ID NO: 20072 - DNA, 3711 bp, Cannabis sativa
atgtttcacattaccattcccttactagcattaacccattccaaacagcccctaaatggcttcggatcgtgttcgaattgactcgtttaacccgttaaatacacgggtcgtatttggattaacacggataacacaattaactcgttaatgatctatttaaagttattttaatactttaacacgtcataaatagattataaacgtgttgaatactttataaacgtgttattggttgacatgtttaaacaaaatatgcttataaacggattacaatggtcatgtcgtgtcaacccgtttgtaaacgggtcgtgttcgagtttcattttctgacacgattattaaacaggtcgtgttcgggtcgaacatatgcctgttatacatgggtctcgacacgacacaaacacgacccgcaaaaacgaattgccacccctaacaacagtgccatcaaattgtgtcccaaaactcccttcatattactagtttagacagaaaacaaatatggtcaagtgaagagatcactactgcctaaaattcttgtaagattctgctacattgtcactaacccgccattcaagtgtctccccaatttatatattgaaatccaaaatctcctcaccattggaagaaccttgaagcctcatttgattaaaattttctacaattaaacaaggaatgcatgctataaattcataaatctgccaacatgaagaaataaaatgtgataaattaggccctgggattgctgagtatttaagttaggtagatcggatgagctgattagttagaaatcgggctttgctccgttctgtattttgcctcacagctcataaataaaaatattaagcctaagagatgtttccgtatcagttttgattgagtagtattacctatcagaaattcagaatatcatatggctatgcctaaacaaatcaaaggggccaggccccttgaccttttcttgtgttctttgttttgtggtgtcctagtcagtagccaaatcacaaatttgttttatgaggagccaagtaaagaggaggccaaattaattttttcaagaaggggccaacactagaaaaaattaatactatcacaagaaaaattatctatccttttttatttttctttcaaatatttgggaggctgccaagagtatttctgctgctggtcctagtcaacctgcaacgacgatcaaacgagacatagtgcctacacttacttgaaacataatgcattttcttttcaaccttagttttctggttgttttttaaaaggcaggaaaggcgtggttcagaaaagtatctcttgtttgtgtaagagagtcagatagactgacaaccctttgaaggtaacacatgaccacaagcttcctgtggtaataacccatacagttttcagcaatcctcaccccaccaattaagacgcataaccatttttttcattttgaataaataattagcaagaaatcctatttcatatgaatgagctcgagaaatgttcaacatttaccttatctagcatcttggattacagtttaaaaaatgatgtcagcctaaccatccttcctgcaacaataaacaaattatatgcatcagaatactcgctgggtgtttttctttccctctttttattctcaacacaaaacagcactttattgatatcattctacaatggtaaataataaaatcctaaactatttatacatactttctctttcttctatcagccccagtattcctcatatcagtttttggaagagaagatccttgggggttagcatattgcatgggagaaagaacaggaccaggagcagcagccattccaatagttgaagcagccacaggtggcatggattgctgaggtggtacaggagtgggagcaggaggttcgggaagtgatcttggtaatatgtgctttaatcgattgtttctgtagttcttccagaagtaaaattgctgtctatgtgccaactcctgaaaatgataaaaactaggagataagcatacaattgatttaacaaatatgataacaaagtggtacatagaggagataaagaaacgaattcaacacaattcagttattttttagggaaaataaagttaacaggtttccaacaactaaacaacaagaaagacaattgaaaagacatagaaacattaaacactaaccttgctgccaggatgtgccattgcattacgaaagtttgcattttggagaagttcaagaaaatataggcaatgaggatacctaggataagcaaaagaaagaacaatatagtaagctaagataaaatagttcaacaaagttaatttttttataaaaagaaaatacgaaaggataaaatacaaagtttttttatccacaccggcagctgataattaagaaatgccttttacttaacacgagcaaaacattactagcttagcataatttcaaagttctggctcacattataaacttcatgtactccggctgctgccaatactgaaggtacttcaagtatccaatgaaagcctcatcttcaaaatagcgattctgagccaaatctgtaccagaaattcaaatttaaaaaacgtagttctagtgttgtaatgatttaggattttcattataggtcatttcaaatttgctttctagttttacggaagtattcaaatttaaaaaatatagcattgcattctctagtgatttatgatttttattataggttatttcaagtttgctttctagttttccaaaagtatcacaactccgtgacctcttatggattagttgtacgtaacattcaaagcagataagcaacttgttagaatatttttcatcatatttgtactcactatttcaatgatacatgcatcgtttaaaaaaaaaaaagagagaaagagagagaatgacagtatcaaacatgtagaacacaggcttttcttgcttggttaagcattttggtgacgatcttatagatagttacaataacttaataagacattgtttaactgttataacactctaaagaatagacactacacaaagagagtaaatagctcctaatatacaagttatggcttaagaatctcttggacactacacaatttctatagttttctgctctctaaatgatattgacgatcaggcggggtgccagttcggaaatttctgactagtgaaaaaaaaagaaggaactgaattgaagaaaaaagactcacaatggatgtaagtagggttagcaaggcattgaacaaactccagttcaagcaagaaacgctgccgcccatcatctggatccttgtatatgctcttttgcctacaatatcatataaattttcaaattttgacactaaatttgtttacaaaattgaccaggaaaattaacctaaaagaggggaaaaaaaatcaatttttgttttactaattttcttttcgatttcctttcccacagtttctcaattagggtaatgtagagagaaagagagaaagaatataaagagttggtgcttacgaagatggagattcggatgaatcgtcactatctttgccagaagccatagaaaagctcgagcagcttagaaaaaaattcaaattatttttgaggaattaattcaaggaaacagatgaaggggaggctccttaatcagaacccagtctgactcttacacacgcagacaataccccgcgaaatggtggtgatgggcctaacagctgggcttgggcttgggc

SEQ ID NO: 20073 - DNA, 4806 bp, Cannabis sativa
gctgatttcaactttatcctggaccacatcacctctaaattacagggttggaaggctaagacttcatctaaggctggccgagctaccctcatcaagtctgtgggtctggcgatgcctatctatgccatgcaaaccacgaaattatctagtcggctggtcaagaggattaatgttttagtcagagatttttggtggggtttcgagaaagggaatcatggactacatctaaaagcttgggataagctgtgcctacctaagtctttgggcggtttaggttttaggaaaacagaagaaatgaacctggctttcttggccaagtggggttggaacatattgaaaggtagtcagtcgttatgctgtaaaattttggaagccaagtatctaaaagggaaagactttctcagttgtagatacaaagactcgaattcctagttttggaaaaatgtagtgaaagctaaagcaattctaaggaaagaggcctttaaagtggtggctaatggtagggagacgagcatctagagggatccatggattccccactttaaaggttttatcccaaaatcgaatggcattgttttaaccactaataactgtgtggttgatcttttgaggtctaatggcgactgagatgtaccaaagctatataacctttttgaccaagatactatttctgcaattttgaagagtggcaaaccctcgggccaagggtagataaatggatttggaccttagaaataaatgggcagttcacgtgcaaatcggcttacttgtctcaagctttggaaagagctccccactgtgaggttgctccttcgctctaaaataagttatggaatagcaaaattttggagcggcacaaaatcctttggtggtgcattctctctaatgcgctctctgttagatcagtgattgaaaaaagattccacatagaggacacaagttgtcctttatgtgggatgggggaggaatccctggaaccccttttcctatcatgtgacgtggcagtacatctttggcgcgcttcaccgtggggcatttaccctatctataataatgggattcgggtctgagattggatcaaatttatatggaatctcactaataggggtatccgagtagaaaaagtctttctgtatgcttcaattgttgttgaaaccatctggaggatgcgtaatgatttgacacataataacacacctttggatgttttgaaatgtattgaccagatttgtacttcttatgcagagttacatgatgctttattgccttgcccaaatccaaccttgagggtgtcctggaatcctccccctcaagattagataaaattgaattgtgatgttaaggtgggccttgagagcttgtgcacagcagtggttgcaaggaatcacttcggtgaagtgattcaaattaattataataaactataaaacaacaaaaaataacaaaactcaaacttcatgacaaattataaaaaaaatataccgaacaatttactgaaatccgtatttttataaataaaaaagttcaaatcttaaaaataaaaatttctcattattaacatatttttataatttttttcaaatttttaatcattttaaataattctctcctttttttattataatgttggtaagcaaaaatatgtaattacactttccttggtttgaaaaaaatatgtaaatatgttagttctgtcatttataccaaaaaaaaaaatacaagagttaaacttccaccgataatgccaaccaaccaattctgaggtcttgaattagccaaccaaagttttcacctttaagctactctctctacctacctaccctttacctgtcaccaattccaatttaatgactctctctctctctctctctctttcttcactctcaatctcatcatagcttaaaacaatcaacaatcctctctctctctctctcactcactactatcatttacaggtcttctgtgactaccccattgaggtgattagccttccaatctgatttgagccatacccatcttcatattctcactccccaacctaaaaatagccagaagagccaaatgggtagtgatggaaaggtcttcactttggcccaagtttctgaacacagcacaccaaaggactgttggctaatcattaatggcaaggttatatcttttcctatttcttgatttgatcccaagcttttaactttttgatgattttatttctgtgtttttcttctgatcccatttagagtataaatcatttacatttgtgattgaatttcttgaagccactaaaaataaaaaccccttctttgaaatctcacctggcatttcatttgttcaaattgttattttgccaaaaaagtagctttttgccaacactaatgttattttgcatgtgggagtagtgatgatggattacattacatgttaactattacttttggttgtttaattattatatatatgtatgtatatgtacacttttctttaagtctctaaatgagttttttaaagtttggatttttttttttagttttaagtgaattttaaagcctttgcatgtgatttaactcattgttatgagttaactttatattctaggatgcatttatatgactttagttcatacttcattatccacttaaacttactgaagaagaaaaagttgttagttgtagattcttgctttgtcatctattattggacttttgttttgttgatttaagttagaatcttttgttgtgattttgattttctggtttgggtattgtatcttcaatgttatgacttatgattaattactgcttgtatgatcctgaattttcttgtgaccttctccagtgttaaatattagatcattagataatcactaaaggtatgtttggtcaattggtcggaaggaatgaaaagataagaataatacaaatgagaatgaaataaagaataggaatagaattaaatttataatgcaaataaaaagttattaatttcctttccacttatttcgaaatggaatagccattctaccaaatagagaaaaattcattccattacaatgacagtactttaacatgcaatcaaataaaggaatgaaatgaaatttgattctttcccattccattccattaccccaacgatacgcaccctaatattgttgagaacatgataacaagagaagggttttgtcacctctccaatttttggcccgagaacttatttgttgaggagaaactgatccaattcgaagattgataatgtatttgagaagattctcagctcttgtattatttgtgacttgtgaggttgattttccattttagttcctgagtttcttcatatgagataagctgaactgcatcaatgaccataagtttcaagaatagaaaacgcttcaaatataaggacttctgcctgtttatttgcttagcttaagagtgtctgtttagatgttttctttgaagaatgttaaggccatagagagtggtcttgtgttatgttctatgttctaggagggatctgactaaaatggtctcttagttttgggattggaaacatatgtaataacacattgctatcctaatatttgatatatagttttgagttactggtggcattgcttctgagcaattcgataaaagtacgacttctcatgctttttgtttgtttggtatggtatggtacttctatgaaatccatgaagaattagaggtttgatcaatctatatagttttcaaccatacacaatctgtggccttggtagtcgatcacttgtattccattcgttacattagcccagtcgggtttgaaccccagatctcttacaacacacaaccaaccaacttcgagttgattcgaaccatcttgacatggctctcattttctttaacttttctaagtgagttggattttcaggaaaatataagagcagaaattgaaatataagaacatatgtccctaccgaaatcttaaacagaaaacagttatctgttatagctcagtattaattttaatagtgtataactgcacattgctgcagggcataggtctaagttttaaggctcaacaccatagcatataataggtatttgccaagtcagctggttagttaagggggagggagagcaatatgtgtaaggtgtgaagaaatcggttagggttgtaacccaagtgtgagtgaacatggctctcgaattgcccgggctctgtttttttattcgataggaaattcttatcacgctattagtgtaatttagtagagggtctcgtatctttcagtttaaaactaatttaaattcaattatgggggtcctctttatttgtaattggtcctcatttttcaatgcttcttcacaagttttatatttaagatgaaatcatttaaaagctttatagggctaacctttctttttggtgaaaacaggtgtatgatgtgacaaagtttatggaggaccaccccggtggtgatgaggttttgttgtcagcaactggtatggaatcaaccttttctgtttgctttattaataagtagcacaaatgtgaaaggaagattgcttagatgaaagtgatatgttgttaggatcccacattgaccgagtatgagattgggagtgagttttactggagtgataagtttacatttatgaaaagtgaaagtgaacacctaataaaagtattgtatatcatatttttatatagtattatgtttggtattgacttgtatgttaatgtgatctaatacaacgttcaaaacgaaccctgaaaggcttattttgaaaacacttctactattttttcattgcaaaagaacccaaatca

SEQ ID NO: 20074 - DNA, 4533 bp, Cannabis sativa
aagtgtttaatatccatcttctatcaatggattcaaactctatggactatgagtttagtattctgtgaccagatccacttgcaatattctaagaactggaggttgccccaggggaggttaatttttggcaaccttctatagtatgctatgtactgggatcaaatccccctctgcatatattagaaggttttgccaatcgcatatggaaagaccaggtggataaggtgcgaatgctctcctatggagtgtttatcattcggttcaggtctatggaattcagggatcaggtgctcaatggaggttatatctttttcaatcgcaggccggtgatcatgaagccctgggatgcagacactaacttcaaaaaggaggatgtcaagttggtccccatatggattcagattgagggtcttgaactcaaatactggggacagagatctctcttcaaaatagtggggcaaattggcaaaccagtgatggttgactcggttactcgggatagggatcgcttgaattaccctaggattttggttgaagtgcttatgaaccagaatttccccaatttactggagtttgaagatgaacatgggagtaatacaactgtgggagtgaagtatgaatggaaacctgacctctgtaccaattgctctggaatggggcacctggctgcagattgtaaaaagaggaatagtgctaaacaagaatgggttattaaagaagataaaagaaaggagacaattattgtagatgaagatggtttccaggcagtttcgaaagggaagaaagtgcaagaacaaaaatctgaggttatggaaccaagtacttcgaatggttttcaagtgctagctgatgtgattgatgatattggagatgttgaactacaggggactaatggtgtaacagtggataacacaagaggggggggaggtccctctcttggttatggataagttccttgtttggaatgtgcgaggagccaacaaccagcaaaagcaacaacagattaagcagtttattcgttctcaagaggctgggtttgttggtcttctcgaaacaagggtaaaggttcacaaacttggatccttttaccttaatgtctttaatgggtggtgtttctcatcgaacatagcttggcaccaaggggggagaatagttatagcctggaacccaaatcgtttcattgttgatattatcaaatgcacaagtcaatttatgcacttgagaatctcaacaatggatggtacatttaacagtttattcactgtggtttatggtttcaatgataggaatgatagaattaagctgtggaaggatctaatgcagctcaaaacagatgagaactgggttctaatgggagattttaatgctatcacaactaaagaagagagagtgggtcacagagttaaatactttgaggaagttgaatttatagactgtcttcaaaactgccagttagaagacatcaaagctactggatgtttttttacttggacaaataagcaacaaggtcaggatcgtattttctcaaagattgatagaatcatggctaatcaaagatggttagatgcttatccgaatgctgaagccctgtttttaaaggaaggactatatgatcactcacctgggattctggccttatttcccaaatggaaatgcgggaaaaagccattcaagtattacaggatgtggaagtctcacactgagtatgatggcagagtaaatgcagtgtggaatcaacaaatacatggcaccagtatgtatcaaattgtgcaaaagttgaagcttttgaagaatgtatttcgagagatcaatcagaaaggcttttctgatttgctagcaggtttgactcaagctaaacagtctatggaagttgctcagcatagtctacatgcagatccacttaatgaagagttgcagcaacaagaacttgtctctagaaatgcttttctcttagcccagcagaattattcctcctttttacagcagaaagcaaagattaattggcttaaggatggtgacagtaacactgcattatttcatgccagtatcaagcaaagacatagacaaaatcaagtattctccattgagaatgaatctggggtgcgagtctttgaaccagaacaagttacagaggcttttgtgtcatactacaagtccctcctgggttcaaaaatggcaagcagaaagactgtttctaacaagatcctaaatagaggacctagagttacttctgaacaagctcaattgctctctagtccaatcactaaggaggatgtcaagaaagttgtctttgagatctctgggaataaagccccaggtccagatggtttttcaagttttttcttccaagacaattgggacctggttggagaggatgtatacagggcagtttcatctttcctctcttctggtaagattctaaaagagataaattcaacaatccttacaatggttcctaaagtaaagtgtcctaacactgtcaaagattttaggccaatagcttgttgcaatgttatttataagattgcttccaagatattgtgctctagaatcaaatggattctccctgatctgatttcaaaatcccaaggaggtttcattcatggcagatttatagggcacaatattatgatctgtcaagatcttgtgaggcactatgggaggaaatcgaacaaggcaaactgcatgatcaaactggaccttcagaaagcttatgatacagtggaatgggagtttatagaggagatgctggttggacttcagtttccttcccttttcattcaaactgttatgaattgtgttagatcccctagattctctatcatgtttaatggttcggctcatggattctttgaagcaaaaaggggattgagacaaggagatcctatgtctcctttgctgtttgtgccttggcatggaatacttatctcgattattgcaggaagttggagacaaaaatgacttcaattttcatgaaaggtgttcagaattgaagattaatcacttggcttttgctgatgatgtcatgctcttttgcaatggagactttaaaagtattttctacatgcttcaggggctgaaattgttctcattaacatctggtcttcacccgaattcccaaaaatcagcaatatactgcagcaatatgccacaggaggaggttagtagagttcttttagcttctgggtttacacagaaagaaatgcctttcacctatttaggcgttcctatttgtgctaaaagaatttttggaaacgaatgtattgctttggctgaaaaaatgacagcccgaatacgaacttggagctctaggaatctctcctttgcagcccgagtaattttaattaactctgtgctcctttctattcatgcttactggtgccaagtgtttatattgccaaaaaaagtaatcaggcagttggaatctatctgcaaagcttttctgtggaaaggtcaagctaatgcaacagggccggggttaattgcttgggaatccctttgccaacctaaagcttctggaggtcttgggtttaggaaaatcagagaatggaatcaagcggccatggggaaatacatttgggcagtagcacaaaaacaagatagtctttggctcaaatggatcaatagtgtctatctcaaaggtcaagagtggtggagctacaaggctcctgcccaaggaagctggtattggaggagtattgtgaacttgaaggatttgtttaaggaattggctgggccagggacaggtactcagttgcagcattatcagattaaaacaggttactccttgctctgtccagttcagaccagatagtattggtctcaacaggtctggggtcgtttaaatatcccaaagcattgtttcatttcctggttggcaatccaggggagacttcgaacaaaagataggctaaggagaatggggatgaacattgaggaacaatgtgagttatgcttaactcagaatgaaaatgcagaacacttattttttacttgtagtgtttctgctgtttgtcttcaagagataaagaactggctgtcatggcatgttgcagctaataacatcttgtctctaaccaggtggattggtagatcaaaaatgagcaagtttaagaagaatttatttgctgctgctcttgtgtgtttgatatacaatctgtggaaagctcgtaacctcagtttgtgggaaaaaactaaaatgactgcaggaaaattggttgaaggagtaaagaaagaggtcctcattaggactgctgcagtatggcctaagaatgtctcacccgatgacaccaactggtttcaacatttataactggtggttttgttttggtttaatctgtacagtttcaaggtagttttcacaaggtttaaattgtatagttttgtaaagtttaaagtgtaggccgtgttggcgctatttgtttgtacaaattctggttttgagcaaataaaatttccctgattcatcaaaaaaaaaaaaaatattctaagaactctttaatgtaactaaacattagtcatcaaaaagacaca

SEQ ID NO: 20075 - DNA, 1678 bp, Cannabis sativa
  modified_base (1162)..(1165): a, c, t, g, unknown or other
  modified_base (1288)..(1310): a, c, t, g, unknown or other
aaatagaaaatcatttccttaattagaaaataatttccataataaaaatattctaatagaatgcactaaaaatatagaatgtagtttacaagtttttcatttttaaagtgttttcttcaaaagttagtgtgtaatttttagattattacatttacagttaagtagttacaatatgttttagaatgtaatgtatgtttgaatatgagatgtctaattataattcctgttataatttctataaaagggataaatttctataaaagagataatgatgagaacaaaattgggagttgcaaaaggaagagaataaaaaggtgataaagttcgaataaagaagatagagagtgagatagataaaaaggaaaaagaaacttactacagtgaagctatgtttggtaggaaaaaaatagagtagtatggatggagagttttgaaagaatggggagtaagatagatggagaggataattactctcttttgttttatttggtattagaaataaagttaaaaaaataaatagtaaaataaatattaaaattattattttaacagtgatgtgaaagttggttgcggattcatgtgcgttgtggcattggttagggactacaccgagtcttatttgtgggtggccacaaacatgcttaacttctctgatctcctcattggagaagctgcagtctgtctgttagctatgtagacggttgtttcgtttcaacacccgtttgtgatggttgaaagtaatttcgagacagttatcaagactttgaagggaatcatcttggagatatttgacttggacgtttcatacatttgtggtacaaaatattggaagatagtgagtttggaaataacttgacagaattcaaacactcattttgaagtttctgaaatcatcctgggcgcacgactagggacgcctcctaagtcaactgctatgattcaaaactatttaactctgatatattttttctcttgtcacatgtcaaacatgatgtctacatcattgagatcaattttcgagttaacacatatattatttatttcatcgataaaaaattaatatataagtgtatgaaattaaaaatataagttatttatgctgcaaatatttcaaataaaatataggaacttttttttttatttgttttttgttttttttttnnnntttgtatttttacggaattttacaaaaactcttattgcaactagtggagcaatctaaatcgcaacaaaaaaatagtataacaacccatacagaaaccagggaaaccactttagaaactcaaannnnnnnnnnnnnnnnnnnnnnngtatatgagataattctcctaaaatatatgtagggattatatttttaatattaataaaaaaattaaaatagtaaatacattatttaaaaataaatattatgaaaaaccaaaaaaaaattattaaaattaatacaaaaaggtgtaaaaggaaaattaaaaaagaaaaaacaaatatgaatagtaaaaaataaagtgtcaaatttaccacaatttaaggacgattttttactttttcctattttgtagtgaccatccttttttatacttattatttattaataattacaccatttccactttctccttaattattattacactcttgtataattacaccattattattaccacaatttaaggacgatttt

SEQ ID NO: 20076 - DNA, 3337 bp, Cannabis sativa
agtccccttaaaatataagataactatactagtgtattgatttagttctaattttatccctcaaataataaaatctaacatatttattcatttaaatttccccctctcactctttctcgtctatatttctctaggaaagttacacccacacacacattcaagtcagcccagtcgaagcatccatcgtcggagttagctggaccaccgtactccacaacaagtgcattagactaccctaaacacccactgtagcaacacatttcttgcaaaaaaaaaaaaaattaaatatgtaatttaattgttgttagatttagttgtattaaatagatctacacgtatgctacacattgtttgttgattttgtgtttggaatgaaacttcacattacttgtgtgttagagatattttgcgatatatttatgaattaacgatatatttagttactgatcaataagtttatttctgctgcacttgagcatgatcgtaagccaaatcacttaaaaaaacactttgttttgtattgataatattgttttgtacgtacaaatgatgagatcattaatatatacaatactaataagacattaatgggagtaactgttaatcaatttgttacaaagagttaaaacatctaattaatgtagtatactagctatatatatatatatagccaaagtctctaatagattcctctcaactgtttaattttaaacagaaaacccaaaaggaaaataagatagacatgacctaagaacactacagtttcaatatccggtggagctataaactgtaatgcatgtacataacacataacaacagaaaaaagtaacacataaatatatgtgttaagaaataagtcataaccagggagtataagacaaatacaaattatagttaagaacaagatcaaggtattaacccagtaaaacgtcacgaacttcatattgctcataactgttttgcctggaatctgagcagaattattatcagtgattttggacatgttgaaattcatgtcaccttgccaaacaccccctggaggacttagggcagcctgataagtgaccgttacaattagtacagcaactacaagcagtaaatttcgtctttcttctgttatgtaacgagttctaaagtaatcactaaagccattcaaaattcttggaaatactttccatcggttatgaagtaaattcttgacttgtctgttgtttacatgaatttggccatttgcaatatctaatgctgttaatccgtttctgttcttggcatttatctttattccgtagaaataggagaatactattttaagtacctgcagaaaaatcacaaaattaataaatgttatatgtattatatattacacatttttatagtttttaatgtagtttgaaatttctagtaaaaaaaaaaccttatttgttttgaatactttaaaatatcctaaacatgcgaataatgtaattattatagaacatcagatatatttctaaaacaactttattaatctaaaattttctagcaatattatagaaaattatatggataaattgcttgtactagaaggatttagacccaacaatactcaagaattatacggataattaattaatatatatcatcaaaccaaactacaacaaattatatatctattaatattattattatttttttgcccagttagaaaatcaaagtattaaagtatatatattgctaaaacatatacctgtggttggttagtgagggcagcaatgtgaagcacgttgtttgtttcatcatcattgcatttcatcaaaattttagatgggattttatagcctcttcgacgtgcactgcaaagtccttttaccagaatttcaaaagcttcaggtctgccatggctcacagcaacaaacaaagcggtttcattgttaaccgttacatcttgaatagacagtggacaaagtgataggaacatcttcaaaaagtcaaggttcccttcttcagccacacaatgcagaggagttttaccctctctacctcgaactcgaacgagattgctatcgacccgaacaagccgattaaccatttcggtagtttgtggcctattttggagagctagatgcaaaggggtgaagccatctaagtttagcttcttggcaaatgatggcttcaacatcattatttccatggcgaaaaggatttggttatgagaaacagcaacatgaagaggagtttcaacaaactgttgctgatcaattctttcaagtatacaaggatcgttatggattgatctgtataacatctcaatatctcccatttcagcagctcttcttaacatctcattcattttaaaattgtgttgagaaaaaaatttatgatgacaagatgcactataaaatcaaaagcctcagaaaaagccaaactaagtatatatttatgtatagatatagatattatatgacaaaagggctcacacagaatgcgatcctttagctagaaacttttgagaaatccaaagtgaataaattttctagtggaggagataaggaattgaagcttattaatttataggagttgttaaaataagagaaagacatatatggacataatgtcaatttgaaatttcctttaatagctaaaaaggaacaatgcatacacttatattttataattagttaataattttttttatttttattaaatcaaaataaacaaaatgtatgagacctaattttcgagtattgttattagatactttaagatgtaagatattatatcaatatagcatgttgtgagcggttagtagttgtgtattatttaataaatcaaaatgcacaagatacaatattgaaaaacaccaattgtaatattctatctattgttaatatttttctattaaaatatactaataacaatatatcattcctttgttctacgcatgacacatttctttaaaaaagtaaactcattgatttttgtttagtttttaggcatgatgcttcacctcagccattcccaccccaacaatcttattatcaatgagagcacattcatttgattttttatattatatattctcttggtcagccaactacttataattttatcaattaaatttggttcaatataaaatacagctaccatgagtgtttataaaattatatataacgtttgtacaattttggtcaatttatttccttttggggacagtatatttatgcttagaaatccaatactaaaataaatcaagttaaaataattttaaaaatttatttatatatatattttttgaaaatcttattattctgttatattcttttatgttgatttttgtaaaccagaacacgtgtgtaaa

SEQ ID NO: 20077 - DNA, 3489 bp, Cannabis sativa
  modified_base (2466)..(2476): a, c, t, g, unknown or other
gtttattagtaactagttgctatattgatttttcattttataagtagtaattcttaaaaaattaattagggttactttagtcttttcttattcttttatgttaatagcctatataagttataataacccttaattattatttgtgttatttactttagtgactttgtaattgagtaaaactctagcttctttttattctatctttttgttcaaataattatgatggtattcgagctttgttcatgagagtaaatttattaatcatataatttcgctcatctaaagctcatctagttcaacagaagcaatttttgggtagggtgcttctttgtattattattgtcagctgacattgattataatttgggaaatttataattttcatacattatataattttattacactatataatacaaaataacttatttacatataattatatatttaatttatacataaatataattttaattttttatacaatctatatataataataaatttttcctatgtcttatatactaaacatacataatgagtggtatattaaagataagctcaaaaaaaggattttaagttgggaaggtagatatctctcaaaagcaagaaaatagattatgctcaaaacttctttttttaaaaaaaaaaaaaaaagattatgctcaaaacggttacccaagtacttccatactttgcaatgtcagtatttcttctccctataggaacctgacctgtcatgaaattgaaagtttaatgagtggccactagtagcaatctaagtcaaaacaaagtaagggtataagttggatgagctagaaaaggttgggtaataccctaagatttaaaaactggattagcattaactctaactagtttgattatattatattatattattatataatttaatatgtgaaagtatactaataaaatatagtattttaagacctcgttagtgtactaggggtatttttgtaattttgacctgagaagggtaaaactataatttttatgacatattgtgcttatggactatattattatatagtatgtttattctatctatctgcaggtattttttgacaagtcagtgcagtataatcacaaccgagtattttgggccaaactgggttcgggacccgaaatacatttttgagattttattttggcatttatttgataaaggaataatctgaaaaatattgtgtgtgtgatttatgataattttgcctttgatgtgtgcatatgtagttttattggccttaagggcattttggtcatttgaccaactaagacattttcaacaaaatgcaatttttgagaaatttgaaactcattttctggttatacttagccttgaccgctcgcccccctccaccctctttccttcactttctcttcaaaaattctcaaatgaaattaatttgtaactttgtgtggattagcataattgaaagcttgtgaatcttggtaacccttaaatctctttttttaaggaattctgatttggtgaagtcatggaagctagttcttggttaattcttagcttttgattgcatgtgtttgaaaactatgtgattgttgatgttttgttgaaggattgtgttagtaggatggaatttgaattgcttctagcatgattttaggggattttagggttgtgatttgtgtttgaattctgagtttagctctgaatattttttggagtttgtagttggtttaaagctatatgatgttgaggaattgtattgattttgtttgatcataccattagacaactactctcaattgaaattatctctgttgacattgtaaagtcaaaagataatattgtggatccactaaccaaatggttaaataaagagttagttgaaaaatcatcaaggggaatggggctaaagcctatgaatgaataaatcaatacaattgatacccaacctagttgactggagatcccaagatctaggttcaaagggacaactaaaactgtaaagactatggtggatcattgtgggggttatcctcaagtccattcctatggtgaaactgatactcgtaaggaaaggttaagctatgcttttaatgattcttatgcgtacgtcgagcagagtaatatgagttactcttaaataagtaatcacctatatgagagagaacatgggtcgcttctataggaattgattaaggatgaattcttagaatatctcttgcaaaatcagggaaatgttcaaggccaaaacgaacatattagtgagaactaaagtatgctatgagagattcctatgtgtggtatatcatcgtttacatgaacggcagaacagttcaaagacatcgcgtctactgagcagctagtaaagtaaatatactcacacgagggaaggttcaaagggtacctatcctatgcaggtttcaaacgtaaaactcttttacaaggtctaaactatttgttggttattctcgagnnnnnnnnnnntcatgtgggggattgttggaaaaagttgactttgtcaactcttttgtttgaatgaaaaatttagtggattttaatcccacatcattttttaagtttatattggcaattttataggctatatatagagcccttttgcctttgatttgaattattgttttttataatgataaaccaacaagcatacatgccctcaaataccaaaataattaattaaaggaccccaaaataatctttaaacacatattcaaagtttaacattaaaggaatcaaaatacaaaatcatacgtagaccaaaactaagactttctctttatatttaaaaatataaatcctgggatacaaacaacaaaattacactattattaaaacgaatataccattttcaaagaataagaacagaaaataaataacctcatttcttatcttacatcacttcttcttttttgtcttgtatttactggacgatgatgattttctacacatttccttaacccatcacattcatttttaaaaaatgatttgtgatgggtcacttcttcttcattgttgaaaagaagcttgcaagagttgcatgtgattgcatttgtttctcttttatgtttataatgttgatgattcaatagtgtcgtttatttcttaaaacttcgatcgacttgcaatggacgtaagaaaattttgatgatagaactgctccataaattagatgcaagaactaatattaaagaatgagagagagatagagagagcaattacaaaaagagagggatgaaattgtaatgagagagagaacaattacagaaagggagagcaattaaatagacagagacgaaaatgtatcatatatataaagtatattattaagacacatttttttaactaaatatgattaaattttttaattaaattaattatttaattaaaaataatgataataacacatttaatttcttctatttgataaaattttataaatagaaaaagagattttcttagttagaaaaaaattcattctt

SEQ ID NO: 20078 - DNA, 3403 bp, Cannabis sativa
aagacccggataaagagagtgtttttaacaatcttcctatacttaacaatatctcatccattgttatgtgatctggcaatgatgtaattccatgcagtggtgaagagtggaatgagagaaaggtgcgtaaagatgataacttctcaagcttattgaactcaaactttcccacaacatatgacaaatgtctagtcttccctgtaaggttgtttaagttactattgtcatccaatcttacacaaaactcacctgatacaaaattggctaaatcatggacaagatcatgcataaaaattgttgattcgttccaacttgattgttgaaacaatgatcttgatattagagcattgatgcattcctcaccaacatcttccattctttttgcagacttatattgatgtaggattccttctgccatccacaacaagattagttgtctcttctcatatttaaaacctttggggaaaattgaacaataagcaaaacattgttttagatgtgaaggcaaacattggtagctcatccataaagctggaataacctcaacactcccattttcttgccaatgcaaatcccatatatcatttctcagaatctttctccattcctcttgattaaattgagtttgcaaaagaccagcaagtgattttattgctaaaggaagtcccttacattatttcgcaacaatttcactaccgattttctttagttctggacatgcatcatccaactccacattgctaaaggcgtgtgttgcaaataatttccaacaatcattgtcaaatattacttgtaggtcatatttggcatttgaatgatcgaaactagcgcaccaagttgattgtcaacttgggcatcgggcccaacaccaatttaacctgcgtgttgggccctgtttccaaggtatcgggtttgtggttttctcctcgagtttgcttgaatcttcattattttctgatgacaaaaaaatgcccgaaatattttttcgagaacttgattggaaatagcatgttaacctgggcgctgggtcccagttatggcccttcaaaagttctgtttggtccctgaaaatagttaaattttaatcttttttgaaaacggagaagatactcgaaagagttctcgaaaaacatcattagttacggcccgggttaacaaaatatcaacctaggtgttgagccttgcttttggcacccagaaagtgttgtttctttctgaaagtacctattcattgttttcgatgaagattaaaaagatgcaaaggtcggatcatcgatctgatacttggaaggcgcctaggtttacaaggcacggggtgcccaagcactgagtgctctgggtgctcaaaaatgaacttattttgaatctgattttgatgccttaaatatgtccgtgatatgcctaattgatgtcccaatgcaaagtttgacccatttccactaagacggtctcgaaaattgaaatcatagttgggaatgtcaacttgggtgctagatgaaaccctaggtgcccaagttggattccgaggtgcatgttcgtgtaatttcaattctcagtgcttggatttgattgctctatgccttcatggtagataatagtgaaagatagtagttgggcgtagggttagggtcacttcccaagtcaactgctatgactcaggttgacttaactctgtgatattatttttcttgccacgtgttaaacattaatgtccatgtcatcagaaaaaatttgcgagttgactatagtatttttatgagcaaaaatttgaatctttaaagaaaaacttttattcctataggagggtaaatttggaaaacaatagacacttattgtacgacaccgttttcgttatggttttgtatatgaacaagaattatacacacgtgagaaggagagactcgcggagatgtcgttggtagattacgcctcgtccgacgacgacgacgacgtcgttccggttgatcccgtcggagaagacgacaaggctcaacctcaaggtcctcaacctcgcccaaaccacaaccagctgtaatcttctccctctttcattttcacacacagaatcattgatagacttttaactttattattaggtttcattattccatttctgcatttttcaatttcttaaaatttcaactgttctggcaataaattctatacaatcatgatcagttactgagataaagctacaattttggttagaaaatctgggcagaaatgttttggggcttttttgttttgttttctaaaacccttaatggagtttttttctttgtttatggatagtactgaaccaagtgagaagcctgaacctgaaattgtgaaacttcctgatgcttcagaactgttgaactcttctgaattttcatatagttctttgagtggtcaaagtgcatcatcatcatcatcatcaaggaagagagacccagttggtttagcttcgtctctgccgcgcagtaaagttccaaaagggattttgagtcattccaagagtgttccagatactgttggtggcattcttgttcctccccaacttcgtggaaggtcagttctttgtttaaatgatttctctgcaatttcatggttttgtcattgctttatgtgttaatatgggagactttgcttctgaatggtatttccaatggaatggtttgagctaattttagtttagtttatgaatgatgagaatagggaaatttgtcgaacaaataacatgaaaatattaaattagcaaaataacaacattgtatggtcacacacaatgtaaatttatggttgcaaaacgaccataatgctctttttgtggtcgcctagtgtaatttttagtcgcttgtgcgatcatggttagtttgcttatttttttcttagaagttaaatttcatagtgactatttctacaaaatactttgagaatagctgtttatggaattggaaggttttgtatgagtcaaaatggtggagttgtaaactgcagtttgtgaaagtgaatttgcagtgacaacattggatttcattttggtaattgatcccatattgaccatgttagtagtatataactatttgggcatcctcctctcttagattagcttttgggagtaagttttatcttagtggttgtattaagtggtattagagtcatgcaccttcaagtgagagtgacgtcgtgaaaggggcaatctgtggattaggccaagagttagtgtgggagactttacttctgaatggtatggtggtatgatgatgtagcccgattgattacacttaggaaatgtaggaattaacagcagcgaaaactagtagagaaccaaaggaacactaactgaaattatattgcagtaagcagggaattacagtgacaattctagacaatttgagaggtctagtctctccatgataac

SEQ ID NO: 20079 - DNA, 2407 bp, Cannabis sativa
  modified_base (1953)..(1957): a, c, t, g, unknown or other
  modified_base (2172)..(2172): a, c, t, g, unknown or other
cataaaataataataaaaattagtgctaattcctttactaatccaaattactaaagtggtcattacataatgactccaaacatttagaaattttattttgtaacaaaatatattttttaaaaaataatgttaaaaaatatatttttattttaattttgagtgttaaacgtttttttagtaaataatattaagaattttattgcaaacaatcaacactttacaactacaattagagtatataacaattagtttatatatacccaagttgtataaccaatcaacagcatctatacttgttttttccctttgaaaatgaaaaaacctaaaacaaatctctcttttaattttatttacaagaaaatttacattatacacacagacatgccaaagagcatgattgctagcctcccaaatactataaaccagtgcatttactacaccaatatacacttctcttctgcacttagatcttctataaattttcacccatttcaaatttttcattcaatctgactgatgggtattcaatccacaccaaatacaaagagccttctgaatttgcttactaaatctgcaattaaaaaataattatttttgtatttccaactctaaattacaaaataagcaaatcaccttagaaatatacccaaatctaaagagtctatctctggtaagaagtctattccaacatgcaagccaacttgtgttttgaatagctttacctgttccaaataatagagaaccattttctatcccctttgtttcgcggccagagcaaggtaaaaatggtagcaatgttgaacttcatgctggaaaagatgactgcctccatttaacctctaattatgttatttgtcataactattttcctctaacaccaagaggtattctgtggagccacataactccaccaattttactctttaatatatatggaatgaacccatctaacccacacattgtcttttttggtggcaacatcgcacacatacttactaagagcaccaatgttccactgctcaatgtttcgaaacccaaggccaccatcctctttcgattgacaaattattccaagcaacaagccagaactaccataatcgttctcacccttccacaagtaatttctacaaatggcattaatttttctaagtatattcttagataaaatcatgatctagacccagtaaatatgaatagctatcaaaatacatctacctgcataagaaatatgtccagagctcatattaaagtttttgttcattcatatataatagtttaattatatttggaaatattttgactaagaagtgacgttaaaacctaattttatttttttaagaaaaaatggagtccaaaataaattttttaaaaatgtgtattgtccttatactaaaattatatagggtttaaaataatataactctcttgtaataaacgacacttttggtgtatttaaaaatattttgagtttagagtaataattgtaatcttttgagaaacacaacatccaaaataaaacttttaaaaatgcaagaataattcaccaaattaaactcgagggttcaaaataatataaaatcaagtctagcagaatttgatcataattatggtagcgcaaatgctttttctcttggctaagcaatgatttaatattaaatcctctttgcatttgactctaattcattactcaattgaatacaatatgtattcagtatgtatatacaaatattctctctgaaccaaatttcaccatttattttggtattggactaattgtcataatttattagggcccgcctgagcccaatattataaggcccacaatctaaaccaaatctttttttgaaaaattacaatctaaaccaaatctaattattaagatttgggattatttcacaaatacacacgaacaacaaaaaaattataaaaatacggttttacgaaattttaaannnnnttacgatttttttttattttatttacaaaaaatacggtcttttttttatgttgtatacttgttaattttttattatctgtatgttattatttgttgttatattgatgttatttaaatgttatttacatattacttttatgtattttttcttattgttttcgtgttatttttatagaaaaccgtaaaaatgtaaaaaaaaaatctttaaacgtaanaatgtaatttttttataaaaaatagtcactaattattcaacatttttacttacgtgattatgtatacgtataaaaacatcaagactagaaagatcttattcaattggactatttacaaaacttggaaaaaaatagaaagtttatatctataactaaaaaagagaatgttgttttgggttttttataataaattacaaaaatgttcttatatttttttttgttaataaccattaaa

SEQ ID NO: 20080 - DNA, 3215 bp, Cannabis sativa
tctctctctctctctctcattacatatttaaaacgagctagctagactatatagtgccatgaaattaaaaatctccaacatgtacccatgttttctcaatctgaaaatttcagtctccaatagataaaactaccctagcttcttcaatatcctaatcaccaatatcaagaagacgcgtgtaaaaaacccacaaaagaaaacaaatttagatatagctactcgatatctccaaagctttagtactttacctcttctttaattctcattcttcactattctctccctattataatatcatcatcctcgatccgcctcttaatttgtggctcaaaaagtgagaaagaaaaagaaaaaaaaaaacctaattactttctcccttggccatgaaaaccgaattaagaggaagcacttcaacgacttctgtttctctacaaaaccctaataacactaataatgtgttcattaacagtactcctcaagggtctctagccggggccgcccttagaggatgtctaggaagccttgatggggattgtatagagaagcttttgcttcactgtgcgagtgctttagagagaaacgacgtcactttggcccaacaagtgatgtgggttctcaacaatgtggcctcttcagtgggtgatcctaaccaaaggctcacctcttggtttctaaaggcactaatctcaagggcatcaaggatttgccctagtactagtactaccactactactactcctactactacaacaagtacagatatgtcaaacggcgtcgttcagagtacgaggttgatgtcggtaactgaattagctggccggtatgttgacctaatcccttggcaccggtttggatattgtgcttcaaatagtctcattttcaaggcaattcaaggctacaataaagttcatatattagattttagcatcacttactgtatgcagtggcctactttgatagatgccttagctaaaaggcctgaaggccctccttcccttaaaattaccgtcccctcattccggccaccagtccctcctttgctcaatatatcttctcatgaagttggcctccgtttagcaaatttctcaaagtttagagaagtaccctttgaattcaatgttattggaaatgttatacactcatcatcatcaccacctaattattataattcctctcctgttgaaaatactactagtcatcatgataatgaagaatataactcttctacctttcaatttgaattgcttctaactcatctgaatgcttcttcactaaacctccaagatgatgaagctttggttgtaaatttccagaactggctacgatatttgcctgacaataatgacaataacagcaactctttacgtgacagttttctaaacacgattaaaggcctaaacccaagaatcgtagtggtggttgatgaagactctgacctaaacgcctcaagtctctcatcaaggataacaacatgtttcaactatctatggataccctttgatgccttggaaacttttttaccaaaagacagttgccagaggatggaatacgagtcggatatcggtcacaagatccaaaacatcatcggctttgaagggttccaaagaatagagaggttggagtccggtgctacattgtcccaaagaatgagaaacgctggctttttgagcattccatttggtgaagatacaattaaagaagtaaaggctttgcttgatgaacatgcaagtgggtgggggatgaagaaggaggaagaagatcatatgttggtgctcacttggaagggtcacagctcagttttttctactgcttgggtccccataatcactaacttggatgctgatgatgaggatgattaaattaatatgggctaatatatatatttgtggcctgtatatatagctagctagtgtcttatattaattaattgaaaaatgttcacacatgtgggattaattagtagtgactagtagctagtgtattcttcatttgtggtccataatcttagtagaggaaatgacaatgtaacaagtttgtctaattttggttaaattgtcaggaaaaagagaaaggaaaaaaggctgcacaaaaggccagtttgtaacgagtaatgttcatttgctgtgtatatatatgagcatatatatgaaatggaaagaagagagagattacacgtcttctaatataatattgtataagtatatattggatgagatgagacaaatggagtcatataggcatgcatgtatattttgtctgttcatgatcattactgtgaagtgtgaatagtagctttttttgtttttcagttttcctattatctttccgttttttgtatttttgttttttgttttttcggttttcctattaagtaatgacgacatagctagccatatatagtccttattacatttgtcaaactattttaggcattacattgttaagtggaaatatatttctaaataaagtaaagtatataagatatttatacatatgatgaaatgacattggaatggacccatttttcaattaccattttcattccactaggttaattatagtcatgcatatccgctcaatcatgtgggacggtgcatgcatttatgttaaccaacaaataattaaaaataaaactcttgtgattataaatttaattttatatatttgtataatttaaattaaaaagaaataatatatattaaccaaaattttaaccactgcttaatcatatcttcgatatctctatccaaggaattataagatcctgtggtttgaaaaaaaaaaaaacagaacatgtatccgacctgccggattcgaaccagcgacctaaggatagctttcagggttaaccaactacagtcctccgctctgccaactgagctaaggtcggttctcttgattttgttactagaattaaatatctattattattgataatactaagggcatatctatttttcctatttattaattaatttctatatgctgtatgtatgttttccactcgtagtgtgagaacttaaatatattccttagtggaaaatctgccaatttaggagaaggagactggtgtggaagagatcaatttgagaagggcccaatttgaaagaaaaaaaataatgtcactagaagagtatcacatgtgaggttgcctgtttctcaattcacgtgtctttcaagcttcaacccccaacaaacaccacaacttttttttt

SEQ ID NO: 20081 - DNA, 3055 bp, Cannabis sativa
ctaatatttgtttgttccattattaatgtaatataataacatattttttcaaagaacacaccgctaatttctttctatatgtcaatgagtaaattttttctcagaattattgtttatattaataatattaatgggaggatatgacgtcgatatgtacaagttgacatttttttatgccattaattattgtaagctattaggtagcctccacgcgcgttgtattgtaacccatcacgtgcgccttattctttactatttaaatctataatctatgtgcgcaaatagttttgttgacttattttttcctcactttaccggatgaaacggtcactgagtgagatgatgtttgttttgggtttgtgttgttcaggctaaagtgtttcactatgggtccataagcttgatcgtagagccatgccgatcggcacacatgaaagcgatggaggcggctaaggacgccggggccctactctcatacgacccaaatctcaggttgccactgtggccctcagaggatgaggcacgtgagcaaattctcagcatatgggataaggctgacgtcatcaaggtcagcgatgtggagcttgtgttcctaactaaaaatgacaaaatcgacgatgcctccgccatgtctttgtggcaccccaacctcaagcttctccttgtcactcttggcgagaatggctgcagatactacactaaggtaattaactaagaattataatcatctatgaacaatctctttttatttctttattgttattattcttttttatttaggaatataagtttatttatgcatgtgtttttgacgtttagctgctgtattgaaattgggttggtggggggttttttttaagaatgagtgaataatgctgacaattctgcgctgtccagtagcacttgccgacaaatgaagttgggctggtgaggaagtagtagggcccgttttctattttttatttttacttttttttggtgggattaaattgcatggttttaggctagctgaaattacaagtgcaaacgtttatttaattaatatgaaatagctgtcaagggttgattatgttttcgcaacttgaggggtttagttgaactatttacattcgagtgttacttaagaaatggtctttttggtactaccaaattagtcgccaatggtttacctaaaagatgtaacaacagaaattaatcatagaagtaaggctttggttttatctttacaacatggtagatgtatctatgattaattaatgcttttctttttttggtatgagatctgattatgattaatgctaattttttagggggtgtagttatttggtttgtggaatatttacttaatgaacaagtcacatgattaatcaagcactcacgtgaatattattacccaaaaaaaaaaatgtttttaacttttcttgttacagaatttccatggatctgtggatgctttccatgttaaagcagtggacacaactggtgctggtgattcatttgttggtgctttactcaccaagattgttgatgaccaatccatcattgaggtatatacttaatcatactatctatttctcattttaattgagcatatacacatatatatacttaatattattgctgaattaattacaggatgaggcaaggttgaaggaggttcttacatttgctaatgcatgtggagccattaccaccaccaagaagggagcaatcccagctcttcccactgagactgaggtcctcagcctggtcagaggtgcataagagaaggggggaaattttctttaatttctgcctgttttagttttgatttcccttaacgttttcttgtttgttttgttttggggacctttttcttttgtttttttaggatctgcttgcaatttgagtaaagggaattttccgacctcagtaatgctatttctttttttcatgttttctcttttatttaccttccttttcacttattttatgctgtaatggtaaaagacgatgtgctctcatgcatttgctgtgaataacttcttttaatgaccaaagaaaaatgtgatacataaatgcaaagctcaaaacacccacttctaggacggctttgcacatgcctacaaatacattaatcattattgtttattccttttgaagataaaaatagaatccattcttttctttttatctttttcgattgcgaacctaatttataaaagagaacaatattgtcacttcgtttaaagaaagtgagacctaacccaaccacctgtctcacttccttttcgtaaacaaggttgcgtacatctgactatagataagacgtcgcagatctctacctcttcattctcaaaagaatctaagtgataaatcataatgtgatcgatcacctcatctctcaaaaagtatataatactgaaagaattggcaagttcattccaaactaatttcggagaacatttaactttctgttctagctgtaccacgtattccataatttatcagcaaataaaaatcaatccccaagtttaagaatattaagataaaattctcaattaatcaagtggtaaaaggagagcttctacaacttttgtattttgttttatttttttgtttctttatattttctattgctatcccttgaaaagatgataaggaatgcaattacaacacaatggcttgtgggttgcattcactcacatccatccgcagagacctccaagcttgcttgcacctttcccacttcatctgcatatgacccaaatacgcttttgcccatagttcattgctcccacccgtgcttagaccatacggcactgagaaactgtttgcattttcacaaaacatagtaaaaacaataacgtatcaaacacgaaggtgtcatcatcattatcaacaataagtaccattaatataaaatatgaagcctcaaaactaaaacaataagttaccataatagcatggtccacaaactagaatattaacacaatgtccaaaatgagtgttacctcaacaattcctccatctcagatcccttggtggatgaaccattcctgcaaaaaataaaaaa

SEQ ID NO: 20082 - DNA, 5013 bp, Cannabis sativa
gcggaatcggccgagccattgctcttcatctggcctcactcggcgctcgcattgtcgtcaattacacatccaactccactcaagccgaacaagtaattgccgaaatcaacgcctcatctacctccactgccgccgacgccgctgcacttcgagccgtcgcagtccgagccgacgtgtccgatccagaccaagtcaagtccctcttcgattcggctgagcagttcttcaatgttcaacctcacattatggtaaattcagctggagtcatcgattccacatacccttctatctctaacacctccattgaaaccttcgatcgcacattcaggtccatactcatataaaaattgtttctttaatgaaatcttcaacataaacatcaaatatttttagtctcgttattaaacttgttattaaactttttgtcttcacaattttttaaattgtttaaacaattggttattggaaatgtattacaataggaatttattttcaggtaattattcattttctgggattgtatagtccatgattgcttcttacaaattatatgtatttttatgctcacaaactgtttgaataaattcttgtggggttttagacacttgataactgtgtcttactaaccaacttaactgtcatgttagttaagttagttatctctgttagttagttctgttaagttctctctgtgtcaaggttaactcctactcctagtgctagcctataaatgagtttgaagccttgtcttagataatgatgttttaagaactgttttctttgtaaaatcgattgacaaaagaggattgttaaagagagtctattgtgtttgatatgtttagatagagcaagtcaccattggagtcgaaaccacttgttctcaatccttgtaactctgtaattcaatctccaaagggcagttcctcccgaggattagacaccagaaaagggtgttgaacctggttacaactagtgttacttttctttactatattcattcttgatcattgttctaatgcagtttctagcaatctgtttcttgtttgtttttgattcttgactagtgttttgataccaccattctctatgataaaagtttgtacattttgttttttatttcttagtgtgaatgcaagagggacatttttgtgccttagagaggcagcaaataggttaaagcgcgggggtggtggtcgaatcatatcggttactagccaccaaatgggggcattgaggccaggctttggggcatacacggggtcaaaggctgcagtggagtctatgacacagatactcgcaaaggagttgaagggaacggggatcacagccaactgtgtagccccggggccgatcgcaacagatatgttctatatgggaaagactgaggaacaaattcagaaagcggcggaggaaaatccactgaaccggctcggtaagcctgaggatgtggcagctgtggtgggattcttggccagtgatggtagtgaatgggttaatggacaagtgattcgtgcaaatggtggatttgtatgaaaatttcttgactgtggactcaaaaattatgctcaagaatgtggttagttagctaaaataatctcattgaatgtaatttctatctttgagtattaaagttaactataattaaactatttatgatcaaattaatttttcaaaaaattcacttttgtaagttattttgctaataaatattctcataacatactattttactctaaaaaaccacattttcccaactcagatttcttcaacatctatttttttgaaattacaatttattccaccaaaaaaaagaaaaacatataatcaattccattggttaataattttcaggaaatctcaagaaacttctacgaagccaaagctcatacataaccatgtgaaaagcatcatagtcaataggtttaagatgccattgaaagtgttttctcaccttcaacacattactttgtaatctcaaatattcatcataactgatatttttaaggatatctttgagcaaaggaatgtccatagttggaacaatgactgagaatgttttccaatccaatatgtcattgaaaggtagatcatagtagttggcaattacaacaggaacacaaccatagtagagtgaatccgcaattcgagctgtgtttacttcgaaacctttgacatggagacaaaacttgctcccaagaagctcatcagcatagggtgttttaagcctaccatagtgtacaaagatttcggtgtcatttctccacacttgaagaagcttttctcgtactggcgagttgattcctcccgcgaaaaatgcaagctttttcctgtaatttttttaccacaaaaatgaaaagtgacctatttggtatgggatagatacatgatagacgcataatgtgagactttgttgtgagaagtttacaccataatttttgagtttttagtagagattcgattgaatacaatgatactaagaggcactaataatgttcaacaccatattaatacaaatgaagacattgtgataatctaatgttacgagaatctatcatgtattgagcaccactgatgttatgggtatcgctctatcgacaactagactataggcacgagtggaccaagcccatacctacgacctccactatgaagccctgaaatttttaaaaatactatttttctacatataaaagggttcatgatttttttaaaaacaacaaattttgtactaagctcaagattgcttttaacttttaaagatacgcagagtaggtctatgtctaggccccaaaaaagtcattttttttataaaaaattgtagcataataaataaaaatttattaatgtttcactcaattcagatgagacaaaccacatcttaaataaaaataaattgtcaaatgaagtaacaaagaaacacaaaatgcatttcttaagtttcatttagtcttaacaatattctacatgtttcttctaaaaaatcattcaactcgtgatgagacataacataacccttacaaaggccttgttatgatgcagtagaaagaaataacctagttattattacctcttgggtgaaaaaagattaggagggttatctttccttggccaaatttgaggaagacaagcatctttatgggcaatgtaggcagctacaaaatagcttgaagaacaaacaacttgaataacattaaatttcacttcacttgttttctccatagctgattttccaatagaatgacaagcaacatagaaatggtcaccaccatcactcctattccaataaggatatttctgactaacatttgttatgtaatctctgatgaaattttgtatgccttcaacaccaattcgcgtgtcatgtctcaaccgagcaatcgaaaagggcaagaagaagagatcggcctctttcgggttcttggtgatgaattggctgttgaagagggatttcttgaagtaactttcacttgcatagttaccacttggctcaaaatttactggcaagagaatatttgcaaaagggtcattttttttgtggggatagacatatattttgaagctctttttcatttgtttgtaatcttcttggaatatgttctcatcatggaacacattgttggtgttattgacatagtttcctataccaataaaaaaagaataggtaagatttctatacaaatgtgatttgggttttcatgaattagaagataataattaagattagcaaaagtgtccataaaagaagtttagtattcttattaactataattaaacaaaactaataaaatttataattaccattatcaatgcttagacttagactttgattatggagattaggctgtgaagattggagatgtttttttataaccccttctcctaattttccattatgaattttctgttacattgtaagaacattaagcatatataaatataaaatatatgatactctataatcatatatatatacaaaaacccacaaacctttttctttgttttccttggaattgaatgaaaattaactccagattttgcataattaagcaaagtaagagatgaaaacctagcaagaaataagtgttgaaatagagagaaaaatgataatattatgacaaggaaagctatccattttgcattattagatttcaccaccatcttccttcttcattttaccatcacaattctgcacccaataaacaaaatatatattcaaatacaaaaaaaattgttactttaatatttataagagtattataataacatgaaaatttaatgatggtatgagagaaagaatgactcaccttgtagagagagaaagagagagagatgaaagtgaagaagaagttttaagttaactctagcctttgttttggttacaaaacatgaaattgggttaagtttatatatactagttagttacctactctactctacttttctctctctcctaattttgaagaatgatgtgcttattttctaaattttgttcacccaaagatattaccattttgtttacttaaaccattttttcaaaatcacatgtttgttataacattttagttttagactgtgttttataaaatttatgaattagatgagaaaataaatcttgtattttttaaaataatacgaatagatttttaaattcaattttttgatatttttttttaatataactaacttaattttatgatgatttatgttcatatgttatattcacagttttaatattaattatatatatataattaattttcataagtaaagtatcttgacattaaacgatgtaagtggttaattatttcataaatagatgtaattaattaaacgatgtaaaaattcatataaattactttatataattgagaactatggaaagtagtttttatgcatgattcttttatttgaatatgattaatgaataatttgattgttcattgaaatctaagtagtttacttgcaaaaacaatatatgccaagaaaaagaaaaaacaatatataataatatca

SEQ ID NO: 20083 - DNA, 5099 bp, Cannabis sativa
  modified_base (5058)..(5066): a, c, t, g, unknown or other
gaaaaataagctttaaattacagatgcaaaaggactgtagggataactacatataaatatatattactagtgtcttcttcattcaaaatcatcaatactaaacactcttctgtctcttctctctgtaccaaatagcaatccaaataccctcataaatctgccattgaactctcttctcttccatctcaaaatatcaaactctttattcttattccatttcccacctttataaacctcttctctttccttttcttcatcaattgacccacaacgctctctcctttttcattgacttttctctctacaactacaactacaaagtacaaccaaaccctttaaactaaaaccaccaaaaatcccaccaacctgccggagacaaagacgacgacgacgaaaaaggcgatggctttcggctaagttcgtcgctgggtataatgaagaaggatcaggctccgacgatgcagtctgttatggtggctttgactaaatgaacgagagagagagagagagagagagagaaagggtctgaagagctactggtaatacgtagataatactttattaaaagaatttttgtgttcaatccatctatctagtaagtctttcttcaacaatatcgactactgtatttaattagacgtcagcgttgttgttttttttccttgcgtggattttcttccactttcgacttgtctctacttgttgaatccatgtgcccccactagagcttagctgggggtttgggttttactgggtcgctttcgtatttgatttttctaccctagaaaaagtacaatttttttttggggggggaagaatgggtcaagggttttaggtgggaaaatgtgaagaaggagactcatattttccatataagttatttgtgccaaaaacaaaaacaaaaatcaaaactttattgctgctatgtcctttcctggatatttcgtttaatgggtagtttgctagttttgttctaaataaaataaaaataaatatattgaaaagtttttagagatgttaggtgaagaagataaggaccggtttgccggagctgcctcgagaaggtattcccggtcagtttcttggactgaccggtcaccatctaagcctgctaattctaatcctaggccacaaactaatagtaaagcaaggtcttgtttgttaccaccacttcaaccactttcaataactcggcggaatgttgaggagtggccgcgagcgggttctgatgatctcggtgtttggcctcatcctcaaaccccaagaggctctgctaatccacctgcaagtccgaatccggaacaaactgtaagagaattccagtttaagagggataagcttgccttttttgataaagaatgctctagaattgctgatcatatatacttaggaagtgatgctgtggctaagaaccgcgagattttaaggcagaatgggataactcatgtgcttaattgtgtcgggtttgtttgccctgagtatttcaagattgatcttgtgtacaagacactttggttgcaggatagcccttctgaggatattacaagtattctttatgatgtatttgattactttgaagatgttcgggagcaaggcgggcgggttcttgtgcactgttgccagggtgtgtcaagatcaacttccctggtcattgcatatctcatgtggaggaaaaaccagagctttgaagaggcctttcaatatgtcaaggcagcccgaggtgtgacaaaccccaatatgggttttgcttgtcaacttttgcagtgccagaagagagttcatgctgtgcctgccagcccaaattccatattgaggatgtatcgtatggccccgcattctccatacgatcctctacaccttgtccccaaaacagtaaactatcctggagttcaagcactcgattctcgtggagcatttgttgtgcatgttccttctgctttatatgtttggaatggaaagaattgcaaatctgtgatgtcaaataatgcacgggcagcagcgtttcaggttattaggtatgagaaggctaatggtccaatcataaatattaaagaaggagaggaacctccagagttttgggaagctcttgccagtgggcaatccttaccagaggtggagatgaaaaaggaagatgacaagtgtcctggaagcattgaggttgctacagaaattggcaccgaggttggtgagaggaaggtcgatgcatatgatttggattatgagctttttcacaaggcacttgctggcggggttgtgcctcctttttcagtatcaaatactggatctgaaacttgcttgcctgcaagggagaatggatggagcaggcttaggcggaagttcgcaataggctttatgaaagaactgatcacatcatccaagttaaactgtgacactgtgccatcttctgatgtatcggacatggttatagataaccgcagacaggaaaaacagctcgatcccccttcatccttggcatcttcaacccacctgtgtggttccccggattcctttgaatgttttcctcatggcagcccagataggatatcagaaacatttaaagaagtagaatcattagatcctcttcctcatcccttctcaccacctttttgtggatcaccggattctttttctcgttttccagacagcagtcctaagtttagctctaagtcccctacactttcaccttctacctctgattatgctagttcattttctttttcgccgtcatcttctaactggtctgacctatcatacctatcatcgcagcagccttcgccatcaggcttactagattcaacagatctatttccaattaagaatatttctttgttagatatgcttaacaaagaaactaataccccaacacatccagaatcattttatgataatcatacttttagaacccaaacatccggttcaccttgtaaagggcttactccctctattgcagagcgtagagggagtaatccaccacctcgtatgttgttatcctcggttgatgaatcacctcaagttccaagaactctgggacgatcatggtcgttttctattcctgaccttgatgatgatggtatgaacgaccttgaccataatcaatgtgagaatgaagacagtagagaagaggtaatgatagatgtgaatatctttagtcaagcaaatgaaataggaagtgaaattagagaaaaagaagagggtggtaaaactcgtctttttacaggtgaaataatcgatgaggctgcagaaacgttgaacttagtcttatacaagtggccttcattgaacaaaataacggggccttgtgttagagaacttgactcagcatcagcatttatgctattagctgaagatgcgagtttgggatcaaaaaatcactgcacgttaactctctggttgggacgtgaaatcttgcaaaagaaaggacagaagctcagtgagcagaacgagagtggcgatctgcactgggagatgattgctcgcaacttccttaatcaaatggagttgccattaaatattcctgtccaggtaactatttcactttataaatcttactcaattacatgttagataagagagtttcttgcaactcatgcaaactaataactattaggtatgaaaacatcaattcaattgtgcatatcataaaatggattttgagatcattttttctgattatgtttggtgcttttattttcaggtggtaagagaaggtcaagagccagaacaatttttaaaccatcttagttgcttagctcaacaaaaataagtgaagtgttttaaccaaagatgagatgtttgtatgtaataaaacaacaccacctaataatgaagattagcatttagcagtagtatgttgaagattttgaaaggtgggtgttcatcccgggcagcttcatctatctatctgcttgtgtgatgtgtggtagagaatgtaagttacctatatagcaaaaatatgtacacagaacagaacagccaagctgtaaaaccaaatactaattacaagtaaatagtattaggttcttctgttttctttttcttttttggatggaaataattcttcttagccatgatgaaattgcaatatctaatgtgggtattggagtttctagtgtttacttttcaaaattggcagttgtttgtagttctcgttaatagctcggaatatctatttgcatgcatccatacaaatagcatgtttctttgcttttctacttaaaagatatcacttttttagttgcctttatatccgttcattaattcatgttcacatggagatcttaaatgaaagtgagtagaatgttggctttagcaactcataaaaaccattgctattaagcactagtggtgcctagcactttctcgatatatcgtattacgattggttagcgatacttcttaaaaactattatatttaattatatgggattcgatacttagttagaccaataacgatattgatacataggagagtgttaggcactactggtgtcttttagcatttgtcattcataaaatcaattgaatttcttactatatcataccatttattagcttttaaaaagtaaggtaagagaggtcaaaactggaaatatctaaatcccatttgaggatggagattaaatgatgaggcatgacaacatactaactccacgtgatttggtgtactcaaatcaaagtggtttgacttcataagattcttgatgtttgtaggtttagataggatatcacattcatagttaagactcacgagtgttacgaggtaacgtcttcacaaacgtttgattgaaaatgtaagatttaagatatggagttgtatttggattttggacaaatctaagagttgatggagaaacttgctgcctttctttctccaagttccaaccacattttaacaacaaagagtaatatcattttaaagtgagcttcggtaaaaagaaaatttaattttcgtatcaatcttatcttaaaaacgtaattaaaatttaaataatttataatgtcagaatcaaaattttaaaaaattgttctccacacctaaaatatatatatatatatatnnnnnnnnnctagcaaaaaattacgtgcgagacacgtatact

SEQ ID NO: 20084 - DNA, 3213 bp, Cannabis sativa
attatactgaaatgggttttatttagggcacaaaacccaacaatgtggtgcagcttcagatttctcattatgtcatgcaagtggtcgtcagttgattagtcactggcatatgatatcatttaagtcataccctcacagtgttttaaatgttgactcttaccatttgcgcgcatgctaggagtatgtctagggagacgttgaaatggcagagaatcgagtgaacggatccttcacttaactatcccttttctcaaagcatgccataatggatgttaaatggttgagtcgatgcagtcttcttagctccccatccgtcatatcttcaaacgccattttggtgaatgatctgagttattcgcttcgtgcggaaggcactcctcttggtacatattaaatacccacaacattttcattgtcttttaagtctcaaatttttttgctctttgcaccagagtttttgcatctttctttgctttgcaaagtttgatcaatatagctagtgttgagtgcacactcaaccgaacgtgacaaagtttggcttccccgtttaacaccttcatttatcattgggtaagtatttttgttgctcttgctagttgtatacagcttcatgctcagcgtacctaagcttatcttgacttggtgccatggtgtacgagatttttgtacctttagaatatctgtctttttcgaactttctattacaaagagagggccatggtgttttgaccaaacaatcgtgtgctgagggatcgttcctccttttggggaggtcctcttcacacactgtgaaagaacgtccaccatgggctaacagactcttgtgttgactttattgtcctgaattgactcatttaaccctgcactaactatttctataggtgtttcctggtttgtcgcattaagtttgatggagggggctagttccttaaaagtcgctggtggcagcagtttttacgggaagataaagatgcaagagattcttgttgatactagtgcccccaatgcatcctcctctgctccaaattcccatgaggtccacctccagcaatatgggccacagttaaggcgaggccagccttgtccacgctgaccttctgctcttcctaaaattccatctgtgggattcacattccccacaaaaactattcctctcaatccccttgcaatgcagagagaggaggggatcataagggctttggaagaacgcctcgcctcgaagtagtgaagggatttttacataaacaggttagtgtgctttaaccatgaggagggctgaagtctcaaagggccttcatgcccgaactcgagtcagggcaacagtcaaggtggaggtgctagagcaacatctggcacccaaagtggggagtgaggctgcaccctttgcagcggaactcctagactgggtggcaagtaatgcctccaagttgcctttggagtcttgggcaacttgcagtagtattgatgcctttaccctagctcatgccgccaagaaataagcagttggataaggttttgaactggtctattatgacttctgccattgtatctagcatttttatatttccttactacaacatatagctctattggtggaaagagccataaaagaggttggtacgtttgtcatggagcttgagcatgtcaaggttgataactgtaaattgcgtaatgccaacgagactcttgttatcaaactcgtagaagccaagactcagattgacagacaaaagaaggagaaccagttcctggaggataactatgccaagaacactcgcctcatacggggtatgagagtcgttcatgatctttacagagagaccactgagaggaagccaagggtaaattcttcccatccatctagcagtgccaaatttgcgtatccagttgaggcagtggttcttcccaagtccacaagcatacagttgttttaagctctcccccactttaatgttttcatttcacgaagacaatttaattatgccctaactgcgggggccatttgtaatcacttaggtttttatccttttctttgaagcttcaattatgattcacaggcttgttacactgttttaatggctatcacaataggttgttttgaagtgtatggctccaacgactagcacttcaaacctttttaccagtctttgatccttcagttgatttaggaagcatctgaagaaattaatttcctatttttaggtaggatcactactgccatagcccttctcagtcagtaccatatttgactaattcaatatgctgacatcacaaactgatctttaccctactcccgcgcaaccagatagatgtagagccttagcactttttgcatgccttcagtagctaattatcaattcagtatttttcctcatggaatgctagactctaggaattttcccttgtccaggaatcgagctgaaattgtgataatagttaagcagattctcttatcccataccttaacaacacgagcctctatcccctataaccacacatatgttttgaggtaggcttcacacctcatggattttaggcaatattttgtgcttaagatagggctaaaagcacatagtggttcaaatgaggcttcctcacccttaccttgcaaaagcgcaacaaataagatcttaaaaaatctactgaaattattgagaaagaatctgggcaaattttttcctcttaggaaattttgccgaaaatgcatctcatctcaaggtttatgctaattttttaattttgagaagggattcaagcgtgtctttccctaaggaaattaggttaaaaacacctcttgtttctggtttaatatgcatggcgcactaagaactctgataaaataagtgattatgatgaactgttggttttcggggcatacgtagctaggaacgacatgcgtagctaagcatgacacccccaaatgagctaagaaatttgatgcctcgaaattctcagtcatttggtcaaaatgtaacccgtggcaataatgcatcacttaaggtaattgagggggagatataagcgcaagccaaagttttggctgggctcctttttgggaggcacaacctgactcatgctgatacccaaatcgtgtcatctccatctagtgttgtccgtgaagggatttttgcaaatgatattgaaggacaggttgaatttaacagtggtgtcacgacttccacaagggatggccttcgttacactttcaagcga

SEQ ID NO: 20085 - DNA, 2886 bp, Cannabis sativa
  modified_base (834)..(847): a, c, t, g, unknown or other
ataaaaaatacatgtaaattgttgaataaggtagttatttaatttagtccacggttgaccattcaacactgaactcttacacactgctcataattattttatattatttattaaaaaacaaaaactgactttctttaagctgccataattgatgacctgagtactacttattgactagtcatatgaaatgtgtggattgtttgactataataataactaactaaaaacccaaatgtctgtgttttgcatctaaacaaaccatcttcaactatattttactcaaaattaattccaaactcttttattttacaaaaacaaactacaaaaatgaaaaaagagaatgtttctttagttggaaaaaaagtagaaagaaaagggaaaataaatagtaagttccaccaaatctttcttccctaaataagaaatttgaatagtaattttttataataggtatcttaattaaaattattatttaattctatatctttttttcctttgaaaataattatatagtattatcaattttatcttatatagtttaagttatgattattccttaaatttttgataatattgattttatcccttaaaatatacagctcgttaaaaattcgatctaaacttttatatttacataaatttaatcattctattagattttgtctcattattctatttaaatgctcacgtgtctttgtaaattagcaactttacttcctaaactttgacaactatcaattcgtacctcctcaaaataaaaaagagaaagattcaacatttttttttaaaaaaaatcattttgaatgattaattaaaaatttaaaactaattaannnnnnnnnnnnnntatttattttttattaaaaaatttgtttagatataaaatatattaaaaattacatttttgtaaaaactaaattttacggaaacaagtttgagcctatttttttttctctaaaaatctaaatttgtttaagtaaacataacatatttttttatttaatttctaactttttttcaaaataattttatattattgaattttaattattttttaagatatgagtttatagatataaataagcttgattttttcttcaaatttttttagtttgtttaagttatttattgaattttcaataattttggtttgattttttaaaaagtgtagttataaataatataaagtttaaaaatattttcttaggaataatttagttttttttaagtaaatttaatatatttttaccaaggtctttaataatttttattattttttttagaattaatagaacattataatttttatttggctaattaggacttttatttaaagggggtaaaattttgtattggtcaaagtttaagagattaaaatgttaatttttaatagtaaaagaaacaaaacctaacataaggaggtataattagatagtgttgaaagttcaaggaattaaaatattaattattttttttttacaaaacatgtatagtgttttcataataaataattttcaattactgattattgaattaaatattaactaggtacattatacctattttctaccttttttttaaaatatgatagattatacaatttcatagctattactattagtaagtaacacaccaaatttagtttggatactttacccacacacacatacccatgtacaattcaactcaatttttctaaaaatgcatcatgtataaaatattataaatttatggagttttttttttccaccaattgtttaaatatatagttctaccatatttatcttttaaattaatttactttattaattttcttttatattaaaaaaaataatttctattaatcaaaccgaacatccacaaggagattctccttcaaaagagatacttacaactcttttatatttttaagactaattttatttatgctagacaactttcttttttacacttacttttgaaactctctttaatgttactatctacataactagattcatacactttttctcatttatacacaatttaagtttagcaaaatattataaattacacatactaacacattcttataaagataatataatttttatcatacattttttaacaacaaaaaattacatgtatatatacacactaccatataacttttatttgactttagcaaaaaaaaactatcttatgtgacgaggtacaaattaaaattagtagaattaccctatatattttagagaaaaaaaaagcaaatattaatccattataaaatcaagagaaaaaaaaagcaaatattaatctgagaagggtaacaaaggaattcacctaaaagcctgggacaaactctgcctccccaaatccctagggggtttgggcttccgaaaatccaaagaaatgaaccaagctttcctcgctaagtgggggtggaatcttctgacagggaaccagtctttatgctgccgtatccttgaggccaaataccttaaaggaaagtcctttctagattgtgttccgaaagcctcggactcgtggttttggaagaatgtaactaaatcaagagacgtcatccgtaaaggggcttgtaagcgagtggccgatggccaggataccaacatttggttggacccttggattgcgcatctaaagggcttcactccccattctagtgggcgggtagtgagtagggagaccaaggtagccgagctcctgttacagaatggtggatggaatatccaaaagctccaccatttgtttaatcaagaaacaatctctgctatcctgagtgagggtgttcctgctggtcgaggcaaggatagctggttttggaccttggaaagtaatggtcggttctcctgcaaatcagcgtacttggcccagactgtggatagttcg

SEQ ID NO: 20086 - DNA, 3874 bp, Cannabis sativa
  modified_base (3831)..(3841): a, c, t, g, unknown or other
aaatgatcaaacaagtcatggcttggttgaggtggaaatttcgtattgttatctatagcgaatactctaaagtaagagttgattttgctttgtgcaatcatgtaggtggttgaaggtgaagatgcagctcttaaagttgggggctggatatctggagcttatgttgatcgtttacatgttgaggtacttggttaacaggaatttctcctcaattttgttcatgtagttatattaatttctacttttgactaaaaattttgcttaagctgtgataaattaagaattatagttgatagttgatacttacccgcaatattatttctgtacatattgctgttatggtattagttttaactaattagtttagcttaagataactaataaataatttttatttttgatacttttatagtcgaccggcacatgatattagtttgaaatcatcttcacttacttgtcgtagttgataaaatgtgaagagtgtctagtttttcctttaatactgttgttgatagtttatggtgcttaattgcatgttgaaatgatggttgctgccaagtgaatagtttctaaaaatcatgaaaaaggatatattagtctattgcattgttcgatgggaggcccaatttaattatttaagtggaagaaattgtgctgactaagatctggagtagggaggtcatggtaattataaagctaattctatgtttggtaggagggagaagtggatggatggggatgagaggtgggaggggatgacaaatccttttgtttgacaagagagattgaaggagagaaaggagaggtgagaagataactcaaacctccaatttagaattcctccattaatggaaagattggaactctccgtattcaattatcgtaaattacaaaaaaccctcaacaaatattattaaataattatggagatatattgtaattttataaattaataacattatctaattctattcttccatcactccatccttcttaccaaacaacataaaaagattattactctcctccccctcccttatattctccatctttcattaactctccatccatcctacgctccctccttcctaccaaacacctaagtcatgaaaaaaaaatgctctaaagactatttttatatcaccattatcatgttcttgtctcctaccaacttgtttgtccttagcttttaattcttctttgttactcaagtattcaagcatgcttaaattctcaatcactcaaatttaattaaaaataaaaagtgaaaatcccagcaagacagcccacgtaaaagtccaacatcattttcagccacccaaaaatatgaaactaccagattatgagtttgcaatcttgcattatcaagataaagaagctaattttttttttttttttgtgtgtaatgaaagcttgtgtcctctgtgctttcattctctttgagacagttgcagtgcctaggaagaaaagtagttatctaattcatagttgtatctttgcaacttattatttagctctttccacttaaacttttctcacctagtcatcttcattgaaccaatatttaggcaaatcattattctctttgtagacaagagttactgtaactgtaatcttctttatcttagaacaggggtgcctatttcattttcaccagttagctttcgtagtatatagggatctagaaactcttaaccactcaaacaatctgaaatgttttgtttgggtcttcagaccttaaaatccatcacaagattacttgcagtgttcatttaatttgatgtcaccagctgaagtatttttatatatgttaaattctgcttaattttgtttcatcttctttgagtaccaaacatgggcttggtctacaacattccagtcccatccatatttctgccaaacaaatggcctcaaatgatttgttcctgtaatgagaactgatttttattgtatctcatggttggtatcaaaactcccatcttgctctttccagtagagtggggttactatgcatgacttctcttcttcctctgctatccgtgttcattgaaagctggctaatacagtgttataagaacatggctcttgtatgatgatttgctattttccaccaatcaactttactaaacatatagaggtatcattattatttctagtttaatggaaacacagagcttagaaatttttcaatatactgcaggttgctgcagtcccagaggatgttggaacagctggtgcacttcgggcaatttcacaccacctgacagcaaatgatattttggtttgattctgttccctatagtgttttgagttttcaatagttggctttgctgtagctgttggctctttttgctgttgcaggttgtgagtggtgatattgtttctgatgttcctcctggtgcagtggctgctgctcatagacgcaatgatgcagttgtaactgcaatgctttgctccactcctattagtggacctctagactctgcatcttctggaggaaaggacaaagccaagaagcctggacgtgttaatctgattgggttggacccaactaaacagtttttactctacatagcaacaggttatatctgatcattatatttcttatctttttcttctgtaatgatattaagtgatatgtgtcttagcttgtgccttttaattctcattaggggcagaacttgagaaggatattcgaatccaaaagagcatacttcgtgcagtggggcaggtaatggattttagaactcatctaattattttttatctatttttttgtttatttcctattgacttttatatataactgtttccatctgctggagttgatgataatgtgagatggttggtagtatttagaaacatttgagatgctttgtttttttctgctcaacctaaatttgagttattgattgacttctagtcttttaatttccggagtgccaaacgagacacttcgctagctaatttatatgcatccctttttaaagcggccatgtctattactttcatttcttataaccccttctaattctttattgaatgactttttgaaataaatgtatgcctgcgtctgttgaaagatttatgctggcataagctgattttgatgagatattgtaaaatttgatgtttcacacatattttgtcattactctcttcttgtagatggaaattcagtcagatctgatggatgctcatttatatgcatttaagaggtttttttcactttctgcttttttatttttaaatcttgtttgaatacaaattgattgtcacattcattgatgagttcttgatttccctccaggtctgttctacaggaagttctagatcaaaaggagacctttcatagtttaaagcgagatgtattaccttatcttgttcggagccaactggttagttcattttgttcgctgcatgataagttccttttagttagatgatttcctttaagatcactgctagtttcatttatttatttatttatttttgttctttttgtgagtattagagatcagaagtatggttaaatggtgtaccacagccagaagaaaatggaaatgagaaggttggctcacacaataaccgactggttcagtctcagatcctggctaatgcatcaaaaccaagctttcaccaactttatgctttaggtcctaatggctcttctcctgtcaggactcataagtgctgtgtttacattgctgacagcagtaaatactgtgcaagattaaattccatacaagcattcagtgacattaatcgagatgtgagattactgtaaaatcccttttgaacctccccccgtctctctctctctctctctcnnnnnnnnnnnctctctctctatctatctatctctatctctctc

SEQ ID NO: 20087 - DNA, 3082 bp, Cannabis sativa
tttttttttttcttaactgcagagaaccccatgattatagagcttccaccgagtgaagagcctcccttatctgctatagtcaagtatattttgtgtttgttattgtgtaatacatgtgtttgtgtgtgtgtgtgtgtgtattcagttctccttctctaggcctctttgcttattcattttgttgtgctgaatagatatgaagaaaccaaaaaagatcccagttctacatattcatctcatccaactactggtaaaatagttaaatgttcctttgtttttgctttttttttttctctcttttgtgtatgtgttttatttacttgattaatatggctttttcttctcatggacatcagaagttggaggggatcaagtaaagcctcctaacgaatctatgatcaaagatgaaattaaagctgaaggtttgtttatgccctgtcattcaaataatctcttagacaatgcatgttgggcttgtgacactcaaatattctagttgtcatcaatttattttacatttctaacagaatctcaagtggataggagtattggggagaagaaacctcgcttatcaggggatgagggacctacattgacagagttgagtggctataatatcaagaggcatgagtttgaaattgaatatgataacgatgcagagcaattgcttgcagatatggaatttaaggatactgacactgaggcagagcgtgaattgaaactacgagtactgcgtatctactcaaaaaagtatatgttaatttctcaattatgtttgatttattcttttatgatgttaagagaaaatgtatgaaaatagaatataagaaattagagaagaataaagtagatgtcatcttctcctctgtcttttatgacaacttatagctatgtgtgtgatggtgcttatatattatgaattaattcttttttacatttttcaagtatacttcatctgtgttatataaagctattcatcgatattgaaaatccttgacaggcttgatgagaggaaacggaggaaggactttatactggaaagaaatttgcttcaccccaacccatttgagaagaatctttcacctgatgaaaaggaaatatatcagcggttcaaggtcttcatgcgattccactcaaaagaagagcacgaggaatttcttcgtattattattgaggagcatcgaattataaaaagaatacaagatcttaaggtgagttttgtatcttcagtacttggtcccttccaaaatagtagcattaatattttaattgtcatgaaaaaaaagactccagaaatacctgatgaattgagcattgctataaggcaccatggtgtccaaagtggtgtattgtcattggtgcaattaagtagtgggttatatggtagttcaaattagattattttaagtataaagatgtaggatctgatatttatttaacctataacagtatatggtgttgggcaaccctagagtgctttcagcatttctctgatgaattagggatggtgtactcaggtttctttatgtataaagtgctaaaactcggtaatcagtttatgtgcattaatctgtgaaccatgttaaaataaaatagtttaccttgttcatggttgggtgtgtgagtgtgtgtaggagggggaaagagttctcagccctgttgtatcaaaaagaaaatttaatttaccttgttctgatttataccttatgcaggaagctcgagctgttggttgccaaacagcagctgaggctaataaatttattcaacaaaagaggagtaacgaagaaagtgctcttaggattagagaaagttttcaagctggtccaagtggtaaagttttgcataagcctggtcatattaaagaagaattagatggtactcctctgggacttgttaggggatccattgatctacattctagtaccaaggatccgtctttagcaatgcaatcggttgcaaactcattggatcattgggacatcactgggttggcgggggctgatttactctctgaaactgtaagaacacggtgacaattttcattgcttaaaatggcttgtattttacacaaatttaatctagctgttatcatctctatgcaggagaaacagctttgcagtgaaatccgaatactaccttcacattatctcaacatgttacagatcatgtctgtggaagtgttgaatggaaaggtaacaaagaaatctgatgcctataacttgtttaaggttgatcccaacaaagttgatagggtatatgatatgcttgtgaagaaaggaatagctcaagcatgatcatatcttgtgttcaattttgttacagaacttgtatagttattgcttgttgtataaggtaacagccatgctgctcatgagtcatgactagagattatttggccaaacattataagataatgtataagatgaagcatttgaatagcgctgtgaacccggttggtgctctataaccaaccgttgtgctggataaagctgctcaaacttaaattgattagagaagaagggcatggtgcctcatattgccttttttgtattttggttatgggattgatggtctagtaccttatgaaacaaaatatccttcggtccctaaattgatccaaattacaagtgttcagtatattcgaaattgctcagcttattaaagacatgtaatctttgtatccaatccggtgacctaatctttatgtagtagtgtgaatttgattaattattagcatttcttttaattttactttagatgtcatactgctgaagcacatgcttaagtaaaagtttttatcatctttgtttttattctttgcatgtagatttgttaaataataataaaaaagaattacaatgtatattttcttgcaaacaggctagggaaacactttgaaatttatttctggcaaagtaaattattcaaaactccctaaaagtgtacatatgatattttttttctccaaaatgttttataagcaaatattatattttaactttgcaaaaatgattataacttgatgttgaaaataatatgaagataaagataattgatgaattttaaaaaatatttttctttt

SEQ ID NO: 20088 - DNA, 1628 bp, Cannabis sativa
  modified_base (62)..(64): a, c, t, g, unknown or other
tgtagggtcagtcgtcagtccatgaaacggccaaagtgacgcactcgtgtataagagccatnnnttctgtgggtgtaaggacccaatgaatacttaaagcgggaacgttacaatatcgagtcacagtacttgttttactttaataaatattataaaaaattattaaccaattatataataaaaaaatttcgtgatgctaaacacatgcctccacaaattaattccatttaattttttacttgttttgtgttaccgtgatatggtaattaatagaagaataatttttatttttatcctaattaatttttagtacttttaaaattgtgcccctttataaattataatatagaacatgtaaataacatctttccaaatataatttttacaaccattctattagattttattcaatttaaagttaaatgggtgactatctatttaataaatagatataaattagtaagataaagtaacgaaatgtgccctaaaaatttacaccaaaaatgtatatttactataaaatattatatatagatctaaatccggaggtttggaataaattattgaaaatttttcatttaatttttttttcatcatcttttctattttaattttcttctaatttattttatattatttataataattttataataatattataatagtactatcatactgctttttttttcttaaaaaaaagtaaatattaatataaataagtataattaattaaaattttaacacatctcattctgtattatagtttagtgtaattaatagtatcacttattattattattaaataacagtgtccatgttttactataatacacaatattttaactatatatcatacatctctccaattgcctccctaccagagaaagaattggttgttccattcctttgatggacctgctatgccctctttgttcttcctcaattgagagcagtctgcatcttttttgggactgcacttttgcaaaggctgtgtggtttgggtgtatttggagcgttaggaccaataatcgtttgactagcaattgggtggaatggctagattggttcaaggatccaaataacagaccggccaccctcgacttcaaccaactcttgggaggcgctgcaataatatttgaacacatttggaaggtgcggaatcgaatcatccacgaggggacttccactccagttgccattaccatcaacctggtcaatcttaggcttcgtgagctcgaccctactggcattatctctccacaagctgtttggaaccccccccggaaggctggttaacttgcaactctgatattgctattggtccttctcaatctgcaggggctgtagtatttagagacgctttgggaacgtttcggcacatcctcaccttccgcacgacccaacgggatcctctcgctggagaggttgctgctatttgtgaaggtgctgcagcggctgtctatcaaggatacaagaacattatcttccaatgtgactcgctgaatgcgattaacgctttgaaaagtaatcctgctgaaattcacaagctccacttcaacattcaagataagattgcaagcttcttcaaccttgtccgaagtctgaacctttgggaggttcaatgg

SEQ ID NO: 20089 - DNA, 3249 bp, Cannabis sativa
acatgggaaaataatcgccggtcttcataggctgtgtccataagattccacaagtttgttaactctttacctagcaggtgaagctgcattaagaatattcagaaatatatcatgattgtaaggaaaatgtctgaagcagagttgaaacattcgtaaacttgaatttgggtttatctagccttgtattatctttgcatctgctggacttatattttctttcatcaaagtttggattttcctagtcatattttagttgctgcgtttctgtattcttactacttttcaatttttagtactttgaaactgaattatgttttgctgctatgcaggtgacactaattaggtcgtttaattgaaggcaaattcagccgaacatctaatatcagatctaaccttttcaagccgcttttgcttttcttgctcgagggaatccactgtgctgttgagcttaaccaagacatggttgcttatgttttttgaaatcccacacaaatcatttaagcttgggtgaacttcaccaatgatattggttgaatccagtcctaatattgtagacagcttgtggactgtatctgtataatgttccactttctggagacgttcattctgtaaagtaagcaattcaaaggcataagaattaaaatgtattgatttagaattgaactcttagaatgtcaatgaaataattgtgaacctgctacagtacagtaccttctcattatggagtctttgtagctcaatttgatactcctcaagtttcttcagggatagatcgttatcatttactttaaggtccaatacagagtcactacattctgatttacctgctatttctgcagaaattttctgaatttggccttgcacagttcggaactggttcatcctctcctctttcctcgatctcatctcctgtagagctggtgtgatggagtctagctgctctttcagtgttcctgccagtctatctggctgataagatgaaggatataaatcagttcaatgaagtgcaacaaaaggattgctttaatgattccaaaatcatgaacttagatcctactgctattcggttaatgcactattgtattaaggcatgtcctttatcatattatttgacttaacagggttttagttgaactacccgaccagggaatgatcgttcaccaagtgataaaagaagatgagtaaattcagcctcagcttccgccagctcctgatgcaggcgagctcttgacgtatttgctgcatcaacttttctcctgtagacctccacacactcttgttccaaatctagtaagaccttttctctttcaaattgatcttctcctacttcattccatatcatctgtcaaattttagtttgaggaaaaactaaagtcaaaatgagtatcatgatagaaaccatttctaatctattatattcattcataaatatttaatgatgaaataaagctcttgcctgcaattcttgtagtagatatccacatgaagtttctatcattgttgaacttcgtgttcctatcgaagtttgaaatgaactcatgggatgctgcttgctctatatgcagatctcagagattattattattattttttggctaaaagggggtgaagttccttgattggcagctaaggaatgagggacagggaagagaaaagagaagagagagtcaaatttagtggagctttggttgtgagttttgctttaaagacaagggtgactgacaggttggtacccctaagctttgggttcaagaatcaccaagttatgtctttacagtcttctctctttccctcttcttaatatttgaactgaaaataatgagctaatatggaactctctcaactcattaagttaaaatctctcattcagagatttgtttacttatttagtatttacattgacttgccttaataggacgtaaattctaagcaacataggcctttgataaaaaagttctgcgctcaatttagaatgttcacatctggctttttatggttgagtatttgagttacctgtaatctaatctatgatattaatagtgtcaaagatcggatgatgatcaccaaccaaatcacaaattccttaattaagtgattgctcatcacatttctttatgattaactcatcaattgcttcataagtccattttttttataattattaattatgttttcctttgtatctacataccaaaaaaataaaataaaaggagccggttgcactttttaatctagatgaatgaaaaaaatgtttcatgataataatcttttgttttaaggtccaatttcttatttgtcattatgacgtgattaaggcttaatcaagtgtatttacaataaagcaacttacttttttcacctttccattatataattatggttgattagagcaatcaaagtcttgcacatgaagactgtatcatgtatgtggggactaataaggagatagtgacggtttatcgattagataccatgagtgtcaagtgaccatttctaatgtcagaatataaagtacaaaatgaaactgattatgttaccatttgtaagaacttgccaagtaaaaggaagatcgactcagataatcaaaattagggtgccctacgattttgcattactcaaacgaagattgcaacccaagaatttgggccacctctattgtgaagaaatgatatctactttgctccacacgctgaaatgcctactgttgttggtattttgtcttagagaacaaaaacatgagataaaaatgagaggagattttgttttatttcagaaatataatgcatatcatgtttctaaattattaaattttcattttttttttatattttcaactcttacaaataaataatttggatgtgtaacttccaaaaaagttccacccataggaccttttttttttcttcagaaataaattaatctctcttcaaaggtttatttgcttaaagaaaatggtaaagttttgaagatgacagtgacagggtaatatgagaaatgagatttgagaacaacattttagccattccatggacgtgttactagcgagataatccaacaggccaataaggaaaaggatggagagagaggatataccatcattatcatcctcttgtctaagtacttgtatgtatcttataaatatatgtatttactagattaaagttacgtacgtatatttaattatattttagttaacttttaattattatactatacaatattattatagtttaattaaataaataatct

SEQ ID NO: 20090 - DNA, 4103 bp, Cannabis sativa
  modified_base (1653)..(1661): a, c, t, g, unknown or other
ctcacctcatattctttctctaactcattttctcttcttcttcttcttctccgtcaccacaccatcatcgtccccacccaattcagagctctgcaacctctctttcttctccttgcttctcttcctcttcttcagctcatcaatatccatactttggaaagcgccatcaatggggttcacagaagcctccccttgagtttggtcttggggctttctcaagaatgggttagcgtcagagaagattgaaaaggagccgtctttggcaacggcgtctccgaagagggatttgaaaatgtccgacggaggagaaacagcgtcggtatttgaggcggtttctgggtccttgggtttatttttccccattgtacgtggcttctatggttgaaatcgggaatcagagagagtgagaaagagagagagctgagaatttgagatggaaggtttgaattgggaaccctagggctagggcaacgtagcggagaagacgacagaagagagaggaaattcagaaattgaattaggtttcgccctattccagctctctccctctcccttcaaatcgggtcgaatcgggtcggttcgattattctgccgcaaatacttttagagaaatttagatagtatattaactttcattatttttttttaaaatattctcggtattttttacttttttactatatttttttataagttttatactgtaatatattgtattaagtttttattggtgttttactagtgttttttagttgttttgctgttattttgagttgttctgttttatgttctactgttgttttataaaaatacagtattttgaaaaacttttccgtgtgacagtatttttataaaagttaactcaaatttcagtatttttgtaagtttccttacttttatcattttaaaattaaatttagagaatatcaatgtccatgaataatatatttgataacttgtattttaataatatttaaatagtttaattatattgataaaatttaataaaaataaataaatttaagaaacaaatatatatgattttaaaatacaaagtacgctataagtattattaaaaacacaaagtatgtaacttatatttaaataaaacacaaggtaccaaatgtgaagacacccttaaatttacaaaagaaagtaatttgcggcgtaaatacctaagtttaactattagtagataaatatctaagtttaattgacaaacctaaattatatttctgaaacttccgtatgtacttataaagtgttaaatcattattcacgtgttattttcttattgatatatttaaattaatttctcgataaaaaataaaaatttaataacttagactaacgagggaccagggccggtctaaacatatggaagcttggactattacacaaggacccctatattaggccttttttttatcatccatttatatatataatatagtaaatactattttttttttgtataatgtatagtatacataataaatatttataagatcaaatatgcacttagcagttaaaaaatttgataaaattttatagtcccaatacacgtgattttaaaaattttacttattttagaatttatgaaataatattttgttttaaaaaaaaaaaaattgagattatttcacaaatacnnnnnnnnnacaaaaaaaattacaaaaaaaaaacagttgtacgaaattttaaatattttttacaatttttatgattttatttacagaaaatacgatattttaatatattttttattatttgcatgttatttttttgatgttgttttgatattattttcttattatttttatgtaattttcttgttgttttaatattatttttatagaatactctaaaaacatataaaaaaaattgaacataaaagtgtaaaaaaaatttaaaaaataatgtattatgtaatctcaaattcatatgtatccaaaaaaaacactactcagtcctaatttgacgtttctctttgtatttatctttctattttccattacgattggtacatattttgttttaattttaaaacaataataataaagatcgacaaaaacaaagaaagaactccctatagtataaaaattaaaaacacgatgatgagaacagaccaaccaagataattaatcatctaagtacaaaagtatgataattgatttaattgtaattaatagcctagctaattggccctgaaaaatgattaattttacatgaaattaactggataaacctccatcttattgggataaaaaagcccaaaattttgctcagtcccttgaggcttaagattctcattaaaaatagcaaaaacataagtctcaacactctttccaggcctcttgggagttccattaccattactcacatgactaatcaaattgttattataagtttgtgcattagcaatagtagcatacacatcaccactatccccaccggacggccacccgctctccgacacaacgatttcaacacttccaccgccaccatcgcacctctccaaggccgaataaacggcatcaaccatagcatcaaaaagggttttgtactccaaaaccccatctctaaccacaacagaattagatgtgaacaatgcataagacaaagagatattaactggattgttgacgtaagcaaagtacgggtacacatttaccaataaaggagtttgtgttgtggccaaaaaatttgctatgggtcccatcactggtagggttgtattggagaattttccattagaaggagggtacgaaactcccaagaccgaattggctactgctgttgttactgggattcgtcctgggatcaagcctgctactagggcttgatcaagtgcggcttttaaattttgcatggctggaagtacgtaattttgcatgtcgctcgggatgacttcatttcgagccgatatggctcgaatttttagggttttggcgaatgagattacgtttgtttggacccaatttgaggaaaatgatatgcttgtggagagttgttgaagatcttgatttagggttccaaggattacttcaatgcctgagttttgtagagcttggagggcttctatgttgggattgaacagacgagtttttgttatgtttttggattttaggagtaaaacgacgtcgtttggtgttggtagattgttccctaacattccgtagttcaatcctacagctcctgcttctggattattattatcatgataaatttatatgtataaacacatcaaaatcaaattaaagccaataagccctatgataataagtaagatccttatattatagaaaaggaaaaaaaaataagtagtacctgtttttatgatgaacaaatcagaataaagaatggcaatgaaaacaaagaaaattaaaagaagactcataaaggagaaattatttgattttctcatgttgttgtgtcgattgatctctctgaattttggatcaaaatatacttatattaatcaaattgaggggagaaattaataagaagaaaatacatacactaaaagacaacatgcaagacaaatttaatatataaatagttgaaattaatatgtatatatagtatattgatacatgaatcaaattaaagaatataaaactatactttggaccatgtctatgatgttttacttaatatatatcgttggaaattgaaagttttggcagctatatattgagaaatcttgagaggtcgatattagcctctatgctcttcttataaattataagccacacctaatgtctttgtgtataaaaatatattacttcttcaaagatagggtcatttcagaactagttttgttttggccagtattgtttttatttctagagttattttgtttgtttgttctagttttggaattcctcttttttgagccttgagtgtttgtctccttatatttgttctttacctactatttatggtggtatggtacttgttaacgactttaactacgaccgtgtgcctcagtatatcagtgtattcgcctcgttgtcgttttctcgtccttatcaagaataattaatatttgcttatccataaatgttgtaatggaattttgtctttggttttaactattg

SEQ ID NO: 20091 - DNA, 5221 bp, Cannabis sativa
  modified_base (1928)..(1928): a, c, t, g, unknown or other
gtaaaataatttccaacatcactaacattagaattatggggttagatttcgagcactaatataattttagatttaatatctaatttttttttgtcaaattggaggttgaaatgatgtgggtgttgatttgatttgagttgtgctaaatttggttttgattggtatatgtatttggttttcaactttctttgatctgtatagttttgtttcatcactttacttttttgaactcgtattaaaatgataccacctttttagtgtgattatggttatgggtttggcatacattcatagtgttagttaattttgttttttttttcttattggagttggggtgtgaaatgactttgttagtttctcaaagttgacaggggttcatcaaagaagatgaaaaaattaaaaagaaagaaaattaattattttttgttgaggattaatttttggtttaattcataatgaaaaaagtctacttctacaaagatgtacatatcttccttacaaacccaatagactaactaattaaagaagcagccagtctaggcttccccaaaataaataaataaataatactttaaattataggaaacctaggagaatgaaatgatttgactacatatctcaatgtctcttgatcaaactaacaatagttgcagcacaaacaaatacaagatattatataaaaattaaataagaaatactataaagtgaattaagggataaacagttgattttggaagatatcacataatccaaggtaccaaacctacactcaaattttactcctatgatcgatgatcgatgagttgaatcttacgccaatcttagattacaaattagttttataattattattttttttttaatttttttagattgtaatgtaatttgtgtttaattgttaaatgtttaaattaattttgaaataaatacttaaaaactaaatttttttaagtgtaataaattcaaattataaggctatttgtgaaataattttaaattataagattatatgtgtaataatttaaaattataagaaggtttttacaatcatttaatcatttaagtgcaaaaacatataaattgctaaaagaatcttgtttagtaataaattaaaaaaaataattaatacttataattaatttaatttaaaatataattaatcttaattaaaatttgatagagaaataaagtatgatgttattataaattacaagtgatttattgtttatttttatttacatgtattttttaaaacatctattatgtggtatagtttctcctaattgaaaggtctccaaaagtcattcctggaaaattattcactcgcagaagcaagtcctgtaaggcttccttgtccttccaggaagggtcttcaagaaaagctagcattcctttggaatggagttcttgatggctagttgttcgtcctagaaaggcaattctggattgtcgactctagcaagctgtatcctatctagaagctcacatacattcctgaatgcactgagacttatgctaacatggagatctcactcaaaggaaagttaattaagttagttattgcctaactcacttcacaacttcaatcttccagccactgactttaggaccttaatcctaagactaaatatatagaactttggcttgttatttcagaatatggttcagattgagattgagagtaagagagagaaaatattgagaggtagagagagagagagagaaaggtacagagaaaagagagagatttggtttcggttttgtaaaaagaatcttctgtagatgaaaaagattcttgggtaagattgtgagagttgaaacactttgagagaactcaacagagaatccttcatgattgtattgtacttattcttgctcaatcagtaaagaaaatttgatggtattccaaaactagagtagagccatanatcacatcgatctatcaaacttgaaccaatatatatctttgtgtttatatctttattttctatcttattagttttttggtttttctcactctattcaccccaatttttaatccgattatggtttatgatttttttaatcttgtcattgctaattgttttattgtttaaagtttagttgttttgattccgcactattagccgtaattttttcacaaatcagagcttgataatcaatctagaatgcagaataaagattcttatcgctgcaattcttgaagagaactttaaatgtcataaatggcaagattcgaattggagaaatttaatggaactagggactttgcactatagagagaaagtctgaaagaaatcctagtgcaccagaaagtctccaaggttcttagagacgagaagttactggcagaaaaaaactagtggaaaaagcagaaatggaggagatggcacattacacgatcatcatgtatctatcaaacaatgttcgaagagaactcatcgcaaagaagacgaaaaaaggaatttggaataaattggaagaattatacttaaagcacttaattgctagcaagattaatttgttagaaaagttatacatttttagaatgatttcttccatttctttagatgataatattgatagatttaatgagattattgtaagattggctaatataagccacaagattgatgaagaaagccaggccatcatcttgttgagatcacttccaatggcatatcaagaagtcaaggcggccatcaagtatggcaaagatgtgattgcattagaagatgttcttgccgcacttaagtcaaaagatttgaactaaaattggaaaatgaattcaagaaagaagaagtgtacttggcaagagaaagatcacccaagaaaggaagttcgaagagtaaacaccatcactctcaatcaagatcaaagtctagagagaaggaaacaaggaagtgttacttctgtgataggtttggacacttgcaaagattttgtaagaaatacaaggagcaataaggcttcaacaaatctcataatggagagaggaagactctgctgcaatcacagaggatagtgatgattgctcgacagatggagaataattctccatcttagaatcttacatgaacagggagtggattctcgattctgaatgtacttatcaaatgtgtttaagtcgagaatcattttttgattataaattagctgatggaggtaaagttatgataggaaatgataattcttgtggggttattgtaacaagaaggttgtcatcaaacaatgtgatggtagaatcaaggagttgacaaacataaggcacatcccagagcttatatgaaacctcatatccttgggtgcacttgaagatgaagaatacgaatacaaatatatttacggaagcttaaggatcaccaaaggttctttgatagtgaggaaaggagaaaagatcaatggtttatatgttctccaaggagaaactgtcccagttggagaggaatgtatggtgaaagggctagaattggatatgaagttgtggcatcatagacttggatatatcattgaacaaggccgaactgtacaaacaaggtacatttgaaaatttaaattcttgtgccttaccattttctgaagcttgtgttttagggaaacaacataagctaaagttcacttcggcaaggcacacaactaaaaagatactcaaataggtgcacactaatctttgggggccatacaaagtgcctactcactctagtaagtaatattttctttcaattgttgatgattatagtaggtgtgtttggacatatagagtcataggcttgaaaacctcttatgaaatgtggtacaacagaactccaaacctaacacacttaagagcatttaggtgtacaacatatgtacaccaatctattaacaagctggaacctagatctgtgaagggaacattcctaggttttgccttaggaaccaaggggtatataatttatgtttccaagaagggtagaccaaaggttgtgattgctagaaatgttattttcaatgagttggaatatcctcacttaacattcgagaaaggtagtgtgtctctgtgtgatgcaggaaaaataggaaacaaagacactacaagtgtggaaatagagtacggaacgatgctcttagatgaaggtccacaaatagaagccagtgtggaaccataaggtaatgcacagacagacgctgacacagagctcaaagataacgaagactaaatagaggtgccagaagaattcaaaaagacatgtctagaaggttatcagttggcacgtgatagaacccggagagagattcatcctttgacaaggttcgcgaaagtagacttaatagcatttgcactggcagcagttcaataaattgaaattaaagagcttagaagctatgaagaggcaatttcaagtggaaacaagtctaaatgactacaagtcatggatgaggggatggattcactgtggaagaacaagacttgggtagttgtgctaaagtcggagaagaaaaaaattgtgggagtgcaaatcgattctcaaggtgaaagagggaattaatgagaatgaactagtgaggttcaaagccaggttagtggctaaaggctttacttaggtagatggtatagactacactgaaatcttctcacttgtggtaaagtacaagacaataaggttgatgctatttttagcaggtcaaatagagttcgagattgaacaacttcatgttaagacgccttttctgaatggattcttagatgaaaagatctacatgaagcaaccgcctgggttttaggtggaagggaaatgagttaaattagagtgcaagcttaatagattcctttatggtttgaaacagttcccaaggcaatagaataaaagatttgatatgtatatgcatcaaattgggttcaaacgatccatttacaatcactgcttatattttaagaatctgaagcaatctacaaccgtgtttttatttttctatgtagatgatatgctcatcatgagcaaagataaatatgtgatcaaaagtatcaaagccaagctcaatagagaattttggatgaaagatcatggactagttcaaaagaggcttggtattgaagtctcacgggaccagaaggaaggggctattagcttaaagcagtctgagtacatcaagaaagttattcaaaagttcaacatggaagaagcaaagagtacatctgttccattagggggtcagtttgttttgtcaaaggaatagtgtc

SEQ ID NO: 20092 - DNA, 4017 bp, Cannabis sativa
  modified_base (61)..(63): a, c, t, g, unknown or other
tagaacatgttttttaaaaatatttttacttttttacttttaaaaatagaaaactgattannnaagtgttaccaaacgccacctaggttagtgaagcgcgcatttattaatataattttattttttatatacgcggaaatatgtactatatttgcctatcattatatgaaattgttgttgtgatatatattaattgtttggctcataggccctgaactatattctttctatatataattaaactttctaaattaatttcataattaattatcatgggacgtaaactctcgagcatcacctatatatagctagccctataaatacctatacatagctagagctagtggtggccttagtacttgagcatatagccatgcaaagcactattagagattatataaaagtacaatctttccaacgaattgttatgatatgacatgagaggacccaatttaaaaaaatcaataatattcccaagtcgcattattaatgttgtattatcgtttttctattttatggcaacaaaattgttgaatatattggacaacccattttggagtattattaatagaaatgaaactgatgtgatcataataagaacaattttgtaagaagaaaatgagttgttgctatctttaacttagagacctaactcatgtaatacgtacgaactagtgggcaacccatagctagaataataatgtactaatatcactaacccaccatgcaaaaatcactggcgcatattaatttctcaaaagccattttgtatatgacacacatgtggcttgctacgtacatattaacatataaacacatagaattataattgtaggacctaataatttctactctattttgggttctagtctttaccacaaatagctcttatggtgtctcaatatgtccttatagaagggtgcacaaatgggtatatctacacactagagccacttgtccaaagagatcatatacatatataatagtgccttaattttggtatatctatcaagctctcaattcgaaaattttgctaatggcttacacgtactcttttcaataatttgacacatatattaaatctgaggcaagaaaggagatcggtcttaattttcttggttgtcatactactctccatccacacaattttttacacataatcaaaccttttttttttcttttgatcatgcatatactatgatttgtcctgtgcaataatttgcaagcacaagataagacccggataatatccccatttatttgttttctttcccatctttaattgacatttttaatttatacaattaaattatttatgagtggggtccaaaattgctgctaagcccagctaaaacactgccaccaaagcgtaggggccgtaagtccttagccgtagtagaactagtagttcacataaacacacttggaattttggacttggaacttggaagccagttccatacagtggcctttttctttttctttattttttttttttttttttgggttcttcgatccatcgcacgtgatgaggatgaggtgggccatgatgttgcagacctgtcgcgcatgcacacgtgtgctcttcctccacggatccccgtaagatccgctgtcaaacaggaacacaaaatatcataattcattctcacactaaaagttattattaagtgagtgagtgagtatagatataaggaggggaccgtttttagacacaccccttctctttgattaccattgcaaattgcccccttactacctagcatcaaatcaccaccactcataatccgacacgtgtgctgctcttgccacgtttttatgcgttaatatttcttggtccaagttaataccaatttgacctatggagtttgtattggggaattatctttagtaatgggtagttttgggattaatgtgaaagtggtttatggattagaaaaaataaattaataaaaaagagtagtagagagaggtggggttagggggacaaggcagctttagtaaaagaaaagaaggtgtggtgtggtggtgttggtgtgtgtgtgtgagagagtgaaaaagagattaaagtgggtactaataggatcagaggaattttatttttggtgatcccaagaagattgcaaatagtttaacttgttcaaacggagagattttatttttttttttttgcagcttttcctttttgcctggggatgcataatagtgtatgagaaagagacattagattccaaaggccactgcacatgagaatcaaaagggtttcttcttcttattaatattatcagtacacttacacactactcttcttttgaagaaaattttgaatatatagtatactactagctagagaacatctataagaaataaagaaactgtctttgtttctatatcgatccaaataatgattccaattttcaattctataaaaagttaaagggatctgactagctagctagctatataggtgaaggcctataaagctaataataatgtgaataaaatctacaatttatatatatataggcatagctattgtcattgttgcgtgataaagatttctctacagatcgaagtcgtcatgctcatataccaaatgtatatatattatatacgtacgtgtcatcattatattaatgaggttaagcttgtacaaataatgacaatgacatgtaatgtaataagtttaaaaagaatctatttgaaatgtaagtttcattaaaaagaaattttgacatgagaaacacccggcctagtgcggaagagaaactttttttttcttgttctttcacaaaaggggtccaaaatatgtatgtggttgataatagtggagtattgtgctggggcacgtagtttccccactcgactagctacgccggcctttgaaaagccattgtgtctattgtggctcggcagattgtgtccagggccacagcctggtctgcccttgaaaatgtcataggcttgtgtagtcattatcagcctcattaattacttaagacacacacatatatatatatagactagttagaattgacatatcttggtttgaatatcatcaaataatccaacataaggaaaaaatgtgactcgtgatgtaaacgtaatgtgagactcttgtcactctttgaaattcatggcatttgtttttgtgctgattaacaatagtaaaatttttttaaactatttagagattattatttgactggatgaaagtagattccttgttcatatataatatatatcagtatgtgtacagtgtggaccaaactcctatggttgaagttgagcaataactagtagtgtcctaaaaattgaaagctactatttatttgtggctccctcatttttagcaatgtgtccttttcttataggtatagctactttgattgagcctaaaattagctttactgtacacagtaacaactgctattctgtcttaattaatgaataagatatataaacagtaaaaagtttgaattccatgcaactatttttatgaaagtaaaaaaaaaagtcctttctaagcaacctatatagttttcctaataggggttcagcagatttcatcatatgatgaggaaagaaattcgatatatacatagtactgattattgattatataaatataagagtagacctagcaacagtttattatttctaaattaatcctttttcagtgagatgtatatatttgtcgtaatcttgtatgatgtgaaaggaagctggctttggcttatttaagtataagcatgcgtatagcaaaagtaacaataaacatcaaatttttttaaaaaaaaaataaaaaaatttgctatttttaagtaaaattgagagaatcttttaaatttttaaacacatacatcacaatactactctaaattgcttcttcttttcattctttttttttttttaaaaaaaaaaagaaaaaaattacttcatcatttcaaaccttctttaaaatatatttttcattttctacattatatatagtaatattttattactctaaatata

SEQ ID NO: 20093 - DNA, 1829 bp, Cannabis sativa
aaggttagaaaattattaatttattatatcaatatagatgtgtaatgatttggtatcttattattaatatataaatttggtacaatatgtttttaaatatatttatttctaccttgtattttgtctcaaatttgattaatttcatcaaattgggttcaattatatatatgagttataaatttaaatttatttatttatatatttattatctacagataattgagagcagtttgaacaaattaataaaattttattaattatatttatgttcaactagggtactaaatatgcataagtttttacatataaatatcaaatgaacattattaaaaatttaagttacgtaagtttgattttgttagaatcgtaaaatgcatgaggttctatctcaaaatcaatttgtaataagagaagtagtccatatagatctaacatcaatccatcctcaagatggtgactattttttacttactaatctttcacggctcgatcacaagtggtactttggttcgcattggttctttttggctcactattctcaaatcaaaagtgactctttggctcttcttttaattatgaccaatttttggattttaaattggatttagagtttagtttagctctcatactatgttagaatattgtaagatacacggaattttatctcaaatccatttgagaatgagaggagtagctcatatataggtcttatatattctattattttccacacataaacaatgtgaaaataaattttaatgataaaagaaaaatgtagtaaaaaataaaaaataaataaaataaaaatatttttatatttggtatgaaatgaaaaactgtatggaaaaatgtttgatttaacaaaattttccaaatcaattaacattaaaaatttgatttttttattctccacacttttttttcctacaatttccttacatttttgtgtcctcatagacctcacccaatgtccaactttcaaacatagctaatttcaagtttcaaacttaattttttataaaaacacaagatattaaatttatattcccctttcttattaacaaagtaagaatactgatcaaatgcaggattggagtatttacacaatggttgcaaaccgcccatagtgcacagagatgtcaagacctctaatatattaataagtgagaattttcaagctaaaatggccgatttcggtctatcaaaaatttttccaactgatgatggtactcatgtatcaactgttgttgctggcacaccaggctaccttgatccagagtatgtatctgtacgtttaaggaatttaatggctagttataataatattacaaagtctctctaaaatctagtttgatggcttatcttcaggtactacattacaaacagactaaatgaaaaaagtgacgtttatagtttcggagctgttctgctagaaattattacaagtctacctattataagcagagcccaggggaaccaaactcacctaaaggaatgggttagtgtaatggtagcaaatggagatattaataatatagttgatcgaagactaaggggatattttgaaataaactctgtgtggaaagcagttgagatatctatggcttgtttagcacattcatccaatcaaaggccaaacatgaatcaggttgtgagtgacttaaatgagtgtttggctaccgaattggctggaaagaacaatagccaccaaaataattccacggaatcaatgaatgaaatgtactctatgaatgtggttacaccattgccaaggtaaaatgtaaaatatactaccttacttgattttatttccgcaatgtcttcctcca

SEQ ID NO: 20094 - DNA, 3202 bp, Cannabis sativa
cagcttggcaactagcattacctcgttcttgaaatcaacatcacattgggctgattctcctgtcaattttttcactgctatgtcttgtccattactaaatctaccctgaaaacacattaatagcaaaattaacatttattggaatgaattgcccggatttaaaaactacttatatattatatatatacacttccattaattcttactttgtaaacaacaccaaatccaccctttccaagttccttggagaaattgcctgtagcaagtttgatagtctcataatcgtactgcaaggattccacactgacttcttccatacgttcgtttgagatcaggggatgcttattagcttgaacaacacaaattgataaaataattcaatcatacagcctacagccatgaatagtttaatttatcgactgacttatgatcagtgcatctgaattgcctgaagttttattacgtgatcactatttttccatagaatatataattatatatatgttcgaaagtagtgcatatacacctccaccactggatctttagttttcaatgcttaatttttattttctactacaagcatctagttaactaagaattaactatttagttactagataaattttgaaaactaggctttttgtaaaatgaaaaagactgaaggaagataaatataatatacataaatatatgtgtatgtatttctcatgatcaaaatacttactctgagccattaatgtttttgcgttcctctttcttaaacacacaaaaatggacatgattatccccaacgcaacagtagacgcaaaaacaataacgacgattaccgttgctgatgattccttcttccttcctgcaataatcgagtaattgatgatacaacaatatatatgataaagaataataattataaaaagaaagtaagattgattatgttctgatcttgtttacctggtacagttaatggcggaggaggtagtggttgtggcattggggatggtggcggagcttgagtgacattagaaatatcatagaagaggtaatcttcatatctatgtctacaactagtgccgagtactactcccccttttttcaagttacaacaccccggcaaattcccaaatgaatcatccaaacaattattgcagtcgatcttggacaagtcaggtgagcattgcacaagcccatatatggttttaaaccctgcagattttatactgtctaaagcaaattttttaagagagccaccagccatagctcgacttttcagattatctaataagcttctaagatctttgaaatacgcctctacggtatcggggtcggatgacgcgttctgagtgttatataatataactcttggaaaactttccatgaacccaaacaaggagcggttagagtagcgcaacatacaattattgtgccataggactacctccttctggtatgggcagagctgttggacaagatgtgtagactcgttaagacatctttggcaggagtcgggcatggcgtccccgtcgcatagcgccattgcaaaaacttggtcgtcggcgtttccgtaagagagattataaaagccgtagccattgttgttttgggagttgggaagggtggagaggaggtgattgagattgtcgtggtaggtactgttaagggtgtagttacctttgtcaatacagtagtagttctccgctgtggcttgttgagcaactaccatgaagattgaacaaactagtggaaaaaatattgatatcatttcctaagtatatgcttctacgatctttgagaagggttttattaaagagaaataaacacgaaaattactaagtatatcaacagactccgctttcaaaaaaaaaaaaaaaaaatcatctgcaccattattcattcttcttgttcaaaagacatttcaaataataaatacaagtcttcacaaaaaattaattttccttaggcgtttggttcacgtccatcaaatgtccaacccaaacaatggagtatatgtggtccggtccgcaacaacgcaggacttattaatttatttttattaaagcaaacttttattaaaattaagaagaataggctttaaaaaccaaagtttgtagtgtgccacttcgccaacagaaaaggacttaaaatcactgtagtgttgttgaaaacactgcgatagtacacccaattaaaatcaatatatatcatcttatagaccaagctctatagctattattattaccgaatatattcttatttcttagaaaaattaaaattcaattttactttatttcaaaaatttaagaacaaaaattaacacacacccaaagataattctttttattatataagcctcctttatcttcactatattaaacatcatatttatataatcattttactattatatataaatttatataaaaatatattatatattatagagtgcttcgccttctacggcgcacccaaaaaaaaaaaatgcacaaatacactccatttatatatttttgatagggttttgtttattaatatacatataaaaaaactataatgtatccgtttaaggggatgtactaatggattagtatatatttattaccatgtttcaccttttgggctctgtttacattagaatggctcagggaacaagaagcgcaacttataaagtttgctatatttccacataacctaggaaatggaaaaactttttgatttgttggtactttttgaaaactaattttaaaaagattgtgagttttaagtttaaaaattgttttcaaattattgaaattagaaattttctaaatattcacttacttttttattttaaaattttcaactaattacaaatttaatatttaaactcataaacattaaatcatactataattaatcacatttttaaaaaaaatttattacatataaaatttaatttttgtttccaaattatttttttagaaaatacagttttccaaatcacattgcaaaagatttttttaaaattaaaacatctctaatttttttttatatattttattaactaaagagtaactaaaagacgaacaaaatttatttcatcaattactttctgaagttattataaagtaatttattattgggtgattctacaatgcatccccttaaaagggatgtactggtgcacccttaacttgtttcggcatccagaaaaaaattttagtctaat

SEQ ID NO: 20095 - DNA, 3914 bp, Cannabis sativa
  modified_base (2785)..(2792): a, c, t, g, unknown or other
  modified_base (3864)..(3865): a, c, t, g, unknown or other
gttcttttcccatgctgtttttacaagtaaaatttataaaattcatcactaaagttctgcagttccctcagctcttgtaataaaattgtacaaaactttctctattgttaaaattaggagatagtatttttattaaggcaaagaaaaaaaaaacatatgaagctcttgttttccaaactttttttatgatatggaataacatcttatatctaagcatctaataagtgttatcacatgaatggttaaccttgcaagtccaggatattttaaaaatccttttttaagatatggaaaggttaagctattgagttttaatctcattgtactgtttcttttcttggtatggtgaagtgtatatatatatatatgtcttaccatttgtactgtgggggcataggtttcttataggtaccctggtggtccatgctttggtgaattgtagtattaccttttttcttcactgtatatgttttttcaagtgtaggaagaaactcaattttgatattatcttccctcttctatgtttttatttgtcatagtcaaatgatttgtatttactgaagttgttagttagactaatctaaaaattaattagtcttaaaaggcctacctaaaagagaagtctggaaaagggcctacacctatgaaacttgtaaataatatccaaatgtactcagaggacccttttccccaaagtagctgttcttctttcacttgttttccatatttgattatacttgataaatatatgccaaagtagatacttgatatataattagtcatttgatcattttaattgtgactaactcacttttagatgtaagcttatctttgttatctgattttgtccttctttgagataaagctatatttagatactgacacgatatcattagacatgtaccaaattgtgccatttgaatttccgtccagacatccatgttagacaccctttggaaaattgaatggaagtttgaatccaacaatctcaatagtttgagggaattttttaacggcttaaaaattttgggagtgcgatttgatcaaatagttgcccaatcaaaatcattgctgcaacatctgtttttgaaattctattattgctgtggaattgttctgtttttgactaaagtagttttgattttcttggctacagagttacaccgttatggcggcggcctagtggagacagacgcgagagacccttcttcggttcctacagaaaataaacaacagggtggtggagtgactccaaaagctgcagcagatactgtggttgcatcatcagttccttcggttcctcattcggatgtcttccacttaggagttccgtcacaacgatcatctatagtaaatcagaggccagggcatagagctcatcaaaaatggaaaggtcctgacaaaattagtagaatatatggcgattggattgatgatattgaataaaaattagaattttcgctgacccgcaaatgtcgaaacaaactataataaccccccgaatcgaatttcgcataaactaaattacctctgtacgatattaatttgatcatgtaactctgtaacttatgatttgaagaagtagttttcatcttacttcaaatgcttgattgttcatgttagagctccataattatgtgcaaatctttgttgtattttaggctcattataatatggtcttctgatgatcttcaaattaccattttgccccgttagagtatcttttgtgtgacgcagtgtcaattttattacaagccattattattaaatcacaagagtagtggaaatagtttattccttctcatttcagcatttgaaataaaaatatatattttttttttcaggcaaataatttgcttctacttagtgacacactctttggtgtccaaaataatgttgttgtttctatataagatttcttaattaaaatttgattaggctattttgaaattttaccttaaattattataattattaaatgagcttttctcagttttaactaaaaaaaaggtaacaatattacaaatacttctaattggccaaataaacatgtattatggtctagaaactaagtctaagattggttctcacctaggcacatttcctaaactgtccttctttagtctaatttcttttctggttttagttaggacagttaagttagttatacctataaataaacatagcagtttattgcatagggggtatggttcagtttcactaattcgagattaagagcctttgtattggttgacagcctaatcagaagagagtcttgtggcataagagaggagagtacattagtgtacttggggtgataattgtttgcattattgtaatcattctttgcataattgaataaagggaagtgcctcaatggctgaactttgattccattttcaagtttaagaaaaagaaactacactgactaaagctacagtacaccaatatttattttctattttttgaaaaaaaaaaaactttcgaatccaattttttttttttatattttttttttaaaaaaaaacttctccaaaatgctctacaattacatattatatatataatagtaataacaacctaatataaatcacattcctccctaaattaattatagtcgctccaatattgttattcttcgataaggagtgtcatccaatctaatcctattttggtcatagtacatccgatctgtactaagtgcggattttatttttttggatccaatccaatccgcaaaagtgcggattggatcgattattttggattggttactttttaatannnnnnnntttaatatttatgaaaaaatattttttttacataagtagcaacaaaataaaacaaagtatagttattttatgtctccaaacaacatatcaaaataaataaaataacaaataataaattcaaaggaataaaaaaatttgtataaaaaaatgtttaattttattttaaattatatgtagaaaaaaattatacataagaatataatatacatttaatctattaagttttgaaatataattgttttatatgtattagatttttaaattattattttttttatattaaaatgttatttgtatatataatttttttttatatataaatatgtgtagattggatttgatcgattacttttacttgtcaacaatcagttgattttgaattttccaatctaattcaatccgcataagtgcggatatccgcactttacgaattggattgaattaaatcatgcggattgaattggattgactattttagaacacccctacctccattactctttctacagtatttattaacgtttttttttatgtctaggtggacagattgatgatagaaaagaaaatcaagagactcattatgatgaaaagaaaaaagtatcaatcatatagagttaattatcgccatcaattatcggtgaaaataaaataaagaataagaaaagctcttatatatgttataaaaaagacatttatttagtgaaccaattataattttttaaattaaatcaataactcaattacaaaataataatcaattcttatttttcaaattaaaacaataattcaattaaaaaattatgataattaaaaattaattaaattaaatttatatgtaaactatacatattgttaggatatttttcaaaagatatttataacttttatttttttctcaaattatcttaagacttattttagaaatgtatatattttcacattatatatgtatgaataagttttaaaattaattaatataacatattattattaataaaattaactatgttttttttttctaataaaatattaggtatggttatatatgtagaatattattaaaacaattatnntatagattttaaaataaatatcaataataattattataatatataaaat

SEQ ID NO: 20096 - DNA, 5577 bp, Cannabis sativa
  modified_base (5539)..(5543): a, c, t, g, unknown or other
tcctgtttagtgttgttgtttaataaattccatttcaaaaaaaaaaaaaaaaaactaatacaagtattttattaaaaaaaaaatacaattatcattttataataaaataaattaaacaagtatatgtttgtatgtattaatgtaataactaaaaaattaaaatttaaacattttttataatggtaaataatatagtaattttacaattaatattctctccatcccacccacaatcatttctctccttcatagctcaccaaacaatatagagtatcacaatcctttccattcttctactttctttatccttcctaagttatgcatctttctcttctccctctttctttccaaacatgccctaatacaaatacctctatttacaagccccctaagtttacatgaacattgatattatattatttattaagtagaacttgatttacaattgtatcaataagagtttgacacatcttgtttggactttacataggtttggattggacagaatcgtactaaactccaaattgaccttatttaaacattatgctaacagtataagggaaatatatcaacagtatacaggtgtgccaaagagataaataaacataaaaatccagataattcattcaacaaataaaatgatctgaatcaccatttcattacaaccaaccaaacaaaaacacaaacaaaaataataataataaaaataattaaactcctaatattattgaatagctaaagaaatatagcttaagcaacactttttgcagccattcatgccaacaatctgaaagagttcaattctctagcttgagctagcacatcttggctcaagtacaaggcaaagcctataaatgcatacaaggataaataaaattcctacaaactagtcatagatttaaaaggaccaagccacttctccaaaatgaaacaaaggagaagcagaatactcctaagcacgtaaaaggcggttttgtcgctactgctcaccctctggcttagctgcttcttttatctcatctgtgccctcatcctacaaaacatgccagcagataatgctcaataacaaaatcaaaacattaagaatttgcatcaaaacatgccagaagagtatagattcaattcaaacctgcatgtctgaggtccacaaagtgagattatcacggagaagttgcattatcaaagtgctatccttgtaggattcctctcctagagtatccagctcggctattgcatcgtcaaaagcctaagtaaaacataaaaaaggaaaaaaaaaatcatgagatgcttaacagaaatagttatacatagggcctagaatagaacagaaagaaaataaaaacacttagatatggaaaatccaataaatctaacagaagacctttacaacaaatggaattagaaccaaaaaagaaattaagcagagaaattcttaaaatcctaagttgtcaaaaaataaagaaccaaaacactttagccactttaaatgaggttatccagacaaagtagattgttaacaaaaagagccagcatctaaaagtgtgaataatccaactaaaataggtcagtaaatggtcacatcaaacgacaaataacaagatccctaagaaatacgacaggaaccaaatagcctcctgtcttatcacaactaaatctctaggatgagttgggagaataaagctatattttgtcttctttatcttcccacaggaatttgattgtttaattattccaataggaacttggacaaacatgttcaaaacaaaaccccgtttcacaaaaattgctatttgaattatattttagatttggttgtcaaatcgaatgtcaattcaatcttgcgatcgaattttcccatgacaatctaactatgatcatccccagatttaaagtccaaaagttaatgccataagaattcaagatctaaacatgaaataaagtaacggtttagagtttcgtttctttacctgctttgcaagagtgcaagcccgatcgggagaattcaagatctcatagtaaaacacagagaagttgagtgctaatccaaggcggatgggatgagttgggggaagctcagtggttgcaatgtcctgtaattaaaagaagtttaacaaaaacacaaagtgagcatatttcaattggaaaaaaaaaacggcataatttgttcaaaatgtcatattttcataatatttgaatctgaagtaacaacatggattagaaaagttgcgaatcagaaaaaccaaaagtaaatggatccaaatgaaatgaatcgaatcgaaccaaaaggcctaacctgagcagccttgtaggcagaaagggtattttcggcagcctccttccgatcggaaccattttggaattcagcaaggtacctgtgataatcacccttcattttcaggtaaaagaccttagattcagcggcagtggcggaaggtacgagctttttctcaagcagatccagaatatccccgcatatggaggcgagttcgttctcgatcttggacctatattccttaatggtggagacgtgttcggcattaccgcgtgtctcctccttctgctcaatggaagagacgatccgccacgaggcacggcgagctccgaccatattcttgtaagcaacggagaagaggtttctctcctcgactgtaagctcaccaacatcgagatctccagcgacgagctttttcatgaaatcagccatctcgtcgtaacgctcggcctgttcagcgagtttggccatgtaaacattgtcttcgcgtgtgaccgccattgatggagctcaaagttagggtctgggtttggtattgggaattgaatcagagagaaaaagaaagaaaactgaaaaggaatccgaaactgctatgctggttttgtattgggaaataaataataaatagataaataaataaaagtttaattatttttaattaatttatttaatattttaattttgtaattcttttttaagcatcttcttctctaccgttaataaatagagttttttttctcaaaaatagaaagtctaaatcttaacagtagttgatttaattaagggaagccctaaacatattacatgtggtgtttaagatgtgtacttttcgatgttacatttaatattttaataacttacttagtcttcctataattattatgtattaattaacttgtttttgaacaaattattaattaattaattgtagtgtaacataaattttatttctttttctcagagcattagcggttttatcatgggcagacctacatagaggcgagatcgaccctcttgaaaaaaaattgaaaaaaaaaaaatgagaatttttacaaaaatactgaattttagataaaaatttataatttttttgtcacagaattctttataaaaatactctttttataaaataaccgtaaaacaataaaatagaacaattgaaacaacggtggaacaactataaaacaaccgtgaaaacttaacacagtatacaatataaatttacacagtatttttttcaaaaaaatccaccccaaaataatagaaagtaaaataatttaaaattttaatatgtgatgtataaaactaaaaaaattatatattttaattaattataatatatatttataataatagataatattataaacataatattataaacataatattaactttgaaattaaacaatattcatatatggttgagatcaatagttcaaattccataattttttttttttttaattttaccccttttttataaaaaataaaaaataaaaaattaggctcctcactttaaattcacaaacttctattgatattttttctctcttacaaaatatcttcttattttattttggacacaattgatacaccctttctaattcacaattcccaaatgcattattttttttaatgggaaaatatcaaataatgatatattttgcaagattacctgtttagtttcattgtttggagaaatatacttttttacccagtactaaaataaattttctaagaaagataatcattagatcaaaggatagaattggaatcatcatctaaactaatttcaacttcatctattccaagagttgagaaagtagaggcagggttgggtcttaacttatagaggtccaaggcaaagcatgatattattgaaactattatatataaaatgatatatcttaaaaaatttggagcttttattttttttaaaaaaattaattaaaaagagctattttaacctaggtcttaggcatggatctaaaattgtcttaatccaggattggttgaggaaattacactctataccctttttatactatcattttttatttttactcttttttttaaaatatcatttttacctttttttaaacattgtactaattttgtccctgtcacttcaagatactctccgtgtaactctcttatattagggtattttggctacaatacatataaaaagaggtatgtttcaattaaatataaaattagaaataaatttgattaattgattaataaaagtagtattttttaacttaccccgggttggcttgctttgagtttaaggaagaatgaggtttttaagtttaaggaagaataaggtattaaaggttgtgaatatgttatttataaaatggattatttcaaaaatacacaaaataacaaaaaaaaatacaaaaatacaaaaatacagttgtatattttaaatatttttttaatttttaagattttatttacaaaagatatggtcttttgatgttttcatgttatttttatgttatactcttattattttgttgttttagttttttattatttgtatattatttttatgttgttttgttattatttggatattattttttttttacttttatgtaattttcttattattttagtgttatttttataaaataccgtaaaaatacacatatatatatttaaatagaaaagtgtaatttttttttttttaccaaaaatagtattttgtgtaaagaatttttttttttttaaataagttgtaatatctttttaagaaaaataaaaataagtaaataagttgtagtactcaaattacaaaactgaatcgaaaatagaccatttcaaatgatctctctatctaagtctgatgatttcctaactaggttgtgtgctaaaacattatcatccttgaaatgtagtttaaggaaacattaggaaatgaagataaatagttttgcaacaattgaacaagattcaaaaggaaagattggtccttccatttatgcttgatcttgttaactaaagcttgacagtctgattccactgcttttaatgggaagtgcataactacgccccaggagagggttgcctgcagggccttagctttagcatagatgggagttgaggctcctacaaaatgagaacacagccctgccacaatagctccaacacctgttttcaaagcttgaacatcaagggaagcatccactttcagcttaaacatcccagcagaaggtaatctcgccctactaaatgttgggaatattttaccagnnnnnagatttactaataagtatgttgaattaacatcct

SEQ ID NO: 20097 - DNA, 2940 bp, Cannabis sativa
tcagtatatatcacacaccaaaaaaggggcaggttcagtatagagctatggaagagttacaagaaataaccaatctcataacaaactaatatatgatagatagatatcggtaaccaattggtattaacagaaaacaactaactaacaaataaaatgagaacttccatgctaactaactaattgttatctctaataataatatgcatatatatagcaacgtaaagtttattaattatgcatgtattattcatgtacatattttataatactaatttaagaaacttattacatttaataaataaataaagaagaggatccattgtcgtaaaaagtagtatggcgtgtgtcaattacatctttacgtttttaaatttattacagttgcaaccacatattatagaattattctcaaaataatattataaaacttcaatagaaaaagaatggaaagatgtcattttcatggtggcgtaggatggtccattggaaatggttccaaaggcctttctggcttcctacaaatacccacattcccctctccttcctttcccatcattcactaccctcatcactactactactactacttactctctctctcttctcatcctctctcttaaaacatatattaaaacttaccataattattatcacatcaccactgctgctgatcaatatttttattcccctgcaacttgctcccccagtggtctgtcttgagacctctgttggatgctgttgcttttctcctaaggtaataataataataataataattactattattgtcattataatcattaatgttaagattatgtctaattatgtgtattaattactttttttgtttttgtttttgtagctaattaattaaaaaaaaacaactacaaaaaaaaaacatgtctggttctctaagcaaaagcattggattgtccacctcgttcgtgaagatcgtggagcaagagtgtccatcttcaatggtcaccggaggaggtggcgaagggaagcagggaatagctgtggctattcttgggtctgaggatcattactgcgaaagaagcagagcttcttctctccggcgaacactgtcagctgacatgtcttccaagacatggcttgctcagaatggactgctaatctctcccatgaaaaagattgcttcatctaaagaactcgtttctattccatctcgtcggcttgactcattttcatcctcagaagatgatgatgatgatgatgataatgaaaagaatagtagtactaaggatcaacaagttggaggaggtaaaggagagtacgatatttggagtttgataatttctcaaaaggctaaagaagaatcaaaatctgctgcctcaactccttatgttcacccacttgtgaaatccagagcaagttctttgagtgaaaacagcctcaaaatttgcactgagagtctcggatgtgaaaccggctctgatgggttttcactcaccggagactcatcatcatccgacatcgaaattactcaagaagaagaaaaagagaaaacacagcttaaagaagcagttgaacaaactactcccactgttgtcacaagaaataaatcggtcactcctactcgatcgttcccaccgccgctcacttctctatctggcgacggggcgtctaaggttcgcatgcaaacgcgccgcgacaatggaaggctcgttgtggaagcggtttctgttccgtctcagaagaactacttcgcggctcaacgccaagatggccgcttagtgcttacctttgatgtctcagctgatgatcttgatgagaaagaagtcaaaaccgaagaagaagatgtggagttgatgaaggaggatggcgagtttgaggaacagttcggaaactgctctgaggacgatgaggacaacaaagaagatgaagatgaagatgaagatgaacatgggtatgatgataatgaagaagatgatgaaatagtttatggtgttacagaggaatcttcaaaactaggatcaccaagggttataaatgtccatagattagccttaatgatgaacaaacccataggtttagcaaatatgaatctttcaacaacaactccatggtccaaaaaattgaatgaagattatgctgatgaggatcagaaaataattgcggctcaaaccacactcgcacaatctctcccacctagacctaggcctgcggtgggccgactcatagcctcaccgccggcaacattggcaaagggtgctgcatccgcaacggcctcgtttaacgcttacgagtacttctggcggcggtctaacccaacagccacaaccactactactctaaagatgaacaattgtgtttacaacaataaagtcatgaataatcatcatcgtttggagccacaaatgctggttttgagaggtaacaaaggagagtacatggtttcaacgttaaagggttgcaaagagcctagacggactctattctgggagccttattgcattgccacttcatcataataatatcatccattgttatcgatcgatggtttcactacttaattaattactgataatccattatattggctaccttaatccgatatatgtatatcatttctcaattcctatgttcttcagttctgttaattagtcaatccaaggaaataaaaaaaaaggacagagagagagtgatgcttcactttgattataatcaaagaaagaaaagtgatcactaagtaatatggttgtttgtatcataataatttatatatataaaatttattatatatatctctctgtattagcttctatatatgtaagggtttgaccaagtgggactacatgtctcaaccctgcagcattaatgttttttcactaattattacatttgataattgcttttttctagtgtatggtttcttaataagcagctagcaaattgggtgatgtgtctggcacattg

SEQ ID NO: 20098 - DNA, 6642 bp, Cannabis sativa
  modified_base (120)..(129): a, c, t, g, unknown or other
  modified_base (177)..(190): a, c, t, g, unknown or other
tccaattttagtaaaaaaattctaacatagatgaaagttcagggggcatgatatagtacatattaaagttccaggagcatgatttggtagatatcaaagtctagggagcatgatttagtnnnnnnnnnntcactaaaatagtaaaattgaatggaattagacaaaagtccttaaatnnnnnnnnnnnnnnagttcaggggaaatttttaacagtaaaaagaattcaggaggcataatttaatacatatcaaaatttatgggaaaaaaaaatcctaattagcaaaaaaaatttaaaaaagctattttagaatataatttgaagagaataaaaagtagtttaataatgtaaacataagcttagcttaataggttcacattttttctcacaaaaaggagaccctagtttgaatccttattccacaatatatatgtaatattttataatgctattagctattgatgattactaaacaaatttaattttaaaaatattaaactattagattttgacataataaataataaaagactttttttttaatttttatgcttaatttatctacttatattaaagaatattaaaacatatctttttttatatactatatcaaaaatatgtttatatacaaaatatttaaattaaattcaaaattcaaaattcaacttttttttatctttttttttgccgatttttttcctagccactagaaacttatttttcttaatattatctattcacaagtaatacacattcaaaatatatccatatttaaataaaaagtatttttttccttaaaaaagtagttttatgatacaaataaaaattatcattaaatatatctaaaataggagtcaagtttgatattttttcaaaaaataaaaatcttattaaatttaaattttagtgaaaaaattagacattttgtactctacctttagatagagagagaacttttgtgttcttcctaattaatttttgtatcctttatgtgctgttgaatttttgtgttcttcctaattaacttttgtgtcctttttaagtgtttttgaaatttttgtgttcttcctaattaactttttttcctttttcaagtgtttttaaaatttttgtgttcttcctaattaacttttgtgttctccctaagtaaaatacgacacgttttgcaaaaagaaacaaaaatgaacacgtggattataatatggatttcattgtttgaagcttgggccacgtggcttccctaaggcccaactataaatagagaagaaatttggagctgagaacgacaacaaacccatttaactcaaaaactaaaaatggaaccagagccaccaccaccaccattctcctcttcctcatccaaaaacgacaccaaattggccaaaacgacagacttattcccattaacagacgatcttctccacaaaattctctccagactaccggcggtgtcgtttgcttcggctgcttgcgtcagtaagtcctggaatcacctctgtaaccaggtcctctctcgtcccaagctcgcctccgctctctctctcgatccttctccagaggtaattgctttcttcccatttgcattttctgggaaaatttcaaagatttgagaaaatttcttcttttttttttttttgtttggacataattattgatagattgctgtgagtgaggttgttgataaagttcttgctgagccaattcgaccccatttcgttcttgcaagtattggaagtgggtttcgcttgtatgacgtttccagacttgtatgtaatctttcgcttttgttttgtttgtttagtatttttcatttgttattttttgaaattttgttttttttcattggtaatgtagatttcaaggaaattgggttcgaaaacaccattgattatatcaacttctcttggagttattggaagagatgctgttactgatgaagttacagaggttcatttctttgtatttcttatttttgcttttgttgtgagagtttgtttttgtttttgttttcaagcaagggagaagttaataatgtatttgtttcatttggggaaaaataaacgacaaattttaggttaagtggattagtttggctggagatttaagtgatgatgatggctcagtaactgcagaagatgacaactttggtatagttttaactgttggatttgtgccaggactagtagttgatgttgtcccattgttacggccaacaaaggtgacatattctgtgccttgaactcactgccaattttgttatttttatatttgaaactcgtggttgtagctttgttatatggattgttcattaactagctaaagaaaaaacatgtaagctctttgtgcatcttgaactgaaaatcaatgttattgtttggtgaaaatttgggctggcatcaggaacctcgaaatgcaatgcttgagaaatttgttacagacataaggggtttctgctcctctgtttcgggtggtcaatccccagtagcgattattgtcttcggagtaagttttttagttggttcattgtctgttcctgctaaacatatttggtattgattgtgttgctaaattctgacatcatagatggaacaggaagggcttgttgacatgaaaccaatagtcaacattttgggtgagtttcttgcagttttcaattaccttttgtttattttaaataagaattttcggaatatgcttatggttacatattgttaggaaagttttgttgaataatggcatctcaaaatcaaacctttcagattatgctatgcccaaggagactgttattgtgggtgatgagagaggtcgctttttgtacaagagtggaaatgagtcccgaaatttctgtggaagtgcaaaatactttactgatgcagtagctcttgtatttgccaaggatagaaacagggcttacggtattataattatgttcttctcgaattaaccatatggattgctgttaatatgttgttttgttaactatattcctgatccttatacattctggttcggttcggtggtaatgaacaggcaatggaaacattcaattccatgtcgcattatccaatggagtgacaccagttggcccacgatacaaggcagcttctgttaaaaggaattgttctgatcattcaacttggctgacggcgaaattagaagggcaacaggctgttctcgatgggcaaagaattttgaatgatatcaatgatgaggtattctagcatgattggttttaggtctcagctagtatttatgctgcactttttgaaaaattatgcacctgaagatagtaattatgagcttttgccccgtctttttggtgttcatttacacagttgggggatcatgctggttcttctgatttgtacattggagttatgacgaggagaaattgttctatccgatcagaaaagccaagattgctaacatctttagctttccatggagttgtagagtaagcttatttttccatctttacatgtcctctttctccttaccttttttcttcttatgtctttatatgctttctgttgctgattcatagcaaagcagcttacttgactgtaccatcattgaattttcacataatcttgttttataggggagatgaagagtatctttatgtaagcggtgaaggtatcagaacaggagattactttcaattctaccgttcggatcctgaagctgcattgagctcaatcattagtgtcactcaaaagatacaaaacttaaagttagatcaaaaccagaagaacagctgttctcaaatttttggaggtttgattttctcatgttacggccgcagtgaacccttctttgcaagcaacgtcgacagtgtcccatttcttgagaatttggccgaggttccattcggtggaatattttgtggaggggaaattgggcgtggccctttgagcttggttgacgaagatcggcaagaaagtcctgtcagctgctgtctgcatgtctatagcactgtttatcttgtgatgacatgtactcctccttagaattggtagttaccattttgaataataagggttgtgttgtgttgtgttgtgttgtgttgtgtgatgttggaaattaattagcacatgtccatgaaattgatattcatgctgtaatgtttcttctaattggaaatgaaataagtgtttttgttttgtaaagtgggactaagagactgagttttgtgttccaagggccatagaaaataatgctcagtggtcatacttcttagtcattgccaagtatgttgttgtactaaggttgattagtctaaagtactctttttttgttgtcatatcttctctacatttcaaaaaactagatgtatgtagaaaaaataaagtaggtgtaaatttgtttttgtttaatctgtttaaataactattactttaaaatgttcctgttatatataaaaaattgaaaaatgtatagtgcaaggggtgcattgatgcattttttttttttgttgaaaaaagtaatcaaactttattaaccttcaaattctgctaccacacagtgtagcaaatcagttgggacatccctcatattgaaattacgatcaggatataaactaactgttcttgtaaatgaatgagccactacgtttgctgaccgtttgacaaaaaaaattgaaacatattttaaatcaataagcaaacgtttacactctttaataacctgaccaaataaagagtttatctcaatggagcttcgtatcgcttgaaccaccacaaggcagtcggtttcgagtaccacaggctgccaccggttttgctttatccaactaagtatctccctaacaccaattgctttcgctagctccggcctaacagctccatgacagtatcttatagcattgatgcattgatgccttttttatttgtttatgtatttgattttttttttcatcaaatatatttttttatagttgtctatattgtagttatttaagatatcatgaaattttttttataattatatacgttgtagttattttaaatattttacaaaattttaaaaagtttagaaaagtgaaagtaagattcaaacaatttgttgtacgcgtaatttttttttttttattttatacgcatgtgaaataagactgtttgaacaatgctttgcatattgtaaattattttgacttttttaaaattttacatcttaaataactataacatacatgaatatgaaaaagaaattagattaattttttttagatgtcaaaacagataaaaagtgtatcattgtattctttttaggggtgcattgtagaagactaaaaacacataaaaacaattacatagtttttttttttaatataagaaatgttatttcaattaagaaagttattatttttgtttttttgaaaaataaaatttttaataaaatgtaagttgtattatttaatacatatgtaacaaatgattcgtattataatatctacaaaggatctagggtcaaccccaatctcttcgacccagattggacacgggcttggaccgaactggactaagaccccggacccgacccagagttggtgttggggtcgagtttataaaaaatatattataattttacacaatttattgatataagtcaataccaaatataatattgtattaaataatactaagataatataatacaatacaatctaacacaatatacaatacaatacacgtaacaaacgagttctatattatttatttgttgtattttttggatcgtcttgtgccatcttcttttgttgtatgcttgttcattgttgtgtaaaactacatatctatgactatgagatcactcataattcattgttggtcggacttagcatgtgagagacatgtaatattgtgttgcttgcccgtagccccaattttaagctgatttgctagtttgaaatgacacagaatattgcacctacagtctattttttttttttagtgtagcataatagtattttacaatttattaatagcttataatataaaggtcttggattcgaacacatcacctttctatttttctcatctttccctcaccattaagctagccttagtagcttaacaggtatagtctattattaggaagtcgaaatcatcagttcgtgacatagagcatgacattttttatgtgaacgattgtacaaatatatgcatgattctcaaatagtttcacagcttatttcttaataatgtttagtaaaaagtgaacaaaatataaatacttctaagagttattcaatcaaactgatattctgtattggaatcatttcaatattataaaaatattaattttttatattcaatttaactgtaaatactagcagcgaaactttttatttttaacttattcgttaaggtttttaagaagtgtgataaggtgtagcaggctttacataataatcaaataattacataaaataaataaagtgtgtgtgcttaattcaatataagtatagtttaaatttaaatttgttcaataaaattttatggatcaaagtgtctttaattatataaattttaaattagaatttaattatttaaatatgatcaatttagttaaattgataaaattttattaattaattttaattttaaggtaataagtatgcacaatttcaaaatacaaataag

SEQ ID NO: 20099 - DNA, 5313 bp, Cannabis sativa
ggattctctttcttagtaaagagagcataaatgattgtatataatcatacatgtttcatgattttttattttttgtattttgtatggttttctatgtccaatagtggtgtatttgctaatttacttcacaacctttttccttcttgtgttcatcattagttacttctggttatttttttcatcaaattagtttttaacttttgttaactttccctatgtttgatgggcaccatcttgagttcattattatctgtaaggatggttttcacaagttctctactgtgttgccttatagtataatttgattataatatgcagaaacaatagatctatattggtactttatttagtaattctcttaatttgatgcagtaagtattatcttctcttcttggtgaaagaaactctcaattctagtaggaatgacgaaggaaaaggggttcattgttttggctttattcttaatattctcgctcatcatgccatcttccgccattgccaaatctcgtcgtcccataactgtatgtttttatgtctttaatgaatttaagaatagacttgaatttgtggtcaattctttcgggtgatgtttttcttaggatattgagatgaggcagaagaagaatcaatgctacgaggacattgagaggtataattttctattcattgtttttaactttgcttttgtaaattttgcatttgattttcgatttggatgggttggaatggaacagtggattatggggttggcagtgcaagtcttccatgatagcaaaggaaaattgtgttttgaaatgcctttctcctacttgttatcaaatcatataccagcctgatccggtaaaacttattttatttgaacttggtaataatattcaatttcttgatattcttactaatctttgttttcattctagctcgaagaaggagaaaaagatcttattaggggacaagagtacaagtactgtatgcacaagtatgttactttcattcttttaattctattatgaacgtgaaaaataccacctttttttttcaactaatgtttactgtttatttcaaagaggggaaaaacaaaactattgtttagtgtttactgtaaacttgaaaaacctcataatctaagcaaactactttcccatccggaattagtggatagcccacaaaaatatcgccaagaccaccatctacatgcctaaacgaggtgtcaactgtcaactaagctttgataaatccctattaaaattgtgcttccattccatcttgcaaccacctgatctataaagactgctatgttcttccctcaagtagatctcaccaaacctagcagttgctgtcctcacaactcctttctttccatttaaaataatagaggttgttgttgatgcatttcttctcaaatttgttttaatatctgctttccgtttatgaatttgttttcgggataatgactacagacaagaaaatatctgtgaacagtataaagtaaacattgtgatggtgtgagtttcttaacatccaaaaactgagaatatttttctgagtacggaggatcaactctcctgcaaggctctataattagcccataacaactcttaaaataaacattgagggtgtgagtttcttatgaacatagtttaacatctagtaatctaccttagtgatcaggttataaattcttaaagtatctttactggtttgatgaaatttcgacattgtcttccttgttcttcctttttgtgattgtgtgactttgttgctatatctactttattcaagtacataattaagttgcattacaacagactatcgttgggagagagtcttgagggtataaagagttcatttgagtaaaatgagtgacaattacggctgcactggatccgtgtgaaacaagttcatcaggtgtttgtaaatttgaaagaaggaagttatgtgaaaggaaggatgtgtgggattttgatacgactcatcctgttggtgtttcaatgttgttttcgtgtggaaagatataagatggtgttgcaaatcaagtcagtttgaacatatgatgaccaccaagtctacttctggagtctggactttgattgctgtaacttttctactattaacaattgctttatgttacctaattattatgtagtaattacactcttttaaagtgtgtttggatttgaggtgataaggacttattaatatttatttggcaagatagcaattacatataaaaataattatttttagtacataatatttaatataaaaagtttttagtaattacacactagtcttatggggcataagaattgaagactttaacggagacttctcaattattttcaataattaggatatgtttggaagcaactatatatttactcaatagtgtaattattagggtagtaattacatttgagagtagttacagttacactctgttttaaaatacaatctgtttggatgttaagttataattgcatacaaatttttattttcaagtttagcaaatgagttactaattatacagtttaattatattaattatttaaaataaatagtaatattgtgtaattatattcaatttttataagggatcataagaattgaagagtgtaatcgaaattataattgagactcattaattatctcaaattacaaggttacttggttgaacaaacatttcaaattttataaaattttgtaattattttgaattatactcagttcccattgtacattgacttttcaaacgttcagttaaacaagtagaattgggtaattgcttttaattacatttaatttcaattattcttgagttttcaaatgtgcccttaatcttcttagctccacgcttcaatgttttatattatctagaatgaaagattttaaaatggatacttgtacttgtttttattttttattttttaaaaaatgtattacagaagtaacaaataaagattttatattataaggttgtctatttaattaagtgtttggtaacataaaacattaatgatgatcttgaccattaatgatgactcgatggtgaaaattgactcttgatgaaagttgttaattttcggagtttgaatcctgtctgtcagattgtttttgggtaatctgctagaaatattgcaactatgttaatggcgaattttcgacttgaaatcttcaaaattgcgatatgagtgtgagatatgatttgataaatctttgaaatagcttcgaaacacaagttgaatctcgttaatcaggtcaatattgagggagttgtgatcgtttaactgaaggttgtttaacaccctataactaggttgacatcctgacgtcaacctggacgccgagtgagtgttaaaatgtcccagactatttttttgatgcctaagtgatgtgttgacaccacttagttagattctgcattctggtgaagatgttcaccaattttcggagatgttatttttttgtgaaattaggaaggctaaaaactcaccgatttttctgatattccacattgttgaaagagtgaaatatcaatgtgtgaatttgacctatcacaagttgtagctctcgtttactacgaaaaaatagttgaatgctcaaaacgaaatcgaattttgacaagcagaacccaacacaccaggttaggtgtcaacttaggcgctgggtgcttcctaaatgccttcccgaggcttgttttgatacctctatggcatttgagattgcgaaagatttaattattgatgaaaacaaagaatatgcccgaaagacttcatctgaattgttgatggaagtggcccaggttgacaaagtgtcaacctagccactgggcccagtgcttaggttaacctgggcggtggatcctcattttggcctctaggtcgattcacttttccccaatagcacttgtttcctcgttttggatgaagatgaataaagtactcgagatacttctttaatattgtagttggaagtgccccaggttgataatatgtcaacttgggtgctaggtgtctggtgcctagggtgctcaaaactgaaagtgctttgattctaattttgttgccttaaatatgttcataaaatatctagttcatctcctagtacaaattttgagccattttcactaaggcagactcgaaaaccaaaaccctagttgggtagtcaccttgggcactaggcacccaagttgacttttggggtgttgtttcgtgtattttcagcttccaggtcttggatttggattcttcttgtcttcattgtacaaaatattaaaagatggtgatttggaaacaacttagtgagatctaaacacccattttggagttcctggagtcaacctgagggcaggactaggaacccttcctaggtcgactaccatgactcgggattactcaactctaggatgtattcttttttgccacatgttaaacattaatttcgacgtcaccagggtcagtttttgggtaaacattagtccctcaagtcaactttacacttgtgtcaggttaacataatgacgtgaactaagtatgtttctcttgaagctaccaggtgggcatcaattttggcaatcttaagtaattatttcttttcttcaatgtcctttagtgagacaaggaattttgaattcctattccttttggaacaatagaattcaaaatttaaagataaaaagaaatgagagaaaagagaaaagatagtttattttctctctcttatctttctaaatttaaattcactccttgttggcttaagaatagaggagattaatagttataaatacagaattccccccgttggtgtccgctagtgatgctgagttccaaggtggcaaggtatgttttagactttcagtttcacagtttctatcgttggccattgctccgttcttgtactgttaatgtttatgttatatgatcttataaaaaaaatgatattttttaaaattaaatttcatttgagcccagaaatgaaaccttcgggctcagcctaataacacccgaactcgaccacgtcaaacccgtcatacccgaccacccgaaaattaggttcaattgtgcatttccaagacccaaaatctaaaaatccgaacccgaccacccgaaaacacaactcatgtgcaaccctagtattttaaaaaacacaaaaaatatagcccacataggggtgttcataaaatagttagatccaatccaatccaatctaatctgcaaagtgcggatatccacacttatgcggattggattggattggaaaatttaaaatccgcaccatattagatgttgattgatatgtaaaagtaaccgatccaat

SEQ ID NO: 20100 - DNA, 1627 bp, Cannabis sativa
ttcccactaagtttgttatcagaaacatcaaatgattccaaagtggtagaacaattagagaagaaagatgatgagagtgaaccgttaaaacagttacctaagaaaacaacaccaatcaacttaggaagatggacaatgtagtctggtattgaaccttgcaataggttcccatctaaccgaagataatgaaggtttctaagagaagaaaactcttgtggaaatgatccataaaggtggttgtttatgaggacaagaatgcgaagaccggtgaggttagaaaggtggggcgagaggagtcccgcgagctggctttcgttgaggatgagctgagccacgcggtggtggtgacggtcacaaaagaccccgttgaaatgacaaacatggacagtgtggttccaattggaaagggttttgtaagggtcatggaagattgttttcttgaaggtgagaagagatgttttatcagtggctaatgagtggcctaaagttgttggaatgagttgttggagtaggaatagtatgaacatggttgtggtgatgaagattatgttgagattttcattatgtttgggtgttgtgtgatgattttgtgtcatctttgcttcttcataagattgaattttggctaagtataagagagaaagatatgatatggtaagactattatggaaatactatgataggttactataaatgttattgtaaagttatttttatagctatataggcactagctcctactcaaattcatggccttgttgacatatatttatttgcataattgaattgttatgtatgattgctatatatatagttacaaaagttggatggttaatctctctaaaaaaaagataaagaaaaagaaattaggtattaccatagtttatgaaagtctaaaattgtgtactagaaaaagaataaaatataagggtatgaatatcctttttaactttattacaatacttttaggaccatactatgtccattaggaattataaattatagtaatttgcaaaccatatatatgatatcattgttaccctttttatatctaactttattctattaaataaattttttatatctacttgatcataaactaaatggaaaatcatgacaagaaaataaaatcaatcattatgttgtctcttaagtacttaatctactttaaggtgactactactactagctccattccaatgtaagtcaagtaatttttactaacacaacctaaattaaccatatatattttaaacctgtattttattttagtttttcttgtgttgttcatgatgattctttgttgttgttgggtgttttatcgatttgtcgtgatggcatccttcaaccagacttaaccgaagtacttgagtttaaagaagctcttagtcagattaagagtaatgtatgaaacattgttatagtagagacgaattgtgtctgtagtaaggtaactatgcaatgtagatgagtgtcagcctttgctgcgtgagttgagaacttatttcttaatttttttaagcaactgctaataaggtgattaattatctttttgaagcttcttattaagagttaataagacaagggaaatttgattttctatgcattttttatacctaaatttgtt

SEQ ID NO: 20101 - DNA, 7142 bp, Cannabis sativa
tcacttttaaaatatacacatatatttttttaataaaggacccgataatttttcatttttcttaacgcccacccaatctcagggccggccctgttgttatggctatgcatgggattataaccattgcaaatttgcaataaggccaatcaatctctaacctaactaacttcaattactacagaaattataaacagttttgtctgttttcggatcaaaatccaaggtaaaagttatcttgcttagatgttctccggatacttcatagaagacaagatatctcgagtttcgtacaagtacttggaataatttggtaacgatgtgttgcagtgagaagaaacactaacccgaacatttgggaatatcccacacggcaatagatgtcgatgtacaatctcgtgagcagagtgcttgattgttttcgtggttgacattcattgcaagcatccatgcaccaattgtaacatcttcattgctaaacatgcgaaaactgcattcaaataaagaacagtcagattaaaacctttttttacagtgatcaagacaatagtgatgatgggtggtaccataaaaatttaacacaatatatataattataaataaacgaattcgtgtaggtacttcttaaacttagaatgctaaagagaggaccgaacaggtacttcttaaacttagaatgctaaagagaggaccgaacatagagaaggttgtaaaggaaacaagcttgcctgttatttctaagagcaaccaagcttgaaacaacatcagcagaaagagcatatattggaccataagcatgaagaaagtactccttcccgagcaaatgggctagcggttcatacctgcaaatatttaccattatgatcatcggcaaattcttaatagttttttttctagagatctacatgattatctaaggatccaactttccattttaacttctaacccgattgagtctcattgtgatatagccacaattatgattcttcatggtttttataaccaaaggaaggacttctagtagtaagtaccgaactagtatagcacattggtaagataaatatgaacaggaaaaaaattcactaaccatttcagctttggatcagtaaagaccgggcctttcttcatgcatccaaggtatgtctgtgagtgagagcgttctttagcaagaagcagtgaaaggcgatctgaaaatattgggaaaagattggatcggttaaatttcatgttcaaagcaaagaattaacatttatacggaagatggtaaagcttcaactcctcacctggccttaaatatatgtcatcatcggctttaacataaaactcggaatcatatagggcataggcagctttaaagaatgccaacctgtagtaaagcatagaatatttacaaagaactaaaatataaacgataattgctgatcacaagctagcactaacgttttgtatggaagcttactatactcctcttcaatatccaatagcaaaaaatcgtcataagtagcaatctccttcttcagttcagacatctttgatttatcattggttttaccaatgacaaacctgaaagcaagaccggtggcttcttctaatctgcactcgaaattacaattcatttaatatacaatcgaattagtcacaatatgaatgcaaaaatagaagtatcaaacaactgttttaagatttcaaaatcgatcgaaacaactaaggaatgcagggttggaaagtttcaggtgcagcttcaggcatagtagcaaccataagaacgcaagcagagtttggaaaaatggagggactagattgtattaatcgactacaaacaaacatatacaacaatacacgtgactaatacagaaaatgaacatcgattgacactctaaaaattaaaagagctgaacaatgagaaatgcagtgacaataattacaaattacaatggaccatgaagtaatggaatccatgtttacaccgataacttgtatgtggttatagagaggaaatctctaataaaaggaaaaaatctatcgaaactactgaaacaaaattaccaaactcatcagattcacccctgctcctattgttcacataaagattaaccggtacagtatttttctttttaaagcatatgattgctacattcatgaaatctgtatatctctgaaggtatacgatttgttgtcaaattcccgcggtgttagtctccccaccatgaactatacaagaagatggcataaacatttggataaatgacatttaaccacacacgatttcttagaccaaaggcattcaatcaacttcttctagtaaccgataagactccaagaatgcttacaagaaattcaaaccattccgcattattccatcctcctagtccaactcattacttaatgttcaacaagtctacattaacattcaggtcaaatccgaatcttacaatcctacttcaaaaagctaatccaactcttaacaaacaaaacataatcttggttcttggtgccactttacagttcatagtctctgatatcagcttaagttttcaagtttcctttttcttttttccaatatacaatttagctttttctataattagtaaataatacatcataaagaaaagatctccaaactagtttgtcatccaccctaagtgcacgaactactaactcatatgccacaataatagtcgaacaacgaacataaatcagatatgcctaaaaaaaatcgtacaacaaactagtaaaatactctaacaaagatcctaaattattacaaaaagataatctaatcaaagatgcagaaaccaaagctaagctaaacagtcagagtcaaaagaactaataagcaacccaagtgccaatgcaatacattacaaccattaaagctaatttacaatatagctttgaatcctccacattcctaggaaatccatttttagtaacatcttctttctcaaagatcaaatcccatttctcttactaaaccaaaatctctaagctaagccccaaatccccaaatcaactattaatctctactaatttagtcacattgattgaattcaaatacccaaaaagagaaaaacacaaagatcaaatctttaccgttgaaggccttgatgatcagacggcatccaagtcatcctcaaagatcgtctcctaccaaccgatccaaaaccagtttgaatccccacaaagcccataactttatgtcgtttcttcccatccccagaacccaaaacaccaccaaatccatcaatgttactaccaccactagtatctctctcccaaacaactcgaaccgatttgggttcagaatgggggcaattattaaccggcctgagaattgcgacgaatccgaagagaaatccggcgatcccgatgactaagcaagtggaaagtaagagagtagtggtggatctgcgagttgaaaggttctgttgacgagcgtggaagaattttggggaagaaggcattgttggtgatgaaccctagatgaaattaaaattgggggttttgtgaaagtgttgggaaaggatcatagggagtgaaaggagagaaatttggaagttgaattgagttgggaagtaagaaagttggtagctttggctttggttgagagagtgattgattgaagtgactctcttcttctttgcttcttcttcaattcaactcccaaactattttcactcattacactatgtgtgctctttcctcaatttgtctttttgttttttttttttaaaaaaatatttgtactatattcaaattattcaaatttgattagtctaatgatttgagatatacctgtgagaaatgttatagggtattatagaacattattcattgggcactattggtttggtgcctaaagtttttagttgtgacattttatcattagttaatttttttaaaaaagttactatattaaattatatgagattttatattattgtatcagtaataatatgacactgaggagattattataaaccagtagtgacttttaacatttaccgcattgtagtgttggacatcatgtaaggagcattgttattggacaccaacactactgtgaggtgacaacttgtaaatgattagtgatatcttatcattgttattaaattaagagcattgttattgggtatctagtacctttagacatatcgtcttgcgattgactagcaatattccttaaaagttattacattaaactatatgagattcgatatttagttggaccaataacgatatggatatttagaaaaatattaagtaccactgatgttctagcatttataatttattaatgcgaccatcaatttctactaccaaacacaatcacaaatatatctcttttagttgtatttttttttttttttgaaataatttattaaatgtggccactagtcacatatagtttatgacattaaaagtgttgtttaaacttctgttggcatctctttgttatgttaattacaattataactcataaattagtttagcatattctttagttagacaataactcaatcaatctcctcctttgtaactcagttaggtgtaaacaatcatatttcttatatttctaataatcatcataaaataccctataattaaaaaatcaatataaaatgatacttagaataacaaaatgaggatatattttcaaataaaaacaacaaaaatagtccaaaaaaggaaggactaatactaaataagacaaacatgttttctaattttacacaaattttggtgaactattgtggttcaaattacctattggtacaaagaaatgataccaatagtaacatgtgttcctcatttagtaacaaatcaatgcaagtttataccactagtaaacactaatccaacaattctaaaagatccttacccaaaacccatatcacagtcattcatatatattgaattgaataacaaaagtagatatataaataagatatggaacaagatatttaaacagagttttgagtctaaagaagaaaaaaactcatgttgggtacaatacaaccagaagtatctcaacataatgtgttcagcaaaatagagaccaaaacaaactctcttttctatcttaatattgtaacagagcctaaaaacaacataggatgccatttttgcttatctacagctaaaattgcccaggcatatttggttttttaattaagatgaatagttcctaccgggcacatttcccatgtctcggccaggtgtgtagctgttctgattgtctgcattaggtacattaccagaccatccaccgttattaccctgatgctgcattcctcccatgttcggtggtggaccgctgttgttatggttgggtggagatcctccgtagttattcggtggcatgccaccccagttgttgtttggtggtggtggtggtggcattccaccaccgtagttattgggtggacccatgttgttcggggggtatcctcccatgttgttggggggattagggggataaccttggcccatgttgttgggaggataaccgcccatgttgggaggtggcggacccatgttgggtggtggtggcgagcccatgtgaggcggtggtgggcccatgtgaggaggtggtggacctctgttgggtggtggaggccccatgttgggggaaggtggacccatgttgggcggtggtggacccatgtttggcccagcattgggaggaggtggtcccctctgaaaatctcggttttgcacattttcccgtctcctctcaaagttccttgatctatcaaaattacgaggtctgtcattacgcctatttctctcatttgctctagcattgttccttatccattcctcatggtacttggggtcatatggaaccgcttggccgttaataaaaggttcccctgccaataaaaaacaataagcaaaagaaaaagagaaagagaaacccgaatgctaacaaactcatgcaatcttcagaagacagatgcaaaatttgaagtttaacagtgaaaaaagtaaataaactactgacaaaattattggcaacccaaacatccaatgatgtaggatttgcttagataaaggctaagcattgggtgtctaattataaatcatcaacaataaggactcgggtgcattctttctcaatgattcgcgtaattggtagttgcgatcgtaatgggacagcttttgtacccaaaaaaaatcatccttatctcttttatgatgttttaaaatggaactaatatgcaactaaatagtttcaaaatgtccatcatattcttacctccataatccttgttcttcacatccaagtacgaatcaggtaggacccaacgcactttaggcaattctgaagaaattaaaacacaaacaatcatgagaaatacaaacggataacactattaacattcaattcaaacttgagggattaaaaaagatgatgtacccttgagtttgtaagaaagttcttcagacacaagagccccaaaagcaaaatagcatctagtagaaactgagtatatcttcattcttgcttcttcctcgctgtttgttcaaaaagagtagcccaaaaaaagaaaaatcaactacataagactgaattgtaatcgcagtaaactaaaaaacaattatcaaaggtaccacaatcccaattctaatgattaattcaatccaactaaaataagcacatacaaaatacaatacatgtcaaggatacctatgcaaaaatctcttcaggtttcattacaaaactcaaaaattacttactcacatgaatgcagacaactcccatttctagtgtagcaatcttaaaattaaaagtacatttcaaacttccaaaactcaaaaataaaataacaaaacaaagcaaaccgaacatcatttgggaaagagttatttgcagcataaataattctggaacctgtagctacttgttagtttacgaaaatacaacttaggtatctacgccgcaaattaagtaccacatgaattttacaaaacaactcatcaactgagaaaaaaatactactaaaaaacgaatcaaaaattacaactttcaaaataaacagaacactttataagagttcagaataacccactaaaaaccactactccacacaaataaaaagctcaaaaatttttttaaaaaaacaaacagaataaattaa

SEQ ID NO: 20102 - DNA, 2357 bp, Cannabis sativa
tcattgggtatctggagacttttgagggcaagtctccgtagccccaaagtaaaaaacctgctgcgttgtttccttttggtcattgtcacaggtagcatttaattgagggtgctgattatcaagttcagagatctcttcgatcacacaattactgggagcgtttgagtttttctcaataaccacaaaatgattttgggataaacaaatttgaaactatatcaaagtctcattctctcatattagtttgcgacttctaataatggtatgcatcaaagctagatgatcagaaataataaaggcattatcatcacaaggcaaccacggacacggaagaatattagtagtagacccatcaccaatcattctccttaaaccagttagaactaaatgttgcgcttctaacacactacaccaaataaaacttagattagcccccactatagcattaagaaatgacccatgaggataataaacaatacttaaaaaagagaaatcatgagtaactaaccttcacccatattttctcaacatggctaaattaaaatcctaaagactgtgaaatcctaaaccacccatatacttgtgtttacacatacgtgaccaactcatccaactaatacttagtttttgagatgaaccggtttgccaccaacatatttccataagtctttctaacactttgcatgtatcaagaggtaacaggaagacactcataacatagttaagaatagcctgacaatcttcaataaaacctcctttcgtacccgagtagcaagcgaccttcccacccttgaattctttctttatacttcaagaagcttaggatagatgtcttatttcttctgatagtgttttctttcaacacatagctatcattagcaaataacatgtgtgagatagttggagctcctctaactactcgacatccatgtattctatcctctctctcatactttcataaaagagtagaataacattcagcaaataggaaaaagataaggagaaatcgggttcccttgtcaaattccacgggatggaataaccggacccatcacacgaccaccatggacaaacaaatatgagatagattcctgatgtgtgtcgtttaccacaacaaatttattaatttttatttctatattaccaattagtttaatataacggtaaatacagatcgatcccacgagaactactatcaatttattattcaaaaattagtaacaagaattaaaaatagaggttttaattataaagattaaataataaattagaaagtaaataaatatagatattaggctattaagaaataattaagagtcaatctccaccctcaacaatcatttaaaatcaataataataaaaattactctaatttctcaattaaactattaaccccacaaaaaatgctaaagtagacaattttctcaatctccctattacaattaatcaaggcgaagcgctcaataattaattttttttttattaagcaatagatccatgaagcataaaatctatttaacttaggaaaaacatcaatttttatggagataagttaatctaggtaacaaattaatgaaacatataattcatttaatctaggttctattttttatcacaatcaataatacctttgacattactattaattgtaaattatcactctgcttagaatcctaaactattaggtgagaagtaattctgagatgatagtagaacaatgcaaaaccttaattagttgtacacctaacaagaattcacaatattcataacattcaaataaataaataggaagaatttaatatgagagaaatcaagaataacattcatcatcacaaatcaataattcacattttaggattttgaaataacacttaattaaaaagaaactactccatactcacaactataatcataagcataatcataattgaaaaattaaagagattaggaagaagaaaagaactacaatgatgaacaattcatgttgaaatcttcgtcttctctctctctctctctctctctctttcttttgagtttctctctcaaaaatgcagtctaaaagtttttaaaatgaaccccaaaattcctataaatactcctaaaaatcctatgatttaaagaaagataaaattttaaaaaatttggaatgtgctctcgctacgacaaaggttgaggctcgccgcggccatgacttgctgtcaaaaaattgttgttgagtgttcagattagtattttagacataacttcttcaatacaacttgaaattggacaattcaatatgttttgaaaagctgagaatgtgatctaaaactttaatgttcagctctaagtccagttttgttgggaatattttacca

SEQ ID NO: 20103 - DNA, 6151 bp, Cannabis sativa
cacaaatataaaataaaagtccctaataggaattaaggtatacaatcctagcgtttattttgaaattgagccattactcacccaatccttacaataatttagactaaataaaattaatattgttattatttggctgtctcacgttaattagctcaccatattcactattaatcttaatattaatgagttgtaactagtactaaatatacccaaaaaaaaaaaaaaaaaaaaaaccaacccgaaatgatgaaattattcctttttgttaatttatgtaatataatccattataataattaaattgaggcttaaaaacaatgaagctacatacaaaaaatattcgcaaattattatgggtactagataaggacatgcatattaaactttattatcctcacatatgtcactactactattagattattgaattaggaacgaaattagttgacataattaattattaataataataatccccaattccactatcccaccattaccctccttcacaaactgccagcgtgtccatttatatatggtgtttttagtttatacgagtaaatcattactatactaattatacttatcctttcattaaataaatactcataatacttatatatagtaatgataatcaaaaaatggtagtccattgccgttttttgtcgtcagcgttgtacgccgtccacgttttattattcactcgagaaattattcctgtgtttttatttcacctctataattattattattattattattatggctaatcaaaatttttattctccgaattgttacgtgtactaaatcatactcgaaaactattaagttgttgaatttaaagacttttgtctaattttagtaaaaaagtctaacatgtataaaagttcaaggtcatgattagtacatgtaaaagttcaaggaacataatttggtagagaacaaagtctggagagcatgatttagtatataaacaatcactaaaacagtaaaaatgaatgaattagacaaaaatcactaaatctaacaatctcaatagttcaaagctaatttttaaccgccaaaaaaattcaaaagatataatttagtacatgttaaaatttaagaaacaaaaatactaattaacctattattatttatttattattcttttctaaaaaataaaattcagaaaatcgttatactctcattttaagtcctggttggagaaataggacacggaatcttggtatagagaattaatcagtctaacctgcttttctgtcgaaaaattcaatctcatttatcatgagtcatgaaaacgcatgagacaaattataatcacaagtatttcattgtctgcagcaccaaaataaagagctaaagaaactacacacaagctagaatcaatttcgttacagagtcgattcactggattgcactaaatggcaaccaagtggcttgtattaactgatgaaagatcaaagatcccctacatatacgaaaatgggtccattaaacccaaaaatcataattgcaagtagctgatgaatttatgtatttctagttttaaaaaaacattatggtacaacgaaaatgagtcaaaattcaaaacccgtggcttggctagagcaatagcatatatagtgttacccaccacagacctaactctaattaatgttacatttttattttcatggcttgagaatgggaccacagccgcaatgaacaagttattttcatcaaccaaaaaatatatgatgatggtgattatgaacatggagatgaaatggtcggtcgaagtcgttttcttccgatgtctgagtggacacaattgtgccagctcagctggaccaaacattacaatttatttttcctctccataaaattcttcccgttaaatcaatagcaagggcaattatgtaattcaaaagatggggctagaaaatgattggtcggccacaagataataaaataaattgaatttaattatagatattggtcccaccacctctccaccttacttcattccaatgggttatggaggttatataaccactctctcttactctgtctctcactcacaactcaattggagatatcaccaaacaaataacatttatctttttacattaaaaaaaaatggagggcaaagaagaggatgttagattgggagctaacaaattctctgagaggcagccgatcggtacggcggctcaaacccaagacgaagggaaggactacaaggagccaccaccggcgccgctctttgagccgggtgagctgacttcatggtctttctacagggctggaatcgccgagttcatcgcaacatttttgttcctctacatctcggtgttgactgttatgggagtcgtcaaggacaagaccaagtgcacaactgttggaattcaaggcattgcttgggcttttggtggcatgatttttgctctcgtttactgtaccgctggaatctcaggtaattaaaaagaatcatttaattttttaaaataaaaacaaaaaaatatatcctgaaacgcccaccgtggggctcgaacccacgaccacaaggttaagagccttgcgctctaccaactgagctagacgggctttgtttggtaactaaatggttaaataactaattattgatgctattaacagggggtcacataaacccggctgtgactttcggactattcctggcgagaaagctgtcgttgactcgggcggtgttctacatggtgatgcagtgtctgggtgcgatttgcggtgctggagttgttaaggggttccagaaagaggtgtacatgactcaaggtggaggagctaacaccgttgccgctggttacacaaaaggtgatggccttggtgctgagattgttggcaccttcgtccttgtctacaccgttttctcagccactgacgccaagcgtagcgccagagattctcacgtcccagtaagtttatatcatagtactctactctagatcgattatcttattaactaatttctctttgaaaagaaaagaaaagaaaaatagttgattaattggtttttattttgatcagattttggcacctttgcctattgggttcgctgtcttcttggtccatttggcaaccatccccatcaccggaaccggtattaacccagctcgtagtctcggtgctgcgatcatctacaacagggaccacgcttgggatgaccacgtaagtctctacctagctaccgatctataaatatattatatttatatatgtaataatacacataggttggtcttatgaaattgtcattaaacagttaaaagataattttcttggtgagaagttaatacgtggacgatattctatcacaatcgatttataaatagtgccttaacagtatattgaaatttgtaattttgcagtggattttctgggtgggacctttcattggtgcagccttggcagccctataccaccaggttgtgatcagagcaattccattcaaatcaaagtgatgatcgatcatggaccgttgatgatgatcatgatcaaatgatcaaaaacaaaacaaacaacaacgtgaatatgattatatagctttgtcttttttgtggctttcccgttgttgctgctctttcaaaattagatcatctcatgatataattaaagaaaaacaagaacaagccaagttggccctgcttttctttttcaacttgttgctctttattgtctctgtgtatttgtattattatgtacgtaagaatctgtaataatagtaagctttgtgttgttctttatctaaagggttcttttctatttctttatttggttgaagaggggggcctatctcatgtgagtggtggcctggcgtggtctgtatggcagtgacaagtgaatatatgaatttgtgaatttttaaataatatatatccaaaaaatgattatcaagaacgatcacactatatttaatatttatacatatatattaaatatacctgctcaactgctcaactcaaatatacgatgatgaaaccatgtatttttaatattctcatcttcaattcacaaaactaaagcattaaatatataggaatagaccagcaatgtgttatgtagaattgcgagattggctatgagaggtattagtttgtttgtctcaatcactccacaccaatgcacactaactaaaaatatgcttttcgcatccgttgagaattaacacaaaaaaacccatttgcgttataattaatctgacacaaatacacgtaactcaaactttgatgtcatttgctataagagtgtgttaattataatttcttattacaattttttataagtcaatttataggctcgaaatagtatgtcaaaatatttttttcataatggtatttcttatagttacaaaatcatcaaaataaatttgaaaaaattatgaatagtttacaatatcaaaaataaagttcttgatattttaatttatgcgtgttcaaaaatatcaaacctatttttgggactgtaaactatttaaaaaaatttaaaatttacgaggatgatgttgtaactataacgaacacttccataaattaaaatttttaaaaaaatattttgacatagtgcttcataattgattagcaattttgtttttttgaacaagatgaataattttattcaaaaaacagaactagatacaagaccacctgaggaaaaacaccttagaaccacacaagccgaacaacaacaggcacggcaaaaccagacttggctaccaattcaagattacatcaagggaataactgttctttttacaacaattaaaggcgcccaaacataaaattctaagcttcatcattttctttacttcctggctaatcctgctaggagaagaacaaaacaggttgaagagatagttatttctatttcaccatatcagataaaaagtggtagcaacctgcattgatcaccctaatttggagatcatgccgagccaagaagcacatgttacacagatcagtaattgaagttggccaagtaacttgaccaagccaagaacaaatatgatcaatcacctgtttcgagaacaaacaatcaaacattacatggtcatgagattcatccttcagctcacaaacagggcatttgatgtctttaataggcatgattctatttagcttgtcacgggttagaagctacgaattaagaagttgccaatagacaaacctgtgttttggaatcacaagtctgtctcaaacccagccagcatagtcgactttattctctatcacttgttaattatagaatcttgtagcactaaattttccatctttgacagcaaggttcagctgagtttcatttgtagccaccctgagattcagtaatttcttaaaataccaggttgtatcaggttttgagggatagctccagatggattggcctttcaggtagattgagttcacccatttcactcattgattatcttgtttgcttgatatagcccaaagaaacttggccattaaagccttgttccacttctttccttctcgaaaaccaattccacttaactttttgggaaggcaaactttttcccaagaagctagatgaaatttgcttctgttcccctttttcacccataagaagtcccgacaactcttgtctatggcagcaattatcttttgaggaattaaaatgatactcatccagtaattccttataccaagcaacaccgagtggatcaattgaggaattaaaacctctgcttgactaatctttattttgcagatgacctcattttatttagcaaaggcaacttgaaatcagtgagaattgttcaagaagcctttactaaactttgtaatgctacagggttatctgcaaataaagctaagtctcagatcttttttggtggagtcaaagatgaagttaaattgaagattctcgacttgctctaaatggaggagggttcttttcctctaaagtatctaggggtgaatcttcgtcctacaaaatagaaggcttcggactgtggtgtgactcttgataagattagcaatttttttatcgattataaatcagtgaaaaatccatattatacatagtaataatagttattacctggtgtcatttcagaacgaaaaagaaaaaaaaaaatttaatggtttatgtgtagtgaataggattgaagattagt

SEQ ID NO: 20104 - DNA, 1849 bp, Cannabis sativa
  modified_base (1464)..(1485): a, c, t, g, unknown or other
tagcatcttcaaaaaatgctatgattgaagatgctaaaccataataattctcatgtattgatcctttacagcttgtacccaaaggacaacaaatcatactttgtcccatatatatagaaaaggccaggatcctagttcatctataggtatgaacactcaatttaatatatatccttcttgaattgattaccaagattttctattccattcccaatgctcagtttggaacagagacagccataatataatatacataaattttctttttttttcttctttctttgagaaaagcaaaaatttccatttagaaaaacaataaaaggggtattaatgtttttccttaatatgttaattttgaaggtaatattattcctaacgacctcaaccaacgccaacttcttatatggttttggtgagcacaattcaaccaaattgatagacctttttgctatattcaagccaaccactacttacaaaccccaaccacaatcttatgatttggttcgattgaaacatggttttttggccttgccaagtgggggcacacacagaacacttgtgttattacaatatgacacttttttttttgttctttttcttttttagtattgaaaaagatgtttatatgtgtgaaagcttattgttcttagggcaaaacacaaaacttcccattttcatattgatttcatcaatcaataggatcacgacataaaatttaatgcacagctctacttctccctatacattaactgcataggttttgatgtctaaaaacttttctccaagtaaagtgacataactaaaaacattatggtatcgaaattaaatatcaaaggtaagtggttaaccctcccattactaccactactaaatgggtgtatagtattcaaaataagtggttggttttggttatttccatgattggtgggagtaaacatagctagggctttacaaattctacaaaattatatttgtcacaaatataaaatttattattagactgagatataaaatgactttaaatttaaaaattaagttaacaaatattttttaaaaaaaaaatagtaaaatgatcaaatattataaattagctaataaaaattataaaaatatataataataaattaagttatataaattttttagtattacatattaatatattgtaataaaaataaataaatatattagatcattaaatatatacaacaatatttaatatatcgtattactaaaaattaatatatcgtagtgataaaattatataccacaaataaattataataatactaaattgatattgaaaatatatatatcacactaacaaaattatatatactattattaaattatgtataccataccaaaaaaattatatataataaaatagaaattaaatatcattttaaataaatgatatagtatacacaacaaaaatataccatacaacaaaatatatatacnnnnnnnnnnnnnnnnnnnnnnataatataatattatttaaaaaattatgtatactatattaacaaaattatatacaagcataaaataattaatcatacctacaaaattatacatcacctttatatataatagtgtaaattgcagcataaatatctaatattttagattttatacacttaaatatcttatttttattttttgaggcaaaaatactcaacgttacaattctcttacaccgttactacaacttccattaactcatatatatggacacgtggagggcacaaatgcattacatttatttatttttattttaaaatttaatattcttaatattaaaaaccaaatactacttgtttccaaaaaaaacaaaaacaattctcat

SEQ ID NO: 20105 - DNA, 5668 bp, Cannabis sativa
ggtaaaataatttccaacataagagccatgaagttagagaagtcgaattcacaacttcacatttctcatttatgacatgataaactactcaaaaatgggagttccgagtctcccatttctgtagaacagcaacatctccgggaactggtgactcgctttgccagaacatagaaatggactaggtgatgtcaaaatatcactcagacatcaaaaaattacatccccataatatttttccactcgcccaacgtccaggttgacaggctttggatgtcaacctgggcactgggatgtcaacatgcgcgttgggcctagaacattatttagtttaacgacaataattcactcaatattgatccaattgacgcaattcaacttgcatttcgaagctacttcaataatcaatcaagtcgtgtctcacacttcaatcacaattctaaagttatcgatctcaaaacccccaagggagttatggaaataagcttcggcttacccgaagcgggtcttgccgccgcgacccgctcagaaaattaaccatcaacctcagaagttaattttgaccataattttgaccgttagctcatcatctatggtcaaaattaaccaatttagatcttttcatattttggattttttttttttctattttcaagaacctccttcacctataaaatgagagctcctctagcttatttttcacatttaaaaaactacccataaggtcagaacatctctctctagaaattagagctaaaacacttagccatttttctttaataccatctcgtgagaaattaaaactcgatgtagacgtagttccattactatcgcgatacagagagtaaactactataaattattatgtctctcttcattcatatttaacaaatattttattcttgccaatctagtaagtgggtgtggcttgaaaatctctgtctaaatttctgagtcaacattatttaataaatttttttattgaaaaatacttaacaaaaaaatacatttttttttatgttttctttacagtttaacaaattttaaaattatttaataatttttaattaaaaatatatgagtggaccattaatatgccgacacgtgtcaacttagtatattttaatagaatttaacgaactggtaatgccgaaagtatcgtaacgtaattttaggtatttaattcgctaaaagaaaaaatatgtggtatataaatgcataatatctaaaatatcaagtatttatgtgcaaatacccctatgttggaacataatttaatagaaaaatagtaacggaagtaacacaaatataatttaaagaatcaaatctgctgaaaaaaaatatcatatttaattgtataaagcttgtactaaaaaaaaatatataaaactaaaaacttatgtatttatgccgcaaatattataggataaatacatattttccaaaagtattttaaatgaattattaagacattaaaaaaaaaaaaaattagagtgagcataaccaattaggtcaatgcagattacattagtaaactaatctttcttagcctattttagctagtcaaactaatttttgacttgcaacttgttatgttgcaaatatcagtctaactactaatactattataatttttctaactcaaccagtaaggtttgactgattatacgtttctttcagtggtgcgttttttttttattcaaattggtgtaattacgacgctttatctatattttatttgcctattcttagattattccaagttcttcgttggtgacaaaaatattgatttgatgagaattgagaaagacaagcatgaacttttcaaagaaatataaatatttggatcaaatcctttagaggtgtggtctctttctttctctcaaacccaacattttctttttcattcagatacagattacccaaaagaatctcaaacctaaacctcagacaaagactttttttaagatggcaaaaaaattaaaggggctggtggtgtattattgaaattgattctcagaaatggaagccacataactctaacaaattccaaggcaagagagggctacctaatctaaattttaacaacggttcataaactaaacaatatcttctaagaagatatctcactgtgtattactctttatctctttctttccacatttttaaggttcatctttacatgaggtcctgctccagttctcaaaatctaaaaataatacagaggtgttatcctttgttcgcattgttcttgcttcattcaataaaaaattagcaatcttctcagcagaactctccataaccgagcagcatcgctccctaaactgttcggataaaagaccaaaatgggtaagtgtttctcttaattgtagaaagaaaaaccatattgaaaagtagagtgaggaagtacctgaaggaccagctgaaaagctttcttggtggtaatgacatcccacagaccatcactgcaaaagaagagtgtcaaaatgaaataatgacaaaaacatttagaaacaaaaacaaaccatttagcaaaagcaaataccttgctaatagcgcaaatgccccgttggctcgatcaatacgtacagctctacttataaatggttcggaactgaaccgagcatcttgctctttaagaaacttgtctccaagcatcctagcaagattcaaacctgaagaagaggcaaattgtgactactatatttaagatgatggtagcttaaaaacaaaaaaaatgaagttcaagtaccgcataaccgcatttccccatctctcagtggctctcctctttgttccatcctgagtctttcagtaggactaactactctatggtcttctgtcatcttaatctgcttcccatccgcatcactacaattaaacatatcaatataaattacaaattacaatacatataattacaattggtaaaagggcttatttgaaagaaaaactatctattcatcttgcaagttaaggatcacatctaatacataattaaacaataataattttacagggagatttagttaaggaagacgaaagaagagaaacattgatacgtacttaataacacatgctgagtcccccacatttgcacattgggcaaagaaattttcagcaccatcagcccataccagaagcactgttgcagtacaaccctgtgtaaaactagttttattagcataaactatagcattaaccgcatatatcactgcccaaaattattgaaaagatagtggatatatgaatacattttttttctgattttcctgcttgctgagcccattaataggggcatagactttctttcaaaacaatatattttgtacacactaaaacaagagtttcaaataataataataatatgcaaaggatgaaccaaaaagaaaaaagaaaaaaaagaaaggagaaaacctcataatggtaatccatggatgattctgtctgaaaaaatgcatctctaagaacttctgaagcatcacacagtgataaaaccttctcccttttttgggagtcagacaaaatagttgcaatggtctcaggaagcactctgcataacagaaatatcactacgctgtacaggataaaacacatacacacacacacactagctagtagctaccaagaactggaacatctatataactagttatatgggaatgaatgttgttaagtagtctaaataaatagtatatatattatttactgatgcatatgaaaagaaagacaaacaaactccagagttcggagaaagaaaagcagcttctgtacatcaacatatatgatgcattaaccattgatcctaagacataatttttcacatctaaaaacatgtgctatctggacaatgaggctacttctcactactattataacttcaccaataggctattagatgaaagaatttggaaaacagaaaggaagtaaagagaagataaaactgacttgctagcaaatttcgcagcatctgctccaccatgtccatcacaaataccaaaaagtccaaactgcaaagttaagcttctatcaaatattttggagaaatgcaaatttgtcaacgaaaaagaaaagctcgctagaattgagtacctgattaatcccaggaagaggccagtgataaaagcatacatcttccataggaaacttccttcctccgcgacgcaaagccatgggatctgcagccacaccaactccaaaggggatctcacattccttctgtgacttaatatgaacctgaggtagatgttaaaattggttaaaagttgcaaatacgagatcaaccataagtatgaaattgcagttcaactgtttaagagaaaaaaaggacaccgtagtagtattcaataagccgcaccagaaaatatatgcagtgttttctatagattctactgtgttagaagatactttaaactgaattcaaagaaaattatgaaaaagaaaatatgttatgccaaaatcaacagaagtatgtagacttacatatattcttgaagctgttccaagagttattacgtctccacttacaaccacaactggttcaccccagtgtctacttccaatatcaggatgattaattggttccgaattcaaaagtgttccattaagactacccatgtccctcagttcccatctcgaatcctgaagccaatggttcaagtacgaaataattagtgcaccatagtggatgcaatacaaaagcaagtccaagcaatacagtcattaaaatccttacattcaaattccagtttatcattgcatgcttccctgacacctctgaatcccttatcagaatgtcacttggagaaattcttccaagagttagaggaagcctctttgaatttgttgaaagtacagagtggcgtaatccacgagaagggccagaaatgacctccaggataaggcagctaactgcacattaaacagacagatattacacatattttcaggcaaacaaccagctgaaattattagaacattaacatcctaatgcaataaagagagaagtcaattactttgatcagtaacatcctttgagacatgttctggaaaaatttcatgctctaaactctctttaacagggctcttttcagccaacaactgatgtttcaaaattggacgtttaagagtctggccaatcgaaacatcttcagaatggtcagaaattacatctagaaccaagctatcacctgagacaagcaaaatattagtttggaataaaaaagaaaggaagaaaaggaatcaaaataaaattagcatgaccattatttcaagcatcgataccttgaaccaaattgggagctgtagtggtcacccttgacttgtgaacaagtccatatgttcgaggagagcggaaatgtccttcgttctggtaacatgctccctctaggtcataatctcttggcaattcgttacttggatttggtgtctgatctgcaacatctgagacaaggggcctctcaagatctccaacctagatatgtcaaagtttgaagagtgagtgatacatgaaaaagttcattactttccaataattctaaccttgatttccatcttctcacatcactctttcaaaaaaaataaaatgagatagataaataaactactaaagtattattgcacaaaatcacttcccctactccaccatggaaacaagttgatgacatgaatg

SEQ ID NO: 20106 - DNA, 3079 bp, Cannabis sativa
gtcactttattttgtatcacactttataatagcatatacattatacatatgtgcccacataggatttttaatccaacagtaaaaacttaatcaaatatatttctaattctattcttccaaattatatagatagcagcaacatacacatcatttatgattttgtagaaatggacaatgatgattttgccacctccatcctaagccctccctcaatatccataagggtaaaaaacaaccaaggaaacaagccaactcaaacttgactactcctcctcctgccaaaaaagacactttttcccttcctactcccatttgttgcattgctccttcaacatctcctacaaaaggcacaaaaaaaaaaagtattcaaggagcagaccaaaacaactccaaagggacctgtgggtcatctgctcgagctgtatatccctttacatgctgaagcgagtaaagacgggccttctctagcttttgacatcctaactagagttgctatgtgtaacttgggatcaaaagattggaaattccttcaaactggggccccatctacaatatttgactaagttcaagatcttgtcgtgatgataagtgattattcttttacctttatgattattttatttttaaaatttatctaaatacatatgtgctgctctgtagggtcttctactcggtcttcagggtaacctggctctgcaccaatatgttgccaagctagagaaattcttttcactacttctcaagattgttctattcccactaaggagcataacactgctcaagcaaaagtaatgaaggttgaaaagaaaaattttaagataaaaaaagaaaataagttctcgagaagtcactaatgaagcatcactttgatattgagaaattgatgagatctctagtggatgtgaaagagaaatgtgctgatgagacaaagacccgagtcaaccatatcattgagatggtggaattatgtatctagcaaaaaaataagaacattgacttggtttcttgcagctaaatgtcaaggcttgtgtaatgaggttcgaatagatgaagaaggaagagcttgagaagtttgttgctctgtctatagacatttacgagcatggtgtagaataagaaaaccaggttgtagagaagtttaagcaaatctcttactcttcataattgaagaaaattcttttaagttttatatatatattcgtaaaaaatttggtctagttggacgaccaactagactttaactattttgtcacatttaacgaacaattttcttatttaatattacatgctcataaatgttttactttttccactcgtacgtgaaattttttaattaagtttgattactttaaattaattttttaataatttttaataatactcttgattttcattacttgttacacctcaaacaataatagcttatatttatcgttaatgacttgtcttcacacaattattttcaatacttatgtatatgaactatttacttttcaggtcataagatctcatgtatcactaaaatattattcttagaaaactttttataatattgttcaaattttgaatttaaatggaactaattttaactttctttgttatggaataatttgattaaatcaattttttatccatttttatacaaaaagattatggcatttggaccaagtaattaaatcattacaataatatttatacaaagtatttaagttatcatagcaattttttaccaatagtatgcccctaaagtaatttaaataaatagactttatattacttgaataaaattttattgataaaaatttgaaattaaataaatatttggacaaatatattaaattaaatataaacaaatattgataataagacttcagttgcacgttgttccaggttttttttttttttctttttttttttttataacaagttgtccatttgatcatgctaacttgtatacagctggtccaataacaacttcaatgacatagaacccttcctagttcaggttaaacaatccttaagcaggatctcaagtgttttgaaaggccatttgtaggaacaaatctcttactttgaatgaccttttgctaacacttttgttgaaatatttagttattctttgttgatatgagacgttttgaagttgaaatccttcacacttttcttcaattagatccaagggaacatcgagaagttcttagttttgttgttggttgtagaattcacatctatgtgtcgccacatttatttcaactagtaacatggcctctgagccacaggccaatgaaaataatgtttctagtcgatgttcgaactgatgtccgataagcccataatacttgggtaattcatcaacccgcttaccttttggtcatcaaagccatttcttaatggagtctgatgcgtgtcgtatggcgtatcaaatttactattatttttttattcctatactttctattatttcattataaaagcaagtacgggtcgatcccatgaggactatgaataatttattattcactatcaaatagaaattaaaaggggattttgagttgtacttaaacatcataaaaggaaaataaaaacaaattataattgagactacgatatgagataaacagttaaaggttattctccacccttgacaatcattcttaatttctattaataagtgtaatttcagtttccaatcaaactattaatcctgcaaataaaactgaagcagtgaattattctaatctccctattgtatgaaatcaaggtgaagtgctcaatacttacgtcttttacctaagcaataaattcacaaagtatgcaatttatttaacttagataaaactttgagatttgtggagatacactaatctaagcaataaatcaatgaagtatataattcatttaacctaggttctattcttcatcattgaaattccgtttttaacaattaccaagttaaattatcaaacaatttaaataatgcggaactgtaataaaattgtttgaacagaatctatctctgttctatcagacacaaaatctgacaaaacataaatatactgcagaaagtaaaatgtagaaa

SEQ ID NO: 20107 - DNA, 2332 bp, Cannabis sativa
aaaaaaaaaaaaaaatcatgttaaaaaaaaaaaaaaaaaaaaaaaaaaaaaaaaaaaaaaaactgattattcatcaaaaacgaagcccagccaactcaaacctgaagaggataagtcagtcttgatccccacagcagaagacaacggagtaacaccaggaggctgagaatcaggaacatgaacagaaggaggcataacgtgttgtggaaccatcatagggaagggaccgccatgatacggctgcatattgatattcaacggtaacctaggaggagcacctcccatctgaggaggttgcaaccacagtccctgaggaggaggatgaggagccgccgccatgggaggaggcatagactggtacgaggaatgacctaattggggatggaaatgtgaattgagcggaacagagcctgagcctggtggtggcatagtgttgggtctgatgactgtagaggaagaatctgagggagcaagaggcataccaggaggagccatggagaaaccttgacgaggaggcggcggcagcgcccattgcggtggcggtggcgcggagcccaaattaggcgccggagttgtcattgtgaaagtgaaacgatcaaatgaaatgaattcttacagtgacgaaacgaagaagcgtagatgtgttgatgtaatcgctcatttttggtccctatactattatggttatgaggttttagtccctaaaagttttgttttaacaattaaatcctaaaattcttttctcattctacttttctactttagaaaagagtattgttatgatattgttgggcactattagtaagacggccctaaagaatatagctaactaatcatgatgtgctacttatttgagtatttgtggtgttcaatagcaatgctctttctaaatgagaattgctaaaagtcattattggtatctagcaccctccttagtgtcataccgctattcgtataattaagtattaacttaaaaaaataacttttaaggaatataactaaccaatcgtgaggcaccacctatagaaggtgttgaacactactggtacccaatatcaatactcttttaaaatagttaatgatattacataataattaattaactttggagtctcttacttaattattattattattcagagacaagaacttcatattttatccgatgtgcaagagtctgaaaattattattaacttgcgttttgtggatgatttcataatcttctgaaaagctcaacaaggctcgatgtagtgtgtcaatggtgattttgaagagttttgtagcaatactagcctcggggtaaataaaaataaatctcacgtgtaagtttttcaatgggataataagcaactcttattatctaagattgatggaatggttcgtgatttctggtgggggtctgaaaagggtaaccatggtttgtatctaaaagcttgggataagttttgccttcctaaatctttaggggggcttggtttccgtaaaactagagaaatgaacctcgccttcttggctaaatgggggtggaaccttttaaatggcaaccaatccctttgttgtcggatcctggaagcgaaataccttaaaggtaagccttttcttaattgtacatccaagaattctgattcgtagttttagaaaaatgtgattaaatccaactctatcttaaaaaaaaaaaggagcctgtaagttggtggtggacgggaatgatactaatatttggaatgacccttggattgctcataggaaagatttcttccctcgttctaatggctcctccacatttggggtaaacaaagttgctaaacttatgttagataatggaggatggaatatccccttgttaaacagtcttttcgacaaggaaactgtttttgatatcttgaaagggggtaattcgtctagtctgggcaacgataaattgatttggacgttggaatgtaatgggcgattctcgagcaaatctgcttatcttgcccaagctcttgacagagcgcctctttgtgaggtcgccccgtctctttggaacaggttgtggaattgtaaaatttctgaaagactgaagactctttggaacaggttgtggaattgtaaaatttctgaaagactgaagactctttggtggtgtatactggctagggctcttcaagtgcgttctatgatcttcataaaatttcctgaggaggtgtcgtgccctctgtgtgggacagagaatgaaactattaaacatcagttcttatcttgtaatgtggctttccacttgtggaggtcctctccctggggaattttgttggaatttattttaccaggatctttttttttttttttttt

SEQ ID NO: 20108 - DNA, 1987 bp, Cannabis sativa
catgttcttatatatggctcaattctcttccatttattccatgtaagacaatgtccataatatttataaattgggtactcttgggctacggtggccaccttagatcagagttacctaaacactatttttctaatgatttactctctaaattttagtgttactatctaaaacttttatctctatatatgttgtaatatagcatattggactaccaagtgttgaacgtggaattgcctacaatctccattgtgggatcactagtcaaggctggagtttcggtcttgatttataggtaataacacaactctacaactaaacacaagtttctatcctttgcttttaattgctttctcatctcattacttaattagtggagaccaagattctgtaattccattgatggggagtagaaccttagtacataatctggctagagagttgggcctcaataccactgtcccctacagagtttggttccagggaaagcaggtattctttcttttttctttcatttttaaatcctctgttttgaaaagaaataaatttagtgagtggtaatagataaggtgtttttggtgttatatatgttttaaacaaaagattaaagtttatgcatggaatattaatgggaatgaaggttggaggatggactcaagtttatggaaacgtattgtcgtttgcaacaataagaggtgcctctcatgaagctcccttttcacagcctcaaagatctctcatgctcttccaatcatttcttcaaggcaaacccctccctgaaattttctgatataattaaatttacacatttatatatgctattaatttattatattagtcttatcagtttgtaatggatccaatcacatcgaatttttgcatatgggaaagaacaaaaaataccacacagattacaacatacaatacagcaataatttacactaatatatacaatgtaatttaatcaattatcctatactttcatgcatataagaaaaaagtttataattacctaattttattattaattaaaccgttaactttcacacctttttagttttaaagtaactttcattattctctttctttaatcttacaaagctctctcatttatgcttgagtagaaatactttcgtagtaaatgtataaagactgcgttatttttaattttgtataatatatattcaattatagttacttctcaaaaaatttatatctatacatcaaatcaaaataatacaacagcaaaattaaaaaaaaatatattaaaattaatatgaaagaatgtgaaaggaaaaattaaaaacgaataaatgttataccaattggactcttttgaaacccacactttaatacccaagaaaattatctcccagccataactttcgcatcttcttcttccagctgcctcctttatcagtttttttatatatatatctttcatttcgtatatttaatggctattacctatagttctgcttctccatctctattgccaaaaaaaaaacttcaaaaataggtcataaatcagttgctaacaaggctaaagggaaacggccagtcatcgacgatgatgactccaatttcgctccccccgtggctaaaggtggttgtcgtccagtaaagaagaagtcgaaggtgtctttgcctgaaaaaaatttcaacttcgacggccagaaggggaagaagaagttaacttcaaggcaactatgatgaatctgtaatgcaacagttatatctattgcgagccaactaacataggaccacaaaataattaataatgctacatatttaatagaaaacgaatattacaataatcgtgttttatcttttaaggtcccatatttgacaattctgagccttgattttataatactatgatattatagtagcaaaactattgctcaactaacatgtaacttaatagcaactagaaatgttaaatgtgaatgtgtatttataagaaactatttgtcagtatttttttgtc

SEQ ID NO: 20109 - DNA, 4199 bp, Cannabis sativa
tcctctattcttcatgcggtgccggagctcaggcgagccactcaaaaaaaccatgagtcgagaaccctagagcccatctttcttcctctccgttctatctcggtgcaaccatggccaaggcgacgatgtccgtccacagtcatcgatggtccaagcagatcttaaaaaccacaagcaagaaccctagatccaagatttgtttttatattttggtgtaatttttagttcaacttttgttaatttttttttataattgtttgtatttagcaactatatttttgggatttgtttgtctattgaatttaatgtatgcatttttttattttgtactggttgtgaaattgataaattgttatgaaaattttatatttcttaatgtgttttaacatgtttttgaaaatgagaaatgttcattttacagttgctataatgtcaaaaattttatgttaataagtttgatagatttagtaattttgaaattactaaatcttatttttaacatttatttttttactcaaaaatactcatttagtctcggttttaaaacaacgccaaaactcatttgtctcagtttataatagacacttaaaatctgactttttgtgattgtggaataggtgtcagttctatgaaccaacacaaaaggtataagtgttagtttaaaactgacaccaaaagtgtagtttgtattagtgcaatcctgctgatagctgatactgtttaatatttaatatttaataaagggtctattataatgcgaaatttttgcctaaaaatacaagtacaacctcgtgagaagttgacacgtagacacaatttttgatagaaaaggatgacatgtcaatgatatggcttttgtagagccagcctcgcatgattcaaacttgcaggaggatgcgagcgagatagggtctagtcacatactatactatgcacaagatagttaaaagatcagcaggaccaagagatgttaatactggttgggcatatctcttatatgcgataaacaagtatatctgtcctgcgacaagtaaagattgcttctttacataggtttggtccaaatgactattgttcgacgaccctttaagaactcgcacgttctaagttgttacacatggaatgtctgaatatgtgatcaatatgatcataaatttttgttaatttaaacgcccaaaggtctattatgggattaaagcaccacagagtctgcgagcttgcctgttttggaataagggtagacgatacatgactttgcaagtcaaagatgttgctacaattaagacaagaacagatgaaactattcttatatttattcctttaaacttgtatcttaattaattaatgtagttattgatctaacaaatcaatttgattagttatgtaatattaattgacacatgctttctatataaaggggtgatccaaatcaaataaactaagttgaaactattgcacaaagtgcactaagcagactgagccctgactgaaccagtatacttatttgtcctctacattttactactcttattttgtctatttggtagtctatactttgagtactcgctattctaagtgattatctacataattgtaagtgggtgttcttgctttactcaaatactcgcattttctggtgttgtctaaattcctccgaaaatatttggtgccgtcggtgggaacaattttataacatttctaagattttggaggagaatcacaatggctacaaaatagacaaacatgaacaacaacaacgaaactgtcaacattgacacaatcaacgttccgattgctggtggagggaagattcttatcgacaccaccattagaggaaaggggcatgctaccacaaatcccctcaacttttttctactcttttcaggctatgcaggagaaacttcatggtattgttcaattgacaactactcaataccacctgctcacgccttccatggtattgttcaattgacaactactcaatacacaacaatacaggggaaaatgcaagctttgcaggctgaaattgcaggaagaaatcagactcatacccgatgtccaccactagttccaacccaacatcgcataaataattaggtaactaatagtactaggcatcatgatgaccctactaatcttccttgtaaacgcatggagcactcaaatgaaaacaacttggatgggcttggtttgaatcaacctatttgcggcccttcatgtgggaacggacctgcaaacctacaacttagccaaagggaagaaaggtcacaaaaggacaaggataatgaacaacacaatccatgtagttgtgcacaagcacatcttgaggtaaatgaacatgaatctcatccttcttccttgaagtctagtagtagctctcccaagatttataccaggccaggcttggtatggactaggctaggaggaagatattatgtatagaaaggcgatctacaacaccgtctgaataaagcgttccacgtctaattcccaactctgaggaatcatgaagttatgaaagaacctcatgatccccccgttgctgatcaaggtatccccctcactagaaaacccatgtggttaatgttgtcaatccacaaatcgcacctgcaacactctataatgttgtgattcctgcgaacatagtagtggtagctgccccacatggcaattaggccatacctacaaacaatctaatcttgcatggaggaatcgatcacaagaatattttccaagctctaaaaatttttgaacggtagaggaagcccatttataaaatgcatggaacatcgtccttcacggaggaagtgcgataggccttacttctaaaaggcttccgtatctctgagtaactgaaatataaagttttgactaaccctatccattacttagatgaatttaatacaattatggaagttgaccaagtaccccaactggaaaagtgtcaaatactcgctgtaacattggaagacaatgcacacgattggttcagttagttgccaaaagattcagcctcgatgtgggaaaaattcattgatttatccttgaaacatttccaaacaactatgacatacaaacctccctacattattttgtcatatatcaagcaagagtaaggtgagactctgcaagattattttaaatgctttgatgctaaagtgataaaagtagagaaggccctcgagtcttcgttgggttgcatgctcattacaggaattttactgtggaataagttttggaaataactacaagtgcgacatctcaagatgttagctgagtttttttctatggccaagccccataagaaaattgagatctcgctggctgaacttgagaagagcaaaaaaaagtgaagggcgcgatcaaagagcctgtgacacaaaagttcaagagagtgtagtccgagaagacgcaccctaaaaaggcattgtagttcaaaactatctaagtaaccaacaaggaaggaaagtttaccaaaacaaaaaggaggaccttgatatgttaactacaccaagttaagtgttttgcgtgattatataaaggctatcgaggaacacaaatttttctttagaaaaccaccactaataaacagtaactgcaacttgagggatccatggaagttctgttagtatcacaaagaaattggtcatactaccctagaatgttggtttttgcaagacaaattgagtaattgatttgtcgaggaaaattagacaaatataagaatgatggagagattggagaccaaaatccccgagtggatggaaaccacaacggagaagaagcaagtggctcgaagtctctttgtaatatgttgaccattataggaaggtctcacattggttgagattccaagaaggaccgagaaagatatatgaaggaggctaaggagaagtcactgactaacgtaagcaacctgagtgacagaccgaaaaagttattcaggaaagaatgtgatgatattacttttatcaaaagtgatgcgagatgggtacaccatccccatacatacacattgatagttgaaaacattggaggtgataatgtacattgtgttcttatagataatgatagttttgttaaccttttgaatatgcatgcatttaagttgatgggattgcacgagaaagacttgtagtgtaacaccctaactagcataggcgtgttaacgtgattttaaacatactctgcagctcgtt

SEQ ID NO: 20110 - DNA, 2917 bp, Cannabis sativa
tcatagcctttataaactagttatatgattcccgtattctaaaataatacggcagaaaaaatgtatctgtatatgttgacatcttgagaggaaagctcgtattgagtagtattgcactaattaaaaacaatatagaactgaaaataggtgacatattaagcaagctctgaaaaaaaataacaaatggcctttaaagcacatgatttataattatgtagctattgttgcccatcacaacttgtgagatgggattaattagtacataatctctaattgatcaagatgaacaacactaataatataataatattaaggagatggagatcggagaagtgaagttagaaaagtaaaaatgggtaaaaggtagattgtacgtgttttaatcaacagaggcagttgcagttatgtaatatgcaacagaaaacagggcatgaacaaaacacaaaatgcctccaattgataggaaatgatggtgcgtgaatccacaggaagctcttgacttgttgttcgacaaagtccctatcaccagcatagacaatccaacggctaatatgatcctgatcaacaacaaacaacactaatttaatagaaatagttataataataagaccctatatattatcacttgtacattttatcatgatgcttcactactagacttaacccttgataataataataataataataataatgcttgaccccaagaaaagaccactagattttccaaagtatatatttataccaggtgaatatgaggcatgccagagagagttgtctattaggagaagccttttgaagttcatcttgagaacaaatgcaattttgacagccaccaagcaagttagccaatacatgagctagagccaaaagagctcctgcggctaacccaagcttgaaagcttcttcacttgggtctctgcactcgaatatccacagcctcaaatgcttcaccttttataagatttaatacgaaaaaaaaaaaaatacaatgttttaaaaaccattttcaaccatccaaaacatatgtgcatatgatatatatattaatggtcttgggtggtataaacacaccacatcatgattaagtactataacattaacataccttgttttgttcaacttctgcttggatgcctagaatcccagctacaacatcaatagtcacgatcaagaagcaaacaagaacacctaccaacttaaccattttggtgaaatatgatctttaattattaattacctaacttggagttggagatcgagatacagtgagaaagaaaagatttttaggagaatttaaaaggttagtaaagtaaggaaaggaagaatatagaagagaatgtggagtagagtgagagaagagaagtggtcttgggtaaaaagcttcttttgtctacacagtggtgaggactttaaaaaagcttttttgcatttttgggtttctttttcttcagtcttggattcctttgatatagcaacaagaaaagtagggtataaaccagctcatagaggagcgtgcctaggcatctatcaccggtggctcatcagatagatgagtcctggtctggggcaatgtttttactttttgacttttagtcctcatttagaaaaaatattcaatgtggccaattgtataaacatgtatatttatatacagtactcgagtgaatattaagttaaatatgtgcatgcagagtgggattattattgattgatttaatttaaatatgcagctcattacttagcagaaacgactttcttttcccagtttttaagctttgttatctcatatattttgtgtatctgtctgtttcatcattacgtcttttttcatttttgtttttttgggttactcttagttttttctatagttagttattggtgtggcatttcccacttataaaagactaacgtaaatatgaaagaaattaattggtcgctaagaaaagtaatactaagagaagggtattgagctatatagtattacattgtgacgaaaatggctggcttcaattaatttgcttaatcaaaagtagaaagtgataacatatatggtaaaatggtatgctttttccagttattaattgctatttatatatatataaatattgctacaactagttgggggttctaccaatgggccagcttagtaaaagtagcaccgttagtttagaagatcgacataatggaaagcagttaaattaaaaatgaaaagaaaaataaagaggataatgggaggtccacataattgagcctagaagttcaggtaggaaaacgaaatcaggcacttgacttttttctttcttcggctcgattccagatgttagtagaaaagtagtgcaatctagctaggttcatactcatgaacacgtatattcaaatcagatataaacaaaaatgtaaagagcaatacgtccaaaatagagatataaactcgaataaacatttaggtttacttgtgtgattgtaatgtgcatgggaataaaatctcattctcaattgccttgtgctctacttggtttttcatgcaaaattgcaaatttaaagcttacccacacaataaagcccagtactatcttattcagcccaatatatttatttctgtggacatagctcaaaccttgtcaccgatttaacattttttaattttacaagagcacaaccatacaatagagtgggcttcggcccattggtataaatagggcatgatttaacaaaagaaaaattatccgaaaaaaattgaaacttgaaagtgagcacaacagaaattggttaacaaattaaactggagtactctataatgtgtatcaacctgcttaaaattaattcaaaccttgtgcttttcgaacgagaagatagaaataggcatccatttgaagaaaacccatcaaaaacaaatcaaatatccaagaaaaaa

SEQ ID NO: 20111 - DNA, 2026 bp, Cannabis sativa
ataaaataattagttagatttttactaataataataatagtaaaaagaattacataaatattatctattacataaagatgatagagaaagatatattaattgggaagaagagaatctgaaagtaaaatgttaaaaagggaattttataattaaaatgagggcaattttatcaagtaaaatattcattaaactaacaaaatagcttcacgtacaagctaatttctcaaagttggtgttgactaacttttgcaaaaagctcaaattttttcttaaatttttaaaaaagctagttttctaattttaccaaacacattttgaatgatagctttttaaaaaagtgcttctaacttttttaaaagctatcccaaacacaccctaaaaatgttagacattactagtgcctaataacaattctctataaattataggtaaataataactttctaatgcttagtcaatttgatgatttatttttctacaaaatttcaatgttaaaaacatcgaaatactcaaattctcaatgattaaaccaacttttaattattagtttattgctacatcaaactaaaaacaaaatccatattaattaatagagcattgcaattaagcaccagtggtgtctagcaccttctcaacatgtcgtattgcgattggctagcgatacttcctaaaaactattatattaaattatatgaaacgcgatatttagttggaccaataactatattgacacataagaaagtcctagacagtaatacctttagcatttctctcatttttataatttaaagccacatagaaatattttaattctatatataggataactaccagtgccttgaattctcaaactacttaattcacctccaagaagaaaaaaaaaatgagaaggtcctctcttgttccctttctcttaactttatccctcattacaatattactaatcatttcccaaattggggttgcgactggtgagccgctgagcacgaattcgagatggattgtggacgagaacgggcacagagtgaaacttgcgtgcgtgaattgggtttctcatctagaggcggtagtggccgaaggcctcagcaaaaagcccatcgatgccatcgcagaccaaatctcttcgatgggttttaattgcgtccgcctcacttggccactctacttagccaccaatgactccctcgcctctctcaccgttcgagactccttcgaaagcctgggtctcacccaagccgtggctggtgttcaggccaataatccttccattatcgaccttcctctcatacaagcctaccaggtttgtcacgtgtcaactaactttcttattctttttctttttaaaaactattgtcgttttatataattcattgtcgttttgtgaaacttgttaagtgcgtccattgattgggataggaacagagactttttgatactataataatacttgttgcaactgttaccatcttttccttcttttctttttcgaaaatttattttacttttctttcaaaaaaaaaaaaaaaaaaagaaaatttattttactttaaaatctatctactgctacgttcactcttctcattattgtataattaaattaataatgatatatatgtatcatcattggttgcgtaacaaactagatatgttacgtgtgtaatttgtctctacaatgtcttgaaataccatattattttcatgttttcctgagagagcaaattgagcagtaaaataatatatactgttaattagaatcttttattacaattttttagtcaatttctatgttcaaaattatatgtcgaaatatttttaattttttttttcatagcgatatttgttatagttaaaatatcatcctgtaaatttttgaaaaattccgaatagtttacagtgccgaaaacagagttcctgatattccagtttaccaagactagagtgttcaaaaaacttcaaacgtattttcggtagtgtaaactatttaaaatttttcaaaaagttatagagatgatattgtaagcataac

SEQ ID NO: 20112 - DNA, 4281 bp, Cannabis sativa
  modified_base (2132)..(2133): a, c, t, g, unknown or other
  modified_base (2188)..(2198): a, c, t, g, unknown or other
acagtattttaaaaaaaaaaaatcttccctacagtaaaaaaataaaaaagttgaaaatttcagtatgtggtgtaaaaattcctttcttaaaacttttgggttagcctgttattcttatttaagagcctacaaacttacaaatttcaatataattacaccaaatgtttcaacctaggccaggtgagagtttcaaacgttacaagtgttcaagcagtacatgcaaaatctacatctcaagaaatgtaatatttaatgagatggaatttccttttaaatctgattttctaaacacacaccaatttgaacagtgtcaatgttcaagtcccatcctgtttagcattcataaatgttccacttgttgtctctaacactcaacctcttcaaaataatgttcctaaaactaataaagttcatactccaagtgtccttggagcaccctcaccttctacatctacaactcaagcacttgatcaaagtacagtgtataattttgatcaaatagatgatgatgttgatagtgagaatttgaaaaaattgagaactgagaatgattacgctactgatgacctgcagcctcagccactaggttaagagcagcctgcaaaattgttagctcttgatcatcctatggtgattgttgtgtattttaatatgcaagtgtacgtatcgaatgcaagtatatactcacatgagtgaggtcgaaaccacaagaattgtagttaagtactaacaaattaaacttctaatactatttggaaatcacaaaatttttaagagagaataaaaattgaaacaataaaaataattaaacttagaataaaaattatcaatgatcaaaatttaggattactgatttcaattgtatatatcttagatagcataatataattttattcttaattaccaatttctaccaaaaatgtgaaactgcaccaaacagtacaaataaaactatttaaaaacgctttaaaaacaatctgaaaataataacctaacaatgactagagctaaggctagaatttttaaacctaaagcataaactaggaaagctaagattgttgaaaagtttgcagaacctagctcagtcacagaatctcttgctcatgcaggttggagaaattccatggatgaagaaaaataagctctagttaagaacaaaacttggatcttggtgcccaagttacctaacttgaacattgctcacaacatgtgggtgttcaaagttaaatggaattcagatgaaataaagatttcaattagagatcaggaatctattgtggtgagactttttgttcaattgtaaaagcttgtaccatcaaatcattgttgttgctaagtattggggggtaagacatcttgacataatgtttatataaattagcatgttagttttgaagacaaaaatcatccagattatgtatgcaagcttactaaaagcctgtatggattgaaacaagctcctagtgcttggtttgataaactaaaacaggctctaatgagcttgaaatttgtaaactctaaaggtgattcttcatttttcttctacaagacaacaagagaagtcatgtttgtgttaagtagatgacattattgtcagaggtagcaatgcagactgggctcatggcccagatgatagaaaatcaatgacaagttattgtgtctattttggcaatgcttttgtttcttggtcttcaaataaataagttgtggtgtctcgatctactaagtcgaaatacattggaagtggttgttgaacttgcttggattcaatccttgcttcaagagttacaatttcctcttcaagaggtttaattacatggtgtgataatatgggagctaatagaaacaaaacatagagagttggatatttactttgttaaagacaaagttttggccaaaactcttagcatccaacatgtaccatctcatgatcaatttgcatattgtttgaccaaaagtctttccaaatcgagattttattttcttattgacaatgaaactacgttggttttctactattataaaaaaatagctacctttagtgacaacctttcagtcacaacataaattttttgtgattaaatgtaatttttagtcacaacaaaaagctacttgtgactaaaacatagtanntagatacaaattgtcactaatttacttttatttattgtgactaaaaatatatttnnnnnnnnnnnattgtgatttttgtgactaatattgttagcgacgaatttcttaatcacaacatagaaataataatttataattagtaacaactttttcacttttagtcacaagttttgttttaattaaaagtaataaattttaacgtaccagttagtttgagaagaggtgttagaaaatgatattgcttttggttactggttactaattagtcgctaccactaaattgtattgatttataccaatttttcttttcatgccattttattgtagtcattagtgaatattgttagtttttctttctctttcctttcggttagtgatgtcaaagaatatccaattggtaaggtgtccttgttgtagaaactttgtaatcaagccttacaactatatattgtcatgtccaagctttgagctgctttttatgtcaaaacctattctctctatttttcaactaacaaatcatgagtgctataattgaaacgtgaatgaacacatatgacatctagctaggcatgatatttgtaattaaagaaaataatcgaaaagttaaataattaatggagtttttgcaccatataatgaaatttttaattttttttttcttttacagtgaggtgtactgtattaagtttttattgttgttctacgattattttttagttgttttactattgttgttaattgttttgttttgttattttactgttgttttaagttgtttaataaaaagacacagtaattttgtaaaaaattctgtgttacaaaaaactgtgttgtagtaaaattgtaaacttttgtccataatttaatattttttgtaaaaatccaataattaattgtgtattaatcaattcttggtgagcttaattcatgcttggttttcattacacccctaaacctatccctaatattaaaagtatcaatatttcttcaaatctacataccaatattattctcctcacgaaattcttttattttttgaaaattctcacaatttttagaaataataatattatcggtaatgtcaaaaccaatgacaacaatggtacaagaccatagttgctcactattgtagctttgaacataaatttattaagattttaaattatcactaaaaggtcaattttcatagtaatcttcgaaccttgagaataattaggatatatgtgaccatatagacaagatattttttaagaaaataaacaaacgatacactttaatttgattttgtattattaataattagatcgaggagtattaattataagtttttataacaatttatatgttaattttattttggaagatacatatatcaaaatagggatattgttttactttttttttattattgatgccctttttagttatagacttgtaaatttttaaccaactcaaaataattaataataatgaattgtttttttttttgtatgaataataataatgaattcttggtgcacttaatttgccctaattttcatattacacccctaaccctatccctaattttttgttgtccttcaattgaatattaaaagtggcaattaagttaagtacacgtggaagtaataatgtgtatgtaatctttctttttctttttctggtaaagaaaatcattgaccaaaccaaagacctacagactaagctatgactagaccctagaaataaacgacaacaacatcgtagaatacaaactaggctattaacacgtggcaacattacttcaaattttctaaatttagaaattaatgtctaaaataaaaatcttaattatatatcatgcatattcaatcataattaatcctaacaaagttataggaacaacgctaaagaagatgaagaatattatacgtgtcattgcaaggcattttagtattttaatttattttaataaatattattttataaaataaatttatagtacatctctgaacaataatgttatatttttgtggtcataaacataatttagtaattttataattcctgatgatgaaatttaaaggttaaatttttcttttaaaattgaaaaatatatatattgagatctgttttgctagataagctttttagtttaaatttttatat

SEQ ID NO: 20113 - DNA, 3644 bp, Cannabis sativa
  modified_base (958)..(975): a, c, t, g, unknown or other
  modified_base (1071)..(1072): a, c, t, g, unknown or other
  modified_base (2439)..(2445): a, c, t, g, unknown or other
agagagagagagagagcagtgaggccgacagggagaaggtttgttggggggtctcagattgtagggctctggggtatcgacgacggacggaactaatctcgggggtttggggtatcgatggcagactaatcttagatccgtctaggagagagagaaagtacaatgagggcaagaggagagaagtagtatggcgagagaggagggaggtagaagaagaaggagaagaagaaggaaccaaaatgagggtttgcttgtttgtgttgataatggcagaaaggagatgaagaagaagaaatgaacgggttggatcatttcagaaaagaagaaaagagagaaaaaaaaaagaaaaaaagaaaaagaaaaagaagaaaatttaaaaaaaaaaattgtaatttttttttttttcaaatattaatatgatgtggactaatgaaaataagttatttgtatgcttgtgtacatatcagcagtacacaatggcatttaatagtaatattttaacagaagagtaaatagcaaatcaaaatagtaatttggagggttttactactaaaaaatcaatttgcaaggttaagtgtcacttatcatgtagttcaagtaattttgcctcaaatccctataatttattatgcaccaatacacaatgttatttaataaaatattttaatggaagagtaaatagaaaaacaaaataataatttggagggtttaattaataccaaaagatcaatttatgggattaagtgttaccaatcatgtagttcaagtaattttaccgtcaaatccctagaatttattatgcactaaaatagatcaagaagtgtgaattcattatgcactaaattaactatatatacatagatagataattaaagagaaatattaaaagatatcagtagtgtctagcacttttttacgtgtcagtatcgttaattaattgtgactaattataaattannnnnnnnnnnnnnnnnntaaaaggtccgtgactaaaggtattagtcacataaattacaatttgttgtggttaaatgtatttttactcacaatacttgttgtgactaaaactannttagtgacaacttgtaactaaataatatattttagtcacaaataacattttgtaaaaaattatattgggactaaaaagttgttactaaaagtacaattttttgtagtgaaatgctaaagggcaccagtagtgtctagtacactcctatctgtcaatatcgctattagtctaattaaatattgaatatcatataatttaatataataacttttaaagaatatcactagtctattataaaataatatatctaaaagtactaattaaacaacagtgtacttaataagactactctatatataaaggcaatgtggttaagcagtcctataaaaggacacgatggcagacataaagaaagaagcctgcatgcactgtttccctttcagtgggctatgtggaaaaatatgaaagccaccaaacaggcacccgatccaagacccttttaaaagtcccactcagatatcatctgtctacctctccctcttttctatctaatttgtatctcttctcttctcacacaatttcaaatcccaatgaaagatgatacaaaaaaatataaatagggaaattgagtactattaaaattaccaaataaacattagttttttgtttgaaaataaatgcctcaccaattccaaattgcaaaccctagatagacatcaattatttattagatggccactttcagagcaaaagataatattcatttaataggatttgatcattttactgcattgtttttgtgtaaatagcttaagtacacgtgtacgttgagaaaattaatttaacaactaaaaaacttattgcatcaatttttctagacttcaaacgcatgacctaccctagtagtacgtagtaactagtaaaaagaaatataatctttaatataacttttcttgacacaaaaccattatgctataattatcaactaaagcaaaaaagaaaagaaattagtaatatatttggtcttgcttattaatataactttattatacacgatgtggtgatcattaattcattatgaataatattaaaactatatgtgcgtgcatgcaatgcatatccttagaaatatatagatgcatgcgtacgctcaagtctacatcctcaacatatatagggagattaaattatagcgagtgttatttttgcttgttaattagaaacgttttttttttttttttacttaaattggtatttttattaactaatcaaatcgttaaaaacaatagaatgtgtttcagaggaacaatcttccaacgaaagcacatgacctagagaaaaacaagaatctctggctaagcagtgaaccagcttgtttgtagatcgtttgacaaaacacaattcaacattgtctaaagataaaagcnnnnnnngaacatcatgcactaaaagaccaaaagaagatgatatagagattttactttgaatagcttatgcataccaagctgtctgattccaaaattacttgtcaattttgacgatcaatccaacttaatgcttctttgatgccaaccatctcaacaacttcaggttgaactctccctatatgaccccgattgaaaacctccacgacattaataccatggcagtcacgagccacacaaccccacccaaacctgccttcatgctcaaataaagcgccatcaacattaaccttgatcttacctgaagaaggtgcactccaatgctcaaccaaacgacctccgtcgaacaatgaagacaaagagaaaccctttctttttttagcgtctttaaactgatcaagtagcattcttgctgatgtaaccacatttgcagcagtccaacttttttgctgccaaacaaagtcattcctagcacgccaaatggcccagctgaaccatagccgcctcctccaactcgccttctcttcctcggcattgcagcaccagcagccaattgctgaaatcatcatccatattgctgccaacatccacactttctgttccagcaagcacgagcatgaacacacccaactaacgcatgaaaaatagtttcagctgtagtgagacaaagggggcatgttgggttaaatggaacatgtcttttttccaattggacacaagttggtaaccagcctaaagccgccctccataaaaggttgctgactttagggggaacttttaaactccataaatccttaaaaaacccatagctccagtactatatttttttttatatcacacaatatattatataattgttgaccattatattgaggcaatcaaatatttaaaaagaagaataattaacagtttttatcttaaactttcgacactacctgatctttgtcctctaaaatatatagcttcttgttattaaaaaaaatttttttcttaaaatataacatttacataatgatgtcccttctgttaggttttgtttcttttaccgttaaaaattagcatttttatcccttaaactttgaccaatacaaaaaaaatttctattttattaaaaaaaaaattaattttaaaagttatattattctgataattttaaaaaaataaattaataaaaagttattaataaatttgataaaaatattaaatta

SEQ ID NO: 20114 - DNA, 1442 bp, Cannabis sativa
ccggataatgttggtcatcccttacctcacgaagagcttttacatcatttattttataataataattaatttttggatttgtgttatctttaataattaattaatatgccattgacaagtatatatgtgaatgaaaaataatttttgtaaagtcggaataagattaaagtggatattgtttgtttccttccacaactactatatgccaaaatacaaaatacattttcgggatatttatgttgagatatattttaatattttaacaaaaaaaaatctagttataatatatatcaatcaagcaaagggcagatgagttcaattcctcaattcaaattttggttggagataatatgaaatagaatgaaaaagaaataatttttaaactattcttttgtttaattgcattttaaagtattagaatgtcattccaatgaaatactctttctactattttagtgtggaatgactatttcattttgaaatgaaagaaaagaccattctattattccattctattattatttctatttttatattttcattcctcccaactaaacgtctgttcatcattgcaatcaagtgacaaatctaagtatacatcttaagaaaatttataaaatctagagatcgaattagttactaaatactatgacaaatttctttctattattcgttcactaggaaacagctcgtgctttgcatgcagttgtttataaatttcactataagaaaaaatacttttactggtgcatttcgctaaatgcatcggcaaaagttgccagcataaacggaatgctggatttctactttcattcagccacaacttttgtcggcgcaataatgcgctggcaaaagtatgtcaacaccggcgcattggtgtatttcgtcggtaaaacctagacaatgaatcgccaaaaggtgcgagatgtttgcctcgttccattattttttgccggtgcaatattgcgccagtaaaagtcctaaaaaaattaggaagaatttttatcgcgtgtaaaatattttaggggggaaacttttaccggcacataaaatgaaataaaaaaattttaatggtgcaaatagacttttgctggtgcatatatgcgccggcaaaggtcaaaaaaagaaaaggaaaaattcccgcgtgaaatttattggtaggtgagaatacttttgccggtgcaattattgcgccggcaaaagtattaatcaaaacgttcgttttgatttaggataaattaaacactgaaatgcaccggtaaaagtgtatatataattcaggagcacgaaagtcccctttcttccctattttctaattctgaaaatttctctctctctctctctctctcaattcatctatatctctctcaatcattctctcaatccctctctgtttctctctttttttaaaaaaaaataaaaaccattgtcgcgcgcgcgac

SEQ ID NO: 20115 - DNA, 7288 bp, Cannabis sativa
ttaataggataaaataatagttaatttttattattatttttttatttctctattttagatttttagatgataaggatcaaagaatgatatatgcacaccaaacctgtcaaaagctgtcttgagattaatttgtccttatattatcttttctccattatgatctcatccaataatttctatggtctaataaacataccaccaagagaaaaattaagtaaatataaataaggaccaagtgtgctcaagttataaggtagctaaaccctaataaagtaaccttgtaattactattccttttggggttaaaagtaagtgtagtatgttacattgtctcaatcaaaaccaaaagactttggcaaatgatgaaaattatagtttagcaactatgtatagtgatagcattattcaattcaacctaatcaatgtgatttttattcttattattattattatacattatcaacttaaaccccaagcaaaatgagccatcattagatagtgattgacactaaaatccacaactctattttccccctaattttattttagttaattaattaattatataattgtggataaacattcatgcagcactaaaatgagaaacttataaaaaagaaaaagaagagagagacaagaataataatacacaaattacagccacataaataaatacaaacaaagcaatacaaagagtaatacagatgatgatgatgatcaaagaaaatgggaatggaaaatacaacccttttgcccccaattttttttttatctacaattcccattttacccttgaatttctctttccctaaaatcccattacaaggacaaaagggtcattagcacattgacagaagaacccctcaaattgttatttttcttttttggaaaccaaaccaaattaagaaactaattaagcattgctcctgaaggatccaagagctttgatggctgcagctcttagaacaaattggtggtagaaagcagcaattgcagcaccaatgaatggtccaacccagaaaatccactgcaaaacaaatattaccaaatatttaattaccatcaataaaaattgttactatttattaaggccacacaagagagaagtattattattatttttattgttaagtgtactaatattacccaaattgcatctatgaaattggagaaaatggcaccatttttactatttattaatttaaaatgtataaaactcatattaaaatgcacacttttttatggtgcttaacccgttaaagtacctcgtaatatttttgttataaacatttttattgagtatcaattaattagagatattttttaaaatttattttcttaagttataaaattcaattcctaattacaccaatagcaaaaaaaaatactagacaccgttttatttttaagaattctattttctcacatagcaatatttttaatttaataataaataatattaaaaaaataatatttagggtaataatgatgatgataataatgataatagagttagagagagagagagaagatacatacgtgttcattccaagctttttcactgttgtaaataacagcagcaccaaaactccttgccggattaattccagttccggtgatcggaatagtagccaaatgaaccataaacacagcaaatccaattggcaatggtgccaaaacctattaatcaattccacatctcattattaaaatcaattaatacttaattaattaactataacttaatgattattctattattcttacaggaacatgagaatctctggcatttctcttgggatcagtagcagagaagactgtgtaaacaagaacaaaagtaccaataatctcagcacccaaacccactcctttgctgtaaccaccagccatggtattagctccacctccatatctgttgtaatacgagctctgaaaagctttaaccaatccaactccacaaatcgcacccaaacactgagccaccatatacaacacagctctaatcaaagacacttttctcgccaagaacagtccgaatgtcaccgccggattaatatgtccacctaaaatcaatcaaatcaaacattaccttaattagatttacatcatcagatcagataattcatatatatgaatccattttaattatttaccagagattccagcggtgcagtaaaccaggatgaagatcattccaccaaaagcccaagcgattccgagaattccgacaccgccgcactcgtcgacgccttcgatgtttggatcggtttggcttttgtagccgatgactgttaagacagttatgtagaggaagaggagtgtggcgatgaattcggcgattagagctctgtagaaagaccatttggttagttcatcggggtcgaagaagggagtgggaggtgggtcgtggtagtccttggccggaaactcgccggcttcggttacttcaacgtctttagtcatattgaagagagagtagagaaagtgtttgtgaaaatgtctgaatgagaaagtttggtgttgttgtgaggatgagagttgtagtaaaggggtatttatgggaaacaatatgggggtttgtagtactagactctactactaataataatggtttaagattaggtttaatttaattaaacatgatcattaataatttagacaaattcttttgtggacaaccctaataaaaagagaattattacaagagcattgctactaggcactagtggtgtctagcatcttctcgacatgtcgcgttgtgattagctagcgatactccttaaaagctattatattaaattatatgagacccgaaacttagttggaccaatagggatattgacacataggaaggtgctagtcactactggtgtcatttagcatttctcttattaaaatgtattattagtatttagcactatttagtgtcatatcgatattaatgtaattaagtggtgagtcccgtataagaaaatagattaattaagagaatatcaataactatttgtatggtgtcacctatagaaggtgatggatactactgatgttaaagggcagccatgatgtctagcgtgtttgtgagttgtaatattactattagtgtaatttaatattaagttttacatactttactttattgaagataataaaaaactattgatcaattataagatagtacctcataatgatgttgtattttagtgtcgcatagtaatactctaaaaaaagatgagcattgttattaaatacattgaatatattaatgtggtgtgttatgagtgattaacaattttttttattatttattaaatataaatgtatgagacttgatattaaattgcataaatagctatatatcacttattgtggtgtttgacattttaatatgtcccttactatttctcaataaaaataaatgtatcgatatatttcattaagttttaaatgtttaaaatagttttgatcttaaaacatcatagtgatttgaaacatacatttaaaaaaaaaaaaaaaattgaaaaatttaaaataatttaatatgttgaaaataagattcaaatagtttatgaagtataaattatttgaatttttttattgtaaattactttgagttttttaaaaaatttcaaaatgtgcatatttaaaattgaaattataactattcagaaatctcatatttaagtgatttgtaaggtttatattttacttaatatttttcaaatcttaaccacctaatataattttagtaattaaataaaaagctatgtattgtgtgattctatataaaaacataatatatattctatgtcaaaaacacaaaaaagaatattacatcaatacacttattttttttatatatagaatatttattatgtgagttaaagttggaaggaataaggtaggacttactttgaagatgcaaacctctagatcattaaaacttaattcactaaacataggttaaatttaatgtaacgcgtccgtttcaaggttaattatggctcttcctataaataatatgctttgttcttactttttaagaagtcacctattgtagaattctttcgtgatggactaccaaaaaataaggatacatcttattgatataagtaagtattaattaatccatttaaatcatcctcaattgtatagtctcatacttgcacagtcttaaaatcatcatacttgatctttcttaaataatgtaaaattatacgacttatctaatattttctcttctgaattacaagactactaactatcaaatttaatattctcattgtcatcaaatttaaatcctacatcaaacgccctatagtgtaccatagaaacattacccaataatttattattattatgaacattaacataaattgataatattttttatttataaaatttatttgtttttagccgtccatattagcttagcttgatttggctagcatgggacccacctataacggctattgaagaaaaagaaagaaaagactttcttttatgtttttgttttcttttttcttttaagagcctaataaaccaacacattttgatttagattatagtagagaaatctagaacaatctatatatgtgtgtgtaataataagttttttttgtagcaaaattaattatagtgtgtggttgagaattgccattaaaaaaattaccacaaaattaattaatttaattgtaggttggcaaagcaacggtctaataatcatgaatcatgatccaatccaatggtgtatatttatagtaagttgttaaacacagttcacttttctttactcttaaaccttttttctttgaaaaaaacccataattaataataataatattaataataatatatttattaggaccccattgcattgcactccttttctttcttttatctttttcatttggaaaaaccctaataatactaataatattatttacatccgaaaagatggacactatagtagtgcactcttattgtattatagtatattttttttataattttatttttattttttgtataacataaaattttaaattaagaggtattataaatatgtaattatcttaacatattaattatatttttttttcaatggtctggaaaggacaaaaagaacttcttattctgatctctagtggacctctcagtaaaattcgaactcaaatgaagttttgacatcgtcgagcatagactttcaaacttccagtatcaatgtatcactacctaaactgtagtattttcttcagacgttaagcattctaaattataacaaaaaaaagatgtccaaaaacatttagtaaatccgtaaaaaatttcatgtaaaaatattgaacttgtattttgttccgaaagcatgcatgtacaaagataattgtgctcataaaaaagacagttttaatgagaaattttgtgtagaaagaaacctaataatgataacaaaaccctaataatgaattagtgttaattaatccaacattaattttgggttgggtccaaatcaatataagtataatacatgtgcagtgtgtgtgggcacaatttgttgatgataatcattgacctaaaaagaagagaagattataagatttcattcacaaatatttattatttgattactacgtttatatattttttattttttaaaaatataaatgaattcaaaacaaagaaattcaattaacttagagtagtattagtatatatatctatagtctatatatatatatagccattattattatcttatgttatctacaaaagtacgtataattattaacatttaaatagtaatctcaattcacaagtaataattataataataataataattaatatgtagggatatatatatatatatatatatatagtgttgtcacaattgttattaatctgacaaaattctgccagagatgaacttatctgtatttctcttacctaatctcaaactttagaatttttttttaaacaaaaacataaaatatatataaataaataaataaatatatgtggttgttatccatggtagttgtcacagcaattatgaaccttattttttaaaataaattatttatggttattttaaattgtaatttaatactaattaacattataactattatcatttccaagcagatatgattccataatatgcttacattatattaattaattattattattgacagccatacataacatgaatttacacaaaatatatataaaaaataacactgaaaaactaatggaattaaatttatggagttaacatgaaactacatgcaattaatatatatacaagttaactatagatgtatatctaatacttcaaaaagtatcaaaatatttttatattaagtcttattattttagtatccgttatagatatttaaaatcacttgtaaatttttaaaaaatttcgaatagtttacaatattaaaaataaagtttataaatattttattgcatgtgagactttttttcttatacacgtaataagtaattgcttgaactttattttttgtactataaattatttagaatttttctaaaatttacaaataatcataaatagctacaacgtatgtaattatgagaaaaaaaatagactaatttttttttactactgtcttggcaacaataatctatcatgtttggatcgatgaatgttagaaatagaataaataaaaaatttcaaactcgatagggtgatgttagaatgtacatacaagtctattatgattcataaaaaaaataaaaaaaaacttttttttatgccaaaacaattaaaaatctacccaatacaccatttgatttactagtgtgtgatctaggttacaatcttatatacttttctatatattttactctaaatttaaacatgagataaatggcacaatattatttttactcttgtctatgaaaaattattaattaaagaagcatatttattatatagaacttgcatgtttgctaatactaattattaggccttatgtaattaacaaagttatatatatatatagaattatagataatattatagctaggttaccaattattaggccttaattataattaattaatttagaactttaattaagaaatcatgtaattacacggtggccatttccatatttggattagttgagcaatatatatatatattttgatattccctcaattaaaatatatatatatatattgatattcaataatatataattttttttataaacaataatatataattagtgacatatatatatggacagctcagtga

SEQ ID NO: 20116 - DNA, 3230 bp, Cannabis sativa
ttagacaaaaatccttaaatctaacaatctcaataattcaagggaatttttaacggccaaacaagttgaaggaacataatttagtacatgttaaaattcgagtggaaatttttttaattagccttattattattaccacaacggatttttttatatttgtactgctttggactattatttttcatttttactgtacctatcttatgatctctctcattctttgtacaaaaattgtgttcctttccctctttctttctctcctttttctttccctacgaggaactccattttttttttctgtttcttcctttttcctcctggtcaaaactccccttcgttctagtttctccctctctatctcaattcctcattgtccaatataccaattaccaaatattatgagtcctcttatatcgactttcattaataaatattatatctcttcttatgtactttcaacaaactttatttctttttttttttcttgaaaaccaagaaacttccttttacttattttttttatataaataaatattataattattatatatatatataaatcacttattaattataaaatacattatttagattttgagttagcaatttaaaaaattccctattaatccattacttattttaattaattttcatgtaaatcttatatatagtagtcttaaatataactaaaagattagaatgtatcttaaaaaaaagttagtgacagaattatgttctaatacacaggagttttttttttcttcataaagggactaattttcaacttttactaaggctccaaaataattaggacatccctcaatattatacattataattataacatacattttaactatttctcaaataatttatatcattaaaaaaaactcaatgaaatgaatcacttcacttgcatattagaaatagaatgttagaaggtttaacactggtatagactgactaaatctgtgcctaaagtttacttagctgagagatctaattttttttccctttaaaatatttgtattttaaataataaggaatactacatttttttaaataaaaacctaaaagtatgtatttttttttcattggcctattaaattttaaagccagcccttaatgtttagcacccaccaattctttttgttagtagaaatggaatgagtaatgatattgatggctatggcaatgtgtgtacatagaataaaaatatgtacatgttagagattttgagttcgagtcttaagtaaaatatggttgtaatatggttaaataaaaaataaaagtgtgaatagaaaataaaaaagtggcaagtactagtagtgaggagtggtctgtggtgtagtgatttgaatttgatcacacccatctttctctctcccaattattgtcatccccacccacctctatgcctatttacccccacacctacatttttcttaagttttcctatctgggttaaaaacaaaaacaaagaatggcgggcacaatttatatttaacctctcccactattttttttatttataattataatatatattttatacatttttaaaaatttagaataatttgttgtatagaaataaaacctaaactagttagtaaccatcataaaaaaaatatatatttttttaaaaaaaattggttgaaattagtacatgttacagcactggtatacatttaattggagctaatattgttatacatcttttataattgtcagatcaattattgggttgagatgaatccgttacttgatataaatgtatgaaaaatgacattaaattttaatcaaaagtcatgacagtataaaacgatatgcattatgtttttttttttttttttgaaagaaagtatatgcattatgtttttacaataagtaaacaaattaaattcattgtgcctactttttaatagctcacaatatgttaataattaatggttaaatattattttagattttgtattttataaaaaattttaattggaacttctgttttgttaaatgataaaattaatcctataattttcaaaagggtaaaaataggatcataagcttaatttttaataattttattttttattataataactttaagacaatttctaacatgagcaaatacaaaaaaaaaaaaaaaatataatcagttttgtcataacatctctaaattagattattattaagttttactttgataaaaaaccaattttggtcctatttctacaattttaaaaaatacaaggttcattttatcatttaacaaaataaaaagtcaaattaataattttcgcaaaacacaacatccaaaatcatttttacccataatcaatcctcaatacattaaaacccaattccacaataaatcatcatatgcagcacatctttatcatacctaataatgaaaagaatgtcgaacatgtatatacatatatattatactttatacattatacatatgataagagtagtaatatgtggagtagtcaaaaatattttaaacaatgacatgtgcataaaatgtgagtttatttgaattaattgtatatatttcaaatgagactcgatttcaaatataataagtgcatattttagtactcttttctctttatacattgctgagagatcgagttcgaataattgggttgaagaaagaagtgcctagcctatctcaaatagtagtattatttaaatgtgttatatattttcaagatataatattttattttattttatttttcattatagaacttttaattttaaaaatgcttcaataatataatttcaaaaatattaaaattataattttaaacattattatatatatatatatattttttaaattattacatatattgcacttttaaatttttactttaaataaatatactattgcccaacatcaatacaaattttaaaaataatatctttatctttaatagtatttactgcttacacttttcaccacatcaaatattttccgaaatactacaattcaagatactcttacgagcttcttccgcttttagattttgaattatgccaaataagaaaaatccaaactaaatgctacagttccactgtactcttacccagtttcaggtccccactttactttttgttttggaccaaactaccctttctttatagtgtttgtttcttttttaaaagctacaaattagaacaacttttggcttctcattaatatattttttaagaaataa

SEQ ID NO: 20117 - DNA, 2652 bp, Cannabis sativa
aagcttaatattgcacacttctatatccaacaaggaggtgtgaccaaaacaaccaaccatgaaatttgaattggaattgtaatgagcacctatccaccacttttctatatatgaatcaaaattccttgtccttctcattgttgtccacattttcaacagcctgttctaacttttagagtgtttttttaagtgtgacaaggccagaggttaatgtcttggtactcaattattgtacctttcgttttctattagagagccaaacatgctaccaataatcactacaagaacaagacccatttccaaaatgatgaaaacgagtacaatccctcacaacaatctccctatcataaatcttggatatgagcttaaaagcaacatgacaatcaacacagattctcaaattcttcaaaatccgaattggaatccctggaccagtattaacaagcataaaagcaactgcaattttctcactgtgataggacaaagcattctctttttcctcctcttctatgtctgcaagcacattttctgtatgaggcacataaccttccaacctcaacaaacttgtaatctctgctaacttagcatatgtctcctcactacacggatgagatctatcacccataacaaactcataaacacgatttctcaactcaacaaggctgtaacctggtgtcttcatcacaccctggctaagcattgcctttctcacctcctggacatctgaccaacgattctcggaagcataaagattagagagaagaacataatccccactatgtccaggctctagtttttggagatgacttcttgctaactctccaagagccaaatccccttgtattgtacatgctcctagtaaggtcctccaaatgacagcattgggctttaatggcatgtttagtatgtactcgtatgcttccttaacaagaccagctctgcccaacaaatcaatcatgcaaccataatgttctattctgggcacaatcccatacttctcttgcatctttctaaagtaagtgaacccttctttaaccattccacagtggctgcaggcatacaatactcccacaaaagttatctcagtagggaccaatccctccctttctaattttctaaaaagctcaagagcatctttgccaaacccattaatagctaaacctacaattaaagaagtccaagaaaccacacttctttccttcatttcagtaaacattttttgggcatctctaatgctcccacactttgcataaaagtccagaagtgaattattagagtgcaagttcgaactcaataagccaactttcaacatatacacatgagccctcctacccaaagccaaagccccaagctcaccacaaacagataacaaacggaccattgtaaaaccatctggctctacaccctcaaaacccatgtccctgaaaagaacaagagcctcattaagtcttccattcaaagcaaacccattaattacagtattccacgcaacaagatctctttgagacattaatacaaacactttgtgaacactctcaacacacccataacaaccatacatatgaagcaaaccgttccgaacaaagatcaaagactcaaacccatttcgcaaaactaaagaatgaatcatttcaccttcccaaacaaccgctaacttcgctgcagccttcagaagaaaggggtaactgtgagtatcaggtttaacacaagaaaaaacacgcatacgacgataaagctcaatagctggcctaggattctcactctcagcataccctctaatcatggtgttccacgtaaatatgttagggctatcgattcgcgaaaaaacgttatgagcatacgacattgaagccgagacagaaacaatggcgaataccaggtgtttccccacatccgggtcggaaaacagaacaccatgtctaactgaaaaggcgtggatttgcatcaatttgagtttggaagaagcacagagctgtaacagtgatatgcattgtgtgatcggaatgtatggattcgggttcgccggattatgaggtgatgaaccatccaatgtgggtggatgggaagagtggcggagaagggtactggtcgtggtcgttatggggttgtgaaatgaagtaaaacgacgtcgtattcgtataactggattggctattgctaagatgataagagactgtctgcagaaaaggaattgcttggagtgcatctcaggtctcaggttcaggactcaattcagagatgaaatgagagagaagagaagaaaagagctaatgtgattgtcgtttctgctaaaatatttgtcgtttatttactgactccaacttagcttgtatgccaagctacatattagtggcacgtcccactttgttttttttttttttccttaactacgtcctaaagaaattattttattatattatttttttaatttatggtttattagtttttatttggttatgatttaaattgaatgtggatttttataaaaatgcaaaaaaaaaattattttaaagtgtaaaaataataaataatttgttattattactatttttttttactaagatttttattttttatatattgatatatgcagggccggccctgaaacaaagtgggtcataggaaaagaaaaattttgggcccttatgttag

SEQ ID NO: 20118 - DNA, 5596 bp, Cannabis sativa
tctgctacccctgttccattcaaatactctacccgggttgtgttgaaaacgatacttgaatcgggtgacaccctgggatttgttgggcagagagttgtggttggtgggtgggttaagtcttctaaagaggttaggaaagagccctctcccgccgcggctgagcaactgcccgcggctaccgttgatcagtatgtgggtgctaatccgggtcggagtccgagtggcgatgtttcttgctctgagattcttcaatctcggataccctttataagatccatcttgaaaatgttgggaggaggagggaattactctgttcgtgataaattagaggtggcttcagctccaaggccacctcctccttccatctcttttttgcagattaatgatggttcttgcgtttcaactcttctggtaactctataatctttcctttatttcattatcttattttaggattttctatgtcgagaatctttcaatttaactttgttggtataagttagagttatttaagatatcttgtaaatttataatatttttggagaaatttaacatgtcgaaactatgatttaaatagtctgttacactgttgatttttttattttaaacgcgtgtaaaataaactgtttaaacactgttttttatattgtaaattattctgaatttcttaaaattttacataatatcttaaacaactataacacgaatataaaaaatattacactaaacaaatattctaaatgtcaaaacacataaagtgtgtattaatacacctttttggaggatatgcattgtagaatgaccttatgatatttattatgatatttcgggttttatatattttaatttaataagtaatataaaaatttattaatttatttcggtattttttatagttgaataacttaaggtactcatacggtcatacccctaataataataacattgctctagtttattgataaaataaaagtttattatattacgtgtattagttaataaattattaattcattaaggttttatcctctgaaaaaaaaaattgattaaggttttatgaatgttcaaaaattaaagaataaaatcctaggaacaagaattattctattgcaacacaagactactatgtaggagtctttttcaagataaaataacttacactagagtagtatttttatataaaagcttcttaattgagtcatgcaatttattattttttattaatagtgaaattattaaattatatatttttcctaaaagaattattatcttttgactttagttaaagactttcaatttgtacatattatcattaagagtatgtaattgaagagtgtatttatcattagtgttatcattcttaatttggctgtactgtaatctgagtctttgatgatcaggttgttgtagactcttctatagcttccccttgtcagattctacatactggaacttgtatagttgcagaaggtgaaatcaagaggtgttcaactgagggaaaacatgtcatagaactcaaagttgagagaatacttcatataggaagagttgaatatgataagtatcctttatcaaagaagcaacttccattgaatcagttaagagaatgtcctcattttcgacctcgaacaacaactgtaatgattcttcttcattatcttcttttctaatctctttttcatgtcaacttgagtaaccaactgtgtcatttttaggtggcaaccgttatgcgaattcgtagtgcattgagttttgcagctcatactttcaaccaaaacaatggatttctatgcgtacaagtaccaatcataacaatcacagacagtgaaggtttcagtgaaaagtttcagattacaaatggggtttttgagaaattaattatgagtaagaaagatgagccaaagatgatagatgacactgaaaatgttagtcttgatgttattaaagctgttgttaaggagaaaagtaagatacttgaggagcttaaaaggactgatagtaatagagaagcattaattgctgcaacaaaggatttacagaaaacttctgagttagctgcacagttagaagctaaagaaaaatccaaatcaaagagtttctcaaaggcagctgatcataataatcacactactactacagcttctgataactttttctctgctcaaactcatctgactgtttctggtcgtcttcatttggagagctatgcatcttctcttgggaatgtctatgcatttggaccgagatttcgagcaattaaaaccgagtctccaaaacaagtagcagaaatgtggacagttgagatggaaatggccttttcacaattagaggtatgtgaaatgaaggcttaaataatggcttattaactcttctttaagttcatattataatgtgtcatgttgttttttcaggatgctatgaattgtgctgaagactttttcaagttcttatgcaagtggcttttggaaaaatgttctgaagatatgaaatttgtcctgaaaagaatggacaaaaactgcatagaacgccttcatttagttatactgaattcagctctaaggatctcttacactgaagcattagaagctatgaagaaagtgagttttattcaatctatcttcggtttcatcatttagtaatatttatctaatttcaagttgtgaatttctgtagcattctgctgataagaaaatggaaagaaaacttgaatggggtgctgcactaacaacagaacatctaaggtattcaacatcattcatttatggtaaaaatgtaaacattttactataccaaattaggccttatttcaatactacttaccattgttaattcatgacagttatttggttgatgagatgtacaaaaggcctgtaatcatatacaactatccaaaacaagttaagccattttatgttcgccaaaacgacgatggaagaacagttgcagcatttgatttggtggtaccaaaggtaacataaactttgtacaaatcccactttgaaacaaaacctttaatggcctttctttaagttccaagtttcaatccataccgaaatttgtttgtaggttggagttttagtttcggggagccaaaatgaggagcgcttcaatgtgttaagcacaaggtaatggcttcaagttctactcttatgacacttaacaattttgctaaacaaaaaaatttaaagtttgatagttaagctttgtgttttggcaggattaaggagctgggattggtagctgagcagtatgaatggtacttggatcttcggcgccatggaacagtcaagcatgctggcttcagtttcgggtttgatcttatggttctctttgccactggccttgctgatgccagagatgttatcccctttcccagaagttatggaaaaatcagcaactgattaagtttctgtaaaagatcaaatccagatagggaaacatgtaaaaacatatacatcctgtaaagattcttattgaaaaattgaataaggctcaaatgagcaaatatacttgtacacatgatgaaataagtgaaagtaataaagttcctacattagttgttattttttcttctgtttttcttcagattcattgtctttactattggcattggagctgtccacagtgtatcaaaatgagttggggttatttttatgatattaaagtcttattgtctagctttcctgagacatctctcatgttagtcgataaataagaaaagagaagaaaatgacttggtggggtcttatttcactgtgcttgaattcaaagatgagaattacaacaaactagaaaacctttgtcttgtcatttttccttttggaaaatcttttagttaatatgacagacagaaatacagacaccaaaactctatggcttcaccttcatcatgtttatcatagaatgatctaaaaccttggtattgtttgaagcaagaggaaagaaaaatggatagagttcatatcttacataacaactactatacaaaactctacaaccctttttgtttttgcaaaaatggtcaaagttttctactgcaatggccaaacactgagcacaatctatactagaaatgtctcttgtgcattgtaccaatgcatagagcgtgacaaaaggcgaaagctgtgtttcgcctttgccaagaccctgattcttaggctgaacagcttcttttcttatctgattcatcaaagctcctaactcctttttgaaattttcaggatcacttacattttgaacattagcatagagtatgccataagaagtgtcaacttttccaataaaactactcttgttgttataccttaagaagcaaaagtcataccaaatcctagcatcagcttcattcgggcaacgagttttgatcttatcagcagcatctttgacacaacttgagcagtcttcagtgctcacatcacctctgcattgagccaagccataaacttggtcttcgcctttaccataggagctagttaaaaagccagttgagggagttttgagagccaattcagacaacaaattgtcaatgtttgatgatattttactgcctttgcttatctcagtctctttgttacagaaatctcccaaaggatctgctgattcggctatgcaaatgcatagaactagaaaaacaacaacaacaatttcatgtggtaacttcatcttttcttttttggtaatgttttttagttgaaaagctcagttcatagtaatctttataaaggtggtcatgattgattatgtagtgagtatatatggacataagttgcagacatttttgactttcttagtgtgtttaacaccatgattgagtagagtatacgtatgaatccatatatgatttccaaattatacattcctcttttctaagtcaaaccttctagtaagtcaacttggtactttataagacaaaataaagtggtagctcatttataacaatcaatattgattagtaacttttttcgattagtaatgccagaccaattaaatattgttcgtcctaaaattaattcttttatttttcttttgtggtaaaatttttttaagttttttttttttgtaaatttaaggtgtcagttagatatcactgttaaataccaactgaattactactgtatcgacttcgagattttactgttacacatacatagctgtaaacagtggtcatccagttaatatttaacgataatatctaataggcgtatcaaatttgcaaagaaaaataaatttaaagagattttaccaaaaaaaaaaaaaaagataacgtgtagaaattaagttttttcatgattatatttttttaaaaaaaaaatcacaaaagtgactacacatcacatcaaaactttttcaatacaataaaaacttttataattagttttttttttttaaatatatacatgtgactgattgacgtgacaactaattttcccatcaacttttataattaaaaaaaaatacattttaaagtgacaagaaaatacatcttgaagcccaaagtataaaagttataaactacacagtataaatgtaaattataccgcctaacagtataaaagtaaaaaaaatgaaaaagtcagtggtgtatgtaattttccct

SEQ ID NO: 20119 - DNA, 1861 bp, Cannabis sativa
tattatacttttcatgatgtccctactttcttcgtggactcttgaaaacacattttaaacaaccatagtagaagaaaattaagaaagcaaagtatacttgggattgggattaaagtccatataatttaggtatttatcttttaaggtcgacacataaaagtatctaaattcttatctcaaccgctcgataaattatatatataattgattttgaatagtagtgtgaataatgtcatatatatcgactcctattaggcacaagcactgactgactgactgactcgtgattctctagaaaattccaggctttaataaatttgttgaacaaaattcaaaatgtaaaataaaattgcatgactattattattaattaatttattattatgcagagagaagatatacgtttgattgggttaacaagactcagacattatttattgcaatgacacctatctatatgtaaactacaaattatataatataagtcatagcgtagacaacgtcactacacaactaacattgttattgcaagtagtgaggaagattattcaaaagaatattctaaaaattaatgtaatatatatatatatatatatactgaataataaagtaataacgaaattcaacttgggaagaagtaaaagaaatacatacgtacgtaaagtgaatacaatttgcgtactccaactaaactccaattcataattcaacatggtgtctaaaacttatataaaccactctcatcatatttatatatatatatatatcaacggaagatataactttgaccaaaaataaaattctatggtaattcattcctatttcattttttccaaaaatatagaaattctgtcttagaaacactagaacttgaatatagaaattctatggtaattttataaacttaggtagaattactattacaaatacatttaataaaaaaaatatatttaaatatgtaaatgagttacttttaatatattaggaaaataagtcttcaatctttttgctataacaaaatttttatttttcaacattcaaacaaagatatatggctaaaatagaaaagtcagaggaaaacaccaccagtagtttgttcagcgactctctctagtctttttaaatcacagttcacactttaattggttccagtctgcttatgctgccagattcatactttgctaaataatgttgagcatactatatatatatatgtatattatacatcaataaagcccataaatatatatagtctattagttgataataaatatatatttatttattgtatagatttatggtatggatgtatgtatcatcttaacaacttacatcaatcaaattaataaagagttaataattaatcaaagaacatgtaacttgacttaatttttatattatttaaaccatttcatatcactgtatctgtatttataatatatatatgtatatatatttataatctattagggttttttttttttcgcttaacatattagttgagcactgacttttgccaattgattgttgatagttttgactgctgctactggagtcgtgtgctaatatgtaagcttgattgattttaaaatttcttatactatcttattaaaaaaaaaaaattgaaaataattcttatgcactatcaaacttaaacttatgtattaacttaagtaaagtaaatactttaggtattaaatgtccaagcaatttcataataataataagaatggtaaatagcggctaagtacttaaaattttatgtttctaagcggtataaattcaatgtttatttttagcgacataagtactcaatatttgtaaaactgtaattttctccagtttcttcagtacagactct

SEQ ID NO: 20120 - DNA, 5094 bp, Cannabis sativa
cattcctctaaaattgccatctttggtgtaaagagagtcaagatatatagctttaggcctggacttacgctactccaatctttgcccaagttttgtagttgggttttggatgtttgctttttgaaggtcaaaacaagttcatctatttttctgttgcacattctccaattgacattgaaaacttatttcccttttctttgatcgatctaaagcagggtcattggagttcatctcaggaaacaggaagcaaattcccatcttttagtatcataaagggttattggagttgctaacatcaagcggggatagctcagttgggagagcgtcagactgaagatctgaaggtcgcgtgttcgatccacgctcaccgcattcgctttttatttattattattattttttgataaataatacaaacaggagtattatgctctgattttggcaaatttctttgatttaggtgcccacccaattgctcaatgttaaatataatattttatacacatgttcgtaaataataatacattttcatcaacaatcaaagttttatatttgtaatgatgattactccaacatataatggtaagtatgactgtatgaaactaaatctcaaaccaaagtatgattggcaaaacaacatactccactagcacaggccttgagcttcacaataatgactcgatataatataagcttttaacgagtataagctcggcctgcaattaacctggacttccatactggttacattatgaaaattgatccaatttctattcttttatttaatcataagaaaacaaaagagatagttccaaactaggcgtattaatatgacagagcaaactacaattccaaagtgcctgtttacattgacaccgcttttattgtgcaaacagttttattatatcaagaaattggctctattaagcatttctctcaatgctcacaacagaaaaagttaaagtttaatgaaaatggaaaaaactggctgctaacatcagttcgccacaatacaaataaaagtgcaaacaattcatttatgtcaggaaatgaaacttagttcttcattgaacattgttcgagagcatttctctcactactcacataaatttcctgtatggtctaccgttatcttcatcttgcatatgaaattctttgacaatacccttgtagacgaagattgggatggctatgccgaacaatccaataagggcaaagttgcggcgtgtccaacggaagttgtgctcaagattctctcttgcagaaccccactcctctatgaacttgttcttgttcgcttccattcctccccccatttgggcagtcctgtgttgctatcaagcatctttaatacttaagaagaaatgttctaaaagcattaaatcattattcattttgccttttttctttttttttttaaaaaaaaaaaaataaaaaataaaaatgctaccgtttatacaaactaaaatacaattcataatatagtgtaccaaatacacatattatcaaacacacaattaacaacctctaaagcaagaaaagtaaaaaatcaaactgtttcaatatttgacattaaatttaaatttctgcaaagagtaacttataataataaacatgctgcttgttccataagaatgagagcaacataattaagtgaatcgaaagactcgtggtatgaacaaagaggtaaagaatgatgctccacaaggtcatggaatgtgagactcccacaatagagaagcttctccagcaaagcaacatcgtttatatttaatttgaaaacctaaggaggtatgtaaatgctcctccaacaaagcaagcattggtttctatttcctcggaaacatctcatcaccataaaaacgagcacacaccaatcaagtaaaacaataaattaataaattttcagctcaattaagcagacatctgttcaacataagtttttcctactatctctatctacgtgacttggaatttgaagaaacattaaaatccacttttgtattcttcatcgaaattctatagagtgtgctttcaatacaactttgggaggcaatgggggttcagaactactagcaaacccaaaagtactggtcacttagattgaagggtgttcacaatctggtgtcttactatctatcctccattgaaccattaaaaaaacgatgtagaaattcaatccttagagcatcacacaacagaaatatacaaacttacatatctatatatatgtatgtatctatataggttgttctcctaacagctcacaagtcacgacacaaaattcatacttaattctcagaaaacacacacacacacacatgtattgtacaggtcccgtttcaatcctggagtagagtaatgttccgtattatcaatcaatctaatattaattatttctacattacttcaatactattataaattactctgcataaataaacggaccactaaaaaagatggacttcatctaaaacccatatatatatatatatatatacagagagagagcagttcgttcaacacagaatagaagtcaacaatttcacataatctggtcgaagaaagtacctttagccgaatctgcaagggaaaatttggcgacgcgtagccgctgccaatttctgagtgaacaattgaggaagattgaagcgaaggcagagagggattgagtcggagaggttcaggtgagttgaagagaatcagaagaaaagaaggcagagatggaattggattggatggaagctacatggactcaacaagtaatgggctgatcaaattgggcttggtcacacgctgaagaaaatgtcaaaaatctaactaaaaaaacatggatattttaaggaaaacttacataaatactaaattttggtcaaatctttataaaaatactgccacgcggcaaaaataacttttatactgccttcagactttttttttttcttttatactgtaaatatcgaaagtaaaaaatgaggtctccatcttccacactcaaagacgaaaccacgacaacaacaccaaaacaactggaaaataaccattaaatccggcaagatgaagcagaaacatagaaaccattaatatttgggctgtcatagtttttctaatgttgttttttgggttgttccattgttattttgtatgtttaacaaatgttgatttcaaattacacaggttaaaccaaccactgaatatttgtttgaggtaaccagaatgaaaaaaatcatggacaataatagtcttacctcccattgaaatgataaaatctggaagacaaaaaaaagtgtatggaagctggctaggaaaagaaacaacataacaaatgcaacaaatgtgagaaggtaaaatacaacaagagaacatacaagagaagatatcaaaaatgaaaagaagcagaacaatttaaaagcaactgtggaagaatggaggaaaacttaacatatattagagcatagaatactgaagaaaataccttacatacaaatttcattattttcctattactattaaaaatagagcagtgcaataatatttaggaaaatgtaatgaagaaataaaagaaaataacagtttaacaaccttaaaacaataacaaaataaattagtggcagaaaagggtaacttagacaaagagggtggacttggaagtacggtagagatggagctaacgctttgagaccactgaagaatgtgaacttagtgggagttttgaaagatttctaccagaagctcatcagagagcaagctctccatctctctctctcacacacaaccatattcttatctgtcccaattcttcttcttcttcttcttcttccttcttcacatactctttttttttttaaggttacctactacaaaaggtgagggttagcttttatttgggtaatgttgtagacttggaaaataaaatgaagaagaagatgaacatgggagaaagagctcaaatacattgaaaaataaataatgtgtgtttattgattttttcaagaggaatatttatataaatatatacatataaacacatatatattatcttaggaagtaagacatcacgtggtgggttgttgctaaaatttaataaaaaaattaaaaagaacacataataatgtgtatgagaggtcaacatcaacttttatcatcatgtaaaaaaaagctgccacaattttcttgacgaggaggagatcatgtgatgggctctttcccaaattttttttaaaaaaaagtgaaaaacataaataataatgtgtatgaaaggtcaacaccaactttaatcaacatttaaaaagaataataaaaaaaataaagaaaataaaataatggtgacaaaatagtataaaatggtaatgtacataatttgatactgtacacagtatacaacatataaaaatatagtaaaaaaataaattttgccgtacaacagtataaaagaaataaattaaaaaaaaatagcatgtgatgtaatttgtcctatttaaagtagaatttacagaattctaaaactttgtttgataaatatagcatttttaaatttgtgtactttatataacaactaagtaatataaccgttctttgtgcaattattataattttttgataaaataattatttatcaatataataaataataaattaaaaaaattattttaataataactttatttattaaaaaatatattatgattttttcttaaatttatttaccatattatttgttaacggaaactttcgttaactaaaattgagcctcacaatattgatttcacacagaaaaaataaaagctataaaaaaataacgtatgaacacaggatatttttacgtggttttacagttaaaattctgcatagtccatgagtcaatcttattcagatttctgattattgttttttttagaaactctcttgtatgagttttttcgtcccttttttcgatcctgtttgtcactatttataattacatagtggacaattgattacaaagttgactggaatatgattacagtaattatccctaaaatcgtgggatttgattacatatcacgtagtgtaaataccgtttatgatttaaaaatcgtatagctgtgattttcc

SEQ ID NO: 20121 - DNA, 3863 bp, Cannabis sativa
  modified_base (436)..(451): a, c, t, g, unknown or other
  modified_base (614)..(616): a, c, t, g, unknown or other
ctgcttgaacgcaatttttgacgtattaaactttttcgaatttcttaaaattttgctggatgtcttaaataactataatctacatcaccatgaaaaaaaattggctaaaaaaatatttcaaatattaaaatagataaagatatatcggtgtatcccttttgaagggatatattataaaattttccaatgatatttaacatcataataatatttaacaactctagctatttagaatttgtccttggtcaggcccaaccggcccaacgcattcatcgttttaattcggatacatttgtgataacacttgcggttggagtcctcctgtaggctcactattttcttcaaaaaaaaaattacacttttacatttttttctttttatatttgtacggtttttcgtaaaaacaatacgaaaaaaaaaaaaattacataaaagnnnnnnnnnnnnnnnntctaaataacaacaaaaaaataacatacagataacaaataattaacaataaattaacatgaatacaacataaaaagaccatattttctgtaaataaaataaaaaaattcgtaaaaatatttaaaattccgtaaaattgtatttgtaattttttttattatttnnntgtatttgtgaaattatcccttttcttatttactggttgggcctataattattgggcttagattgaaaagcttggcctgacagaggttttgaatgtggacactggaaatgacatgaatcgggatagtagaaaaggttccctaaaagttcatttaagctttcaacattcttacttctaacacatcaagcaatcccattcgcatatagcagaatattcttgcaatttgtgcatttggaattttaatattttatcttgatggtacagttttagtaaaataatttgtaagatgatttcaggtttgctgctcctgaaggcttcttttgtttaagttacaagacagacaaactcaatctttgggtataaattgactaatgaaaatataatgttaggttgtttagtaaatttgatgaaactggtagagaataaatctatggagatttatccaaccacacaggaagggtttatgatgatacaaaagctgtagcaaaactttaccaacttctggttttcctttctcttgtactacatacgtacttaaaaacattactaacaatacaagcataataatctatgtaaagtggggccatttgaatacctggggtggaacaagtgcgatgtaattgaatttaaatttcattaattcttttatatgatcaagataagcttatcaacactaattcattagaattgctatttccatgagagagaacactaattcactagagcaaaatggaagttcaaagttaaagatactcatcctcactttcatctttgaagctgaaaattcaacaaagaaagcttatcaacaatacagtcaaaagagaaagaacccaattataattatcttatgaattaaatgattataatctcatccttgcacaatcagactacccttacaattctaaatatttcacaaataactaaaacctaagctgtcatcacaaaggaaaatctcctcagtcctcaccacctaataaaggaaaaaaaatatttatatatatataaataatatatctgttcagtgcaagctttccctaatattcacaagctttctgtcttataaggggggcaacaaaaagatatcacatttggaaaccataatgttgataccccactgaacctccatgattattagtagccattgtcatatggtttggtggtggattcatctgttgtattgtttgaaattgttgaggtgaattatgaggtggtggtgtaggctgaaggcacatttggtcagaaggcacagaatcagtgacaccatccactgtggtaatgtcatgaatgcttgacctcttcctctctttgggacctgattcaagcctaagaaagtatttctgggcatggctagccacttgggttggagttcttgtgatcaccacattccttgaaatgctcctccaatctcccttaccaaatagcttgagacccttgagaaataatctgatgcataaaagaaaaacaacacagtcagttaatgatgctttatttttgcaactaaatactccaaagttcgaaaatttcatataatttgcatacacctcacctagtcccctagtactattaagttactctatatgtcaacaaagtcaattctaagcagcagaaccaggaagttaggaccagattttaataagcagttgaagattgaacccatttacagttacaggtttctctcctagaaaagttctgccactgattcctaaacatttatttattattattattaacttatttccaaaatatctcaatacataaaaaccatttgccttgaaccaaaacctttctagggaaatgttacaaataaacgttacaagaacgtttttatatgtagaaaaatagttttatataataatagaaaaaaaaaaacacggtttcttttttctaaaacaagaaaacaaaactggaaggaaaaataaaaacccagaaagatatataaatatggggaaagaaattataactagacaacatttaatactttacttataaggccaattcaaacaaattttattccaaaaattaaaataaagaattgaatgcccttttccaaatttaaaagtttaagaaatggaagatagcaaaaaaatttgacaagagaatccaatagaagaaaaaaattaaattatcaattaattgagagagataaggataagaagaagaagaggaattacttgtgttcttcttcagtccaaggagttcccttcttcctctccggctcagcctgtttggctttggacccaaaagatatctgattagcggagtcccacccattcaaaccttcagccgagtaatcagtgtaactcggaagcgcgactctgcccgagtcaatctccatgacatcatgaaccaagtcattgtagtgtctgataacatcaggaatggactttccaggcaatcgaccggcgatcctatcccaccgattggggaggtcgttggagaagtcgacaagagctttctcgaacagcttatcttcctcccgagtccaccaagttgagcgcggctgatgagtcaccatgttccaatcccgagcttcctgaaacattgtttccgttttctgaattttcaaaaattggttttgggttttggatattttttttcttctttcccttttttcttttttcttgactgagactgactttcttggagatttcgcgtttgaagggtttggtgggaggtttggattgctggcttaaatatttatacatatatatagagagagaaaggcgtgtcctttatttctttaacaaataaattacaaaaataaataatttaaaaaagaaaaacaaaacaaaacaattttggggggttttttggaattttgtttgggatggactggattaccaactcaacagagtttttattcaacacgttttctttatatttgtttattgttttaagctgcacaggtggcccagctttctcaaaactctgttttctgttttcttatttattttaatagcatttccaagttatataatctattttttattttggtgaattaataatagatttcgatagtggttaactaattttaccctgttaattaaaaaaatgtacttttaacaattgaatgataactaattacccactaaattaactttgacagaagaaaatactcattgggagatgtccatctgtgtgaaagatcaacaaaagtagacatgtctgtctgtcaacatgtatatctcctatacttatatatctccattttacaagtgttcatactagtcacttttttgaaaaaaaa

SEQ ID NO: 20122 - DNA, 8837 bp, Cannabis sativa
ttcacttacaaaatttaaatttttgtttccaaaacacatttttaaaaaacacaatttttgaatcacaaaccaatcaaacaaaaaaactcatctctctacatttctcttatccatcatcacccgccaccctccctcccccttcttacttctctttagctccctctcatccacccaaaggagccactgtcgtcatctgttgaagcccacacatccgcctcccattcgtcgcccctccgtctcccgtcgaagaccatatcctcaccaccttctaattgaaagtcaaagcttgtgggtgaatgggtaagtattttttaaaccattttattaaatgattgtaaaagtatagtctattttcggtagatccatgcagttgttgtttgtatttatttggttttgatacaattttcgttgaatcgtgagatctatttttttggagtatttaatgttttcatatttttctcgacgatttttcgatacgtacccgacgggttctcgacacaaatgtcccaaagttaggaaagacctttatcgatagttcaaatttttttttttaaaaaaataaggaatttagttattattgattgattatagacgggttgtcgaaagattctcgataaaagtgagaactttattttgttgttatgttggttattgttggttaattatcgacatattgtcgacaagttcttgataatattaaaaattagttttttagttgtcatttttggtggttgtctactgactatcgatggattctcgacatgctctcgataagatttagtattgcatttttttttgtcatgtctgcattttatttttgttattattgtattgttcaactttttttgatatcattgataagttgtgttttttctttccattgtgttatgtctatttcttgataggtttacgattggttgtcgatatattttcgatagggttctaacatttgttcagttttctttcttcaacaacaattgattgttatgagagggttatttcctctcccagacaaagaagcgtatgtcaggacaatcatttatgatgctaagatagtgactgagatgggtgtcgataaaacacatctttaatatgacgcccaggaccctgctgttttcgaaagccatgctaaaaagtagcagaacaaattaagataacaacatccttgtattaaaaaatattttgtataatttatacatttagagacagttagtgtaacttttctatgttatcaaagttaaactttaaaaattgtaataacaacatctggagcctccataagaaatattatcgaaaaaccatcgataaatcatcatagaacatatttattaaattactcatcgagaactcatcaatttcccattaagaaatcctcaaaaaaaatcatttcaactaaataacagtttcaattagtatgaaatataacaaatgtagttttagggaccccaaataacattaaactatgtctcaaacacaggctttgcatgtagctttattgtggcccaaaccaccatagttgtctaattttgagactgtgttaccacttatttatcactaatttcaaatcatactctaatgattcaacctccaagttttcatataaaatgttgtgcattttctgtaaaattgtgtcagtttcaatcatcaatatcatacttcattcgcttttatacgtccaattaaatccctcaacactctaaataccatcatacaacacaaccaaaaacctaagtacgtaatcatgcaattcatacaaataaaaaacaactaaattagaatgacaaataactaaaattataataattggaaatagtgtcaacaaacagtcaagaaccaatcgagaacctgtcaaaaagcaatcgttaaccgttgaaataataaacagtcaatcatcgagaaacagtcgataagcagtcaagaaatcgaagaaaacatgggcaaagaagtttgaaaagataactatacacaccatcaaaaaactatcgatgaacaatcgagaacacgtagataacatgtcaagaatggttgcaaatgtaaaaccattcaccatttcgacaaataatcgagaacctatcgaaaaattgtcgagaaaggtcgtccctaaccttgggacatttgtgttgagaacccgtcgggaacgtatcgaaaaagcgtcgagaaaaatatgaaaatattaaatactccaaaaaaatagatctcgcaattcaacgaaaattgtatcaaaaccaaataaatacaaacagcaaccgcatggatctaccgaaaatagactatacttttacaatcatttaataaaatggtttaaaaaatacttacccattaacccacaagctttgactttcaattagaaggtggtgaggatatggtcttcgacgggagacggaggggcggcggacgagagacggaggggcgacagatgagagatggaggggcggcagacgagaggcggaggtttgtgcttcaatagatgacaacagtggctcctttaggtggatgagagggacctagagagaagtaggaagggggagggaggatggcggctgatgataagaaatgtagagaaataagttttttaagtatttttagttttgaaataaaataaataaaaaaggtattttggataaagtggggtattattaagatagaacggtataaaataattaaggaggtattttttataataggaattattttaagaataataaatgaaatttccttttatattttgagaaaaaaaatatataattgggaatgtgaaaagacaatgaaaggcttttaaaatcttaaaatttggggatatattagacaaaccagcatgaggtgatttagactcttattatatataagataaagatgtatattatgtaaaaaaaaattaaagtttatatttttattatatattattggtcatatttattcaactattgagacggttaaagtatatttatttatttttttgttggacattgtcaaacgtttaaatatgcacccgtcatctaagacatgaccaaagaaaactcaactttaactactcataattaatttttttattttattaaaaataatttatagtataaatattatagtttaactcgcatttggaactacctgacaattgtcatatggtaaatcttgatgggaaatttgcggcaaaagtcctcaaaaagttcagtttgatacagataagtccccaacctcaaaaaatagcggtaatagtcctcaaggtcatgctttttatttatctattagtcctaattttaactgagccgtttacttttttaaaattgccacgtatcaaaatattattgattcaaattattattttaattttaaaaaataaaaacaataaataaataaattatttaaaaatgatttaaaaatgatttttttttttaaaaatgattttttttttttctttttctttcttttcttcttcgtcttcttcgtccactgctcgtcttcttcgtccactactgactaacgaaccattctcgatattttgaaactcttctccactcctgatcttagcagctatggcatctggatcgtcgggtaggcctaactccagttccaagggattcgattttgccacagattatatattctctgctcgtatgaagactacaataactaggaatcctccaatggcagccatgacgatccagtgatcacttctagctccgggcaggtactttgggtcatatcgataattgatgtatatctgttgccccctctcctccgcttggtgatccagatcggtaacctagatccagatctgttaacctcctcttcctcggccaccattaaagcttgaataacctcgacggggtggacgacaacatacaacaagcctaccttgccctttaaaacaagcctttttgagttgggcagtgcataacacctggctgcgactgactctgcagaagacgaggagtggacgaagaagaagaaaaaagaaaaagaaaaagaaaaaaaaatcatttttaaataatttatttatttatttttatttttttaaaaattaaaataataatttgaaccaataatatttcacacgtggcaattttaaaacggataaataaaaaacttgacctgagaactattaccgctatttttcgaggttggggacttatctgtatcaaactgaattttttgaaaatttttgccgcaaatttcccaatcttgattagtctaggtcattaaatttaaatcttttaaaaaatatagtttaaatataccaataaaaaaatgacatgtgcataataacttgacatttaatgatcaactacttatggagttccaaaaatataatttaagtattattaccgcaaaaaaaattaaatttaagtatttatttacaaccggaagttaaactcatgcatttacgccgcaaattactcttttattaatttgttttatgttgattttgtatcctaattaacacttgccgtattcaactattcatggtttgttgcttgcgttataaacttaccttcttaacttattattgtgtgggttattaacttgtttcctaacgatcatctcttaattaattaaagtaggtaaaccgtatttgatatccatctaaacacttaataatttatggaaagtcaaatagaaaactacatacgaagtctataatgtatgctatattcattaattgtagaatacattgttgatataatttcatagattaatttatataatccgtatatgtgatattggcatctttttatataattaactattatttgcaattatattagaatcttctttggagctggttcttgcaattatgagattcccattaggtggaaagttctcaagatttgatgaagttgaattaatcaagttcaatgcctgtggtctgtggattaccaacattgaatcagccagtggtgcaattaataatggtttatttattgtcataatatgctcatataaaaagaggttctaatattgttttaaaaaaaaagagtgaaagactgattaaacatattaattgataggtatatctaaacaaattcactttatttatacatgcaaagccagcctggccaattaaataattaatttgcttataaagttttgatgtttttttttatttatttatttttatttaaagagcttaacttctgctacaagtcaatgattattgatcgtattttgactttgtgtggttaattaatgtgattttctattatcttggtagaccatccttatatgaatgcagagacaatttaggtagatttctaagtcaatatcttatggcaatataaaaatgagccattattcccaatttcacaatgaagctacaattactctctcttggatcaaccgtcctcaggtaatttcatttgaactgaaattgagataattgtggtagactgactagttgagacaattagactcactttttctaaagcttgaccctgtcactgtgattatagcacgttaattaaaaacagctatatgattaaacaaagactactaataagcaaacatatttcgacttatttaagatgtaaattaaattgaatttaaaaattagtatgtgtattctatacaaaagaatgaatggtagtgggtgtgtaatactataattaaatgacaaatgtcatatttttagattcttttatttgtaccttatcatcttattacaattaaaccttgtcaatgaaactaattatttatcatggaaaaacattacaaaaaacatagttttgtaaaaaatgaataacgagtacaatatatttgagcttactcgaaaaaatacgaaatcattcaaaatattcagcacaatagatatacatatacattaacttacttaaagttacgattagtgtataccaaaaaaaaaaaaaagagtcaaaataacaatcatttgccaatttaaattcattcaaattaattactaatataattatctaaaaaaactgataagttcaatatttcatcagcagtgataaaattccatgcatggagaaatactttgtaataactctagagagagagagagattgaacaaaattcttgttatacctattttttgaactattaatgaacaccaaaacgtttggggagagcaaaggttcccaagttaaattgtatgccacgttgcttaaataatggtctgtgcataaataataaattctcatagcaaatacattgtgcgataggtcgaaaaaactcaagactcaacttgtgaggtaacctcatgaagtgaggtattgcagcattgtcaggacgatatttcaataaatattcaaaattaaatctcgcaataaggaccttgatgctggtcgtaatataaagaccttgtagttgctcgtataatacaagaatcttgtagatgctcctaatataataaacttgtagttgatcgtaatacaaagatcttacatctcctcgtattacacaatcagtaatgcattgcctcatattacacagcaaacaatgcatctcctcgtattacacatcagtaatgtatcacctcgtattacatagcaatgatgaatgacctcgtaatacataaacaatgatgaatcagctcgtaatacacagtcagtgatgaatcacctcgtaatacatacttagtgatgcatctcgtcgtattacacagcagtgatgcatcacctcacattacacagtagtgatggatcacctcgtaatacatactcagtgatgcatcacctcatattacacacatagcaatggttttgctcacaaataacatggtctgaccatgtcaaagaccgcttctttatattttaaatataaacaattatttatacttatccaaattaatattcaattatatgtaaaacgtgggcattagccacccatcaattataattttttactaagatagggttgagtaaccaacatcctattactataattaggggttcactcataggaaaatgggggaagcaattctgatttacaagaacttttctaaattgtaaacataacgcaaaactcagaaataatactgactcgtggagtatgtagatttaactataaaactacgtaaaagtatatggtgttcatttattatttttgtcttttcatttcttgaatttattcttaaattaataatcttcttagattaagttgatgaaaaattgcattaataatttggtgaattcattaagagaaggaagtttcaagagatttaaaaggatgagattcagattcatcatcttcacactctcaactatgaaattggttaaaattaggattctagtagaaccctcttctactaatcatcaccaaagtatgtagaaagtaactttaaaatattcttaccaactttacacaatattataaatatatatgaagggtatataagtttttgggccactacaaagacatatacagaatatatacatatatgtaaacatatatgagaaaaatgttaaatggtgtcaacattctagatatcctattggcataatcagtaagaattcacttacaaactctatcaaaggttatatatataaatatatttcacgaggccaaagtgggacaaaaataatgaaaataaagaactcttattcactcatatattcaaaatacaatttactcataattaacaattacatttgttgacatatgtctcacaaatttgagttgtccacacaacttctcaataagttctcatcaccaaattcacatgagagtgtaactgaaatacataattttatatattatcatgctaattatgtctatatcgcatgtaagtactgagagaaaaagagggataaagcttagaagatatgcgaaaaattgtcattcttatactcttgacaaaaaaaatgaggtggtgagcagataactcaatgatgatcgatctgctcgcagatgactaaatctactcgtagatagctctacttgtagataaatctgctcatagataactgtgcacataaataactctacttgaagatgaaacaatctctttggacgaaaataggagatgaacaacttcttactcaataacatgtgatactcaccgagctgtagaaatggagacactcttttgtgaataactcaagatatttagcaagcaaaactgtaacaaactgaattcctctttgctgggagcacacccgaagatacaattaaagtggtcgcaattgtagaagagaacttctaaattatggtcgcaaccaaaaaataaaagataacttcgaattgtataaacatctaaattctggtcgcaaccagaaaaagaaggttatcccaattattttccacctgacgtggcaccaaacacgtggaaataaatcattacaattgttgtacattccgtgcagcttccaagacaagggcaaagacaatgatacataagtattgacaagaccccggtaggatgactagaaggccaaacagcctacagcatgtagaatgttgaacatcctgcttgtagaaggtcggttagcctatagcgtgtagaagatcgggcaacctaccttcagaaagtcgaatagcttacaacctatagaaggctggacaacttacaacctttagacacaccggatagcttccaaaccaagtttgctggccaactcgtaactttttctatgggccttctagaaaacaccaaatcatccccagtactcctacaacttcaaaatagttcaaactactcacaaaaatagggattcaacaccaaaatgtaacctccctattttctagagatattttccattattatgtattttgtgttagaaaaataattacaatacaataataaactgataacacctgaggcgtgcaaacaagacactgtccttaaggatttacaaagtaatcccccaggattcaacagg

SEQ ID NO: 20123 - DNA, 2023 bp, Cannabis sativa
tttaggtcatttttacagttaattttctttcactttttggaatggaattacgcttattttctttgattttaggtttcgacacttggaatgtataaattggccagattttagaaaacgatgatttataaaatagagaaaattttacaagaaaataaagctgaaactccaagcctaaattcgactatgttctgatcagattttggacaaagtcaaaatataaaagttttagatatctttttcatctttctaacgtatcttgattcagcttatttggagttcgtatgtgaaagttatgcatatgttactgagagaggtcgaagtaggaacattttagtcgcgactaatattcgtggccgctgggagcatcgacttatggccgcaatgagatggctacaggaagccttgaatttgattttctattgcccccggggcgaggctattggtggcccagtgatgcctccgtacgggacatgggcaactttgtcttttcttcaattttgggctaaaaaaaactctattttaatgaaaaaagaagtggcgaattttaggaggatattcaaaaatacaatcctagaaacaaagagaaagacttctagagtgagcgtggcgatccgagcaatttttctactagtttctttcttctccctttttaatttcttatgtcaatttctgtttttaggttaattgtagatttgaacatggaaattatgaactaaattcctaatatagggatatgatgaatgttagttgattttattccatgagttaatattaatgctatttcttctttcttgattgtgcatttattcatttgtgtttaatacatgttggagattgatcaccttatgcatgatttataatttcaacataaaatctgaaaagtaggtattgagaatgctctaattgaataaatttaagttttgatgttaaatgatagtatttgcatagcttttgtgacttataaattattatttaatgtaaattgtatgttagtatacttcagaaatgcaatagataatatatggtttcggaccttaatgacctgaaaagaattttagttaattttataatatgtcatcacataaagaaagagaaatggtgattagcaagattcgcattcttaatttctcattcagtgttaaacaacttttatatttactttcttttaaaagaattatttgtcaaccaaaaagaaaaaataaatttaattcatggtaattagtcttttgtgagttcgactttatttgtgtgagtactgcttgattacgtgcacttgcgtatagctttataatttttcgtaacattaatatgtattattaattttaacatgtttatgctagttttttgtaataataaattatttacgtgtttatataatctgttggagagatgattaaaaaaaatggcataatgtagtttatattatttatgtgattatgtttcgtttggtataatcataattataataaaattactattacagttctattattgttttaaaaatttggtaatgatttataatataatcattgttacctcatttatgtttttttttttttttgataactgttacctccaaaggagaaacacaacactaagagaaacagagaaaaaacagaacacacaaaagtagctagaaccgaaagaaaacaaagggttcagaacccggctagaaacaaactaggacataaaaaacacaggaaaaaaaaacaacaaaaaaacagaaaaaaaccagatcagccatctgcctcccaagatggcaagaaactgacaaaattggtcaattcaattgtcccaaactgcccagattgaatttcccagtgagccacgaagtcggctacaccattgagacttctcagaatccaagtagcctcccataactccacacggtgagcaatggtgtgaaacctttgcaccagcggttggatgttgtgattgagtttcttaacccttgagtgatcagtggtaattacttcaattgcgcccttcgagtccgactgaaaaataacattgttgtagttca

SEQ ID NO: 20124 - DNA, 4667 bp, Cannabis sativa
tgaataggcagagagaccaaggtattttttttccaaatggcactcatagataggcattctcaaaatttggctaaaaaaagagaacaacatgattgacttttgggtattaaaaaattgtccagatgctcgatgataaacatctaggacgttattgatggccaaagctgaacttgtatttgcttgacagaataggagactatcctagttgttggtatattagtttatttgaattgaatagttagttaaaaagttagttaggatattagttatgtagtaatgagttgtcccagttgttagtaaattagtttatttgtaatcccagctactataagtagctaattacacattgttataactaatttcaattcattcaatacaattgttagttctctttccaattcattcattttttttatttaagcgtttatatattacacaatatatacatataacttggaacttaaattctgcacttccaacagacatgcaccctcctataactctatttccaatacactctgatgtaaatttctcaaaaaagaaaaaatggataggtcccatgccatattttcttttaccaaacaactcacttctatctcttcttttcacttttctcttccttttttctctttcttccaacttttcttctctatcagacaaaggttagtgccagcataactaatgcaaccatctgatgaaaaggaaaaaaaaatgcatcccatcttgtgacgctttgtatgtaaattgatgcaaataagtattataacaagtttttatgctgacagattaatagttacgccacaatatatattgttgatgatatatacactagtaggtgttggaggctattttgcattaaaagaaagtgtttgaaacaaaaagtgcttaggtggtgcacaaacagataaagatttattgaatctttcgtcattttttatttattaagtacgatacattttattgtggtcgacatactcatgctccgtacggaaccatatgcttactaatattttgcatctctttatatatataatacataagatttaattagaaatagtagtgtatagctctaaatcagaatatttgggtgtaggaatagctattaaagggactcttttcttaagagcaagcccaaacttgtcagatagttcaagctcagtatcattaggtaatttccaatgaaagtagtgcaagaaagaagccaatataatgagcgacatcctctcccctaaagaagctcccggacatattcttcttcctgttccaaatggaatataatcaaaagtgttacctgaaaagttatattcattattattacccccattattgtttgatccattaataccactcatcaagaacctttcagggagaaattccaaaggattttcccatacactaggatctctttgtatagaccatacattgagaaaaattgcagtccctttgggtatagtataaccaccaacaatagtagattggcttgaagaacgaggtattaaaaaaggcccaggtggatgtattcgtaatgtctccttataaactgcattcaagtatgttagtttggacaaatgagactcttctagggtgttgttcaatcccacaacttgctttagttcttcatttactttattcaaaacgtttggattcctcataatttctgtcattgcccattctacggatgttgtgatagtatctgtagctgccacgaagatatcctatttgaaaatacatcaaaagattattcactgtcagtcacatatttttattaatccacatcatttatattatttaaatactacaaaataactcaaaaataaaaattaaaaaaaaaaattgtttaattttctttgtccttatagattcttttctttctttttcttttttttttttttcaattccattttcaatggctcacagcaagagattaacaaggacagtgaggtggtttagtgcccagaaaggcgacccagctgcactacgcaaaaccccctctttctcgggctcactctcaaatttcttccctctctttttgatggatctagatctggaagattttttttttcagacctggatggtagttttaggaatttgaggttttattaacagtttacaatttaaggaatttttttaggaaacaaacccagaaaaagagaaggaatttttcagggcggccagagtttttggagaaagaaaatcgcttgattagattttccaagtagtttttgttattttttattagttcttttttattttaattatttaatagaatttgtttagatggaacagtgaatactatcacataattgaagttaggagggtttcgctgttaaaatttcaatttgtggggtcaagtgcaataaattgaataattaagtagtattaccacaattatatatatcacttcaaaagttattagttttagtggcattaaaatttgtgattaaaattaaaaaattgtgaataaataattacgaaacaacattttttgtaattataaagttcgcggctaaagtattaatcataaaaattataatttgttgtgattaaatgtgtttgtaatcaccatatttgttgtaactaaaactttaaattagtgacaacttatatttaaatgctatattttagtcacaatcacaaataattttttgttgtgacgaaaaatcacatttagtaacaaaaaatttatgttgtgactaaaagattattagtaaaagtaattattttttatagtgtttatatatttatcataaattaatatcttgaaggatataacaatacatattttaaacaattttacccaaaaagttaaaacatatataaattaataaaataaatattatgaaatgtcatgacaaattctcctcttttactattccaaattaattgattttgagaatatatatatattgttttcatagcttaaacataaaatgtaattttagacacataaataattgaaatttcgcatatagttgattatgtacgtaccataagtattgctttgatttcgggtatggtaatataagtatccttatcttgaggttgaagatgaagctcgacaagggattgtagaatgtccttggtggtggattccttgaggatgggactataattaccattagttttcatggccttcttcttcttcttagcaatagcatcatcaaataccatttcgaacacttgattaatcctctctgtatctcttccaattttctgtatatcaaaccacttaagcatcggaaaaatatcagagatattaggtttcgctagcaactcaaagagttcctctactgccttcttaaacttagaaccatcaacatggctgaccgactcattttcttctaatgaagtaccaatcgtcatgcctataacacaattaatggtcgtttggtacgtaaagagtgctatattaacagggctttccctcttttcatagatacacttcactgattttctcacctcttgtctcctcagctctgttagattatcaagcacagaattatttaacatttcgcgaactaagatctttcgcagcttcttccaatctgtaccatacggttggaaagaaatgttaaggcccccttgactgatgattgaggcagagacaccaacatcacggttggaaaatattatgtcttgttcacgacccacttgggcgactagctgtggcgaattgatgactacacatagtttggttcccatccaaaacttgtaaattggaccataaacctcacccaaagctgttaggtctatgtgaaggttttggctcagataaggaaagtatccaactatgggcaagcctcgagggcctggtggtaggggtgccaatggtactgatgataacttcttggttatccattggaaccatatcaaggtgaaagctgctacaaagagaagaatgaagatgtcaaagaggtgaagcccaaaatagtttactacgttggtgaacatagttttacagcaagctagctagatagttatatgtgtgcagagtactgcttgtgcttgtgtttggtgaaaagaactggttgtgttggaagcactttttatagagtgaattatgggacttttcttctggagtaacgaaactaactagtgaatggcatcacctcgtttgaattattcatttctttcaaatatatataaactagttaacgcaattcgcaatactaatttttatataatttttatttgaataatatgaaaaattaagtgtacaaacatgttagcttgacatgtaagtacaaaatcttttttttattatgaaattagtccgacatgatccatataacactcttttttatatcttaattatttaaaattattctcatcattatttatcatgttgtcatcaccgtatctcactaactcactatcaatttagcttaccaaaaaacaaatcaagcaatgagttaacattattaacttatttttatacaatttttctataccattagggttcctgctataagttaagcatcatcaaaattaaagacaactttaagcaatgttctcacaagaatcagcacgacttacgactctgcagcatgacttacgattataaatgatagattgcttagttacatttccacttgagtgatacctaactcataacagtaatatctattcagtacgacccataatgcacactcatatatatatatata

SEQ ID NO: 20125 - DNA, 2534 bp, Cannabis sativa
agagagagagagagagattacacatttagaacccttttatcttttgctgaaggaaccattaatcgtttatccaacatgaaggaaattggggcatttgaactcgtcccaccatcaccgaagcccttggggactgtgccatgtgaaactacctaaaaattgacaataattatgttaagataagaaaggcatcacataatcagaatgtagcacaacagccaaccaatgtgaaagaagctcaagaagaagcttccttcattccccaccaacctcatcagtataaggaaacattagatgaccagaagcatggttatgagctaggacacattcaaggtcaaagatggtgaataaattagttgccctacaaattttagataaaatcaatgtctcaggtataagagcacatcacaaaggaaagtcttgtcataaccatgtgttacaaaaggggagaagaataagttaagtagtttacactttacaaataaaaaatcagcaaacaaatcataggttaaccaaatcaaagttttattcaaatcattagagcacctccaatggtactctctatttttcagctaaaatagctaaaaaattaaaacagagttattttcattattattgctccaaccacacccctactctagttagtaagattattttaatattatattgaatttatcaaatataaattaattttatataataataaaaaagtaatagtgcttttgattaaaatactatttaaaaagtttagtaaaaaagtagggagctccttatccattctctattatagagagccattttttgtatggttggaactcattttttcaagtctcactccctattttagctaagtagtgtgttttgagtgcatggttagagatgctcttatatctaaaaaagtctataaagcaaaagcaaatctttaggtttatatatatacacacacatatatatataagaaacaaaaaattgttttctaataagtctaatacaatcataagaaaacatgacagaaccatagcagtaaaggacaagaaaactagctaataagcaaaattcacaagagatggaaaaagtaaaactttagttgcatctaaaaaagcaattagaatttagaaacaaatcataacaaaagaatattgtaaataaaagtttaaatttaacctgctgatatctgaactctaattttgtcagaagacactcaagtttttcaagcatccctttgtagtaacagcctctcgcatatactgttgtttctatagtctcttttatgaaagttatgggacacgcatttgatgaatggatgctggaaaaggcgtcccaacaaggaagaagatcctcataagaatggttaatagagccaacatatgtacacaattctagtaatttcattaatacttgaagttgttggccagctctgacaagtggaatcaagtggtccttcagaaaacaaggaatggtaactccatctcgttcctgatgtgaaaataaatcaacatagagacaacttgctaaaaacaacacaaatgccaaataataaaatttaaagtatcaattcacaaggttaaatctgaaataagcagtaataccctaatagttgccaatgggaagtcagtatcatactgtcgttgggatggttggttgtcaatacattctactacaaactccttataaggatcgcttatctcagctttgtatatccatgatctgataaacgagcaatatggttcaaatgaacgaacaaaaagaaatttgagtacagcatggtgaggaggatcggcaacctaaacaaaaacatttcttagaaataacaaaaactaaaaggaacaagccaattaaaagtgaaaaccagcaaagcagaaattataatcttggaaggaaacctatactatagaattcaagagcaattatagcaaaagaaaatgttatcagtgccatcattttttgtaataactttaatatgtttatcattattatttctttctgttgactaaagactagtgagcttaaagtttctttaattttccacattagtcagcaaattttgacaaaagttaatagctatttttcagcaaataataagttagtgtgtctacatataactgacctgtaactgtgcatacaaatatgtaagaagatcacctcctctgaagaaacgacaaaattcaagcattgctttagcaattaaatcttcagaacaagagtttgagaagcaaaaagctatgggacataggttgcatatattcccaagggcttcaatctgaaccctcagttcttttgtgtgcaaatagagctccaacaaagtaattttagaataaaccactgtggtaagacatcctattccagaaggtgctaccagaggcatctcaccactttctgatgaatccctcaaacatacagatgcatataatgtatctagtgcacacatgtagccctctaaaatctttcccacagcaacagagaatgcatgattaacaagactgtatggagggtgcacatcctgttgcactttactgccatgacgatcttgaatatcc

SEQ ID NO: 20126 - DNA, 2371 bp, Cannabis sativa
  modified_base (26)..(30): a, c, t, g, unknown or other
agtaataatttataattagtcacaannnnntcacttttagtcatgtaagattttttgtagtgtctatataccaataacccacaactacccataaaaaatttaaaaaaaattgacatacatttgaaataaaaaagatattaacaaaactaatatagatatactatgatctttaagtaatatactacttctaatatttttttttaaaaaaaaactatgaaaaacagattattaattttttttatgtgattataaacaatataaataataaatagtgtaaaagagttatttatctataaattttaaaataaggacatttacttatatagtgctataatttgaagtcatttgctataatttcttataattaattattttgtttttttaattttacatcttgtgtattaaaatataattataaattatggactaaatataatacatttttttttttagtacaaatttgagattgtccgtttccaaagtcttaagtttttgctatatatattatattgtatgcagtgcattcgaaaaaggtcccttggaagcaatgtaccatggaaaagtgaacaataaaatgcacaaatgcatacatacacgtcagagtatgcttgttaaaactttatattattattctatgatacaatgaatcatcccaaacgagtagggaacatcataatgttgacaagatcacacttaatcatcatccctaaacccaaattaacttcatatcctcatcatatttcacgtgaatatataattagatcatttctatgctaaaatatatagttttattttataaaaagtatactctaattatgtgttaaaagttgatgtaaatttcttacatattagaatttgatccaaattaaaattttaatttagcataatgaaaatttacatcactataaatatatttttatatttagtgttacgatatttttaatattttattattaaattataaacctttacaaatattataatataaaattaatgatacagatattattttaatacatttttaataaaaatattagtttttttggtcaaattttgcaattttaacttaaatcaaaatactaaaaaaagttgatacaaatcttttcatcttaattataatacatctccttacaaattacaatataaacccacacgtaacctccacgcatttccttcactcacatataacgcgtacacaacacaagtgtcattcacaacgcgctagctaataagtcacatatatctaatatatctcataagtcacatatatacaactatttcacgtaattaagctcttttgtcttttcatatatgtatatatatatgcggagctaattatatcttagtgcagaaatatatatttcacttcagagctctctaattaagagataagtataataattttggcaccaaaatctggtcaaataatatggcatcaacgacgaaattattaacaacattcttgccgaaagtacatagcgaaggttgctcctttcagccggtactgttgcggcggcagagacagcgtaacggcacgatagcatgcggtagtagagatgcgaacggtcgagattacgggggatcaaggattgtggatgagaacatgataatgcttcgattgcgtattcaggagataaagcagttagagattgatgaagccaatcataaagaatgtgaaaatggatcatggcttcgttcagaatggatggagtgggaaaaacagtactttgagtactacatagatgatgtttacgaaggaatagggttgttgcaaaattatttgatgaatattaggcctgctttggctctagggtttctcctacttgtcatgcttagtgtgcctaattcttctggctttcttttttttcatatggtagagatcgctaaacaactcctctcatgattgtacatgatctagtcatgaagatatatggtgaattgttaaatttgtgttatgtacgtgcaaggtatgtagctaattaaaacaaattaatagtggaactgattaaattagaattacttgtctaatactcttattgtaaaagttagtaaccaatatttacggttagtgttaaaagtcatattgtaaaagagcatttctattagacaataaggtgctcaacaccatttagacatggggtgttacaagtggttggcattggcctatattatttataaaatcaaaatatgtaggacctgatattgatttatgttaataacaatatgtcacctattgattaacatttctcattataatatgataaaactatttttgagggacatcacgtgtaaagactcggtcaaactgagtcaaaagaaaaaaaatgataaaaagaaacccaataccgactctctctctctctctctctct

SEQ ID NO: 20127 - DNA, 2864 bp, Cannabis sativa
aagaaacgacccaaatcataaaaaaacgacaataaacgacacaaatcacaaaaaacgacggtaaacgacacaaataatgaaaaacgacaataaacgacatagttaataaaaacgacaataaacgacacaaatgacaaaaaagactcttgtaataaaaaacgacgataaacgacacttatattaagaaacgacaataaacgacactaataacaaaacgactatacgggtgtggaccactgaacccaaaacttgtcctattacccatttgctttccaatttatattttttgctttccaatttatatttttttaaaaaaaaaaaaaattaataattaaaaataaataaaatagggcctacacacgtgccttttcttttaccccaaaattcaaattttcttcccactctctctctctctctctaacggctaattttctttctcttcttctctaaactcctcactttctctctctatatccatttctgtacttcttcactttctctctctaaaccttctggtttcgattgattccttctggttcgaatcgaataagaagaagaagaactaaggagttagtacgaagacgatgaagcactttatgcagccaagaaataacatcttgagagagacggaacctccgccatctccaaaccctagcagcaccaccgccaagatccgacatccgcggaagcagaaatcttccaaggagaatgctccgccctatgccgatccaaactccttgcctccgattcctaaaccctcgccttccgctgctgctaagttgaagagtccgttgcctcctcgtccgccgtcttctaatcctcttaagaggaagcttcacatggagactgttccggagaattccgtgtttggaacctctgattctggcgtacaggtattgtttatattcatttctttccttttttagctgtggtgaaatttgaaattggttgagtgagttttggggttttgagtttgaagcagcatttcaaattggttttagttttgctcaaattcagctagtttctatgtataaaaatatatattatgaaatctgaaaatgagatagtttcctttttagaaatgagataattatggaagttgaatttcaatttagaaggtaatagctttaatcaaatgaaagaaaattgggatttaaggggaaaaaagtttctaaaaatactaatagcatttaaggaaaaaagggtctatcgagtttagtagttagattcagctgaactgttcaaactgcttgaagattcagattcagattcagattctaaatttttttttatttttttttatcttacatctattttatctgagattcctttttaactgttaagataattattattactcattttttaggtagtagtgcgaatgaggccaccacgcaaagacagggacgaaggagatatgatagtcgagaaactttcgagtgattctttaaccatcaatgggcaaactttcacatttgattcagttgcggacacagaggcaacacaggtatgatcaaatgctgaatatctttccaggttcttaattaatgattatgaagtgaatgctgaaagttatactttttgtttgcagcttgatcttttccagcttgtgggggcgcctcttgttgaaaactgtatggcgggttttaacagttctgtctttgcttatggacaggtattttgaagtttggcttttcttagttttacattgcactttagtagtatatatgtgacatatgtattgatctacattgatttctcgttagactggaagtgggaaaacttacactatgtggggtccagccaacgcattgttggatgaaaacatatcgagtgaccaacaaggtttaactcctcgagtttttgagcgtctctttgctcgcataaatgaggtaattttaagttgtctttgttttgattagttgaatttcatgtcctatatttgtttcaacttatctctgtattctcacaggagcaaatcaagaattctgataaacaactcaagtatttgtgtcactgttctcttcttgaggtagattctccacaacagtttgtttctgattgatcagcttgtttatttatttttttaagtttctaaattaaagtctaactaaattttgcagatttacaatgagcaaataacagatttattggatcctaaccaaaaaaaccttcaggtaaataagattcttttttcttcaaaagagttaagtcttttatgaacgaataatgactgacctgaatctctacacattacctttcttacagattagagaagatgttaaatcagggatctatgttgaaaatcttacagaagagtgtgttcgtacaatggaggatgtaaataagcttttaacgaaggtttgcactcttaacatatctcttgcacctcagtcataggtttgatgtatttttgtttaagcttgagtcttatctctctctttatctcttttgccttactcatgttttcaaattttatttaatgttgagagcagatcaaaatgtaacacgtgagtgaatattacaactcgtagcattattcaccaaaatcatttaaattatggttcagtataactcatcaccttagtatgatgagctattaattaaaattatcttgtttacatgcctctcattaccacttccgaatacactttgcagggtctgttgaacaggaggacaggtgcaacaagcattaattctgagagttctcgctcccatactgtttttacctgtgttcttgaatctcggtgcaaggtataaccatctatggtggtgacaaattttattgtctggttttagatgttaaactgtgaaaaaattatattcttgtaggactgatttcaattaaatgagcacttaagtaa

SEQ ID NO: 20128 - DNA, 8836 bp, Cannabis sativa
ttcaattcccaggtcgtgaaggctagaattttctattatttctagatatatattttatattgtttattctatattattgtgtatgactaaatattcatatgtggtacttttgggtagcaaacatatgccatataccattaccaccattgatttttgtgagttgtggcagaactatgggtggaagtagagaaatggtaaaagccacattttattactattgatataattaaattttgagttctatataatttgataaataatttttataaaatatcgttaatcaattataaaatgtcaccatactaattaagtatatatcgatggtacttacaataagaaaaacgggaaaagatcacactagtagtacttagtacctttttttattgccatatgtctcattaaggtgatgtttggttcattgtaatggtaatgaataggtctattacattgtttgcttttcccttttaacttttgtaatccatacaatgtactgcttattacattgagtattgtaatgatgattacataccaaaaccaatgtaatccctattacaattacactccattacaaataaaaaaaaataattttttgatgaaaatataataaaaaaaagtcaaagtctatattacatttttttaaaatattttataactttataataaaaagcaatagggttattttagtcaatacacattttattccattacattctcataccaaaccaaacacattacaatgttcattttaactacaaatcaaacattatatataatcaattcctataaccatttttattctattactattaccattaccattacattacatcaaaccaaacaccacttaaatttaatataattttttttaataaatattactaatcaatatcagagtgtcacttttaaaaagtactagacatcattagtgtccaataataatactccttgtaataatactcataaaagagttaaagatatcatgtcttgcacacttttttaataatattcatgtaataattattaaattaatttgatgtaaaactcaataatataccaagtggtgatactagaatcaagtggttgcagcatttttcatgtgaaagagtaaagaatacttttgatttccaccgactctcattcgaagcttttccattattattttattttttcaatctaaattgttaatttccattaattgacattgactcataattaatcttagttctgatttagactttattttccaaagcatgtgtgtatggggttggttgggtcgactataaatagcacccatcaaatttcttcattcaaaccttttaagtaaataaaataattctatttgtttgaaaattttcatggttttatatgtttctccctcttttacgtaccttttatcatgttccattttttgaaacattaatattaatttatattgttgataatttttttgtcttcttattgtaattaagattataataatattctatatatgttaaaatttatcaagaataatcaatacaaaccatgtttatattctgcaatgaccatctcaatcttctagggattataaatctctacaacgactaaaaaaaaaaaaaagtagaaaatattcaaatcactctttgaatataattgatagatagctggtagcttattaagaagagctatcgcccaaaagaatagacaacaacttcgaaggaacactattaataaggaatatacgttcagctaggaacatagagtgtcaggcaataaaatgcgcggcacgattcgcaaaacgtttgacaaaacataaagtaacatttgacaaattttgaagaataaacttgcaatcttccacaataattccaaaatcagaatggagcctctcattgtttcgaatagcttccacacaaaccaaactatcggtctcgacagcaggctgagagtaatctttttattaggtttcttgatagatttttctttacacataaaaaaaaataagctacaacttatgtcatacttactagtaaaagaaacatttacttaagctactacatgaaacggcaaccaatatatgaaacgacgtcaaactacatgaaacgacaacctatatgtgaaacgacatcaaacgacagaaaatacaataaacgacaatataatccaaaaacaatcaagagagagagagtttgttgcagggttcaacaatggaagcggaactggcagagttagagacaattcaaacccaaatcctccgacgcatatcggacctagagctctcccttctccctgccggcgccggctccgatatcgaagaatctgaactggtggcggagagcgataccgaagctcgactctcttccattctgcggagccatggcgtgaaggacttctgtttcaagaaggtcgcttcggattactacaactggcctctcgaggctcgacgagacgccctctctgccccatccgtcgatcatctctgcaaaagcatcgtcttggtaacttaccatcgattatattatgttagctttaatagaatggtgattgaaatcagtgaattctttagggattatcagttgtgtaatgatttgattctcacttattaaacaagcttgttatgtttaaaatctagttgaaaaatggaaactttgaactggggatttagggattatctgttttgtaacgtaaagatatgatttttgggggaaaattgtggagtagacaaatatgaacattggtttatacaaatgtaggttatagtgagcactgatgagcttatatatgctctgaaattgaacttgttatgaaaaacattaaagatagatactttttctagtttcatgatcaagtagttttttttttcttgaacaaaaaaccttcattaatctaaaaacaaaataattacatccttctaatgtaatctaagaggttatgctcattccttgtgggttttttgtgcaatacagtgagtattctagcttgcaaactccttttaatcttcctatcaatcattgtaacagtacaagaaaagcaattatatataccattgtttctgtttctccaaagactgtatacagttgcagcaaacattgcgaaaaaggatatctgaattgagtcctttctctctattcgggtaccactgacgccaacttttaaagtccaaaggtcaggccttctaaacatattgttctccaacaggtcaatactcaagctccatctaatgttacagattgcagtgatcgcaacaattcaaaatactatgttgttgttgttcaggtaggttttagttttctggtaaagtaaagagattaaaaaagttcaaatttacttgctgcctgaatgtaatgatacattgacttagttctttttaattgttgtattgcagtatactgctcgattcaatgctgaaactgttaaaaatttcttgtattcactcaatgatggcaagatagcaaaaaagaaatttaactgtaagtttctgtactactaaagcaatacttattatgttattgtatttgcctctagtgtatgtaaacaggctctagtatttgaattataaaatacttaacttgtaggtttgatagataaacaacaaagtatttttttttaatggtcagttagaatgagaaacccttgaacaattgattgaaataggcatcatatggcaacattgctggactttggattgcctgtattctaatactgcttaccaacttttcttctgaaatcccggagtactcgttttcatcttggtagttgtcttacggtattgactttgtcaactattgtgtatatttgcaaccttacatcatttattgacatgtctagacatgtctattgctaacatttaagttctttttggctagacatgtcccttgcttgcgtttaggttctttttcaaatgatctgtctagttcttggcccatttacttgaaagactttttttaaaattaccttctgcctgtcatagtggaagctcttaaaaaaatgttgaattgtctctgtggttcttctggtacatataacaataaaaaatactgaggtctcaatgcctttggtatcttaatctatctcagaagatgatactgattgctattttttctccctctttcattcagtgaggcttgcacctgaggagacttcagcaaagttgactggatacgagcacaatgctgtaacatgtgttggtttgaagacagacattccggtacacattctttccccacaaattaatatatcacgtgtaattgcgtataaaaggaaccagctcacttcaggttggaatagacatgagaataaagactttgactattattttttgtatgaattagagcagcaaaccactaagatacagtagatattttaaaagtgtgaatatgataaaaatggaaaagtgaacttgcagagaacttctgtctgaaagcaatactctcatgctgaatattttcgggtacatgtctgaatatttttgggaacctgtctgaatatttttgttctcggcatgcattgacaaataattcagtgacaaactgcttgattattgtctcttaatgctggagataggtctaactcattacccctttcgatttgattgccgaggatttgctttaagtcagtgttgctttatgtaccccattgataacaacgttttgtgatgacaaaagggagtttggtttatgtttgcaatagtaagaaaactcttgttgtgagttatttcattcaaacttaacttccagcaattggatgatggtcatttctaattatggtccatcaatacaacaccgttctgaagtgataaaaaagtctagattataatagggtggtccaccctatttattgtatgatagagatatggattgacaattcagttagaatagtgtagctaggtttatggacagcaaaaaaccatgagttgttagcacatgcatctgtgtagggaacactatcactttaaaagaatttggggaacatttgacgttgaaataatgaaaatctctcttttcatcacatgctggaaaggttaaatagatagagagctgcatgagaaaccaactagactacgcgacagaaattataattgacaccttgttttgattggtattgctttgatttcaggtgattttggacgaagcgattacaaaacttaaccccaatttcttctggttgggtggcggtgaggttgatctgaagctcgggattagaacctctgaatttattgactgtgtgaagcctttcattgtcagttgtagtggtggttaacaacaagggctcaaaagagaactcttcatcaaaccaagaccatgcttaagacaactctctttatttatattaaacattgtaatttttggccatggctaatggcagaataggagatcagattggtataatgacttaatgttttgtttaggatttgaaatttgatgaacattggagggtccacagcaaaagatgtatgtataggccttgtctcgcattgttgttggtggaaaagattgatgaaggtgacacatggaatgttagactgagccacaattcatcaatataagccattaattttggttggttgttagttaatcctcatggcattttttcatcatatataatatatttatgtgtgtctgaaaatgaaaataaatacaaaaaaacaaagtcacttcatgttctttgattcatcctatcataacataaccaaaacatgtgttttgggatgagttttatggcctttgtaaaactcattttctcatgtgacacattcattattatcaataaagaagtataaattattattgttcaatcaaattgcatttgcattacatagtgtgaatttcaagaaatgaattccaagttatagtgaaatcactagaaaataataataagtcttgagataatttatttcataaaaatcaaatttaattgtctcaaatgtcaagttattgacttttacataaagtgagaaattaaggtgaaagagaatgaatggaatatattatatatggcacatctgttactattaacaaattagtgttgttgtcttaacattaatacatagaattaaatcagaattacaaatagttaattcaaacaagaatttcattaattaatttctgagaacattgaagggcttgtcataacactactaacacagcaattcagacaaaagtaccaaattatagaaggtgtctagttcttctacttcatcttctctagtgcaacagaagcagaaaccaaatcttcagcttcaaccggctgatgcatctgcactcgtaacttaacatgtcaattgccatgaataaatctaagagtagcatgctctaaagaagaaataacctaaaattgggtcacatagatcaattgagtaccaaaatttcaattgccaaaatactctagtataaaccttgtaatatgtatgatctacataccattttatatttgcaggattctatgtatcatgttatgaacgggcactataaacatcgaaaaactcgggacataacatacaaagattcttctctcagtattgaaggttgtacatattaaggatgtagagtggatactatactacttacagcttttgcaacagcaagccagtgaaaagaacgaacaaatgtatcttgatgtgagggaaggctatcgtgtttccaatatgttaaatttttaaactttgcattcatttcccaacggtttgaatcctctccaaccatgctggaagcttttctcttccctagtcccctctttcccaaaacaaatcctgcaacaaataccgatatagataattagtgatgtttcttcttaaagagattatagttcaataaaggaataatacaagaaagttaacaagcctcattaaaattaaaaagacaatgataactactttcattcaggaacaagattgattcttgatgaaatgaaaagtagaagacggataagcctttgcttaagacacccaatgaaggtcctagtggctagcattctcttctaatttctttttttgaaaagaaacatagctgaaaccaaatctttaattaaaacaatttaaagtcataagagatgataagctatcatctttaattaaaaccaaaaactccaatctctcagaataaatcagaaaatgaaagttcttaaaaccatattatctcaaaagagtcaaaaaaggctaccaaatcaaatctaactttccatagtttcctcctaccaataaaaagcttgcagaacaatatcttgacattgatgatgttgaggccaaaacaataaaataccaaaaacattcataactattcatccaaaaatatgtctgaggagtgatatccccaattcttaggccactaattcttaatttcttcacacacacacacacacaaaaaacaataggtgttcatattacctaggcaccacgcctcaagtcaaaatacacctaaagtttcaggcaaaacgaatgaagactggactgttatatagtgcgaaaaatgcaagaatactaataaacctataaattatagaaatttctcataactaatatcaatatatttacaccatatttataaaaatatatgcataaatcacataccagagtacccttctggaagagaaagtgtagtcccctgcagcttccttcctctgaaatgagcttcctctaactttagtccctcaatttccacaccttttaatcaaccccaagaaaaccatcaacacaaattctctaaaacctctaaactactagaacaaaacatactcttacagcaacaacaggttgtttaccagtaaatttgggtttgaaataatcagcaacagagcaagggccgtcaaacttgatattacaaggcagaaggtgtacttgacttgtcaaatcaaccacatcattctccgattcaccatcaccactgctgcacctgtagagctttatactcccttgagttccatcctccattgactacaaaaatcctaatttggtcaatttattttaccttgtctccatcaaatataaacatattagagaaactcaagaatgaaactcaaacaattcttcactatcaaaaaataaacataccaaaaataaaattatatataactgacattcatttatgttatcacattgctctacttcaaacatgaagcttaagccattagtttaaaaaaaaaaaaaaatagactaaaatagcttcaaacaaacagagcataaggatatgtagatctaagcaataatatcataaggatatgtatatacattattaatctaaaatctcagatcatagaagaacactaagaaatatgcatatcattaacccatactagtaactataataggcctaaaaagttgagaaattaagaacattatgtatgaatgaacaatgaaccaaacccataatcatgatactcaatctctaactattcagcctaaagatttaaaaatatatatgaatgaaacacataatcaaaccattataaaaatcccaactttaatttaaaactcgagttcaaaatcccacactcagttttcaatctactgttgtttgctcatcttggtcagttcaagacaaaaaagaaaacactgtaagaacaaaatcaattccacgttaatatgattacttaagtaaaaacaatcatatatgaaaaaataaatggcgaaaaaggacagaaaagctgaggattctcacctaaggagaagaagaagaagaagaagaataaccggagatattggaacggtggggaagaaggagccgccgtgtggtactgtacgttgggaaccaaagaggttgaaagagagaagagagagattttgatattacacatatttctttatttcattttttaatgctttttttttcgaaaatttacataaattattattatttttttcaag

SEQ ID NO: 20129 - DNA, 4717 bp, Cannabis sativa
  modified_base (1026)..(1027): a, c, t, g, unknown or other
  modified_base (4049)..(4052): a, c, t, g, unknown or other
tcaaatcccagatgagatttttggggtttaatgaagggaattattttattttatttttttacaaaatcattccctttgtttttttaattattttaatttgtatcaaatatttctgttgtgaaagaaagtagtattattcatgatcttcttctagtctatgttagtgtgttgttttaatcttattaattcatttaactttctagaaaaagaaaaacagggttgcttacattttgattagtatattatgcatggagtcaaaataagagatccaaacagatttgagtttctcatttgaggtattgcattccagttggaaacattataattaaacttattttttaaaaaacaaaggttagtttttaccttgacaaagcttggaatgatatatactaataatatattatacataatatcaaagtatgaaagtggacatgtcatggtgcaaggtggattatatatatacaatgcttttaaagacactttcgtgtcaatttcttatttacgaatagttcagaaagctcaaaagcatttggatatataaacagtctacggcaacaaagtacttaactatacaaaaatgataataatctcttcccatatagattgattcattgaatctgccccatgtatcttctgatgatttctctttctattcatgctataattatatattgggatatcggtgcttaaaccactcaaattttaaattttttaacacttatcacaaaaattgattttttagagataaaattacctaaatttccattccgtttttttctctgtaccctccgtccaaaaattacaattaaatgacacagtgaactactcgtatgtacacacttgtatacttggtaaattttattaatctacataatttaattattttaaatattggaaaattaagtaaattttttaataagaaaaataatttaaaaaataaaaattctatttttttctttcttttttctttttcttttcttatgtaacccttgacaacaactccttctcctcctcctcctcctcctnntcctcctcttcttcttcttcttcttcttcttcttcgacagtcaagacttcatttctttgctagtgatgaaaagtccgagcataactatccagtgctttgcttatgtccctaactatgtggggttcacaaataatgacctgtaaattgccaacaatcggtgggggaaatgggttgttatttttctggccatgtgtctagttttggccggcttggacataccaacgttaatgggagttgttcctttttattaggaactcaatttcttctttcaagctcttacactcattggtgttgtggccgaaatctttatggaatcagcaaaatttggtgacatctcttttactgatgtctttcttcattggagggagctttttgtagaaaacaatggcctatgtggccattaggatagtctcgggagtgttagtcaggatactaaggcatgtgaacttcttctccttttcccaagggtgttgttgtgcatggagattattgaatttccctttcttgccatttccttggctggaatcgttattgttctattttcctccattattattgttggtctgtggctgggcagtattattgggcccagcagtggtaggtgtgttgttgggggcagttgttttttgcccaccaatttgcacctaccgaacaacttcttcaagttttataaaatctttggcccagtctaaaaagtctttcatattggtggttgatctttttctcatgtctctccaaaggttgttcataggcaggatacctcctaatatggttgtataatgcctttcttccattagacctttgacctttgtggtttaggtcatgaacctttggatatggtctttcaaaggctctcctagcctttattttatttcaaccaagtcttccaggtaggatggtattttcctagaggatgaaaattgcgtgtaaaacttagcagtaaatgcttcccaagaatcaaatcttcttagggatagcttaaagtgccaatactgtgcggttttagataaggttgttggaaagatcctacaatggacattatttatcaccccttgcagatctgtttggatctcaaagtatttgatgtgagccaaaggatcttctttcctagagtacatttctaagctggtatcttgaacttagttggtaggggcaatgcattaatgcatgcagagaaaggtgaccctcaagccctgtcaagttccatattagaaagctttgggcgagacaagccttgtattaggcttttaagttgatccaactgtgcttgcactgtaggatcaaatctagtcgtcccttatctagccaacccttctcatgggttggcaggattctggtcatttcgaggcaggatgtttccattccgattaattcttcttcagttcaagtcattctgaaggtcttcttctaccctgggacccattctatcaaacatagaacgtctgggccttggattataatttgccaagtattttggtgaggaatgtcattattgcactcggtgttgttgttggtttttatggtactacattatataagcagtggaagagttcatattatctaattattattgtaccatagcccagtagatctccatatgtgtatacattaaatcaaaatataaaatacaagtaaagaatatatacatcttgatgactatcagggtatccttaaaacttattgtatgttgtatcctttaatcctgatgatgaggatgatgcaattgaactcacactagtattttccaaatcgatcaaccacacaaaaggaatagtatcagctattaggataaagtgtataatgtgttcttgtttaattctcaatagaagagcaagaacaatttaagagagaaaataattttctttttctcctatgtcaatttcaaaattttctattaaaaattattatcttatttctcaaatcaggcttttatttatagtagttaaattcctattaatttaatcatattcaattatttaaataattaaatatctataatcaaattcggttactaatatttatgagggaatctcttaactacttgagataatatctcaactaattaatttattaatccgaaaagataaaaccaatagggacactctacactagagtaggcacctaccttgtctgaattaagacaagaatggtgtcttttgtcctgacaacttttgtcttaacaaatattatcttgataaatattttatatgaacaatttttatctttttcctatttaattaatttgaaagattatttatttattacaaaaaaaaaataattactatttttccaattcaaaatagacttttttgaacgatattatactactatttatcccttgacagtgtttcaagatagcgatccggggaccatggacctatcattataatgtccaataaaccagattatttattgagtctcatcaactaaataattcttttttattaattccatgattactccactataaatatgagctgaactcttagtaattatagaattatatttacagagttttactgcagtgtctattgatacaatcaatttcagtgattagccattcatgtattggttcatattagttttgattaaattatcgttttaccattctaattacttctttatcatttagtgccattaatttactagtggaagtataatttagatctcatctaaatttgtgcacaactttccagttatagaattaacacttaaagggaaccaccattcgattctttaaggaagtcaagattccataattgtagatcatatcctcagccatctacattattagattcccaaaatagaagttgtaagaatcatcttctttgagaaattttaatgagtggatcaaagaaactaataacatgaacaaaagttcatgattactcaagatttagggcgatttactatttatcatcgttatgatatgatttaggtctttatattaaacgacatgttagataaagacaactttattcataccgatccatgtcctatataatctctattatatacaacnnnntcactttgatgtcatactacatcactaatcagaattgagattacttacatcaaagaataggcatctgtgaaccgtactagcaaacattaattaaagattccataactttaatatgttgctgactgtttcattcatagctaagtgatcttagttcactgtatagttacaggtcacaacctcatatatgaataaaaaatttctcaatatttatatataaagtattaaataataaatatataataatttaatattcatgcatatatcaaaatgtacaactctttattaataattagaaaatgtctttgtaggctttttaaggcataaactctaacaatctcccactttccctaaaagcaaattgagcatctcccttagtcccatattagttatatgacccataaaagattacactagtagtgtctttgtgaacggatctaccatgttatatttcgatgcaatcttcaagactgtcacatcacctctctctactatacctcttagtagatagtacttcctctcacaaaccagcatcaaattcagattagatttacacttaaggaaattttcaccatttagtttttcaattgctaaagtgtaacgccctaaataattaggcatgctacccaaaatgcttatggaatcctaatcccctaattcgggattac

SEQ ID NO: 20130 - DNA, 3706 bp, Cannabis sativa
aagttgtaagttttaattattgattatagtattcattataataacaaatatataatatacatatatatataaactaacataaatttttacttgtttttatcagtttggggtaagccgtttttcttacagaatatcccaaacttggatttttcacttctaacccctccaaaactcttctaaatctaatgaaacattcgagaacagtttatcaatatataaataccatatcccaatatttaaaacaaaccatttacttaaaattacaaaatcaccattattgagtgagtttctgagctcttgaactcaactcacccaactcaaaatataacaaccctaaaatcatgaaattaaagcttaaataaccttaatttacatctaaaaataagcttttacaaaataagcatacaaacaaccaaatttatcaaaaaccctctttaaaaccctaaaatcttcaagaacaccaagaaaagcttacctcaagtttgattagctcctagagtggatcaacaacaaggaaatgattagatttggggatgaaaactcgattttttctcttgatttttcttaagccgaaatgaagagagagaatgagagatattgagttttttgtgtaataattctattgtttgatttatctcttaataatcttaaatgaaaagaaaagaagcaaattacttaagttaatcattagttcagcctagagttttctagaaaataaataaaacaaaaagataaatcttactaaaattactattgtaaccctaatacaacacttatgaaaccttttcaacttaggggtattttgttcaaattcatctaccccaaaaatttcgacaactcaaacctctaaaacattctggtccaatccaaaactcaacctattaccaccgtgacatccttggccaatccttcgagtttccacggtcgttgaacatgaaaataatttatgtcaaaaatagtatatatgatacccatatgtttcaataaaatcttcataattattaaattacgctcatttaatcattttctcaaaagtcactaattatctcataattggcttaagtaagattataatcttactctaatattcatataactacatatttaataaaaatatgtccaatttaaacataattatatttttaagatattacaatgatcacttccttacaggaattccatcctcaaaatttacttgaataacttgagatactgctcccgcatctgcgactttaactcccaagtcacttcttcaatcttgttgttcctccataaaactttaactaagggaatagtcttgttctacaacactttttcttttctatccaagatctgaatagattgttccatgtacgataagtacgtctgaagcttgatgtcctcataactcaaaatatgggccgaatcagacatatattttctaagcattgaaatagggaacatgttgtgaactcaagatagagcagaggggtaaagctacctgatagcctacttgacctaccttcttcaagatctcaaagggaccaataaacctagggctaaatttccctttctttctaaatctccaaatccccttcataggtgataatcgaaggaatataaagtcaccaacttaaaactaaatatccctacgcttcgaatcagcgtagcttttttgtctactttatgaggtaagcatacaacctcgaatcttgtcaatagcctcattagttctctggactacttcaagtccaagctatctccgttcatcgacttcatcccagtgaataggtgaacgacacttccttccatataacatttcatacggtgccatgccgatagttctttgaaaactgttgttgtatgaaaattcaatcaggggaaggtacatctcctaggaacctttaaagtccaacacacatgcccagagcatatcttctagtacctgaataatcctctcagactagcctttagtctgtgggtgaaaagtcattcttaactttaatttagtacccattgctctttgtaaactttcctagaacttggatgtaaattttagatctcaatctgagacaattgactttggagcaccgtggagtcaaattatctcattgacatataaagcagtgcattgatcaactatatacatagtttagactggtaaaaagtgcgctgaccttgtatactggtccactatcaccgatattgaatcatgaaatcatgtttccttaatccaaccacaaaatccatggttatatactcccatttccactcaggaatcttcagaggttgaagtagtcctgttggtttccaatattctgccttgacttgctgacaagctagacattttaacatgtactcaactatatcatccttcatacctagccatcagtacaatgcatttacatcttggttgttcccaggtgtaacgagtatggtgtggtatgggattcattcaaaatctctttcttgataccttcatctactggaacacaaactctacctttgtatctcaataatccatctgatgtaattgagaaatcctttattgatccagcctgaaacttttctttatactctactaatactcaatcactttgctgagaagttttgattctctctagcaaatcaaagtgtaacaaaatgttggctaatttctcaatcacaaactcaattttcgctctagtcatatctctaactaattctagtgagatcttccacaattcattaacttgcctcagacctttcagacttaaagtatcagctaccatagtttcttttcccaaatggtagaggatcttacagtcatagtctttgactagttctaaccatcgtcattgcctcatatttaaatccttttaagtgaaagtacttgaggcttttatgatccgtgtacatttcacactttttgccatacagataatgtgccaaacttcaaggcaaaaactactgcttccaactcaatattgtgtgtgtggtaccgctgttcatactccttcaattgcctagatgcataggcaataactttatcggactgtgtcaaaatgtagactaacccttatttagaagcatcacaataaatcacgaatttctcatcactgattgacaaagtcaacactagtgcagtaattaatctctgattcaactcttagatactactttcatacttatcattccaagttaacttacagttctttcgagttaactttgttaagggtgtagaaatcttgaaaaacccttccgtgaatcttctttaatatcctgctaaacttaggaaacttctaacttcaatagtagatttaggttgtggccaatcttgaactacctcaatctttaccgggtctaccagaatgtcgtccttgttcacaacatgctctaagaatcttacttggggcaaccaaaactcacactttctaaacttagcattaatttcatgttcccgaaggcattattgcaccacccaaagatgtttctcatctgccccttgtgaatcagagtaggtcaaaatatcgtcgatgaagacaattacgaagtcatctagaaaatctttgaatactcagttcatcaggtccataaatgtaactagagcattagttaatccgaaggacatcaccaagaattcatagtgcccgcactgggtatgatatgcagtcttgagaatatctgttgggttttatgccctaaaaaaaactccatttcaatgtaatctattttattcaacatcaat

SEQ ID NO: 20131 - DNA, 10537 bp, Cannabis sativa
  modified_base (2018)..(2028): a, c, t, g, unknown or other
  modified_base (2605)..(2608): a, c, t, g, unknown or other
gtagatctaagatcctggaaaaataatttccaacaaaattttcatggttctcacaatttaaatatttaattttcagtgtttttaaattttttaagatttattagataaatatcatggtataattataatagttttattcaaattagttttattttaatgttaagtcgattggttattggtatatatattttattttatagtatatttcctttttgatgatttatatattttattgtataatatattattacacattgtggtctcatacccttgagagctacagacctctctttgggttctcggactcttgaaagttaagacgcactctttgggtctaggaccctagacagttgggaacctctctttgaggtttcaggctcattagagtgggagacctttgtttggggtctcagacattttagagtttgagacctttttttgggctctcgaacctttgagaggtggatatcacttcttgagatcttggacctctttgacatttatgtctttaggcttttcttcatacgttttttcatctttgacatatattccttaaggtcatcgattgtatgtggatccctttataggagactcttggcttccctaactgtattgaccctgaatgtgttttttttatgtatcaaggtaaagaaactttggcccttccttgtgcagcgctgtaccttatttatgaactacaagtttataagaggacatgtagcccttccttaggcagcactcaactcctttttattacattcttcacccttactatgtgcgttgaatgttttgtattttataaatgtgatatgacttgttggagttttcaaatgtcaacatatgaggtatcgttcatggtttcttctctcattgatttctgcataagattattggagataagtggttactataaggtgttgttggtggaatgtatggacacatttccatggttcgggatgaccttttgttttcttctttaaccattgacccacgtgctttgcattatttgatctagtgtctcttataagttgttgccatacgcaatttctaacttcttaattggggtttgtttatttttcttacccccatcgtatgcctcttacaatactatttcttgcaagaggtagtcttgaaaaagaaatgttgtcatctcgaacctcaagcaagatgtaagggtaagacacgaaggcttggtgagattcccctttagagatgcatgctgacaggacacatgttgtttagatgcatgttgtcgacatgcatgcgatgagatgcatgttttcaagatgcatgatgtagaaatagatgttttcgggacacatgctattaggatgcgtgctaatgaaacgcttattgacgagacacatactatagggatacatgtagttgagacaattgctagtatgatgcatgatgccaagagacatgctttagggaagatctcagcgaagatgctctagggaaaaccttgctcgagttatgggcgttgtagcgggtagctcgttagaaactgttgtctttatggtaattcttagttaatttgattagtagcaacttaactctatgggatgaatccctattgatgacgctagtgtttgtaatgaacacataattagatatgaaattaatgaaaattaattagaattataataaaataaagattaaatttatcatgtgatttatgtgcataaattaataaagacttatttatagagaaataagcaaattcgtaactagtaacttaatatgtctatgatgagcaataatagaaactcgacagattgacaaaaatatcaaaggtgtatagtttaatattttagagttactgataatttttatgtataattagagatatttttacgtggttttgcaattaaatttacataccccgcgagtctatcttatttaagatattttctgaatattagatacaatatacacttgattatatctattttctctctaaaattctccgttcctttttgttgtgggatttgtccctatttataggaatatannnnnnnnnnnatttacatttaaattcaaaatacaaccattgataaaacgttggaattgatcacgtttcatttaaatcgtatgttggataatactagataattgcttaactacatgtgattcttatcctttcaatggtcaatgctgatttagacaataatatctcgcttatttctaagttgttatacctagatattataatgtagaaaaaatactaagtgttagcaaatgatttgcctctccaagtctcctatgaatagcaaggtgatgatctcgctatacataatctgaggttgctttgcataaccgcattcattccttcaaaataaatgaattatctccttggatttgtgtacttcaatgcaggcatgtgtctcgttaatataggttttaatagtcctctatttcagtctcgcttaagactgcatattcagcgaattatgaatattttatattaatcctttatttaatgagttatactttttcttcgcattaaatgatataatttcattatatcaggttgttcagattcctttgtatgacacgtgtcgccttctgaagtgaagccaaatttcgggtataacaattnnnncttaaaaagtttttttttttttctaaaaagagctttttaaatgattgcaagagtatttttgtcttaaccaaattttgaaaaattgcatcctttaagttttggtgattcatgattttgaggcacataattagcattaattggccattttttccaattctctcttattcccattggttagatctttattcttttaatctaacggtgatcattatccttaaagtataaaactcaagagaaaattaccatttcaccatttttgcctttcaaacgttcaagctctccttaaaaaatcattcccgatttctcaaaaccttgcatgccctctttatcatttgatgattatggtaactttctttaaatgagagtttattccccatttttctattatttctttttgagcaagtgtttgatgtatctcttttgcctcgcatatattgatcttgacttagaaaatatgctcaacaacccccctctcgtcgacaaaagagccaaaaaaacgagttgccctggaaaatgaagcctcaggttctatcaaagaacccaaaagaacaaaaccaactgccaacaagaagaaaacttcaagccaactcactatcgagcctgtgaaatctccagagaaggttgttcctgcttcgtcgagcgctagtgaatagccccttgggtctattcactaggtgaagttctctggttctcgcccaaagatggtcttcctcgaaccctcttgccccttgcccattgaagcgggcatagaaggtccgcaactctgctcgctacacgctaccaataactggcaacgttatcagacctttgagtctagcgattggcaattacttaacaaaggcaattttgaaagtttggtgtagagaagctatgatcttatgcagcaggtcagtccttttcctgttcttttttcctttttcccttctcgtctttatacttctttcatatcgcttattctcattccttgcaagcatctcttttgtccattgctgctcaacaccgagggttcaacgagtcgagatgctagagactgaacctcgtaagaccagagatcatcgcgatgttagggccaagaagtggaacgactcagatctaaactttctcgggtaaaggaagaggttgagaagcaacaatgagctgacaagaagaaaatcaaagagctcgaggatgccattaagaccatccaggctgaggctgacaaaaaacttaaagatgccaaggtttacaccaaaaaaaagggtcaacagaattgcctggaggtccatctatcaagtctggttagtcaatcccaagatggacttcagctttctgggccaaggggctgtagatatggttgcataccgcgagaagaccaaaaaagaggaggtcgacaatgaagaagaagttgaggcagactaaggagatcgaaccaagtctcatactatgtaggcttattttctttaatttatttagaaaaaaggctctttggccgagacaatggctgcccctttatctttacttttaatgcctcataccttacatttgaattaaatatatatgttcattgcattttaattcacaatctaaacatttaaattttgatccaacttaagatacttttagaaagcatttccattgctctcgttttttctttcatacttttaagtagttgttcatctactatgtaaaagtgcgagcagctataattctacgtataatttcaatttacgagcagttcttatctactttattttatgcgagcagttataatctggcttgttttatacgagtagtttataatctaccaaacattgtgtaaacagatttaatttgtcgtataaaacatatttttatttatagcaaacttaaaaaacactttgaataattcactccatgaattattttgtatttttttattactcatataaatagttaggtcttctattcatattttaggttaagtattatttttgaaggcattttaagtgcctcatacattaagcttcgcatgtagctttttgttgttttatgagttggtctcatttacaactactactttttgtctttttgaaaggtttttcgattccatgactttatattggtcatagacaattttaatcaattatcatttctttagtggaaaaaattttaaaatgcgtttgcaatatcatatgtacttctagatgaattctagttaacctacatatacatatatgccactcaagtaattttaaagaaaactttgtaaatacttgaaaaaactttaactttattaataataagaattcacatattacagagatgagtacatcatttacatcttaactttactggtaataaggtcgcaaatgttcactattccagtggttctttattagcgagccattaagctaagcaaatttataaaccctgattcccactagtgacttgatatcatagggaccttcccaatttaggttaattactgcagcaaacggatctcgtgtgtttgtaaatactcattttaacaccaaatctcacatattaaagagtcttttcttaactcttttattaaagtacctcgtgattctatgtttataagatgcattagaagtttgcgactcggtacgtttttcttcaagtaaatccatggacaacttaaggagttcatagttttcttcttgattgtagaattcatgtctatgggtcgcaatattaatttctactggtaccattgctttcgagccaaatgttaatgagaatggagtgtgccatgatgttgttttttctattgttctataagcccaaagtacttgcgatagttcatcaacccatctcccttttgcagcatccaacttcttctttatagtatcatttaaggttttattaacagcttctaaatgtccatttgcttggggtcttgaaaccgacgacaagctcttaataattttattccttttacagaactcagtgaacaactcaccatcaaactgagttccattctcagatactatttcagtgggtattccaaatctgcaaactatgttcttgacgacaaaattgagaacttttttgcaagttgtggaaactaaaggttcagcctctgtccacattgtaaagaagtcaactgctactactgcgtactttgctcctcctcgccctgtgggtaatgccccaatcaagttaattccccatattgcaaatgggtatggcgaggtcatcattcttagttctgttggtggtacatgaggtatttgtgaaaatctctggcatttatctcatctcttgaaaaattcatgtgtgtatttgtttattgttggccaatattatccttgatggataatcttctttgataaactttgccaccctatgtgatctccacaaaaacctttgtgaatttctttgattatttcgttagcttctgttggcagtacacaccgtaagagaggcatttaataatccctcctatataatttgtcctcgacttttgtatagtgaggtactaaatacaagagtttgcgtgccctagtttttttttgtaagaagttctccgctgagtagatatttgagtatgggtgtcatccatgtaggcgaggcatctatcatttaaacttcttccttttcacatatacttgggtcgctcaaaacttttactggtaccagatttaacttattaagcttattttgcgataccagctttgccagtgcatcggcatttgagttatgttctcttggaatttgttcaatcttgaaataatcaaacttctccaagttcttctgaactttctacaaatattttgccatctttaaacctttttcctggtacttgcctagaacttgattcacaatgaattgcaagtcactatagcatataagatttttgacttttaatgcttcagcgattctcaagcaagctaacaaagcttcatactcggccttgttgtttgaagtgtcaaattggaatcttaatgcatagtgaaatttgaatttatttggtgacatcattatcactcctgcctcagagccattctcatttgatgctccatccacatataatttccaagtgtctgtatcgtgcttgacgagtggatctttttctgaaattatcccttcaattaagaaatcggccaaagcttgatcattgattgatgatcttaggtggtaggttatatcgaattgtcccagctcgattgactattttcttaatcttcctgatgcatcaggttttgataaaacttgtcttaatagttgacccgttaagacttttacgggatgtgcctgaaattaaggtcgtagtttgcgagatgcatgaattagacataaatcaagttttccaagagggggttatctcgattttgctcccagtaaccttttactaacatagtaaacaggttgctggtgtttttcctcttctcccaccaaggctgcactaattgcactctccgagacaactaagtaaaggtataaagtttctctagttattggtttggtcaaaaattgaggtgttgataaatgttttttatatgcctttaaatgcttcctcacattcttctgtccatttaaacttcttattgcctcgtaaaatattaaagaatggtagacatttattagttgattttgaaataaatctatttaatgctgccattcttcctgttaaagtctgcacttctttcagttttgtgggtgaaggcttcttcattaaggccttgattttttctagattttcctcaactccccacgcattaactacgaaaccaagaaattttcttgaggagactccaaaagaacatttcttcgggttaagattcatattgtattttctaagtatttaaaagcattctgcgaggtcttttgtatgatcataaaaatttatcgactttatcaacatatcatcaacgtagagttccatatttcatccaatctgcttttcaaacatcccattcactagccggtgatatgttgtagcattcactaaaccaaaaggcatgactctataacaataaagtcctgtgttggtcaccaaaattgtacgttcttgatcagggacatgcattttgctttggttatatccaaaatatgtgtccatgaatgtcatcaactcgtgtcctacagttgcatccaccaactcgtcaatccttggtagtgggaaacaatcttttagacatgctttatttaagtttgaaaaattaatacaagtcctccaagtgttgtttggtttcgagacaagaataggatttgaaatctatgaggggtagaaggcctcgcatatgaaatcattggttaataacttgtccacttcttctttaagtgccccttgcctcttagaatctaagggttgcctattctgcctttttgctgggtaattggggtcaatattcaaatgatggcaaatcagcttagggtcaatccctatcatatctgaattgatccaggaaaattgaccttggttttcctttagaaagttagttaactgctattttagtttttcatctagatttttcccaataaacacacatttagtgggattgtctggatctaaaataacttcttccaattcttcaattggtttgaactagtttttttcgtcttggattctagggtctagatcctctttcttcttctcgccttcttctgccatgaccaccattaatttatggttggctcttgtactttgaaattctacgcgataacattcgcgagccaacaactggtctccttccactacacctactcctgcaggtgtttagaattttagagataggtatttgattgaactaactacccctagtccaatcaatggagggcgacccatcaatatgttataaactgatggtagatcaacaactaagaactcttgcatcagtattgtagacaatggttgctctcctacagttaatgggagtctaatgatgccttgactggcaacactatcaccagtaaatctgcataagctcaccatgccaggttttaactttgcattttgtagcccaattttattcaacatatctttgtaaaggatatataccgagctttaattatccaccaacactcttttttattctcttgttggcgagttgaactgtaatgacgagaggatcgacatgtgtatacctcacgtgctttgtatcttcctccaagaatataattggaggttcttctattttggcctattttagtggttccagagcaaacattgattgctcgttttttatttcattgacatatcttttcttggaattattactctctctagcgaggtgtggccctccggagatgaccaatatatcctcgccctcaataaggggaggttgtaatctttggttatccgtgtttttaggctgattaggttagttttgctcattccctttacgcttcatatattatccaaaatatccacgagagatcaggctctctgtcccgtcctttagttgtcgacactcttcgattgtatgccctatgtatttatgaaatcaaaaaaatcttcttggatctcgtttgtgtctcgcatgtctcattggcttaggtttacgaaacgcaacactgtgctcatttgcgagaaagatgttttcacgagtttcattcaactcggtgttagtgatgtaaattggcacatatttgtcgtgctttttctgtttcttcttatttttagatgattctctcgagtcatcttttcttttggtgttcgaaccacttggactatcagccttcgttgagacagtacttgttatggcagtacttgtgttgggtttttttcccaagctagtcttcaacaacttcatctcattccttgcttcctccttgcgcataaacacttacgctcttttgttgaaatcattaatgtttcttactggacgaacctgtaagtcatcacacaactcgcctccagctgttgaaaggttagttgtgatccctgtttgaacagtagtaagttgaatactgtcattcaagttcctaacctttgcagcaacaatgctaaagtgacttaggttagccttatgcgactcgcctggttgttgctttatgttagttagggatgatgcttctggtcgcctatctttggcagcttaaaattgtttcttaaagtccttggatagctgttcccaagaagttatcgaatgatgagtaaatttatcgaaccagctagtcactgccccagtcaatgaagttgggaataaaatgcatcgtacattatttgagacgttgctggctcgcattatggtattaaagtaattcagatgtgcaactggattagtagtcccatcatactacgagacgggtggatttttgaatccctgagggaattcagaattcattacatcagaatgaaatggctccgtttcctcatccgagtcatagcaaggtaatttcccatgctccccatcttggtattttctaaacttgtcctacaactcaatgattcgcaacttgatagggtccattagttgttggttgacattacgatgattgtgtaagttaggtgcattctgatttagtcgcttgcaaatatcaggttgtcttcgattaaaatgctaacgaagattaggttgtcttcgttcataattactcacatagctcgtatctaagtaattcttagattgataacttctcgtattgctcatgctttcttgatcagcataatgtcaaggtgtgcttccttcttgcattttccttcctgatcgactgtgcccttgagacctcgagtgtcctgagctagaacttgcctcaccttgtataggccttgtcctttggaaaaggttagatacacgtcctttatttacgtttgtatatacaccctgcctcttggatcgagagggatgttatgggtatcacagtggtaacccacttgctctaggttgagtcctaggatttctctcgttattacgagggatttccgattccctagtttggggctgccatataccctcattcctaagagaagtctcttgcacatcattacgttcattcccttga

SEQ ID NO: 20132 - DNA, 2911 bp, Cannabis sativa
ctcaactttaattccaatgctctctaagttgagaatcaccttattgaaatcatcaagatggtattcaatttcctttcctgacatcatcttaaaagagtataatctctgcttaagaaataatctgtttgccaacgattttttcatgtaaagactttccagtgtcatctatgtccttgcagccgattctttcgacacttcccttagaactttgtcaccaagacttagaattatagcactatgtgctttctcgagaatctttgttttctctttctgggtaagacctttagccatccttctctcctaacaaagttgattatagactctgttgaactagcaagactctcattttcacacaccacaaacaaaaattgttcttccatttttaagattgaactttgcattttttattttcttgcttgaccaccgaaatcttgaaccttcgagctaaaataagatttctcttcgatctccaagctctgattccacatattgtaactcgagctcaatcccacatgccaggaatggctccaagaacaatccaaaaacactcccaactcacagaatataaacacacaaaaggcaaaaacctttttgatggaattatatctttattgctcttagtatatgaatcaatgcatttacagttaaaaagttaaagttatttatagactaaatacttctactagcagcatacttacatactcaagttaagactgagaagttgtaatagatttaactgctaaacttgttaacaattaatactacctactaattgattaaagacatatggacacgtgtataaacctaagcatacaaatttaacaagaggtaaatgatagtattgacattgcttgttggattgatgacaacatggttcgttaagtcagtgaagtttcttcctaaaaaaaaattgtttgttgtgtggaattattacctctttatcttggaaattttgagtgtgcttcagtcaatttaatcatgaaagatgataataataataatatataaacagaggaacagttgatgagcatatacagatgtatgatttcaatatgctgtttatgttgttaaaaaatatatatatcatgttcaccatgtgtctgtgagcaacaaattttatgcggccgtaccgtacgtatactattaattaattccatagaataatgttctcttatatgatttgatcggagacaaagtttgatgtcatataaaaaccgatcgatgcatgtgattaaagagacactgtggtgataaattaaagtcaaaatactgaaataaatcatctatatatatgcaaataaatatacgtcaaatttatggaaattttgttaaggcgccgttagtatatcatgttgttactgtctgattgtcttagcaatctattagattatagttacaaatctgttaattgtaacaaacaataagcttctacactcttcattaatagcttgtactctttggactctctttaatttataaaggaatatatgatatagaagctttgtaactttatattttgcaaagtttattcttcgaagttatacagtaaaacactctaagctcgtccatgtatcaataatatatgataatggtggcttttgggatcaaggggccggccctcctcggccattttttttttcattacacaaaatcgtaaaaccctaactaaagaaaagtattttcaattgctttcgcaaaaattttgctcaagtatgattctacatgatcttcttttttgtttacttttgcattttgtttgttagccaagcttgatccagatcacaatcgagtactactactagctagtgcatatatatatatatatgcatatatatatatatatatatatgcatgccctgtttatgcatatatctctacactaaattaagtttcgaattttattattaatttatatatgaattttgggtttaatgagtttaagcaaatattttgacgtcgaaataaagtttcattttatcatttactctaacttaataagtagtttaattaaaaaaattagagtttctcactcttaaatttatagctacaagaggttgttttttttttttttttctagtcaagtccgtactttcttttcctaggcataggtgcagcttggtcagagttgtattttactagcatgatttgatatttgttactagattatagtcttgtctctatgatatggttattttagtctttatctatgtgatatgattttaagtgttttattgtctgcgtgatatggttttattttgttgttagtatttttctttattcttcaatggctcaaatattagtggttgtgaaaaacaaattttatatggttgaaggagttgttagtagtaaatttatgtacattgcacacaatagtgagtgcttataagctacaatgtttaatgaactttttgcaacaaatttctactgttatgtcttctgagcggtaaatgaaattgagtataaatgtttttaaaatttaattatctatgtatacatttattaagtatataggagtgtctcaaatgttaacatatataattaagtaattatataattattaattttggatgaaaacagtcatatatatgtttctcttcaaggtacattcatatctgttaacaatatacagtttgccttaaaaaaaaaaatccctagttatctttttgttttccttttaactttttttttggtttaattttaaatgtaaatttaaaatcaagatcagtttcattaataaataataattaacaaacaaagtacttaaccactctcttgtcgacccaaaccaatcacttaaacaaatcttaccgtacgcaggcaaacttttgttattttctagattttatcaatttgtattggaaatttggatttgagtattattgtgatcgattgggcaactagtattaatggt

SEQ ID NO: 20133 - DNA, 3012 bp, Cannabis sativa
cgattcataaaggagctgatactccacagaagaaatacataccatatataggataaaccaaatgatcaaaataaaaaaaaatgaaaaaacaatcttatttttctgcataaactgacccgatcacataaacaagtaactattctttaaaatcttgatctttgatgaagacaaagatctatgaagcaataggaatctgaaaatgaaatcaccaatttaccaaaaccgaaatctttaatcacataagcagatcaataatctcatctcactaacaaattaatcaaaatcaaattctcaaccaatcgttcatgcaaagaatctaacaagataaagatccctaaaatcgaagatcacacaaaaacatagcgcaaatttccaacaattaattcaagatcacgaatttatgtacataaacagtacaaaccgaatcaaaatccaattaaataacaaaaattacgaagacaaaacaatgaaatcaaacccagtaagatgatcaacaagaaaagggggggaaaactcacaggggggagaaaagcgatgtaagatcccgaaagagaaacagaaatgagaagtttgaatgaaatcgcggaaaaagcgataggtttaaattggggatttttgttgtttgattgaatttgatggattgtttttaaaggtgaaaaaagagagtgttacttagttgcatgacaacacggtcgttcgttcctttgattgggtttgcgatcctaactctactgcttaaggcgctgtttggttagtgggtcatattacctgtgtcacccaccagtatactaatttattttggaaaatttctatttatatattgaatttttatttttacatttatgatatcaatcccatatttttttttacaattatttgaaaattaatataaatatatatatttttttggtatattcatcaaatatacagtatattttgtggcagattgttttggtagatttttatttatttcgttttaaattatattgtattttattatataatattatgtcaacctttaatttatattgaaatattatatatttaggtacctataaaagttaataccacttatatttatacataaaaatattacatgaaatacaattaaatataatataatgcggtgtaatatattagttttaccaaacataccctgaaaagttttttagtttattagcttaaacttgtaaatttttttaaaattctaagtaattactgtgctcaaaataaaatttaaataattactgtcttatcttaattcttctgaaaattctaacacgcaatggagcttaatctacaatcaaattgcttctagagtcctcgatccatacaacctcaattctgatttacactattgaaagtatggaacgatttgagaattggcaaagttattttgtcgtgtctttgactctttaaagtttaacttaattattaattcattatttctaatttacacatatatttttttataattataccatattcttatgtgagatatctgctaattgattgtaagtttaaatattataatgctaacatgtaataaatatacagtggaaaattgtatgataaaaaaaatccatgttaaaatccaccaaaaatatttgtacatgttagatgactatattttttaatataatacttctcttgtaaatcgcacatgtagtacataattaatttaatgtgttttacttggtaacttggtgtaatttaggctaaactaatagcctgaacaaaaccataatccatttctctgttattaacctcaaaatagtataattttcctatgatctaatctgaaaagataatagatggtttgatacagaacattctacatcacagatgagagttcattctgtaagatcacatgaactggaacaagaaacctaacataaaaaaacactaattacaagtatcagaaaagtgatggtacaattacaaagaatgaacagagtagaggtttatgaacacacagaaagatttatgaatagtcatttggggggccatatcttaaaggcaaaacctcttgagactttggtttaaactttgaacaattgcagcagcttcaaactctatctatgatcaaagctgttggctaataatatacactgaagaaacaatccatcatcttcaatctatctcaattcaattctcaacctcccaaagcgcgctttagtcctgctcgttgctcaggagtcagccttgttggaaacttaatctcaaacttgaccctcaaatcacctctgttaccaggctcttttgcaattggcataccttccttggagacaactagctcatagccagggctcacaacatctgacactggtattgataggctgcgatgatcgagtgtggtgagatttagagtagttccacccaatgcttcggctagtgacactttttggtttacaatgaggtcattgccatctctgctgtataactcgtggggtttctcatcaattacaaacacaaggtctgctggaagttggtttggctgttcattacctttatctgggaaagtaatcttggttcctttcttccatcctggcttcacatctatggtcaatatttccgactcgggtatttgccgcctgaaaaatcggatttgagttaagaatcaatgttcgaaaatcttgtctaataagcaaaaactatcttacttcatccatagtcaaagaagctaaaccagatgattctaaggccctggttggctaatcttttaaaaactgcttttgggcttctgaagctctaaaacacttcctctgcttgattgggtaatagtaagtttcaacttttagctttcaaaaactcttttaacagaagccagctttaggcctgtttgactggacttctacttctgattttagcttttcaaagagttcttcatgagaaagctactaaagcttgtttctgttaaaagagttttttagagccgaaagctgaaactcacacattactcaaacaatagcagaaatgcttttggaactttggaagcccaaaaatagtttt

SEQ ID NO: 20134 - DNA, 5475 bp, Cannabis sativa
tgaaaaaaaattaaaagattcaaaatcttctatcttctacaaagcaataatacaggtacaaactttaaccaaacaaagctatgtatatagacatatgacatatgaaaaaggcaatccagattttgtgcccataataaatcaaaatagaacataatcaacagtgcattataaaatctagcttaaaaaaacattttaattaataggtagtcatgcttacacatgctactagcatcaaatataattaagttatttattattaatatgaaggctatatactttctccatttttagtatagtgagtttttttttttttcttcttcctctgttttttaggagtactgctgagattttataccttttacctatgtacaatgtatatatgtctaattcaatagtagtagttgtgattgtacaataaaaaaaaggtctctcctgtctagccaaaatatactttcgcatatcgatctttatttatttatatttattttttcttaaaggcatatgccagaccttttattactcatgtatattcacatttgaaatcaacgcaaaagcctagagaaacggagaaagggaagaaaaaaatattaagaaaattatctactaatttcaacggttttgcaatccttcttcttggacttttaaccaaagtacagttgtaaaactaatactataatataatctagcatttttttactgcatacaattagtcatggccagtattgattacattcatgcatgatgatgatgatcatgatcatcaggccaaatttgccaatggaagttaaataaaagagaaattgacaggaaagaaaactcagctcaattgtagctgatcacccttgatttcattctaattatgtatacatttatagccacaaaggagctggtgctctattacaattagggatgcacaccggggagtgctcttccggttctcatccccattaaagattttaattcccatccttacttattcttcatcggggatgggtggaaaattccctaatggggcgggacgggacgggacgggacgggaatctcttaataaaaatataaagtttataataaaaatttaaatatataaaaatattaaactacataaaaattaaaatattaaaaattaattattatttattaaattaattattatctaaaatacagtttaaaatttataaaaatgatactaatatactaaaaaatacaaacatatataaattataaaatataaaatattattagatatataagataaaatactaaacggatcccgtgatcagaacatagactcccatttaacattcggagacaaaaaataatctcccttcccatcccgttccccacttagacaggaaattctcgccccattaaagggcgggtcctgcggagccatccgaatgagagaaaaatgcatccataattaccatattagccatttaggcaattaataacacgttgcaggtttacaacagtaaaaaaacaaaaaaaatatgatgttcagtacagtagtggtcacagaggtaaggagaggtggtaatgacattatgtctttacaatagaaacacgagaatatataatattgttaaactgttttttaatttgtaaagagtaagaataaaagtaatagttgtttaattacacaaatgcataattgagaatattattaaaacaaaatataaaaattaataaaaacagatctaattaaagtcgcctatacttatgtccaattagaaaatatgtttgatatcatatttaggattctaccaccgaaatttcagcacatatgtctaaagtcttagagaagatcaagtccatattatcatgaaaatagtactatactagcattgtttagttgtcctttaatatttatatacatgatatcattgaaaaacatgtaaatagtgaatattggtgtcctcataagcatataattatggtgatcttatactaggaagagtacgagatataaaggcacacaattcattttaatttttaattacaaattgagaatagttcaacaatattatagtgatgatatgaacacacaatgctttcaatggggtaacaatggcacgtggtcatccgccagcacacaagtattttcctcaaaacaaaaaataagtaatcatttataatcacatgctggacggtaattttatatatatgtattctctaattaataatttattttaataaaaacatgtacttcaaaatctatcaaagtggagtgcagttgggtgatcatgttagctataagccaaaccaaaaccgaagaaaatattttcatgtaactgatcatacataattttatagatccaaaacagaatataacaaagtatgtaacggctatgaagctttgaaaggatcaatattttcgtccttaagtgtcaccaaacattatctctaaggaaatatggcaaattaataaagccaaaataatagatatatttatatgtatgtatattttattgtaattaactccaatgggtatggaacccttttcccttatgtccttttctttccctcgagggaatccacttcgtggggattgttaaaataattttaatttcttctcaaagtaattaaatctaacctaataattaatatataataacaataaaagaaaaaccttttaatacaatttaattacttatattatatgttgatcaacagtactattcctaagcgtttttaactgaaccttcgggcttcttgtgcatggattttagtgcacgtgctagaaattctgtgttatacgtttttttcttttactttaaatttgttccatatattttttaattaataggataactacactagggttatatatatttatatataatatgctcttattttttatccatatcatattttacagaggtacagatctgcttttgcagaaaatatattttctgttcagagaaaataaataaatatacatatcatatttgtatacatatggtctcactaaatatatgtcccataagtagttccaaatggtactattaattaatagcactatttaaacgacattcttttgggaattggcagcatggatgaatatatatggtattaataatatctggtcatgtgagccttacaaattcaaaaatttacgtaacaacttatttgaatcaattattttcttttaaaataaataaataatctcaacaaaaaataataaataaacaacctaactagctattttgaactgtgagctatctatagatatatatatcaaaattaagaaagatattctggagtgtacataatatgttttttaggggagaaaaagtttgttttattggctctgatatgtcatttttgaggctctaccttcaagatatatatttttttcatcatcaagtgtgtttgggcatatgtaaatgtatgtatatatgtatatgtttgtgtgttaaactaaaagatgatgaggtaggaataattaccgtagagtagttttctcagtcggcaaagccaaacattttgtacagttccctttttgtattattcaaacaaaaggtttatagtagtgcccaacaatattctcttttaacaataaagagagtggcactaatgttataactcagtaataataagttttgtgttttcttacacactacttaaatgaaacagaccaaaaagtgtgctgtagtacaataattgggataattttaaatcaacccccacttatataaaaaaaataataaaaaaaatccctaagactaattagtttagggtagtttattataatattattactataatattaattaatatccatggccttttgggatgatatacatttgatcaagttgatattaaagctgtatagtgaaacttttttttgtgtctctgaaaatgtttaaacgctttactaaagcaaatccatctgcatcactctgtctgctagttattaaaccccaaatgacaatagatagtgttgttgttttatgatagaggaataaagaaagaagaaaaaaagtagtccttagatatttatgaggggaaaaaaattatgtttagggttgcaatgcacccttttctatttgtttggacatttagaagaatgttttagtctatttttttaatagatatacgttatagttatttaagtatattatgtaaaattttaataaatttgaaacaacttgttatattttaaaaataattttacgggatcccaaatatgtaactttaatattttattttaaagtaatgtatgtttttattacaagttatttgtttaattaagtgaaatttattttaaatcacttggcttatggactccaattaacgagattagcatattttaatcatagcacgtggcgttcctctaaacgttacaatatttatttctcttaaatgcatttaattttcaaactgttcacttgtcgtgaccatatttattattcgaaatatgtgcataataattttttatgatttttttctaacataataataaggtagcctattaatatatatataaattttgaataagaaaattattttaaatttattaatttttaactaaaatttaaaaaaaaaaaaataacaacaccattagtcctcaaattaatttgacaaacagaaaaagtatttaataaataaataaccttttataattttttatttattttttttatgttatgtgcgtaaatatatatattttcatcaaaataataataataataattatattattggattgtccgggatcaaaattctgttgcacttatacaataataagggtcatttacaaaaatttattactgtaatgccgattaaattttctattattttgttgctataaaattttgtatatactgtatttatttatttatattgtcttacaaattcacatatttatttatattctaaacagtatacatatattgaaattattttttctaatatttttcaaatagtgtagttttttcttactttataattgaacattattgagtcatttttttatataaaaattgttatatattttattttttaaaaatcttcatcaattattatttatttaaaaaataaaatattactaactatatttatattaatataacatgtatttttatcaaaaatttctataatttagtatttagttgaatatattttagttcatcatttacattttatcatttatatcgttattgatttacagtatcaattaaatatataataatttttataattttataattagcacatagataacaatgtatactaatataaaataaattaaataattaagttttaaataaaaaattattttaatagctaagagtttttagaaaaataactatattatcattaattctaaaaataatttaaaaaaaaaataaaaaaattaatcttttaataaaaaaaattttattgaaaagagtatatattgtagataagttcctacaactttgttattatttttttatttaatatatgtttttttctaaaaaaaaataaaaa

SEQ ID NO: 20135 - DNA, 2619 bp, Cannabis sativa
gaggaaaaaatctttaattaacctaacttattattattaattattattatatatattttaccaaataaagtatgaaatgaaacacatgtgacctagccatgttcataaaatagtatatatatagtgttgaattaaatattgaatcaatgaattgatagctagtttgagcaaatacatatatttaattcctacttcctagtacattatattaattatatagcttttaattggggtttcactcacatcaacttcagtcctttagaggaccataaaacgcaaacgtacaaagactttaagttgtcgttttaatccgtacaaatactacataaacaagagaagcaaaggactccatagaaataaaagtatgtaactactctcttaatttttttacttcttcaacaattcaccataaaaaatataataactaacaattaatttcatatatggagtctagtacaagtaagttgataaatttttgtacgaaatgattatatatatgattctaaattttggtaaatactaaatttattatgtatatatgttgtgttgtgtacatttattaattataatcttattatggtcttgtgtgtgctttagaaaattttacaacaatattatgtatgagaaagaaaaagagattacaactctatgcaataacaataataatgttatccaaatttttataccatgatattatttatttgggtgaacgtgaagtatatttcatcacttgacggataatattactccaaatgagttgtatagacagttatgatacttgaagtcacaaatggaagataggatgtccgaacagattatgtatatacattcgattaacttctataacacaggttgtttgcatgaactgatcagggttacgagttagcaattttagagatacgtcttgcatatctccgagcttgcaagtcacatcataatccctatattcaagggatggatttgtatcttcaaaaaataaagacaatcagtctaagttttttttttttcttattgtaattatggaaataaattagttttctcattttatttattattgatgtagataaactaatttcatataattaatctctatttagagggataatactcaagagagaaactttgttctaagagtaaatcactcagagatcattgtaagagctttaaagagagataaatgcattcttgttcatcctctcacaagtcaatacaacaaaaagaaaagtatgctattaccaactataagggatcgaacttctataaatctgacgttttctttactttatactatttatattatgttatttaatttattctcaattgctttaatttgactaactgtcattgactaaaaataaaatcaacaaataacaataatacataacacttgtatataaaaaagagaagaagaagatatctcaaatgattaaacaaggttaatgaccttcaggcccgtctcaagccaattggggatcttatgttaaaaaatctaattgaacatttttttatataatttttttttatgtttttttcttttatatatagtggtaaaaatttaaaatataacattttgaaaacataatttaactttttgtcttaataaaatatttaatgtagtatcttaaaaaaaatctttttttttttaaagaaaatagttatattcttaaataaataatagttaaaatataaaatatgatatttttctttaaaaaaatggggccttttttgttaaaagaatttttgggcttaggtggggggttttgggcgtgggcctttgttgccccaccgttgagtcgaccctgatgacctttgttttaaaagtcatacactaaaggaaactttaaaagtactcttaagaatttttaaacctcaacatattgtctgaggatgaatatatatcctcacaagattctaaccacaacaaaattaatttcaactaattagagtatcacaagtgaacaatatgatctctatttataaaattttcacttccatgtgaacatgaatgaccacataaaacctttggatgttagaaaagttcacaaacattcaaaaacacatgcaatcgtattctaaaaaaatattagttagttactaattaccatttttgttttttgctttggtcgattttttttttttaaattttccaaatcactcccacttgattttgaatcatttatacaccttataaatatgaataaatgaagtcctcatgaactatactttcaatagctattattcattcacattcacaagcaattagtaacatatcttatactaatttaaatatagtgtggatagaagagttacacaatttatgatcattatttcttaaaaatttacaactctttttttataatcattatcaacacatttttaactctataatgcatattacaatttaataaaactaataattattcacattatataattatttgtaatatataattacatgaaacattaattcttgtaaaaagtttatatttttacgtttaaaatgaaccaaaattatacttctcattctatatcaattaacttctataggcaaatacatatttagggacacgattttgtcccgtaatgtacttttatggaatgtattccgtagtatattag

SEQ ID NO: 20136 - DNA, 6388 bp, Cannabis sativa
ctaatttttcttaatgaattttgtttttgtttttcaaaaataaaaaaagaaaaaagttgcacactgaacatgtctgcccacatagaaagttttgacctattccggctataatttcaacgcattattataatattaaaaatttctcaaccgacaaattcttgagacatgtcatgcattataaataaatacagtaaatgtttttgtacaacaagaatttttattattattattttaatttaacaagaaatatcattttgagtgtgaacttcgtaaacaaatatcaaattccctcataattaaaacgacaatttaaaaatcgtaaatgttcgcaaccaactacaactaccaatgaaaatgaatacacaagaaatcaaataaatataaaacgatttttttttaaaaaaaaaaaaaagaaaaaaaagaaaaacaaaatataagagtaaaatgaataacaaacaaagaaataccagacgtttgactggagaaactcagatccttttaatcaatctattcgaatcactcataacgacttctcttgtacttttcttttcgtcacaagattttttatttaacaaataataataatatgatacagtctttaacaaaccataccaacttaaacttaagttgttctaacatttcttatttattcttgttcacctatctaaatcctaatctctctttcatatattatcagacatgcttagattcaaagagtctaccaatatgtcactctccacattttccttgtggagttttgcctagtcactaagttgaaattaatacaacaattcctttgaaaagccataaagttaccagagaagtatcaaattaattccatttggctcttgcttttgctttaagtaattttgctaattaaaagtgctataacttagacatgacttagccatataatatgtttaaggctataaatcatgaatatttcttattctcatatatcaaagaagaaagttaattttctactctttaattagcccttctaaatacacgggaaccacaaaatcacttatattgacatctatataattttttttcccctttcacgtttaatcttagcagtaagaaacttcataatgtttgttttactacttggaaattttatattttacttctggttcgtcaaatcatgcctcaaaaatatcactataatagtgttaaaaacacgtctcacttctttcagcaactccaaaatgaaaatagtatctatctcttgtaaaaaaactcatgaatgatccattaaaataaccacaagtagaaatcaaacctactatagtcataggctcactaaataacaagtatcttttttgtttcctaaaccttttatggcaattaatcaaccacaaagattaacatattttcacttaataaaattataatataaaataaaaagcagaacacgtaacacttatttttaatttatatggttttattggaaatatcaataaataaataaggcgtaaaacatatgaataaaaaaaaatagcatatatacttagatgaatagacagggacttcttgaaaattagagtaaagtaatatattaattatttggtgataggctacctaatttatacagaagtactcaaataatatttgatattagagtgtgcatatataaataaataaataaatatatcttttaacagaatgtcgttagagcaaaccaaatctcccattggtgctcaattgttgaaaaagatggtaatactgatgactgaactcctcatttccttttcggaaagcgactgaattggttctttctgtgtttggttccgaaaattcaaattaattaatagaattaacaaccagatcatcatgaccataagtggtctgttcttgggcacttctctgctaattgtatttttccctatttctttcttttttttttttttgttcttttaatcatgtccacatgaccatcagtaaaaatgaataataatttgaagttttctttttactttgtcctgaattggatcatttcttataactatagactttctagagtctagtcatctttaattttcattttcaacaaataaagttaaagggactcaactaatgcgagaattttcgtatgcactgaattgtcgcaattgtcgagtggttacttcattgaacaaataagactaatatggttcttgctttaccttatgcatatcattattattttgaaatttataaggtaaatattgtttacattatgcatgaacttaatttaattggataagttttctttatcaattaagggatattttagcttttaagatagagaacgtcatagccaacgtcaagttctcatgtaacaaagaagaatgaagttgactgtacaatattatatcagtcttataatgtatggacataaaaatgaaatcaaaatacatttgatcgtttggagtttggaccaattctacgatgtttatgtggataattgggttattatcaaagtaggcgattataatgttgtcctatttgtacactatttaaattaagaaataacagagtacgatacatgtaaagatattcaaaaaccaaaaagctaaaaaaggaaatgataaagtttgatttgcttaagcatcattttgataataatgagagtctcctgaaaaatcaaccatgaaggaaggcttgctaagcaagcattatttgaaataattcacttgtaatggccagtgggtgcaacaactcggccaagggttgaactaagttttgtccaggtaacttaactgaccattttcccgaatcaaaacctaatctgccaacctcgaaacaacttttctctcctaatttttccactataaaagaactttccttggtcttcattttcatcaccacactctctcaattccccaagtcattagcttataagctttcaaacaaaactagctcaatactcaagtgtagcaagcgaattaagatgggggcttccctgatgatcaaggccgttgttcctttagccctttggcttctctttgcttcagcattattgtccttggccaatgccattcccaaaacacacaaccatgattttgttgtaagcaccacatctctgactatatgctaatcgctaaatagtaacaattttattgcctagtttcaatttatggcttattaatactatataacaacacttgcagattcaagcaacaccagtgaagaggctgtgcaaaacccataacagcatcacggttaacggtcaatatcctggcccaaccttggaagttagcaacggtgacactcttgtcgtcaaagtcaccaacaaagctagatataatgtcaccattcactggtataaaaatttcttcaaaatcatcgtgtgtgtatgcatgcatgcatgtgccatgcatagaatacatctgcattgtcttcacttctttttaatcccaattataattaatgtctaaatctaatatatacgtgtggggttattaattttcaggcatggcatcagacaaatgaggactgggtgggctgatgggcctgagttcgtgactcaatgcccaatccgaccaggaggcagctacacctatcgattcacaattcaaggccaagaaggcactctttggtggcacgctcacagctcatggctaagagccactgtttatggtgctcttattattaaaccaagacaaggagattcctaccctttcaccaaaccaaagcgtgaaactccaattcttctcggtataatatatataacataaataataactccatcaatagttataattatagtaacaactttattagctaacatcattataattacgatgatcaggcgaatggtgggatgcaaaccccattgatgttgtgagacaagcaactagaacaggaggagctccaaattcttctgatgcctataccattaacggtcaacctggtgacctttacaactgctctagcaaaggtttgcttaaaaaccccttaattttcaaatacacaaaaataataatagtaataataaataactaattgttacttaattatgtaattaattgtgttatgctattacaggcacagtggtggtaccaataggatctggggagactaaccttctgagagtgatcaacgctgcactgaaccaacccctgttcttcgccatagccaaccacaagttcaccgtcgtaggcgccgacgcctcctacgtgaaaccctttaccacaacggtcatcatgctcggaccgggccaaaccactgatgtccttatcaacggtgaccagccaccggcgcgttactacatggcggcgcgtgcataccaaaccgcaaatgcaactttcgacaacacaaccacaaccgcaatcctcgaatacaaatcagccccttgcgcctccaagaactgcccaactacaaagccgataatgccccaattgccagctttcaacgacaccaacaccgtcacggctttcagcaaaagtttccgaagcccgagaagagtcgaagtcccgaccgatatcgacgagaatctcttcttcacaattggactcgggctgaaccagtgcccgaagaacttccgatcccgaaggtgccagggcccgaacgggacacgattcacatctagcatgaacaatcactccttcgttctcccaaacaacatttcaattctccaggcttaccagcagggaattcccggagttttcaccaccgatttcccggccaacccgccggtgaagttcgattacaccggaaacgtcagccgatctctctggcagccaattcctgggaccaaagggtacaaattgaagtacgggtccaaagttcaaatcgttctacaggatacgagtatagtcacccctgagaatcacccaattcatctccatggatacgatttttacatcgttgcagaaggtttcggaaacttcaacccccaaactgataccaagaagttcaaccttgttgacccgccaatgaggaacacggtggctgttccgtcgaatggatgggccgtgattagattcgtagctgacaatccaggtaaataaatttatatgtaaaagtaatgcattttcaaaaaattcccattaacactttctggcttattattagtttaatatatttcaatatatatatacataggtgcttggattatgcattgtcacttggatgttcacataacatggggcttagctatggtgttcttggtggacaatggagttggagagttacagacgatagagcctcctcctgcggatttacctctgtgctaaagatgatttagataaaatcatatagttactcagaaaacaaaaaggattaatgaggttgttcgtaatcagaataatagggtttttcagattttccctttatatatataatgttacacgagttgtttgttggtttctcccctgcatttggggtctcttagctcttattgctctgttttgaattgtttttttcattatcatttttttgttatagataaaagaatcgggtttaaatgggatgatgcaatgttttaaaatactaaaaattgccatctcgtttggtaatactcgactcttagttcctcgtttttacatagaatgtattcttttaatgttataaacagattaatataaagtttttgaatttcttttatatttcctttgttgtcttctaaatatatataatttttgtcctatgtataatatggtagttgaggaaaaaaaacaaaggcaaaagcaaaagcaaaaaaacaagagcttaacctattcgatattgtacccaaagtgactatcatgactttttgaaattcattactaattattgcttgttttggatttttttttataaagaaaaaagacgttataattagtaatttgaattgttaaaccaaactaaagtattaaattttctctaacatatagaaaaagcaaatgctaccttcatctccttccacttccatttcactttacaataataaataattaattaataggtaaatagcgacataaagtatccaaatttataagtaatataaatttaatattaattttagggacataagtaaccaatgtttattataaaactgtaatttttctttattttgttttaaaagaatatttagaagtaactacatgtttctatttagacctaataatttagaatatgagtcttatatgtgtcatatttaagacaataaaagagtctacactgataaaattaaaaaaaaaaaattacagttttataaacattgggtacttatgccgttaaaaataaacatagattttatatcgcttacaatcttaaaattttaagtacttataccgctatttacatttaattattaaaaaaaagtaataataatattaagcaattattttaaggagctaatcaatttaatgtcttacatttgaaattaaatttcaattataatggaagaaattgaagaata

SEQ ID NO: 20137 - DNA, 4300 bp, Cannabis sativa
aaataatttccaacagaaacatcactgggcatgtgacagacttcaagtagtcattcttttctgggaaggagggttgaagacgtatcgaaaccccagtggtctttcatgcacgatgaaacttcgtgcacgcgagaggtaggttgaattttaggtgcagaaacttctgattccacgagaaaaggctaaagttgcattaaaatttaagcaaaaacttcgctttaaaagaccaaagggtgaaacatcactaggcgtgtgacagacttcaaatacttcttctcttttgagaaggagggtcaaggaggtatcgaacccccatcgacctttctcacacgaaaaaattacgtgcatgcgagagtcatgtttaattttatgtgacagacttcggcttttgcaaagaaaggcagaagttgcactaaaactcaaaagatgacttcgctttaaaagaccaaatggtgaaacttcactaggcgtgtgacagactgcaaccagtccttttcttttagaatgagggttgaagacgtatcaaacccaaagttatctttcccacacagaaaaattatgtgcatgcgagagtcatgttgaattttatgtgtcagacttcagctttcgtcaggaaaggctaaagttgcactaaaattcaagcgatgacttggtatattacattttacctggaaggtacctttggataccgttgacttaaatgtgtttgtagctttgtcaggttgctcacctccccttatttcttccatccaggtagcactgggtggataataggagaggtgacagttgcgtatgtcccgcatttacttcgtttgtatggccaaaacgaaacagaccctcagtagcacacatccatatgaccctcacgtggtaagagtggcaacaagggttcaagttaggatggtggaggagacttctcagccccgtgctgatgttgagccagagatcgaccaaggggctgagagttctgatactaaatttgatttagaggatgccacaccagtgaggaggaggaggtacaggacttgttctgtcctcccagattgtcccttgggtcgctatgatgccaatggtaacccattaaacaggcttggtgagccttcagagcttggactggatcatgtcatagaacagtcttctgagctagagatattggatgcaaaatcatagggagacagttgggtctctcttgcttctactctttccagtgaggcctttagtaagattcttgctagtggcttaataaggggtgtccattgtgagattcctcgtacaaattattgagtgcaccgactccctgtacattggttggcgtggtcttagcgccagattgagcatggggcagtgtagtgttaccgcttcattagtattttttggacatcactacttactttgggatgtgtctgacacagcttacgctgaaaagtatcaagtacctttggacgatgttcgtcgtatatatggagctaggctggcctcagcctaccccttacgagatcggatactactttgatctaaagtctgccccgaagcagaacaggactgggtatttttattttagatagatcagtcaccaatggttgggctacactaatatcacaaccatgtcaaaggtcgatgggtatgccaagaagtactttttttcctatggtcgccgtaggatcgggcactaaaaattttggctggttccattcctcaaacgctctatccctacttgcaaataagggataggcaaaccacatcctctctctcttgacagagtatagaaatataatctagtttaatagtgtggccaattttcgaaagtatggcttatatgaacctgctcccagagttgcaaaagtcttggtggtaaagggagacatagaacatgaggtgcctttatctcgtattgcacagaatttggagaggaaggatagggccctcagtcggtgcttggctggcaggggtccaattggtgatgtttctctctggatcaggcctagaggacaggtttcagaggatctactcgccccgtgcctagagtccaaggcaaggcggtggtcaaggactctgatagttcctcttctgatgacaatggtatttgataatttataacaccatacttttaatttgtattgaatgtttatgattcctttctgactttgctactttctttttgtagatatgtcttgcaggctgagaggtcttatggggtgaaattcaaatgagcccacaggttgagtgatggccaaggtggccaggacttcttgtggtggagatgatgccgggttgtcactactttcccctctccttaggcatgtgccagttgggcagcatgtgatacggtctataagtcaggatactccaaggactagtagaggagctaggtaagttgttgggtagagggctactgaagtagtcagtagaaacatagagagagctctcccctttagggatgaggatcttaaggagcttggtgacagtgagccaaacatgccctactctaccgatctttgagacctttctccagtaagttgttcttttagctctgttcacctttttagcactgtgcaggctggccggccataaggcttgttgcatgttgctggtcagtcttagatgttgctgtgaggggcgggccagccataacagtctgaaggggaggctatctggccagtgttgtgactttaacactaatgttgttttgttttgttctcaggccttgatgaagctgagctcagcacaaagtcacatctgagctggaggctctccttacggagagacatagaatagtatatgggctagagactatgcttggcgcaagaaacgcaaagaacaccgcacaagctactttcatcttccggctgatgtatgaccttgatgagcacaaggagaaactaaaagaggctctttatggccagtatgccattaaggaggagtatgctgacttaacctccgaactcacttatgagctcaagttgcgcaacccccgagctactctatcatagatgggtagtgaggcttttgttgagagaatgttggctcgttgaaaggaacttttcaagagccggatggaggtaggccaggtcacttcctatcgagagaggtcatcatcagagactcatgaggaagggctggccgacccacctgtggaggaggtgggcggccaggatactgaacaccaggccgaccagcatgctgatcctggggccagcccagacgctagcgatcctaatcttgtggcttcatattcatctcctcctacccctatacacattttgatagtattttcattagtagcattcaacattatgtttgtataacatagaaaatattttcatgtttcgtatagtctgtggccttttatggtcggtggccttttaattttagaacactgcttactttcatgttccatgtggcttgtggcctttttagaacactactttatttttagccccagggccttcatgttcttatctttggccaatatgccctctattttgagacaatactattgtttggccttgttgcttttttatcatggattgtgtgaccgtcgaggttgtctttaatcctagctatcttcttatggccttgacaagtaagggtctagatttactttgccaagctgaagtatgcctacacgacttagaggcagggttagtagcttattctaagcgttaaaatttctctacataagttctttttgctagttcgatgccttgtattgtatgggtaccccccaagtgaccatgtagacaagtctcttaatcattttctattcaccatgtttcacataccttgcctaggttctttcttagggtgttatccatagtacgcacgtcgaacaaaaagaataactttaagaagttaatctatgagcaagtggtttagacacaataaacagaatataaacattattatttattcattaattggtcttttttgctatgcaacttacataaattgaatctataagcttacattacaatgatttagcttcttgatgtcaagtggctacccttgcttgcctagtaaagtagaggacaccgttgaagaacggtggaagaccacgccaaaaaggccgtgcgtacatggacttttgtactctagtgttgagtaggtataactgctactttggagtagcattctataagtttgttactaatagtatttgcgaaggtgctctccattcaaatatcttggtaggaaaatgagctccatgttctcgttgtaccttcccagcttgtaggttctcgtactagttatttctgtaacttgataggggttttttgttgggttttgtgccataaataaa

SEQ ID NO: 20138 - DNA, 8783 bp, Cannabis sativa
ggcctctttcttaaaaaaaggaatccacatcgacaaagagaacacgattctccgattcaaacttttacaaggtcagacacaaaaaaaatgtacacataaacaaagagagaacttctgtgccaatcttcaagagaacatgttcttttattccaacttctttaaggtaacacgcatgtaaatgtctagctaaaattgtactaagcaaaacataagaaaaaatatatgtatttatatatatataaaagctcaccctaattttcttgttaggcgcaagcacatgtggaggaagaagagatgatagctcacataatggccttgttagcgctgagtaagtggggtgttcaatagccctgccaaagagaatcaagaaaacaaaatcagatatacataatgctcatctttcatattgtacatatccatttcaaaaattcactgttgatattttatccaaaaaaattcagtcggtagacattgattaatgggagaatttcaatcaatggagcactagaacaaatactgcgtaccatatatgagaatctttaacacaggttaaaatatcgagatttggagctcgtggatgggaccaagatgccacactatgacatgctagcctaggaacaggtttaatccgccgtaattcctggtaaaccaagggaaaataaaggatttaggcccaaactaagaaatacttgcattggtgaataaaaaaccatgacgtcagaagagcaccttaaaagagattgtgtcccatatagctaatgtcttatcggcaccaattgtaacaagctgtggagcacctccaatgattctagaaagctcaacagccacaacaccaccatcatgtgcctgcaagaattcataaacacataggcacattaaaagttttgaaagcatttaaatttaatggaatacaacacatataccctatgcaaccagcaaatatttgagcacatcaaactccttagtccaagcacatcacaggagaaacaatgaaaaaagaaaggagagaaagagagatgaaaaaaattattaaaattaaatctgaacaaattaagtatgtccacattattatatctctcaaaaaggattgttggacatacctagtctatgtaacatctcaataaatgtgaaatccaagcataactttcaggaaagtcaaatttatgaatactattacaagattaaagagcaattgaataaataataaaatatagattgatacctttaagcttaattttggtactagttctcgtgagtcttggccgtgatctgcactccaaaggacaagcaatccatcgctagcccccgaaaccagaagtgactgcaagcaggagaatgtagtgtagttaagtggagtttaacttagaaagacccatgcaagtatgcagaagttatatatgacataaagaaacaaatattcatgcttagagtgctcgtgacaatgggtagctatcactctacattagcatgcctgtgtttatatatacaagaattacattacaaagcctgactgtacaccaaaagttatataaagaattgaggcattgcaacagcaactagatccttccattaaaatgaataattttctatagttcatcaaaaggctgaaaatacgaaatccaaattaaaacttaagcctttttgtttcctatttatcgtctattaattttcaaaaagcattcagtcaacatccaacactacagaatggggatacttttaaataacacagttatgcaagatgcaaacacttcaaaataaaattgactgaatttcattttctacaattaaaatctacctcaccggaagaagccataaacgtcatcagacaagaaattgaacctttatgtcctccagtgtatcttcgtactagctgcaagatatgtgtagtgtcataaaactaaatttacactcatatttgtgaaagaacaaaattttgacaaaagctgcaccttccatgatatcatcgatagaactctaatgacaccatccgatccaccaaaagctactagtgggacatctccggcattggatctagaaaggaactccatactgcaaaagtcagctagaaaatgttaagagcaatggtaataagacaaagaaacatacaaacagcaacaaaacaaccagtatgaccctagtgtatagccatttctaataggacctgctctgttaagagctcaatttatttatgtttggtgaggcaacctactctactggacgctgtgcatgttgatatttaatgttttttcactaaaatgtaaatagatttacattaaggaaatcatgattaccaaagaagcgatttgttatcaagctcctgcttgggtacatctcggccacgcatagttaccaagtcaagaaaaatggctttattttcacaacagattacaagaaaatgtcttccttttgttgatggaggaggaggactaaaagaggtgatatgattgatggctgatggagcctcagccgctgcagcacggttgcgccaaagttgccaaaatcgcacatcatcatcatagaagctcacctgcttaacactttaatgggaagcaaaatggaagtcaggttccaattgagaagccaaaagaagtatcatatgtaaaaatccattacctccctccacgcatggcttctgtaggcttccctttaggctctatcatgaacaaacatcaagagaaagaaaacatgagaattaatttccttgcaacagaaattatgaacagcatcactaacagattaagacagactgatttaaaaaataaataaaaatcatactaaaaatcagaagaagagaccactactattatccatgccgaccatgttaaagttcatgtatcctagataaactggcttcttattatgtatcttgtagtgcacttgttacaaaatgtctatgaatttcaaggtacaatttctatttttatttttgtaatcattgaaatagaaagcattcagaaatgacattaagaaaaggtctataatgatctttatctaaagaatgttcttccaacagcaacactgcataatttcatgatgcatataatacatagtaatataaaattaaaatctatatggtgctaagaagctacctaaattaaaagacaaccataacaaactcttaaatgaattaagcacagtatataattactttttttattaaatctatagacactaagaaagcataatgccccggacacaaaaaggatcagaacaccatgtctcatgtgcttcaagatacaagttaaacaaaattcaaaaacaagaatgggattttttttttttttttttcaaacaaaagcaagcacacaacaacaatcttaactagccagtttatgggaaactgaaaaaagaagcatatgagagacggggaggttatgaggaaaatgtaattgtattcagatttctgtaaattgcttaggacaaaatattcttttatccttaactttcatttcccaaaagaaataacataaaaatcaatctttaaaatgctagcaaactatttttcaccaacatccttaagagttctaacaggctaataaactcagtacttaactgaatttaaagcttttctggatttaactgtttaatctaagcttcctatagtaatcaagaacattcagatctgaacttcaataagttccataagataattacaactgaacaagaatagaatcaaaatgtaaggttaactgtactaatctacaaaatgtaaagacttcataatcaaaattgaatcaaccgtagcaatgaactgcttaaatctattagtttcaacgtaattcgaactaaaatctcaaagcgataaagaagtacatttgtacctgattcaccctcggcaagcttctccaactttgctccaaccaaacgcctctcatcaacaccaccagctttgagctcgtagattacctaatataatccatagatcaaaagtaagatagaccagagatcgattctccagtttacggatgagttgaataggaagaaggagatgaaaaggtacctggcgatgttcccaattccaaacggaaacgtgatctgacgcatcggcagtgaccatccatggatgtgttggatgtaactggatcttcacgatcttctcgttgctcggcctgaatgctttgagtcgcaacattttctagagcttgttctcaatggtgattctgaattttaggaaatcagattcgaacacacatttgccctaaccaccttgaccttctcagttttctatggcgtctggagtggtgagagagaagcaagttttgcgaccataaagatgaaccagcttggcttttctctgatttggaacctttttttctgctaaaaattgaattatcaaaacaacagagtccaaatttaacgacaaataattcaataaacgacaattttgaagagatctaatttacgacacaactgcctctaagagcctagagttactcaataacactaattaagatttttgtcccaaatgttatattatatgtctaattttttatcctgttaaaaattttgtttgaattatttaaattattacatttaaagatttttgtataattttactaacataagtttaatatgaataaaagtttaaaaagcacaatttaatataggttaaaataaaactacgatttagtacaaaaacaattattatattaataaaattagacaaaaattattaaattcaatattaatagttgggggagtccattatattagtacacattttttaatacaaagacaatgtaatttactcaaaatataaaaagaaatatttgcaacatctttattgttcaaaattatattcttatattttcctaaaaaaaaaaattatattcttatatctattttttattaattaaaatacattagtcaattcttttttatttgtaaattatttaataatttctttttaaaaaaaattaaaatcctaaccagcattatattaatatgcggcagtttaacaagaaaatcagtatttaataatttttttattttagttataattaactttcattgatcaaaagtaccaatacaagaaagaaggaagaaatatcattcaaaaattcattatatatcttacagacatatttagttaatttatgagtcacaacattaaaattgtgattaacattaaaaaaaaaaataattatgtgtgtcaataaaaataataaactactaagaaaaaaaataatatttggctgtctattgaaagagtaatttgacagcacttaacaaacttcatagttatttggttgtttaaaaaaaaaattaaatactaatccaaaaataataaacatttatgtttggttttgacgaattttttgttgttgacttgagtggaaccttgagtacatcaaacaatatcatgaagtccaatggtttgtatttttatgtcgctctaggttggtttggatattccaaatgttagagctagttttgttgtggtgttgctacattcttctagtggaattttagccatgaccacttggcctttcggtggtatgttgattgaaactcgcctatgacccttttgtatgatgttgggctttgtgttcgcttggctatgtcatgtttcggtggaactaaactactggcgaaactaattccattcgcttccctagctttcgtctctcaatgtcttaatattatcaatgcgcttaaaatttatttaatggataattcttacttaagatgcacattagtagatagtagagatactttagcttattgtattctttctagtaatttttcttttgctattatcacaggttcattggcaaaattaattattacattagatgaccattttgtttggtagtgtgattatttcacttatattattgtttttttgttgattgattcttattaattaatgttattttctttgtacatattttttcgtgtccaatcgtgctcgtgaactcgttctgatttcgtgtcgtgttaaaaaatttgactcatatttactattgccaagtatgtaaactactcaactctcccaccaaatgcaaagattttcttattctttattgaaaaataataataagtaatttacggcataaatacataagtttaactcttagttacagataaatgactaaatttaattttttacggtaataatatctatattatattttttcagaacttctataaatacataatcgttaaatgctaagtcaatatttacgtgaatcaagactactatgtggtcattcacttagcgtttaacagtgaaatacttacgaaagttctaccaatataacataggtattattattatcaaaaataaaatttaattatttatttgtaatcgatagttaaattttgatatttacgccacaaattactcaatatatatatattcataaatatgcttaaaattaaattttcattgccatcctataaaaacatcaatttaaaaaccattcctcattagtaattatgtgaaatatgggttgtagaaagtgaaacgagtagccaatgagttgttctacgctaattattcaagggaactctgttctcccccgaaatccaaaccccaaatccaaaaacttgatacacagtaaccgaagaagaagagaagtaatctctgtgttacagaaatgcaaacacattaaccaactacgctctttacatgctaaaatcctaagaaatgctcaagaacaagaccccttcattgttttcgagcttcttcgtctgtgctccaagaacaacttcattgactacgcctacaacattttccgaaccgttcgaaccccaaatgtctacctctacactgctctaatcgatgggtttgttttcaatggtttatactttgatgggtttcgcttatattgtcttatggttgatgattccattgttcctgataactatgctgtcacctctgttcttaaagcttgtggctttcagttgggtttgaaacaaggtagagagattcatggccaggtaattaaacttgggttgtcttcgaatcgatcggtgaagatgaagttaattgaggtttatggaaaatgtggagagtttgtggatgcacgacaagtgttcgatgaaatgcctgaacaggatcttgttgcgtcgaccattttgatgtcttgttattttagttatggattagttgaagaggggaatgatgttttcaaccggcttaggattaaagacacagtttgttggactgccatgattgatgggttggtcaagaatggggaaatgaataaggcattagagctttttagagagatgcagatgaaaaatgtgaaggctaatgaagctaccattgtttgtgttttatcagcttgttcacagttaggagcattggaacttggaagatgggttcattcctatatggaaaagtataaaatcaagcttaatcatattgttggtggtgcattgattaatatgtactcaaggtgtggtgacattgataaagcacagaaagtatttgatgacatgaaagagagagatgtcagtacttataactctattattactgggcttggtatgcatgggaagagcattgaagccattgagatgtttcgggtaatgataaaacgaggatttaaaccgaatagtattacttttgttggtgtccttaatgcctgcagtcatagaggattggtagatttggggtttgagatatttcattctatggttaaagactatgagattgaaccacaaatggagcattatggatgcattgttgatcttttgggtcgagttgggagactcaaagaagctcactcctttattcagagaatgaaaacaggtcctgatcatattatgttgggtgctttgttgagtgcttgtaaaacacatggaaaccttgaacttggtgaacaagtggctaagactttgctggattgtgggaaagcagattcggggacctatgtgcttctctcgaatgtttatgcttcatcggggagatggagtgaagctgcaaaagttagagcagagatgaaggaaggtggaatccaaaaggagccaggttgtagtttgattgaagtgaacaatgaaattcatgagtttcttttgggagatataagacacccccaaaaggaagaaatctataataagttggaggagattgagaataagcttagatcatcagaagggtattttccatctactgagatggctttacaagacattgaagattggcaaaaggaaagagctttggcaatacacagtgagagactggccatctgctatggtctaatctctactgaacccaacaccactttgaggattgtgaagaacttgagagtatgcaatgattgtcattcgatgatcaagcttattactaagatttgcaagagaaaaattgtggtcagggatcgaaataggttccaccattttgagaatggggtttgtacttgtggggattattggtgaaaaaaaacatatatatgtatattgaaaatgaccatgtgttacagcatctcattattatgtatttaacattatgtaacactatgagaagagaaatgctaatagaaagatgagagtactttatactgtgaaaaaaccttcttcatttctttcattttatagaaactatagctgaaaacatttcaatgttatcacttatttatggttttagttcttgatgttgtttatgtaacaagtcaatcgtttgtatgaagaagattcagaactttttgacaagacaaatgtgcacagttggtaatagaagcaaaatatttcagttgtgattagacttgatatttctggaaatgattacacaatttgtagaagttttccaattgaataactaacccaaaaattgc

SEQ ID NO: 20139 - DNA, 3537 bp, Cannabis sativa
aaaaaaaaaaaaaaaatctcaagtggtccgatatggtctctctcaattcaatgaaacacaacactaaaacaacaatgttataggctcttttaagtatataaacataatagcatcaataacactaaaccagaccaatattagtagccatacatttagaatgaattaaaagaatctattactctggtctttcccactcaaatatcataaccaaaagaaaaaaacttaatcaaaatagtaatcacagcaaaaccagctaaatgtgaagaagaagaagaatagatgaggaggtgtatccaaatcagaattgaatatttcattaatacaaaaccaacacactttgagaaactgaatgagacttcatagaagttactcctctgggagattgagctcttcaaagatatatattaatatatatatacacattggtgtcattgacaccttataacaaccagccaggaaaaatattacagacactattttctgcaccatgggaaacagcagccctgaaaaaatttcaaacaaaagggattattagagaaaaaataaatagtgaacttttatggggtgttcggtgtaagaatttcatttagaaaaaatgtggtattttcacaatcagtgaaaaaacttgaccctagacacagacctagtctgcctatgcccaaagtgggcctgattagaaggagttgagatgacaaaaaaagataggactcacttaaacataagttttccagttaaatctaccaatcataggtttggttttacattctcattctcgaaaacccgaacccccacaacaaacacccgattaactccatttcaatgtaaagtaggaatgaatgacaaaccttggcagcatcattagaatctggcctccgatgggggtaagatggctcgggtgtgccaactctacctgctccagtctgcctctcttcgcggactttgttaaatatgtgagtaaaaccatcagctgatgcagggtttgtttcatcccactccccgaatttcggaacagcagcaccatgatcaggctgatatgatacattaggaatttagcagagacaatattagaagcaagtatttacaaaaagctgtatctaattaaggtggtgatcctgtttatttactagaagatgaaaggggtaaacaacggcataagtacttaaagttttgaatctaacgaagctagatgaaaattatgattttactaaaattattgaatttataccggttacaaaatcaaaactttagttacttatgtctacatgatgagtaatgattggtgaaagccaaatgtaattgaaaatgaaaaacaaatcaataatagaatcagattattcctaataatggatttttcttttggtcatttttggagtaaaaatatgaacacaagataaaaatttcaactttatgaacaaaaaaactaaaaagggaataaagaaagaaactttacagtatcatcgctgcgaggtctcagtctagatcttccaggagtaccatggctaccttcataagaactctttccttcccaagatggtgaatctcttcctgcagccctcgcttggcgatgaagaggcgacttttcaatactttgttcggatccaacacttggtcttgcaggtcttccacgaccaccaccaccaccaacacctccaacatgacgttgattcgataagtcattgctggccctacgagcagtgttgttatgatgtcccggggaatttgagaattgccttaaatcattatcctccttgcttctatgcctttcatgagttgttttcactacaacaggctgctctactggtttaccaccatcaacattgcctttagtaagagaagtatcagctgaagatgagtaagcatctggattctcttcgggatcatttggattaatcatcttagcccctgttcggccctttcgagccttgtcaaaataggcggtgtatggaacattatcttcattttcccagttaccaaactttggtacatgtgaccgttgctgctacattaagaaaaagagcttgttattaataataagtgaactaaacaagaaaattctctactcaaaaatgtacaaaccgaaaaagagaattaaatcttcagagtaccaaaaaaccaatctttacaactaccattcatgatgttcaaataccaaaaatcacagcatacaaagctttttcaaaacaatttttttgaccccaaagagaattaagacaactaatggtgcccatctttatcaaagaccagaaattcatatgctttaaaataaagacatacttttagagacatctttcccaattcttctttttctcttttttcgtattatcatagtaaagaaacccaatagtgttcagtcaaaatgttatatttgctaaatgacaagcaattggccattccaacttcataactttatgttggtttgccactagtttggtatatcaaattggttaaactaaggcaactttatgattaaaaaagacaacaaaaagtaccccaaagaaaaataggcaaacaaatgaaccaaagggctaacactttcctaataaaaaaatgcagaaaaccatgcattgaactaattcttcaaacttatttgtaaagaaaaaaagttgtctctatcttcctcttttaatttgttttttttaatcctaattcaagtattcaaccacatgcagagtaaaatatttagggcttggggtccaaaatcccataattaatcatcatatgcagaaaatataatgtagatgaagtacaatatataaaaccatctttgactaattagtatcttgataatcttctcaaatttcataaataatattaaaaaaaaaacaagatcaacaaagtcatgatttttagcaaaacttttggtaataattggattgagtttgagtatcaaatatttcatttaaaataaatcagcatatatgatttatctaaatgccaaaaacagagaaaacaaactctcatattgcttctccaaacatcacaaattaggaaaattacaagtcaaaataaggaaagtccaatcaatttttaacagaagaaaacagaaaacttatagtttaacataaaaaataaaaataaaaatctgtaaacaaacaaaaattgtacatttcaaagaagataaaaaaaaaaacatcaaagagataaatcagttaagatatatatatatataaatacttactgccattttctcttcaaccaaacttggaataaaacccagaaacaactaaggaaaatttcttatacccaattcaggttctgtaaccaaacagacctcaaaatctactatggcctggttttttctcttctacaaaaacccttttaacgatccaagccaaaagaatttaagagggagaaagagagagatggagagagaagaagaaagaaattgaatgagaattttagagagaaggggtaggagttgtagagagagagaggtttatcaacccattgaccggagccaccggtcaagtttgacctttctttgttcttcttttatttttctctctgtaaaagtctctgcttttttttttttttttt

SEQ ID NO: 20140 - DNA, 3098 bp, Cannabis sativa
  modified_base (220)..(224): a, c, t, g, unknown or other
atatataaaataagatattcttataatttatttcctttttttttcaaaagtagtttttaggagaggatgttaaatgattttgacaattctctactgtacaaaaattgctcaaaataaaactatttataataatgacataagttctgttctatatataccaaattatgacatattttcgtcagggtcttacaacctttgatatctatatatatatatatannnnnatatagatataaatatatatatatttgaacaactttagtctttgatatagatcaagtattaatatatattaatttaattccctgtccctacgttggaggaattctgactagcttatctatacaattctctaattttatgtgtatgtataatgaaatagtagtactctctacaacgtttttaatcaaatttatatattattttctcatcataatttttttttagtaaattattattactttctttttccaatttaatataactatatcttactcacggtaaacattgattaattagtaaattaagcatttaagatatgataccaaatataattgtttttggaagcatgcatgtagccgatattttttatatataattatattaatagaaattagcagttactttcatggccccccatgctatccgggcattttaagaactagggtatattattcatatagaaattaattaatagaggacaagaaaaattgatcaattatatatatatatggtcatggagctgacaccaatcgagatagctgaaagggaaatatatatatatgactcaactgccacacgatagaaaatatttagtgaaataattttagagaccaaatatgtcatctactatatatgtatcattcctttgatgataataagtagaatatcttaatatttgaccatatataatcccaccaacaaaatttgtttcaatacgtatttttcttttaacccacaaaaattgttttattttttaatcaggtgatcatgttgaaatttaattattttaccccctaatctaataaatatattatatatatataaggaaagtggtgtatgaaatttttttcaaggtgcttttaattaatcttagaataatttgaaaaatactttgaaagatatacataaaaagctcttttattaattcttttattttgttgtgggggagagagaaatataatcctagttttttctttttgaaaaaatatataatttctaagtggacagaaaaataagatataaccccaattttacaaaaatcagatgggttccacatgctccacttagcttaatttaggtacaaaaaggtgggtagtgcccttaggccgtccaaaaagtctgaccttaaagccctataaatatatgtcactattttttataatatgtgtgtaacaatcttatgtattatattttgtttaattatgaaatttcctaattaggggtatcattcatgctcttattgtaagaatgtattctatttttggaatattgaaaaataatatttctttttctgatgttttatatattatagttataatagattattgtttgtttttgtgaaattttaaataatttatagtgttgaaaattttgttctaaattaacagcgtaacaaaataaaaataaacatgcatatatgcataactgtgtatgtgtttaaattttattattgatactaaacatttattcaaaatttttaaaaaacgaatacctactataattaaaatataattgatatataaaaatattcttcatatcctaaaaataataatacaaaaaaaaaaaaaaaacaactatagtagaaggaaaagagatgttttattacttaaaaaaattctatatgtattgtagctttatttagacccattctctctctttacacatatcctgaaacaccgtcctccttacgtctcatcctgctctttcattgcccaaagaatagagaaaaatctcagataaaacaaaaggggaaagaatagagattagaaatttcaaaagatgaaaaagaaattcaaactagaaatgaataatagtgagaataaaaccatttgcatgggaaatgaaatcatggccaagaaagtgaaagaaaaggtatcccaagtaggcaaagaaccccaccaccacatccatctctatatatcttctttcggtttacttatcctttaggtgagattagacacatctactatatttatatatttatttaatatttttttaaacacgtcaaaagtaaggggcaaaataattatattaattgttactaaaaaaatcttattttaattgggaattgggcactaatattatagataaagaggacgttataacttttgtaccttaatttttttttttttttctaattaggttattgaagagatcatgggttatcttaaaaaagtaatatatataagactggttcatgtgattttctttttgttgcgtagtgagatagaaagtggcacggaattttatgcaatatccatggataaaccatgtttttggcatttgctacaaagaaggatgcctaaatttcaatacaaataatgttatttcttaacgtaataaataaatttttagagtgtgactcaaacttgtgccaatataacaaacatgtttaatttcctaaaaaaatattaaagaaagaaaagaaaatctcaaattttatcctgcataacaaatgaacaatgaaaaaaaaaaatctcaaacgatgcaacgtaattaattaattctttgatcacaaaatttactaattatatgttgatgcattggtcataaaaagtttgtttgtattcccttacatttttatcaaaaaatatatatatatgtatatatataaatcaacttgtggttcaggaaaaatatatcccaatctcaatttttagctaaattatatatagtatatagtattatatatgacccatgccaagaaatatatatataggggaccaatatatatagttatcaactaactataattgagattgaaattgtactttgttccgattgtatgaaattacagtatggtggtcacgaacaacatgtcaattagataagtcaactattaaggccaatatagttggtgagaatttcaatctgaa

SEQ ID NO: 20141 - DNA, 7541 bp, Cannabis sativa
cgtccccatccgagttgaatgaaagctcaatagggaaaattcgctcggggatgaaaggtgatctatggtcttccataaaaaaaagggagggagggaggacaaggcagaagtattgttcgaagaatgtgaatgtgggcaccaagatccactgaccaagtatgggaacacaccgccaactataactcactcacaaaagggcctccttagacacacgcctagtcaccgacacaataaaaggggagggtgcacgaatggaagtgattagtgggggaccaaagacaaacaagactttaacaagagttatcataaatttgagtggtacccgcaagggtggtaggtgtataaatatataaaaaaaaaaagtagtgaatggggaaagcaggtacctaacaagattggctttagtaagaagaggctcactacattagaactcgaagaaagaaaaaatatcaaagggctcaaaatgtaagaagagtttggaaagagtaggaagctaagggagatagcaagtgaagggaagtaaggatgagataagaataggtgaaagtgaaaacctatttataagaagaagagatgaatggtaactattggattgaaataagatcaaagagtggggttagtcacatgcacacatgagaaacaacatgtgacccacctacctcattgaatgatctcatcaatatttcaatacgtaatgtcagatgttccaccagacgaggtgcgccacatagggcctaaagaacgtcttaattgcattcaaaaagatcacttaaaagtgctctttttaattggggggaaagtgttaaccacgaaagttcaataaatgaatgctcctatggacaacaaataagtagaaggaataatacaagattctcaagacaaataaaatggacaaagagtggtccccacctcttttgtccttgtcctctcgtcacatctccccatcatatcagcttcttcctcacgctgcagcaaccagtgcctaggctccacgcatcagcacccaggctccatgcaccagtgcccagcctccacgttgtagcgtccagctccccaccctgcacgcatacagcgccaagctccccagcctgcaactcccagctccttagcctccacgcaccagcgcccagctcacttccctgcacgtcgagttgtgtacctggctcccacgtatccagtctcctcatacaaatagacgtaaggagaaaatatcgagactagggtagtttaagctaggagatcacatataagatagcgactaaagaattaatattgataaaggagacaaagttcatttcaccgaggtacaagtaaaagagaaagttttggtgcaactgaggatgtgtgaaacaacaggctacctgaagtactaaggtatttagtgtgaaagtgaccttacattctcagacttagggatttgatgaagttcaaaattgtagagaactcactataaatagggcctttgaggtcattgtaaaggggcttctttggaaaaaatattaatgaaatagtagttttatgaggaaagtgaagagtctaaagtttacttttaatgttcttctattaagatctttaaatactattttgggttcttgatatttcgttgacgagtttttaccgccaacaaataatatttaccactttgtctgttagctctaacatcttgtctgtagacaatatttctgccatgatggcttcattagaaagaataactccttttggttctccagttgttccacttgtatacatcaatgtgcagatatcagtcctttgtttttcaggaagttcaccactaagatttccctgtttatttagacaatagttagtaatattgtttataatataactaaccaatcaaaaagtaataaataccaaaaaagaaaaaagaaaaagtatatagtttactatatgaggggagaactgataacattattgagatcttaccaattgagagaattcctcccatgaaaagcatgaaactcccagtttttcaccttctttcttttgcaaacttgtaacattagcaaagcttacaattgctgaaagcaacgaaggagtattttggttagcaacctcacataacaatgcactttgtttggctaaaaaaacataaaagaaaaaactaataacctactctttatgtatgaagaacagtttggcaggcatgatagaatctgcacaaatagtagaaacatcaaaagaggcatagtcttttctatttcactcttgctatatatgtttacgaaactatcaaaagtggtttttcaaaaaaaaattattattgattaaaaatacttacagaagggattttgttctcttgaacaaatgctattgacacttcaccatggttaatgataaattcaactgcattgggacctgtcacatatacgtaaaaatacttagttggattcttctaacaagtattctactactcaataatttttagagtaattcaagaaaaatctccctgcataatggtgacattctaaaaagaaaacgaggaaagtatacctaatgtgtcatacaggggaacatatgtcacggcatggctgtaacaggcctgttgaaaccgaaatgaacatataaatgaatatacaatcttgccataacattatatctatattgtttaaatcacattccaatgtttcaagtattttcacagatataattgaaagtaaactccctaaaaaatacgagcaatctttagctatgtcattacaaaaaccaaatagttaaacaaataaatataatgagtgagttgactactttgttcacttaaatgttattactaatttaagacatgaacatggaaagccaaaggaggtaaatgagaatgcaaccatgttttacaaaatacctgcattgctatgatccactgcgaacaatttgttccgtatataccacagcggtctccctacagataatttaagaggacaaaaatagagcaattaatttaagaccaaaacccttttaaaggtaatagtagtacacagtacttattctacaagaaatgaaacaaacttaagtaagaggttaattatgtagttataggttattattctgatatgataatgttggtagctaatcctatattctatgtaatatgtatagtcttcctctcttctccactatctctctctgtctattcttgtgatgcaccaaaatataaataaagaatagtattccattacatttcaactcttgaacttttatagctcactaactgatataaacataataattagaataataaagaaaacacataaaactaacaaatcagactattttaggacacctcataaattttctagtttattatcactcaacacattgtctcgatgatctgttgctaacttgagagattttggatcctaactgttgagaatgcaaacaaagttccatattagctagaaataggaaggatcatgggtataaggatatatatctccattggtatgaggcgttttggaaaggtttccaagaacaaaactgtgagggtttagttctaaagtggacaatatcatacctaaagatgtttggtgtccgatgatccttgacactaacactgaaattaatccattctttccacgtctagagcatgctttttctatgtatagcaggaattttgtgtgttcaagaacgcataaatgaactaccatctcttcaagattcaatgtttgaaatgcagcaacaactagaagctattccaaaactccaaatggacactaaaactttgatcacatcttcaatggataaaccacgcattgaaccacacacgtcaccaccattcccatcaccaaatctaatgcttccattattgttgcctcttcttcaacaaactccatagccccatcatcttcaactaatagactaccatttaagacatcgcaatgcaagagaaaaacacttaaggcatttcttctattgtgagaaaaaaattggcaaatcaaatctacaaataatttgtcttttttttttggaaaaggacatcatttacaattaaattctgttgttctggtaagtttgttgggaggaatggaaattaaaaataggaatgagaaaaagaattttagctgaatcgaaatttaatatgctaaaaaaaggctagttagattttttgcccctaaattttaacatgtaccaaatcgtaccccaaattcttcaaaccatcaaaatttttctctaaactattgagattgttggattcgaggacttctatctaattttactaacagatgtctggcgtggattaaaattcagaggtacaatttggtacatatcaaagtttggaggcacgatttggttcatgtaaaagtttgagcgtgtgatttggtacatggagaatcaacacgttagtaaaattgaacaaaattagacagaagttctcaaatccaacaatctcaatagttcagaagaaattttaacagcttgaaaaatttaaggaacacaacttggtgcatgtcaaagtttggggacaaaaatcgtaattagccaaaacaaaacaaaaatcaatataccactaaaattgtggaaaaatagaatgacaattaatactttaaaatgcaaaggatggataggaatgacaattgattcaattgcatctatatttcgttattcccaaccaaaggctgtaaaccagtaatactggtgattagtttgttagttgtggtaattaaagttagttaacaattctattaacattgattggtttagcatttaaggctaacttgcaacgcacacaactcatgaagaaccaagccaacaaacataaacaagacttgacatttgaagtaggtgacaacgtctacttgaagctctagccttttagccaacagttactttataaacgcagcaatgagaagttgatgacctccaaaatctgtgccccatttcgtattgagcagaaagtttgtagcatagctcacaaaaactacaacttcatccgaatgctcgaatccacctcattttccatgtttcccaattgggcaaggtcatacgaaatcaccatctaacaaccaagatcttacttgctttgactcaagacatggaaccccagtaacttctcagtgtgtagcaatctacacaataagattataataaaccgaagttctcattcactaaaatgatcaaccttcatatgaagacttctgagaaagatttgaggtgataaacacacattatcctcatttcaacctgatgaacaaagttctagtttgggtggacagtactcttaggaccctaatagataacattaattttgtataggtgttctaattatagtcccttgtcataaaatgggtactaaatttgggaattgtattagaaatagtgtgaaaagacaataccatatataagatgtgtaagttacttaattttgacataaaaccatatgcacttttttctaaaattctaacaaatattagtattaggagagcggaaggtctctcaaatcagctaattgatctgtccaaaatttcctaagatgatttccggtgctaagacaatagtactactaccttgttactctttcctaaaagaagcaaacaaaacaaaacctgttacatattcaacacacacttacaggattcacaccacggcttctcatggcagaagccatacgaacggcttcatcgtggacctcctgatacgtgagccacacgtatggacctgcctgcaattttcatttaagcaagcattaagacttgattcagttcagcttttccacacacacaaaatcaaattaaaaataaaaaataaataaagtacttagattcagcttattaatgttttttgtattttagtctcgaactaagtactcaaacagagtgataggtacctttgaatctgtaatttggcgttgacccagcaatggagactttgggttcctcttaacagattcactgttacaaaaatcagttgttagcatttgcggaaagctatatacattcgcacaattgaattacaaaatatcagagtttgaactcatgtagacgcagagcatttaacagtacagcatcaaggtttttttatttttttttaattattattattattataattatatcctacaacgttcaaaagatggtaatatcgaaaagcaatgttgaaacaagattaattggtaacccttgtaacttattgtaagctagttttgaggcatgtactctcagctggacttcacatgtcatagatagtttttctttgagatttagacgagaacaactctaccaaacatggacattggacatatttatccaaaatgaaaaaggcaaggatagcttgtgtacctgaagaagtcccagggagagtgtaatccttcaggcaactcaagcaagccatctttggcataaatgctccgataaacaggcccggctgatggcattttctctgtggccggccttgcttcctcaaccctcacagtgtaagacattatcacctacaatgcaagaatcaaaagcttagtctcattaaatatcttttcttctttttggaagctactatttatatatgtatatatagatatatctgtactttttgtgactgtccgtttactttttcttttgagatgttctgaagcttgaagataagtacaaatggagttgtaaacaactgatgcaaacataaatatatagctcacttataacaaaaaaaatgctccaataatatataaaagtgattcaaatttatcacatagtaaatattgtgcggatatatatttttattatttggcatatagtaaatattttgttgaatttgagttatgtattaaatctgcataatcataaatacataactttattatttatttttatacaatttttattattattattattatttttttgtatatttagttataaatttatgttctttttttatatattaagttttataattatatattaaaacacaatattataaattaatccaaatatatgacaaattttcttttcactttaaatataatacaatttttaaatcaggtgtaagatttgagataagagtacaagttaaagcagcaaaaagggtgataatactggtgggagagagttagttcagctgaacaccataaattcttgagtacttttaaaagaaaacatttatatttgagtgtgaccccatccccttacatcggcgtttattaggctttaaagttagttgtctctcactcactcctagctgtacgtacattatattaactggtaagaataagaaatcatttataatggtagatggagtttggtgagaatgttacattgtttttatttttctttacctcacctaattaaaatacgcaataaatgcaattttccttttattttatttttttcacttaagcattaattatttattaaaaataatcttaaagtgtaattaacaattgtttgaccatctttagataaaaggaaatgcatttgtactatatttaaataattatgctctaatacatattgacaattgagaatatataaaaactaaaaaataaacggcactttgttgtattttgttaagtgataattaagtaattaaattatataaaa

SEQ ID NO: 20142 - DNA, 5986 bp, Cannabis sativa
aatccaacatacatgatagtaaatagatcctggtaaaataaattccaacacaaacttcacaagtctctgccaacacaaatgagcaagccccattaactcatgctcaatgtcagcaactcatatcaatgcttactcaacaactacaacccaccaataatgcaacccaccaataatgcttccactttagatggtccaaccatcaacaagtttactggtaaaccctatcctttatctctcacttcctggattattgatagtggtgctactcaccacgtttgttgcaacatcaattgtttttcttcaataaacaaatcgattactcacagatctgtcacattacctaatgctacaattgttaatattgaactaataggcacagttaaactaaattcagctataactctctataatgtcttatatgtacctaagttcaaactaaacttactttctattagtagcttaatacatgacaactcttttcacctttatttcaattctaaccattgtcaaatccaggacccttcttggacattgaggattgggacagctgataaactcagcaagctccactacatacaaccagagacacttcatagtcaaatttctaattcagttttctgtaatgtaaaatcacaaagtgaccaatggcatacacgccttggccacccaactatactcattacgaataaaatcaataaacaactgaattttcatactgatttcaaaagtaaccatgtctgtccaacttgccatttatcgaaacaaaagaaattaccttttgtttcaaacaataatttttcacaggatatatttgacctgattcacctagacatatggggaccctaccatataccttctattgaaggatacaaatacttcctacccattgtggatgaccattctaggcacacatggctatacctacttcgagcaaaatctgatgctccaattgtcattaaattttttttcacttttgtacacgtccattacaaaagaaaaagcaagtctgttcgaacaaacaatgccaaagaattaactctcaacaccttttatgcacaacagggaacaaccaacttcaactcttgtgttggcagaccacaacagaatgctatagttgaaagaaagcatcaacacattttaaatgttgctcgagctttagctttccaatccaacttacccctaccctattggagctatatggtcaaaacaaccatctacttactcaatataacaccatcagttcttctcaaggataaaacttcctttgaattgcttcacaaaaagccaccagaatatgcacacttaagaaagtttggatgccttgcatatgcctccaacatccaaattccccacaaatttgcccttcgggctaaagcttttatattcataggctatcccgaacatatgaaagcatataccctctttgatattgagaccaaacacatcttccactcacgaggtgtaattttttatgagtctatatatcccttacaaggaaccactcataattctcacattgataatttcttttcatctcataccagtaacaatgatcaacaacccttcaatgagacatctcaaccaacctcaatcactcctcctcagtctttcgccaatctgccaacaacatcaaaatcaaggagaacagtcaaaacccctgcttatttacaagattacaactgtgccccatccagcacaacacaccctatcacaaactatttgtcatacaaaaaattctctcctcagttcagggctgctgctcttgccatctcttgcattactgaacctacttcctttgcacaagcctgcaaagaaaaagtttggaatgcagctatggacacagaaatcgatgcccttgaagcaaatgaaacatggattgtggttcctcttccctctggacaacacacaatcagtaaaaaatgggtttatcgaattaaacttaatcctaatgggttggttgaacgatgcaaagcacgtctcgtagccaaaggctacactcaacaacaaggtgttgactattttgaaacttatgctcccgtagccaaattcaacactctcaaattactcctctcacttgctgccataaaccaatgacaccttcaccatatggacataaacaacgcatttcttcatggtgatctccaagaagaaatctatatgaagttaccacaaggttacaaaccaaaaggcccaatccctccaaatgcagtttgcaagttgcaaaaaagcatatatgggctcaaagaatcgtctcggcaatggtatgccaagcttagtaccaccttactcaaccaaggcttcactcaatcaaaaaatgacaactccctgttcataaaacgatcacatgacacattccttggcttactaatatatatcgacgacattatcgtggcaaccaacaacaccacagctcttcaatcctttatctccactctaaacaatcaattcaaattaaaagaccttgggccccttcaattctttttaggccttgaaatcgctcgttgcaaaaatggcatctctataagtcaaagacccttcaccttgcagctattacaagatagtggcaaacttggtacaaaactggtttccacaccaatgtaaccaaataccaaactcaacaatgacactggaatgctactcacaaatcctacttaatacagaagtctcatagggaagctaatctacctcactataacaagacctgacatttcttttgcagtgaacaaacttagccaatatcttcaagccccacaggaacctcatttacaagcagccaacatcatcatccaatacttaaaaggcaccccaggtcaaggacttttcttccatacaacatcacattcacctctcagacttcaagcctttgcagatgcggattggggagcatgcttagatacaagaaggtccatttcaggatattgcattttcctaggaaattccctcatatccttgaaatccaaaaagcaacaaacagtgtctcgatcatccgctgaagccaaatacagagctatggctaacaccgcttgtgaactaacctggctccactccatcatcaaagaactcggcatcaacatacaacttccctccactctgttttgtgacaacaaagctgcactccgcatatcagagaatcccgtctatcacgagcgcaccaagcacgtcgaaatagactgtcttctcatccgtgaaaagatcaacactggtacaatcaaaacaaatcatgttccgtccaaatccaatatagcagagatcatgatgaagcctctgtttccatcccacttccatgatcttatttccaagatgagtgtcaaaattttttacactccatcttgaagggggctcttagaccgttatttttgttacttgatgtacactgctatataagtctagctgaacattattgtatcaatcaattcaattcacttttcactcattcagtaaaagatgactttctttttctctgtttcttctctgcctttccactaatacatttggggcatgatcataattattgatcgacctggccaacaatactttctgagtggtaactttctagataacgtgggtgcgttgtctgccatgattttggcaaggagagttacctcttccatgtgatacttccccggtgcgggatctggaagattgacgttgggattgactgtccctgtgtttgttactaacattgttcgaacttgttctatgtgagtgagtctcttgtcttgctcgactcctttgagcaaacaagtaagatatgtgactcctaatcgacctatgagggtctctaggaggaggatgtttgcttggtggaggattgtgaattggtgaaggtggtggtcccatgtttctatgagaaggttcaagaatatcaggtcacatttccatgtggtttgaaccgttaggattaaaatgaccttccagattaattggcacattcttgttgcctcgtgttgttaatcttgggggcgagttatgtggggtacattctcattcacaagagggacatttaacttatccatgccctagatccccagggcctttcttccggatgtcgaaattgaggtaacgcctcattcgcagtcgtgcgggcctcagttgcttcacgctcaagttttacgttccttcgattggatttagccaacctttattacaattgtcgattctctactttgataatggagacatatcttgtgggattatatgcgccatcaaaatttctcgtcatctcaagagcaccaatggtaggtctttccatggttgaaacattggggcctcttcatgtgtttgcagtattcacaggatgagtttcttagggctcttttccagacctatgggtcattctatcatgttcctcctgtttcatatgaacattccgaggatcattttctgtagttacagatcgtggttagggagatgtgtttatgagttttaatgatcaaaaactctaatgaaaacagaaaactgttaatttaaaatttcattaacataaataagtcttgataattgatactttgaaataattatgtaataaattatacttgaaatgtaatggctacattaaataaaggtaaggatttttacgtaattttgtaattaaatctacgtagttcacaagtcacttttatttctctgagtgtttgtgtataaatttttgcagggatttgatatacaaaattttatgtccccttcaactattattttcattgctatttatagaagtagaataacaattattcatttttatctaaagggcaattatataatgtgattttccctatgttttacatgtttatgcataggcaagaaataaaaatacctacttatgttttgaaaaaataaatgaactggtgctttgacttggtcaaagcatgtttcagtcgagcagaatttgttctacattcttctctaaaagcttatcgaaaggaccatagatcaaattaagcttcttcaagataaattcgacagccaaatcagcattattgaccatttcttacctatgcaagacacatggttatcttctttcttgaagagaggcacctcaagtagagtgtgttgccaaagcattcttgagataggatgttttgagcgagtagtcaaatatatttaatatctgaagtggagagttgtcttctttgaccaaattaggtcttaacatagttttgccaatatttcgtgaagtgtcttttcgggattgttatatgaatttatttctttattatgcgacctaatgagtcttactttatttatcatttattactttgtacacgtgtcatgcgattaaactcgtttatttaagtgcttcgaaaaatttgtatgacactaatactatttgtaaggcaccacctcgtgatagtattagatagtagtgcattcttatgaggtgtcatattactacaagtacaatttatgtagggtctcttattttattttaataataattataataaattgctagtcatttatagagtgtcacctggagtggtgttagacactattgtacctagtagaaatggtcaatataaaatagaatattaatatggggcactaaggtacctagcacaattattgtagctagtagaaatggtcaatataaaatagaatattaatatggggcactaaggtacctagtacaattatcaggtgacactttataattggttagtgattttatataatcttagttaaagcaaaataagtaggatatgatattatcctactaatagcaatattataccttacacatatactagcactcatgtcttttagtatttctatataaaatatagagaaacgctaaaatatactgatgatgtttatcactctcctcagtattatattattattgatacaattaattatcagatctcatataacttaaggtaataatttttaaagaatattactaactaaacatatgacactatctctaagtgatactaattaagtaccactagtacccaatatcaatattctaaaatatatgaaaaaa

SEQ ID NO: 20143 - DNA, 2187 bp, Cannabis sativa
ttttttgaattaaaccacacttttcctaaactaatagattattgataataagattataaaagcacacacgtggcgttcctgaggttcaggatgttacaaaagttctccctaattaaattttaataaaataagtaaacaaatatataactgtgtttattattattattattattattattaataaaaataattagtatttttttcattgaacattttacattattaaattgtgtttcttctagcatatacctttttaataataaaattttcacattaatatgatcttttcatcatatatgatatattatatattcaattttatcctcaaacaagtaatacagttgatgataataaataaatagattcaaattaaatatatttcacattttgttactttaacgattaagaaatgaaaaagaaaaatatgaattattatatataattttctttttctatttttcgttaacataaaaagaataaagagtatttaattttattcatttattaactatcactcatcattttatttagttcccgataaaataagtagaatgtaatgaaaaaactgcacatgttcctataaaagttatatttcaagaaattttattaacaaattttatattataacatatacacaataacttgatagtgtataaaattcggtgctacaaaaatactaatttatataactttataccaaattcccaagttagatactaaatatgcccattttcatgttttcatttaggaagataagaaaagtgctattataatataatatatatgtgacacgataagcttggaagagttgattacgcgtttaaagtttaaactaataaattagaattaatgatgatctatcttatgtgatttaatctcttaatagaagaattaattgttttggtgcctgttcaactctttgcttagaaaatttcagctgactgagttggcattcttggagctgtcttttataatattttgtttgtataaatatatataataattagccatctctatttatcgaaacatgcacgtttggaatatagaacaagtaatatatttataaggttaggtcagtatggaatgtataacttgtcctggatttagttagtttcttctgaatttgtaatgatctaatgaagatggtaagataagaacggttgaaatgtaataatgtgttattttctttgtatttgttttgacattatgctattttctttgtatgtatatatttttttttttatactgttattttctttgtattgatccttcctcgttatgaaataaagtgtatacgtatatattatcctataattaattaacctatatgtctattgacacatttacttgattttgtacttgtacgcagggacggatcgactttgattgatgtggggctatagccccactactaaaaatactgttttttaaaaaattaaatgcaatttttttattttataattatagattaaatagtaaaaaaaaacctcacaaaattaaataaatctaataagagtaattataatataaatataaatatttttaataataaataaaccccccacaaagtaaaaattctgggtctgttactcttatacattaatacttttattaggatatacctacgagacacactcacacataatcaaattctacattactttccactttaaactatagagaaaaaaaaaagttactttattgctagatatatgtgtctcaatcgttattttattgttcatatgaaaataatattacgtggtcactttcaaaaaaaaataaataaataaataaataaataaaaactctatacgtggtcaaacttatatttatttaaagaccattcacattcatttacatattttgtttatagctaaattcttgtcaattcttttgataaattaattaatagcagccaaactttaatttaattacaaacatataaaatttattaaagaatataaaagatagtttaataaatttatatgtttaaataattgataataatttgagtttatttaaggtaaaattgaaataggctataaaagaattagaaaaaggattattgtggtatagttcttccaaataaaaaagttctccgtgatcctcatttttaggaagttgttcactcgctattatcgatcccaaaatgatagtcgagtccagaaggaagtttctagatgagta

SEQ ID NO: 20144 - DNA, 4687 bp, Cannabis sativa
ttgggtgcgagaggtcccgagttcgattctcggaatgccccaattttgctcaaacacatttaattttttatcagtcattgaaaacaaatctactaattgttacagttttctattatgggtctaaaatactactccatcaattttttaatatgaagactgcagcacacagctaccatatttcatattttactttaagcataaccttgtcctgacttggcaaaagattgcattattcaatagtaataattcacacatcttaaatttttattaggatctgaaaatgaaaagagaccatgcttttatccagaccagatttgaaaagccatacaaaagaaacctaacctgtgtaagatacaataaacactgaatccttggtaataccacaggtgatcacaaagcaagtatgatacactacaaaattcctgctccaacttgttaattaaatagagaaccattttttttcctttggagtaaataaaattttcttttatatttgtatttgacaacaccaaggtaaaaactcagccgtactgaatttcaaaacaagcaaagtaaatgaaagaaattaattatgcatagaaacaaaagaaattattgaactaaagaaatcaacctatcaattatgtttagcatattggagtgcaatataaacatcaatgggcatttggtctagtggtatgattctcgctttgggtgcgagaggtcccgagttcaattctcggaatgccccaattttcttgaaacatgttttacattttttttggtcgggccttttatatgaatctggcaactagtgcagtattccttttcaatctaaaatgctactccagcaagttactaagaagacagcaaacagcttcttgtttttttaataggatctcgcaaatgaaaagagaccatgttttcatccagatcagctttgaaaacttatacaagaacaatctctacttacgaaaaaattgatcccttgataacttcatatgatcagtcatcaccaagcttgtatgatacaatgtcaaatttctagaccagctagtctatatatgtgtgtgtgtgtacaatttcaaatttctagaccagctagtatatatgtgtgtgtgcgtgtgttacagaacaacaaaaaaaccgtgcactgtgtttaaaaaaaaggtagagaagtaaatggaacataaaatatgtcagttaagcagagcaacagaagaaatcataaatatattggtttgaaaataaacatatgtgggcatttggtctagtggtatgattctcgcttagggtgcgagaggtcccgagttcaattctcggaatgcccctgttttattaaaacagtttttgctgaactactactgtaagaagtcttttttttgtaaaatatttaaactaatattaataggaaaacttaaagttgtgctagcatatatctttactgttttaatgtcttgtgaataagggaaaaaaatacagcataatagagatgctgatatgccatgctaacctaccctctgacaaaattctgccaaattaattatttaacaccaaataacagaaatttcaactcacatgttacttgttgcaacttgcacacatgcatttgaaaacacaaagtcaactatgcaatgcattaaaaaaaagagactatcagttaaatacaaattagtttaacattgggcatttggtctagtggtatgattctcgctttgggtgcgagaggtcccgagttcgattctcggaatgcccctgtttttgcaaagataaaattttatgtgtgtgtacatatgccttggcgaaagggggtacataaatagtttacagtctaatcatcaaatgcagctgtcatagactcataagtttcctctttaatttttaattttttttcatgttaattggttcccagcaagctgagcacctgtactcttacataagagaaattcaagtacagtttattccagcaagacttttataaatattgaataatagcacaagctaaagatgttgaatgctaataatctagcatatgaggatttaaacctttgatcttaaatattgtcaaaaaaaaaaactttgatcctaaatactgtaaaatccagtttgataacctttgatcttagatattgtcaaaaaaaaaaaaactttgatcgtaaatactgtgaaatccagttttatagtaaattcataatcaaaagagcatagaatagataaacacacaaaccatcttataaagaaaccccaaatagaccatgttctcagacacaaggacttaactaggccaatgaaaactcataaaaatgaagttaaatatgttcattattggaaagcatgtccttttttatgcccctaataatttttaatatttaaaaggtcaaacctatactgtgtagtgtacatatattgaacaaactcctgttatgtatcagagaacaccaagccaatcgacacaatttataaatgaaaaaaacaggaaaagaatatagtaagaaaacaatatacataaggaatagcagctggaaacatcatacagcaaaagaaatcaatcatatgctatacgtacagacagcaacataaatataaaaaagaacagttatcgacatttgctctagttgtatgattcacctatggtgtgtgaggttgcaagtgcaattcttggaaagaattgacatagtggtacatttattttatttgttgttacaataaacttgctaaatacttatccaataagtttataagaaacccactaacagctttcacttgttccaaaactggtatattaatattaatattatgtgtaacctggtcctgactccgaaaagggcatgcctatctaatgattattgtatacttacatcagtatcctagaacagcaactgaaataactatacaacagaagatacatattcttagctatatattagagaccagctgattaatttaaagaagagcatttttgttttccttttcaagtaaagaaatttttctactatgtacaagtttacaacaccaagacaaaaatctaccctgagtttatgaacaaagcaaagaggagaaatggaaaatagaataagttgattaagcagattaacaggagcaattaagagcaaaggaaatcaacattttgtattgaatatatttgttgcaagataaacatcagtgggcatttggtctagtggtatgattctcgctttgggtgcgagaggtcccgagttcgattctcggaatgcccctggttttgcagatacttttttatttatttatttatttctaatattatagttatattttgaggagggaatctaatcattaaaacagctgtcacaaatctcctctttagttttctattgttgttaatgtcacttgatttccagccagctgagaaccttgaactcttacatgaggggaattcaagtaaagtttattccagcaagactttaatagatatgaataatgcaagctaaagatgttgaatgctacacactttgtgatcacagtagaacttacaaacacatttgtcccaaaaaagagaaaaaagaaaaggaaagaaatcctaccaattatacttatataccattaccacctgaggattaaaacctctcaattttaatattgtaaagtcctgtttgataataaattcataaccgaaggcatagagtagataagtatatgtccaaacacatcttacaaagaatgcccaagtacaccatgttctcagacaaaagggcatatttaggccactcaaattctcacaaaatgcaagttgaaaaggcatgtactaaagagctagatgatcattacttaaaagcatgtgcttttgttgatgccccctcataaatgaaaatatttaaactgacaaatctatattaagtggcataaatttattatgtatcagagaatgccaaggcaaacaacacaaagtttataaatttaaataacaaaaaaacaatagtaaaattaacactatacattaggatggaaaccaaaagcattatgcaaccaaagaaatcaatcttctgcaacttaaatataaatatgaacagtaattgtcatttggtctggtggatgattcttgcttagggtgtgaaaagtctaaagttcaattcttggaataaattaacttagtgttacatttattttatctgttgttgcaattaatttgctaactagtacagtatttggttttgttctaaaatatgtaatacatatccagtaagctattaggatgatcacaaacaactttcacttttatatttcaatattaagtataacctgatcctgacacagcaaagggtgcttctatctagtgtttattgtacatacaccagtatcttagaatagcaactgaaatatttatacaaacagaaggtaccaactctttgttatatattagagaccagctaattcatttataagagtgatttcttttttagcttttcaagtaaagacaatcttctattatgtacgagtgtcaaaacaccaaggaaaaatctgaactgagtttaaaaacaaaataaagaagaaaaatggaaataaaaaatagttaattaagcaaatcaacaggaaaaatttatggaacaaaaaaataataatatcctggtttaaacatattggttgcaagataaacatcagtgggcatttggtctagtggtatgattctcgctttgggtgcgagaggtcccgagttcgattctcggaatgcccc

SEQ ID NO: 20145 - DNA, 5210 bp, Cannabis sativa
aaattagcaaagtatattgtaaatcacattagcttgcttatcacgctatgctttcttgtcgaagtaactgtgtaatgaaatatatagaagacaacattttctatatataatatattatgttcaaaataatcaaccaaatctaatttttatttcgttttaagtacaacaattgactgggtgtcacatatgagatactgtctttgtatttaaattaaaatactaaagagtacacctatatatataaatcttgacttttgaaaagatatattattgacttgcttgaacgaataattaaatttgagggacagatgttttgttatttgatacgtacatagtctcctaaccagtaaccacaatctctggtgctcaaagaagcaatatcgatctatatattgcgatgttacttaacgtctgcatgtatgctccaaattccaatcccattaataaaagtagactttattaggcattggtatcgaactccactacaaaattgagctttgcaaataactaataatatttgataataattattaaattaaaatgtgttagatttttaattacactaatagtgttataataacaccttatactgatactaaacaatgtcttataataacttttctcataaaaatataattttatttggagaatccataaaaaactaaaaaataatatataaaatttgtaggcaccgtaatgacaatgctagctctattatatttgatttataatttatgtatttatagtcagtagttgttatcaattttatttgaatggttatcacagggatggattccaccgctgttattatctcttcttcttggttttaattaatatactggtcttgtgttttgaccccaagcaaagctagcctaatataacatatattgtttagagtattgttaggggcagtgagtggcgtggccgtggccgtgggagaaatatacattatgggggggcaaattgtaagaaaaaaataatttgtgggacaaattacaaataatttgatatagtttttttaccaatttaatatgaagaaaaatatatataatttttttagttgggagggctatagcctcctccctacctttataagtactagctgtgtcagtggttagtggtcagcggtttgtaaaattgtggaactgatcaataatatgaaccaataacagcatatcactatgtagtacttttcaccttatcctaagcatatatgttaaagccacaccgttcatataaatgtaattacttaattaaagtatgcatctagaaagatagcaacttcggacctaaacatttatatctatatatgttcctgtaagaaatctatataatatatatatatattgtgttgttgccatacattaattataattactatgtaaatatgatcattttctcactttagatacaccgaattaacatatttgggcaaatcgagaagtcatcaaccgtaagtagtataacgtaatataataatatatctggactagagtccacaagaagtgtacaataagaaaaaaaaaagtgtatatatatgtacatatatatacatatgtaattaaattactttgtatatatgaattgaagtgttcagaccagcgttgtagccggaggtggctacaatttcgtatttgcaatcgaagcgacgtcgttttatggtgagatatggacgtggctaagattgacatgcagaataagaagcagcagcagctaaaggagaacatactaaaactagttgagaaagataatgagagttttcttcagagactcacggacagaattaataggttttcaacttttgctttatgttccttctctactttttttttttttttttgcttatgtatataaatatattatttattatatatataatgtttgttattaaatttggtttataaactttttgtagggtgggaattgagattccaaagattgaagttagatatgaagatttatcagttgaaggagatgtccatgttgggagcagagctattccaactctacttaatgctaccttgaacaccatcgaggtgccaaagcttgaatgggctactaagaaagtagagaaattttaatgatattcatagagaaacgctaaaaagcacccagagcgtgttagagagtcctacatttagttgaaactaaataccatttataagatgcgtagactacttctctcatttataattaattttgagatgaaacttcacgtagcttaccatacactcacctatattctactactttaaccatttatattttgaattaatttaatttgaattatataaaatctactatttaattatactaatgataatataacattttaatgcttattttatatttatatttatagtattcttctacttgagaaacttttttaatgcaaaaaataagttgtgattatattttgttatgtatattgttcatatgaaaaaggcatccataatgatcaaaaaagttgttttggtatctattttgtatagggtgtgctgggaatggttcaaatagctccatcaaagaagagaaaacttcagatactcaaagatgtcagtggaatcattaaaccctcaaggtgtaaatcattacaaatctattatgatttctatctacaattctctggttttaataacagtgtcgtttttcactccaacactagttttttgtttgtgtgtcgtttattgtttacaataatgatttgtaggatgactctacttttggggcctccaagtgctgggaaaacaactttgctgaaggcaattgcagggaaacttgatcaaaatttaagggtgtgtttggtttttcccattagtatcatctttcataattttttttaagtgtgttttttcagtaactatatagttttgtatcttaatcaggtatctgggaaagtgacctattgtggacatgaattcaatgaatttgttccacaaagaacatgtgcttacattagtcaacatgaccttcactttggagagatgacagtaagagagacactcgatttttcggggcggtttttaggtgttggttcgaggtatgaaatactagaacaactttccaaaagggaaaaagaagcaggaattgagccagatattgagattgacacattcatgaaggccacagctgtgtcaggccaagagactagtttaattacagattatattctcaaggctagcctttattatctaaaaatttaatattgattacatctttgttatcgttgtttacttatttagaaacttttttgacaaaaatatttaccaaaacagattcttggattggagatttgtgctgataccatagttggtgatgtaatgagaagaggtatctctggtggtcagaaaaagcgagtgacaataggtatgttaattcagcaaaaactaatatatgaaattaattagtataattgtcttagctaataatattatgagttgataacaggagagatgttggtaggaccagccaaggtttttgcaatggatgaaatttcaactggactagacagtaccaccacttatcaaatatgtaactacatgagacaaatggttcatatttcagatttaacaatggtcatctctcttctacagccagcaccagagacatatgagctttttgatgacattatattactttcagaaggtcaagtagtgtaccaaggtccaagagagaatgtactagagttttttgagtacatgggattcaaatgcccggataggaaaggagttgctgattttctccaagaagtaacttccaagaaagatcaagagcagtactggttcaaaactgagcaaccatacatattcatttcggtttctgagttctcagactcctttaagtctttccatattggacaacaactcttaaatgatcttaaggtcccatatgataagtctaaagcaccaaaaactgcattaacaacaaacaagtatggaatatcaaattgggaacttttcaaagcttgtttttcaagagaatggttgttaatgaagcataattattttatttacgcattcaagattgcgcagataacaatcatgtcgattattgctttgactgtgttctttaggactgaaatgccagttggtactttacaagatggagaaaagtttcttggaacactctattttagtctacttaatgtaatgtttaatgggttggtggagatggcattaactgttatgagacttcctgttttttataagcaaagggatttcttattttaccctgcttgggcatttgccttacctattttggttctaaggattcctctgtcatttgtagaatcagcagtttggatcattctaacatactacacaataggatatgccccagatgctagcaggtactaatttagattcaactgatatcatgtttttttactaatactattataatttggagactgatacagtgtgttgcttcagatttttcaaacagttcttggtactctttgccatacatcacacagctttatcactctttcgctttgttgcttcaatcggaagaacacaaattgtctcaaacacacttggaatttttacatttttaatccttgtgcttctaggagggattattattgacaaaagttagtaacttaaaactctagtatttaagctataatattttttaaaaaaaattattcataacattttgatctctaacaattttctctccttcctcatttatgctatagatgatcttgagccatggatatcatggggctactacatttctatcataacttatggactaaatgccatagtcataaatgaatttcttgatgacagatggagtgtggtaagatctaaacatcagtgacacttgatatcattcattgcatgtgtgaaaattttgtttaagaacaggtttcattcttaaaatgaagtattttagctaattcatgtatgaattaggcatctaattgtgttctttatactttcttatagccaaatcaagatcccaaaattagtgagcttacagttgggaaagccatccttaaggccagaggcatgcctgctgaagaaaatgaattttgggtttgcattggagcactttttggattttctcttcttttcaacatcttagtaattgcagctttgacttatctaaatcgtaagctattttaagaaccattttctaactataggtttcatattatggtagtgattttaccaagttaacaaaatcttttgtaatatatcagc

SEQ ID NO: 20146 - DNA, 4032 bp, Cannabis sativa
tcgataccagcttgacatgagatctttcgatgatctatcggacgatggagaagtatatgaagattctgattaagggtcaactttcaaatattgcaggatagtggtgtgagatcctcatgcaggtctctttctctgttagtgttaggtaccttggatctttgatgccagttttattactttattagtatactagggaactactagtttttcacaataattataatcttttaaggttgctatagtttatgaataatcaattatttgtatatgtgagaatttctcaaataaatatttatgacatatttccaaggtactcatttcatggaattttggcaaaataatatagtttataattttttttactgtacgcatacttttcatttataagaaggtacatacaatttatttttattggaattgaaaaaagaaaaaagcaaaaaaataaaaacatgtaattacttatttttataattaatttaaggggctttttcatttttacactttaaaccagtgttttttttgtatttttacggaattctacgtagaaatccctattgcaactagcgctgcaacctaaattgtaacaaaaaatcgtacagaaacctctattgcaactagcgttgcaaccattctagaaattcaaaccgtaaatttgaagaaaaaaaaaaaaagttaaaaaatagtatatgagataattactcttaatttaatttaattttagtttttgattttttttttcagtaattacaacatctattttttttaaaaaaaaaaatctataaataaaaaatggaacgattttatcattgagggcaaaagtagtgcccctactatttatttgatttcgaaaattaaggagctgtttaagacaacaaacattcgttcaattagcttgtgtaatgtgatgtataagattgtcattaagacgatgactaattgtttgcgtaatgttttggggatatcattttggaagaacaaagtacctttatatatgataaatgcttatgaccgtattgaatgtactttcatttgtggtatgatgagaagttgtattatattgtatatatttggttcgttactcgttaatgtgaatgggaaggtggtgggtaattttactctatcttgtggtcttcttgagagagatctaatttctcctttcttgtttttgatatgtgcggagggtctttctgtgcttattaaacatgaatgcaggttcaagactcttaagggccttacgtgtgggagaaggggattggtgatatcccatttatcgttcgccgatgatagtttatttttcttgaaagcttcaagagataggtgtctgaggttaaagtaaatttagcttgtcatgagaaatatcttggacttccttgttttgtgggaaaaagtaaatttagcttgtttcaatttatcaaagataaggtttggaataaggtttgaaataattttttataatttttaaataataatattaggtggaccaatataaatgtgacacgtgtataagagtgtacacataaacagtttatattaacaataaactataaaaaaaatagatgacactttaaatttattaacaatttagtttaaagtgttttataatgaaaatttgagtttagagaaaaaaataattttataataatttttattttactaaatctttaaattttgttaaatacaatattatcaaaacaccaatcaggtttggaaaagagtccaaaatagtatttattttgtattttttaatgttgaaaataagagagaagggtaaattgggtatttggtaagccaaagacttttgcttagtgtactttgctcttcgctggttttgaggactagggcttaagcggtagctggacgaagaagaagaagaagaagctctgtcaatgggtgcaagcagcgatccgactcaagatgggtccgacgagcagcaaaaacgttcagagatctacacatacgaagctccatggcacatctacgccatgaactggagtgtccgccgcgacaaaaagtaccgactcgcaatcgcaagccttctggaacaacacccaaacaaagtcgaaatcgttcagcttgacgactccaatggcgagatccgctccgatccatctctctccttcgaacacccataccctccaacaaaaacaatcttcattccagacaaggagtgccaaaaacccgacctcctagccacatcaagcgatttcctccgagtatggcgaatctccgatcaagattccggtgtcgagctcaaatctcttctcaacggaaacaagaacagcgaattctgcggtccgcttacttccttcgattggaacgaagccgaacccaaacgaatcggaacttcaagcatagatacgacttgtacgatttgggatatcgaacgtgaagctgtggatactcagttaatcgctcacgataaagaggtttacgatatagcttggggtggagttggtgttttcgcctcagtctccgccgatggatcggtaagagtttttgatcttcgcgataaagaacattccacgattatatacgagagttctgagccagatactcctctggttcgactcggttggaataagcaagaccctaggtatatggctactataataatggatagtgctaaggttgttgttcttgatattcgtttccctactcttcccgtggttgagttacagagacaccaagctagtgtgaacgccattgcttgggctccacatagctcttgtcatatatgtactgcaggggatgattctcaggctttgatttgggatctttcttcaatgggtcagcctgttgaaggtggattggatccaatccttgcttatactgctggtgctgagattgaacagttacagtggtcttcttcacagcctgattgggttgccattgctttctctagtaagcttcaaatattgagggtatgaatgatgaaagtaaagaaaaaaaaaacaaatctttctttctttctctttctctttgagtttgattattgatatgatgaaaaatagcaaagaagggtcgatgatgatcactgaaagctaaagagaaagcttcttctcagctagatgatgatgatgatgatggagaagaagaagatgatgaagaagaagaaggttactactattactaacatttctttatctcttgtttcttgttttttttttttttttactaattacctcataattcattccttattttgtctcatacattgtgttccttagtttgataattcatgttcattgtaaccattgaaactatatgtaaaatagatacattttaactttaggggaattcaattagctcgaatggtcagatatgtgttagttatgaagaatgcaattagaatgatagtagtactaatactagaccgatagctcggatggtcagacatgtgggtatttgaatttcgagcctccgaatattgtagggttcgggtacgaagctccgaaaaaaatgtgttagagatggagttgagtttaggggttagtttttagtaatcattaggtgagttaagagtggttgatttttggatttggaggagaaattgaagagtgcttgtgttggttcaagtgaaaactatgttttgtgatgtacaagtactaatgaatgaattaatatctttttactgtctaatttactttctactaaaccaagtattaaaacaaaagacttacatattatatcatgacaaatgtgggtatagattaaggcctgccaagaggataaaataatctcaagtcttaaaaaaatcatcacttacaacaagttttgagtcgtaatttgagacttgccatttgacaataatagtatatgttaatgttacaccaattctcttttgcaagattttgtataaattacaaactattattgtttgaatgttaactaaaagaaccaattccaaaacagcagcagatgcacacaatgggaagtatccctatccaagaatgactaacgatttgtgagaatattagggtttgtttttctttcagaagtttggtatgatattgcctacctttcaacaccgaa

SEQ ID NO: 20147 - DNA, 4157 bp, Cannabis sativa
tacaaatctcaggtcttggcctgtaggattcaagtctttcgttggttattatattggaagtaaaatcattggacgaactttagtccaaacaaaagaaactatcattgaacgaactgtacgctgatgacttttttattgtatttttactgcagaagctgaccgaggcagcctggaaaatttctcttcgttacatttatttatgcacaaatgaatgaaggtggtaccatttagcttgtacgtcatttccactcgaatatcatatgaaatgattgcttgtgtataataattattccagacgtttctggttcaaaccttcataagcaacagtaaaataaacatttgcttgtctatttgttcagactagttcagtttttcttcttgtttaattgtttcttctttttcttttttttttttttttgaaaagaaattcatttctggttaagaaatgcagagacaaagtcacatagatctcgtaaagagatgaccacaaaaacagcaaaaccaccccgagaaagaagatgagcataagctcaagacccataacggaaaacactagagataaacccgacaaaacaaccgaaagccaacatcacatagggcaagggaccattattacaacgcagctaaaagaactaaacaaaagaacgaaacccccagcaagtcgatcctcctttaaacgaagctaggctaaaggacagtcataacattagggttcagccaaaaaaggagcaggacgagagatgtaacaatcttgtttgattgtttgtgttgttcatttacagttttcgacttatgttttgctgctacacatttttttttacatattttccttatgacaacatagcaaactaactagcaaaagcagagagttgtgatactaatcaataattggataaaagatatatttctgtttatttaacagcacttcttcatttcagttttgcttattaatttatacaaaccattgtaaattaaaaataaaaataacgacaattctgctattcaaattagggcctgccaacagagctcatgaataaaaacgagaacaaaggaattcaaattaagaatctcacaacaatccaaataactaatcattctctgaagtttgatttgaaatgacaaattaaactgtaatgtttgaaaaatcactcatagatttcccaaagttccttcacttcgactcctgcgcattgaaagatcggatttgacattcattagtttgctgccaatatcaatataattatgccgattagttgttactttagtccccattggaggcagccggctgtgtctaccctttgaacgttttggagacactgctgctgcttgacttccacggacaagtgctgaagaagagggaggcctctgagcggttagaacactgcctttccttgttttatgatctggtctgagaccacggtcaaactggtgggagctagttcctagccgaactgatctctctgcagaatcctttaaagtgttggctttgattgtttgcctgttgaagtaagccaaatggggaagaaggccttgaagatgtttcttcagctggtcatctccaacattcttctgtgctgggttcccttccaagctgatggcttgcagggaactatagttggcagcaagttgaccaagacatttggctgtagagattttattgaaacgtaaatccagcacagttaattttaggagacggtgaagaccctccacttcactgattctgtttccagctaggtacaactccttcagggaggaacaagaagccaagccttcaaattcaaggattgattggagaagattagtgaaaaaaaaaactaaacttggtttccaaagctactagattttgacaatttccaaaaggggaaaaaaaaaactaaactaagaaaacaaatgaagtaaaaaaatgttcagcaactctcaaggttatgaatattatgatcaaactacatcataccatgtccgattctgaaaattcggttgtagctcaggtccaacacccgaagtctggtgagttcacgcaaaccctcaattgtggaaatattgttcttcgatagattcaacatatgaagtcctcgaggaagagcaccagcagttattctcactgaaccaggaggcaaacagaataataatcagaatgttaaaacggaaaaataaatcattttcacaaattaccatacagcataagcatgctgaatatttcagaaattaaatgaagaaatagatcaaacctattgagtttcctgacagattgagcaccctcaggcttaagaatgcactcagaaatgggatcacaaccaatccatggtttgccaggtgagctgtagtggtggctgccgtcaaagaagatatatatcttttagccacttccatgccaggagtgagtttgtcttccaccttcaccaaaccatcaaaattactggaatctcccttcatgtgatcatcagactggagtaattcatttgtttcctctagaggactgcagtgttgaagatcattaacccagtcctcaatacgcttaatcttaaaatctctgttgggcaattcatcccactggtgaagtgaggatcctcctgggatgcttttcgctgaatcaaccttgttcatcactggcataatccagtctttagctataccagaataattgcaagaatcataattatcatcaacataattttcagaagggctttcagtgttatgattagtatctcctacttttctttgcactgaatgtttttctgcgtcatgaattgaaatatctctccatctcatgtcaagaccatgtaaatcttcaaaagatttcgaacgtacacctaaatgcgtacaccttgcagaaactggtgaacaaacactgagatttggtaaagaaaatgatttcgcaatcctgtgtggagtacgcagagcctggtcactgccctcaccagcacattcaccagatagctgagtatcagagttctcctggccttccttttctgaatctggtggtcccccaattgagtaaatggattcattatcatcagcaacattacaacttacttgaaaactctctaagtttggagctttttgatgctgatcgggcaggctttgttcttgatcttggtcttcacttccatatcctaaggccaacccaatggcttctggggatccatcacaggaaaatcctagatcagtctcattttcaattagactgtttgtagaaaccatcccctctctgtacaagccactctgcatagattgacttttcttaaggtgtccatgcttaggaattagtacctcgccttcaacagtaaactcgttcttcatgtcctttgacttccaaccacgctcagaagaagaaacatgcttaatgtcactagtaacactggaatctgcatgagagttcaataataaggagcttggtttgttcggaagaacctctggcaaacgactatgagaacaatctgacaatgtcttgtggaaagcttcagatgaagattcaatagttttctgaatgaacacaaagacaagtatacagaatcaatgagccatagataatctactgatgctgaggttcagcagaaatgagtaattaatttaccttaggtctgtcggagtgcacgtgagcattgaaacatgaaaaccttaccattgtggcaataccacagctgcttcctcaggcagcctaccttaattttttacatgaaaacaaaattttcttctataaaagtatacttcttaattcttattaatgtatggaagcttgaaataaatacttattttgttgaatagtggagcaaaccatagtcaagcttccggaaaactcagcaagatgtgtcattagccatagtccaatgataaaccctcagaaacacgacacaatctccaaatacttgatgatattgatcttctaagaacacaaagcaaaatcactctctcattgtcaccccacaccctcttacaggtgcgagaaggatttgattttgttgcagctgccagagtgagaaaatctttatgccaaataggagaacacaaatcaaatcatgcataagagtgataacctgattacaaaaaagagagggaaaaatgcatcatcaacgacctgactgtttgtctaaacatacagagaaatcataaaaaattgtaagtagacaaatgagaatcataaagactgggcagtagta

SEQ ID NO: 20148 - DNA, 4813 bp, Cannabis sativa
tgttcggagttgccactaaacttgcttttctttctattaccttgcatgttgccattatttgacctttttctaccttagttcgagctgctatgattttgtgaattttggtctggctggacagatgtattggctatagtggtgtgttgttgatttttcttttgtccagctgtgtccacacgctgaaatgcttctttgagctttataaatccatctacccggtcaaagaattcagccattgaccccacaataagtcttttaatgtctttccattattcccctaggggttcaatacctcctagattgcggccaaccttccttcctcagtcacttctttcacctttgtagcttaagtcatagatctactgatgctagctctaaagggttctcctggtatttgcttcacttctactaggtcctccaagtgagatggtagtttccaagaagaggagaactatgcatgaaatttttacatgaaagagttccacgaattaaacttccccgtagctaatttgaagtaccactgctaggcggccttcgctaaagtagctaggaagattttgcaccgtagattacctctcaccgcttgtaagtccgtttacatttcaaagtatttaatgtgagacaatgaatcttctttgcctgtatatattttccatgttggcattttgaatttaggcactaggttgagagcattgatttatggtgagaatggcaattctctagtctggtcaagttccaaatctatgagttttgggccagtcaggccttgacgaggctcttaagatgatctatttgtgcttgcactaatggatcaacttgacctgcctgttgcctgacatgaggatctctttgaactgggtctggtacatagttatttgtataaactgtacagtagaaggaatatcatgtctgtccaatcctctactgcaattcaaatcatttttgaggtcatgcatggtacttaatcaatcaaatactgatgtcctgaaaggcctttgtgtttaactgttttgagcaaagggttggcctgatatctctgtttgagtatgagtattaaactgatcattccctcccaagggacgggttggtaaaattttcccatctaccaattggtcccattttgaacttgtgtccttgtattggatggtccacctacttgggtttgttggtggtgtttagccaaacgctcttctgacccattctgtggccccgtggatatattagcatccgtcactggttgttggcagctgacctgatagactcttctaattagtacggtggcctgcctggaacgattatcaattgctgcttgctgggctctcatgatattcatctcttgatccatccactattcaaactggcatctttgtttatcaaaagcaaaattatagctgcttggatatcttggtagttatagtgaagagtgttattgtggccttgcactagccccaatgcatctcacaaattctgtagttcggtgtatctctgactggcctttgagaatttgtggtggatgggatccaagttccaggaatagtctactcagttgcagtactggtatttccagtttcttacacgcctggagtgaacccagccagaggggtagtcaccccttgacctacagtttgtggacttgttggtggctgagaattaatttgagtgggggccatcctgggtggatctcttaggtttgcaggtgtctgcacgctcggatccatcaccatttgatcagttgtatcagtctgatttccccttcgtgtttgcacaaccatcttatgtcttgaaaaagacttaaaaaaaacttgtgtttttgctctcaatgaaagcaccaaaatattggtcacgcttttagccaacgatagtgagtcaaaataaagcttttgagaataattaaataacgaaaaataaattatttaaagtaaagaaaatattagatttatagaggttcgaccctataggttggtaatagcctactcttctttttgttgtattaacttgtgaccaagaataacttattctctctcaaaagctcttacaatgatctctgagcaatttactcttagatcgtgatttttctcttgagtgttctctgttgaaatatttttcatgtccttgcatagtaagatgaatccactatttatagggattaattacatgaaattggtttctctaaatcaatgagaaataaaataggaaactactttattttcacagttgcaatgaagaaaataaaaaacttaggctgattgcctttattctctgaagataggaatctatcccattattaatgtagggattgtaccgtgattcgcaagcttagagatatacgagatacatcttaaaacttactaactcgcattctcttgccggtgcatgcgacctacctacttagtgaagctagtcggatgtctatccatgatctgctcagacatcctactatatgtatgtgtgactttgagcatcgtaacaatttgtacgacctactaggagtggaatcatatgcctagattatgaaatatgttacacatgtcacctagataaatgccacgtcatagtgtagaaatttagataacaatattattaataaaaagaaaattggttcagttttaatttaattttaattttattatatatatatattatatttcattctaaaattttcaaaaataaaaaagcttttgtcggcgaagttaattgcaccgacaaaaaaaatatatcttttgaaaaaactgataaattcttttgccggaaaaataatgcatcggcaaaactttggcgagaaattaaaaagggcgctaatgttttaccaacgacttacttcattggaaaaactcgtcgaaaaactcttcaactgaccaagaaatggcagcggtgggatctacgcccgtgatcaaactcgctggtacaacttctattgccgatgaaagtacttatttcattggcaaaaactcttttcctgaccagttattgccagtaggttttgccgacgagtttcttcgtcggcaaaaagctcccgacgagttgtgccttttcatcatcagtaaaaatcaaaattcttgtagtgtcttcttctttccacaataattattttttaaaatattaattatatatttataattttcaaaagatatataaataaatgtaaattatattaattatttttgcaagtaaattaatattcgatatccacacaagtatgaattttaaatttgttaattcatttcgtagtgtaaatataaattaaattagattacacataaattaaattagatttaatattttatgaacaagccttttaactaagtaattaatgttgtaaaatgtataattaattaatagggataatgcggcgaaagaccccaaaaacttgaggttgatgccgattagtcctcaacctcaaaaatttgcggtgaaaacacctaaggtcgacaaagttgtttgtccgttcatacttagtgcgttagtataactaacatgacacgtggacacaccatatttaattccccttttctttttaattttctctgaaatataaaactaataaataaaataaattaatagaaccttaaaaaacataaataaaacaaatttaaaacaaaataattaaactgtttttattaaaacaaaaggaataacaaagaaacaaaataaagtttcataatttatttcagaaagcaaaacacgaaatcgaaccattatccacacccaaaaccctaatcacgaaatcgaacctaaatccctcaaaatcaaagacgaaaactgtgtatgcattaaaatccagtcgattttgtgaatatggaccccttttgatcctcattcctaagctaaatccctaaatgttgaagatagagcagtagaggtccctaaaaaccagtcgtatgatggaggacgacgatggtgaaggtacaatctgatttctcatttccttgcttattcatagtttattatgtaatttgagtgaataaaaattgttaacaatatattttttctctatgtttttactgaaaaaattgtttttaagttttactgtgtattttttttttcatttcccattcactgtatgaaaaaagtttgttcagatggcagtttgatatttatatagggttgaatataatatgttaggtatacacatttatttgatctatattgtttttgttgggacatgataaagtcggtattaaattatttttcaatgttgtgtagggtataggttttgactagttagcatgtgagcatctttgcacatagttttaggctttatgtcatcaactttattgtaaatttttgttggtttgttgctggcaagtttgtattttagtgtgaatatgcaccatgggggttcttggtgcactaaaaatgggttgaaacactgtgtgggtggcactataaccgagtttgataagtgccatacagatatgttcaacatgatggaacttgaagggaagcttttgcaagttcagtggtttcatggttcccctctttatttctggtttaaggctaaagacaaagaactcaatgatggatttgagcttaagactgacaagaatttgttggctatgttcgaggacacgagacaaaagagatataggaaggtggatgtttatgctgatttatctggaacttttggaggaaacaatgctgaattagcagttgtgactgttgatgcaaatgtgattgttgataatacaccacctgctagaactaagctgagaagatgcataatagaggagctactaaatgatgcaaatgtgactgttgatgctcgagtaagtgccagaccagatgactatgttatgtgttgggttttatgccc

SEQ ID NO: 20149 - DNA, 5708 bp, Cannabis sativa
gcttagctatggagttctttcactagaaaacaagatacaccttgttgatacaagtagtaccaatcaattcatttaagctcttttcaactgtatagtctcatacctacggagcctcagaatcatcatactcaaccttcctcaagagatgtgggattgcacaacttacccaatattttcctttatggatcacggtactactgactgtcacactctcagtttcctaaaaacataaagaaaaaaaaaacaaaaagcttcatctctctccaagatctcaatcccaatccctttgacatctcctcttttttctttttcttaattggtttttttgggatagttcgatgggtcgagaaagaaagtggagatgaagggatagtactggttgacagtaagcctcctccaccaagaagagtgcgtggcaaatcgtaaaagtttgtaaaatttttttcttacaataagattttttactctttaataaaggaaaaaaaaaaaaggttattaaagtttttaatcatttttttatgacgtggaccaataaaattttgacacttggtaattttaagaactacaaaccaatcagttaaattatctgcatcaaagtaaactttgtagggacttatgtcgtaatataatatcaacacgtgacattttcggaacaactaaagaatctatcaaaataagaaccaacagactaacaagaatctcaagtttggagaaaattatcactattttccaaggctaaaaatttatctacatcaaaataatttttttagaaatttttaccgcaattttccatcatttaaatgttattaccatagttttggaaattacttgagtatattcttatttttgggctgtaagtgaagtactttttttttgttaagtgtcaaattattagccatttaagtccttcccacattaccttgagagaaaaaaaaaacattaatttccaatatcatattaaattttggaaaaattgtattgacgcactttttatctgttttgacattttgaagaattttttagtccaacttttttataattatgtacattatagttaattaagatatcttgtaaaattttgataaatttaaaaaaatttaatacaccgaaaataaggtttaaacagcttgttgcatgtgtgacttttttattttatacgcttgtaaaataaattgtttgaatactgctttctatattataaattattttgaatttctcaaaattttgaaaaatatttcaaataattataacatacacaactataaactaatttttttttctcatgccaaaatagcaaaagagacacatcagtatatcttttttggaaggtgcattgtaaaagcacttaattttgtgagaaaattacaattacaatatgccaaaataaatttataagtttatttaacataaaagagtatagacgtatctgattataggatatttggtctgatcatcatctttttattttaaaattaattattttatcaaaagtaaccaattggtatcttatcgaaatcataattaattggtccaaaaaatatgtcttatttataatgatttaaaagttaattgtaacttgattctttatttaactattcaaaatgcatatattaatttatatttaaaaaatatgagtgacataaacattcatgatatatattttcttgaaatacagtttactaaaatgatagcttattggatattgataacaactcattatttttgaaaataaacctgaaagttactcaaatgtattaatgtaacctaaacaattaatgattattaaagtgtatacacgtaagttttagagataactaaaatgtatctcacattatataatataaaagtgatactttttttttttataaaaaagttacttattggtttcttatcaacatcataagtaatcaaaagattacttttgaaacgcaggaaaattaaaaaaaaaatcagaattagtttcatttcaagcatattattttagaattaaggtattttttaatgacgtggcaagatattattgtaattgagatttgttaagttattttttgtaattattttatattttatatatatttttaaattaaatcctttttaatatgtgtaccacatatatatatatattttatatctaacttatgttagcttaaaataatcaatatgggctcatatatattggtatattattatttgaattttgattcacatcaagtgattatttttgtaattgtaggtcataagtattaaagtgtcatagactaaatgggtagataccttaagcgataattctactgtattgagaggctaaattataaatacttaaaattaataatctagctatgaggttatatactagtagtaattcccaagaagtaatagccaactctattctcatcttttcctattaagagaaaaaattagagaaccctaaatcttgtattcttggaatatcattacctaaagattctagtttatttagatcatcaccaataataaattaaggtaagcttctgctattcatgttcttattctttttgaattataagggttatttttaaatttatgtttatacacttataatatatatgtaatatttttatttatagaatggaatcttattataacatattttataagtaataaaatttctacaatttattctctttcttctttaattataaaaaaggataatagtcatattgctaatcagttgggattgaacttaataccattgcaacctactccctagatgatcatttaaaaatgtgggaacacatattatttcatcaatctagatttaaagtaaccatctaattgcttacgataattgattgctgattaattacctttcaacaaactttattttagccaacaattcaagtttattttttgagtaatttgtggaataaatatctaagtttaactctcagttacaaataaatacttaagtttaaattttggctgcaataatacctaagttatatttttagaactttccaggtacttaattgttaaatgttatgtaaattgccacatgacaatctttgattggtccagattatgaatttttattttttataaattaaattaatttcaatatactaataaaaaaattgacacgtggatgatgacttgacatttaactgctaggtacttacagaattctaaaaatatgacttaggtattatcaccgccataaattaaacttaggtatttatttgcaactacgagttaaactaaagtatttatgccgcaaattaatctttattttttaacaaaagttgattgatttatgctacacataaaaagtaattttatagttgcttttgatttattatttgttataaattataagtaattttaagtttctttttttgtttagtaaatcaaaatatctttatatataatttacttgtcaacttgattttttttttttttgttaaatcagagaattgtattgctcaaaaataatctttacaaactaatagcaccccatatttagggcctatttaatatctatacatttttccttttgcattgtatgtttacacttataaggcttgaaaccatactctatctacatgcttgatttttttttttagtaaaaacatagtaattcttagttttaagttccctttgaattcttccaagagactgctggaggataattgttcatcttttcatatgatggcatttctagttttccaaatgctgtaaaccatagaagcaacagctgctaccagcacttgcttcttaaagttgcttatctttgccttgcctatccatctgaccagttggggaagattgttattccttgcattccatggcagccagcttttaatctcatgaagacaatgatcagcaaatctgcattcaaagaacaagtgctaaccattttctttctgctctttacataggctgtaaatctcatccatttggataccaaatttaaccaatctattcttggtttttgttaagcattgccaaccatagtatgaaactatgcttaggagtatttaaacttgcccaaatctcatgactccattgtaacctattttgagaaggacaaagcaatttatatcctactattatagaatatctttgcacatgaaaaacagcaacatcactttcatcttgatcttgtctacttcactccttagctttcctatgatcagtatatcatcaacatataagagtagatatacatgatcattgtagtacacacagggatcatacttgcttttactaaaaccaattcgaatcatgaactcatcaaatcttagattccattgtcttggtacttgcttgagaccatatagcgactttttaagtagacagaccttgccttctgagttttctacttccaggccttcaggaattgtcatgtaaatttcttcatctaacataccttgcaagaaggttgttttgacatccatttgatccacctcatagtcaaattttgcagccagagccatcatgatcctaattgatgtttgtttaacaacaggggagaagatatcattgtaatatatacctctttttgactgaattcctttgctacaagctttgccttgtatctaaccttgccagttccattatcactttctttctccctaaatatccacttgcagcctatgactctttgccctttaggtcttttcaccacaatccatgttttgttcttgatcagtgagtccatttcttcattgatttccattaaccatttctctctaaccttgctctaaatttcttctgtatagctgatggggtctgcattctcaatctcttctgcaaaagcaaaggcaaaagctgtgcattctgatgcaaagtaatctgcataaccaagtctgtcagaagcctttgtttgtcttctttctctatcccttgcaagttgataacttcttagattctcttgagtggcatgtgtttcatcatcagattcaatctgagcttctcctgtttttggtagaggtgcttcatgtgtgtcagtttcttgactagtttcattgtgatccacctgaacttgtaccctagcattcatgattgagttctgtccaggtttcattaccatttcattctccttgaataccacatctctgctgataatacatttcttataaccatcctctaaacaccatagtttatagcctttcacaccatcaagataaccaaggaacaaacatttcaaggccctaggttctagtttgtcttgtctaacatgatcataggcaagacatccaaaaacctttaagtgatcatagttaggcttggttctagtccaaacctcttgaggtgttatgaaatttagtgcaacagaaggacatctgttgattaaataacatgttgttttcacagcttcaccccaaaaatgtttatgtaatcctacacccttcaacatacatctaactctttcaagaatggttctattcattctctcagccaaaccattatgttaaggtgttttgattactgatttgtgtcttttgatcccagtcttggcacagtaatccttgaattcatctgagcaatactccagtccattatctatcctcaacacctttagttttcttcctgtttggttttccatgagcttcctccaattgttgaatgtttcaagagcctgattcttgtttctcaacatgaaaacccaaacttttctactaaagtcatcaatgatactcatgaagtagttagtgttgggttttgtg

SEQ ID NO: 20150 - DNA, 5129 bp, Cannabis sativa
  modified_base (3249)..(3251): a, c, t, g, unknown or other
atttttttaaacagtttttttttaatcaatcttttggattacaatcagaccgaacccaaatcccctcctcacggccttggcgctgaacccgacttttgacccgaacccgaatccaattccgaatcttgatccgacttaaataaaattaaaaaataaaaaatgaaaatgaactttacagaacacatttttgttttatgtttttaaaattgaaaaacaaaagtggttagagagcacattttttgttttttaaaaacaaaaattttactaaaaagtgttaccaaacggcacttaagtttttaaagtttatatttaaattaagtaaaagaatatatatagagaaaatgatatagaatataataggaagatgtattgtatatatatcttagataagataaaagaaaattaagaatttaatgatatattttaaaaaatagagtaacataaaaattaatatgagtattctttcgtacacttgtgatacttgtaaagttgtaagatgacaaacagcataagaaaactaacatataaaaaaaaaaattaataaatactcttgcttccactcgtacgcaaatgtcttagaaactgataatttaggtaatgtttgatgtagtattatttttgttggtttcattttcacatttcagtgtaaaccgattatattccattttatattttgtactcaaccccaaataagtttaagtcggcctacataaacacttaacttcccgtagcttaaaaaagaaagaaagacaacatattttggatacatcccatgaacgaaccagaaaaagaaatgagagtaggtagtaggtaattaaaggaagtcgaggcttattattacaagtaccaaatcaatccacagaaaatctgattttggcagctctgaaatctgtatttattgctgaggtgagaggacttgttacttgtttccatccattccacccaatacaatacaatacatattagatattgtaggcaggcaatagggcctttgtgaaggccattgagttgagtttagtagtttattaactcaaagcccaaatgggtatagagtagttgataaagggctgcacatggagcaggcctagtaagggccagacacccttctgcggcacgatgtctgctcataagacttttaggccgtagacgccgccgagtatatcgcccaccgaatcaactccatcatcatacctcactattttcttcaactcataccatgtgtaggtcccactcccactccacacacactctgcttacccattctattactaatttttttctatccatatcatctctactatctatctatctatctatctacctccaatctcctctcacgtgcttctcgcgtgataccaaccaacctttgcaattgctaattgtaattactgggtaaaatctcttattaatattaaccactccaaggttaaggttaataaaaagtcttacttgtgtaattgttatgtatatttttattttgtagtcaactgtaagataaagttatcaatcgtttcccactaataaaatactaaagttgggagaatcactaccattccataagattttagaacttatttatctgcaattaatatagtttgaatagatcttttttccttcttaaacgcgaatagatatggctttatatgttcatttattatatttgcataataatttgtacaggggtataattataccttgttttacttgccactattgtcaatgatcaatactaataaaattggcattcatttaattacgaacgtaagtacctactcaaattaagattattcttttgtgcattttatagaatataacgttcaacctataatgtacagtgtacactactgttatagaatatatgtttaggatgcttttagatgaaaccctaattactcacctaattttaaaaggaaaatttaaatttatatgtatatatttggtgtatattaaatttttgaatacaagcttattaaaattaaaaaaatagacatattttatattcatacccattatacttttctctcttgtcttctcttctatcttcactattcatgctctctattcttatctatattgatggtggtccgataagagtctgatagtggtccgatggtagcctgatactactttttttttttaatgttttggtacataaaaaaataacatcatgccaccatcggaccatattttactttatagatgttaagctacattcattaagctcgtcaggaaggtatcgggccactattagactactatcggactaccatcggaccatatcatcaggctaccatcgaaccaccatcggacattcgtcttcaacctttactcatttttactataagaaggcatcaaactaccattggatcaccatcggacttgacaaaaaaactagttttttgcccaaaactcatatctacccattttcgaccctaaatctaacatctactcacagataacaaacattaatcatacaatttattcttttgacaacattgttgatgatgaagtcgtggttgatggagaagtcgttgggttcacggtggtcattgggtccttgggtctgtggtcgtggagaaaagggaccaatgttatgggtggtgggttgtgtgtcaagtccttgagtgagtttagagagcgagtgaaataagggagaaagagagagggttaggtgtttgaaatgagaagggtaaatttgtgttttataaaatattagcccattctactataatatgggttaacttaaatttaaataaataattttaatttaataaaggcataaaaaaaatcaaatttcttttttaaaatacaataatgtcacatatattttaattttgatttttatgtttggcaaatgaattaatacttacatagtatattatcattaattatctaaagattagtaatattgtgtaattacatacaccatgcttgaaaaattacaatgaaattagaattggatgtaatgaaaggtaataatataattttgtatttatttgatcacataattagactgtaacaattaaaatataagagatctcaattatactcttcctattgagattgttggatttaaggacttttgttcaattttagtaaaaaagtctaacatggataaaagttcagggcgcatgatttagtacatttcaaagttcgagagccatgatttgatatatatcaaagtctggggagcatagtttagtacataaacaatcactgaaatagtaagattgaatgaaattagacaannntccttaaatctaacaatctcagtagttcaggggtatttttgacgaccttaaaagttcaggggtcatgatttggtacatgtcaaaattcagggagtaaaaatcataattagccaaacttttaatacacaattttattattaactttgatgacacttttattattttgtaaatacattaactacaacattaatcataaattatttatattattttttttttatttttttacataataaaacaataataataaattagttattatttctttctttacaattttaataaaaatattaaattttatattaaacattacaactatatattaaagtaaaatattaaaaattgatatatgggaaaaaaaaatatatattgtgctagcacaatttttgcatgaaatgatccaactaaattttagggagtgtatgcacttgcacaccctttattttttaaggattttttttagtatcgatcttatataataggacgaacatatattgacaaacacattaagtatgaacagattttttgctcatgagcattaagtatgaatatatttccttttcaaaaaaagaaagtatacatgaatagattgattgcatatgcaggcattaatattctgttctccctgacactatcgttgtttattattatagataaatttgaatagtaaaagacaaattatctagtgaatatatactgaatggtgataataattaactttaatatttagggatcatgtttgtatatatatacgtgtatatttccacccctgcatgcatgtttactagtctgttaaaagttaaaacaattgttatctatatgtttactaaagaaaaataaaaatgaaataactatacattcaagcaaatagcaaggaaattatattaataggcaaattaatgaatgaagatattaataagtgatttaactgttacatcaatatacacctataaatagtagtactaataaaaacagctcatagcccatgattggcatagtggatctaaagctttactagaaggcatctcctcgtaatcgtattaatcaaataattaatttatgtggctaatgaaattcaataaaatgactatcaattattaaggaaattaaattagtggcttttaattgccataatagtattatagtacaaatacaaagacttattattacaaagcatttaaaaaaagatggagtgctctacactcatatatacagtaagaccataatatatatatgaagatgatcacgaagaagagtttaggtagacttgggcagtgtatagtacagtattagcaatagtatgattaatttgattagatttagatttgagatttttgggctgataaagtggttaaataaattaattaaattaaatttaatagctttggagagccgcgattgaggataagccccgctaacgctattgctaacccgtaattgtccctatgagtccattacatcacgcacccaccatcccatcaccattctcatatgtgtcacacgtgtcatatcaaagtcatgtcatctatgtaagtatatagaattactatacatgtatatttgtatagataataatacaattacaattggcagcgtggtaatgatgacgtagcataataaattattaattttaaatgatttttgtttatggggaaaaaataataataatattttatcagctttaagaaattaaaaccgagacgcatgcaagaacctcatcatggtgtccttctctgcccccacgcaaaaaccctcttcactctctctcatgccttttgtatttttaaagctgctgattcgcgcatggtcttcctttaatgcccttctaactccactcttttaccatctttcacctaccctttactggatacgttactc

SEQ ID NO: 20151 - DNA, 7141 bp, Cannabis sativa
catgtcacacatattatacattatacatattaaaaaaattaaaactaataaaaaaaacaataaattaaaataaaaggacattttttaggcatttttttacttacttgcatatatatagtacttacttttattcaatgtgattggattattttattcaatgtgtgtcctgtttgattattttgtagaaaaatgtgattggattttgtcaaagcagaatcagaattatgaaatcaatttatttggtgaagattagaacgggaagtttggttttcaaatttcatgccatttattgaacttttaacggacttatatttgagcaaatttgagtcgacgagtgtttttaccaagagtttgagttaaaactggtattaagtcaaaatgtagggtattcaaaatggtaaatttactttgtacatactacattttctttgatgaaatgaaaactaacaaaactaatttatattcaaagtcccaacgggaaggagacaccaactagaaaagcctaagaaaaacgacaacaatataagtaaacgacaattcttgagaatccttcgaagaatttgagagaaaattcgcctaagattttttcgctctgatttttcaagaataaaaatggctaaaaggttcactagatgttttcaatcctatttataaacagtttgaaaaaggaaaataattatttcaaaaatataaactcctcgaattcccccaaaaattatatgttacgtactcatcaggcagagtaactgtcatcacgcgcgaacatcaagttgtgattgattcgaggcagaaagaactgtcaatcaacattaatgatccaaaattgaaaagacctttagtcagggacacatcagtttgtcattcgacgcctaagacacatgtcacccatccaaacaagactccaggttgagtgaagtcgacgtgcgaccaggaaggtcacgcgtagacttgaagggtaaatgttatctaattttttgtacattgacgtggtgataggatcaagcgacacatgtcctatatttctgatacaatggacaaagggaaatgtccctagccacctgcacctgactagtcagcatctataattgttgattactcgagcagagttgtggagaagatacctgactaggtagaagtctgttgtgtcgagcgacttacaagagataacaactttagaataatctcgttatgtccaaacatgaagacaatccctataatcgtgggattgagtcagaggaaaatgacaacctatcctagtttcttatttcatatattgtaattatagaatcattgtaatttcctattttaggcattgtaagcaaaaggaaactatccctaatgcattaagtccctataaatagtgacttagcctcactatgaaaatgatcaagagaattactgcaaaaatatactctagagagaaaatagtgatctgagaaagttacgcagtgattagttgtaagagctttcaagaggaagaacactttgttccttctcttaagtcaatacaatacaaggggagtaggctatttccacactcacggggtcgaacctctttaaaatctggtgttcactttacctttattgtttttttttctcttttaattatattattcaaccgctttattatttgactcactgttgttggctagaagtaaggtcaacaacaggaatccccagaacacgctttttatttcgttataatgtatgttttaatgttttattttttagtcatttttaatattatcacgtttttaataattaattattctatttgtattaaactagtttataaaatcacacatgtggcatccctatagattagggtgttacacaatttgtgaatcaagaacggaaaatctcaagtgatagtgcttgtatgggcgtgtgagaaaggaagtgaagaagcgggaagttatcagacttagacttagagtttggcggcaagtattagttatcagacttagacttagagtttggcggcaagtattaggcttaactgagcttaggttttcttggttagagttaatgcctttatataggaggcctaaaccctatattacaacttaaaaccttatatatttgtatattttattagttaattacaaaataccgaaattcccttaaacttagatgttatttagttattctattggtctttaagggcctaattcccaccccaaaggatgttgtccacgtgtagaagtgcacaggaaacactgcagaacacctcttggccggctaagcccttgtggaggacaagctagtcggccatggtgcagtcccaaggctgcccaaccataggaccgaccaggggtgcctagccagctcctgtgagggagctggtcagtcacttgacgcctgtttgagtgttggggtctccgtttgcttagatgctgacttggccttcttattagtaagttgtactgccacgtggtgctgattttgtccatgtaagcatgccatgtcagtaggacaaaaatcgtgataacagtagggttttccctggtttttcctccgacgcattctaatgagggattatcgtcagaatccccttcatctagatctccgacttggcttgaaggtgagccatcactttctccatccttcgagaaaacttcttttgatgagctagcttttatttggtctcgagcaactcgttatacactcaaatacttccgggtcttgctcataatgatagtcgtctttgtagtactatctttgacgtactctccatcgtcttcctcctcttcatcattctcagcatctctgtcatcatcgatgtggtcatactggttgtttaggtcgtcctctcgattgttcacgttggatgtatccccgcctctcgcatcactcggttgggcgtgctttggcgagagggggtttacttcctccatgacaatcttgaggccaccttgaagagtcttcttaagaaccgtcttttgtgtgaaaaccatggcagcaataacaccgtaggctttacctctttcttaagctctcaatgaaagtaccaaaatatttatcgagattttcgaaatctaaatatttgagaactaaagaaataataaaatgtagaaataatgagatggagatttttttacgtagtttgggtgttaattaaccttattccacgagttagtctattagcctcttacgacctttttgatatgcttacaatattattacaggaaacccaaactctatactctaagtttctcttgaagaagatgaagacgaagagtaatattggcagagtttcaattatgtcggttgtgatctcctcttcgtatggaaatagaagggtatttataggctaagtagcggatatggacatgtccatgactcgcctaggatttatgctaaaagcccactaacggggtaaattacatgcaaagtgagagctgactatcgagtcccttaaaaattattgtgcccgtgcgtgcttcagttggacaattggggatcatttgtacgaagtggacacatgttatccaaaggtttaacctttaaaagtagagactacgtgtcacccaaagctttcacctttaaaagaaaaggtctctaatatttgtctgataaaaaagtagtggaagtgtgcgcactaccatgtttggacgtaagggacaagatctaatcatgcgttagaaaagcataaacgtcatttggtgacccgacttgtatcaaaggtagacgtccgcgacactcctaggcaatcaatattagctgggcaagcttccatttttggacccctacgggtccgggagaggcaacacactgggaagctaaggcaggatcaagtcgacttgttcccacttctacgaggcttttccctgataagattatagcgggagattttatttagagaaattataaggttaatctcattctttaaatttggcctgtcacatactaagaaatataaaattttctaattacgatgcagcagtagaataataaaaaggagggaaatgaaggggagagtgaggacatagtttggcgggaagaagaaagagaagaatggaggagtcagagggaatggcaatggattcggatgcccccgatctggtctgccagctcgacaacgttcaaggtatggttgacgccctcaccgccgtcagatggaaacgccaacaggtctctttccctcccaattttctatttgtttctcagaaaaattaagaatcatatcatcgttcttacttatatcgatttctatttgtgtgattgatgttcgtggctaaccaatttacccaaatgtaaaccataaataaggatgcggtgatcgaattatctgagcacggcattgttttgatcgtagaggaaacaaattgtcttcaggccaaggtttatctacagcgcgaggtatggatttcggcttttggctctttctgaattcctaaagttcaaattgtggtttcgtttcagattattcgagcaattgttttcttaaaaaccaatcagtgaatcaaaactgttttgaaaattttctcatagcttttcattcgttacgagtatggcgcccaaggccgacctcgatttggagtgagtttggggttgtttgtcgattgcttgaacactttttctgttcctgggcattcaagtacaatcgaaattcgatatcctggacccgacatgcagcttcttcttaagtatgatttttatatatattatattagtacagaaatataaacattattttcttgcgatagggactgaaaacactctgctgggcgctttagttaatgcttctttaccaacttaggcatcactggcttttcaatggagactatataactttttttttttttttttctgatcgagtgttgatgcatttgtgagaatagtggccatcacaatagcgattttattttacttgctaactgaatcattaatgtccatcagttatgatatgttttattattagagttagtcccacattactaacatgtgaaaataaattaccgatgaatgaggtactcttcccattatcaattggttttgagattgtaccttattccaaattcgtgatccaaattctaaaagttatgaaatgggagaaagcaaaaaatttgacaaccttaaatttgaacttttattgttgagaatgaatcgaaatattttcttgctcaggccacgtgaacagcaactgcatgtagataattttatacactaaagaatgcttattttaggtcatgttgctcatacagcttttttatgatcctatcctttttgtctgtgtattgttaccggagtttacatccttcgcttgaccattttcatatgtgttttcttaggtctgttgattcactagactcaggcatttatgcagagatcaggacgaggataccagagacaatatcatgggattacaattttgaacctacagggagcacaccactcacgtttactgttaaggtgcatcttccttttctgaatatgtagtggtcacctagacaaactaattttgtttgtcttaaaatcagactgaaaacatgttaggcattaggattagtggggtgtgctagcatatagtaaataataagggtatatgagtctttgtttgggaggaagtattgagtgaaaaattactatatatattaaagtaatgtttgaaagagagtatgaaatgaattgagtaaaactctttgcatcaatgggacctaagggctcccatagtaactgaatgtatattgaatatatgagagaaccaagtacaaactatgggagcccttcggtccttttgatgcaaatagttttactcaattcattgcatactccctttctaaccttactctcctatatatagtaatttctcacttagtgctacctcccaaacaaagactcatatacccttattatttgctgctagcacagcccacaaatcatagtgcctaataaaacagtggcaaacttttgaattcttgttcaatattattcacttgtggctgtccatctaaaattatcactaataacatgaaaaatggaattttttaagatagttataccagattcagattcaggatagagttaaattttgagtaacactatggatgaaggatttcaattttcattcagttactgtacttgttagggattggagatcattacggtacttcttgttgagaactttatgatctattgattgtattttgtctatcaaattgatgtagtagctaaaagaaaaaaagggtggaaagttaagaaactatagcagtattacttaccactaagacatctgaaaactatctcgctattatatgaacataaaaaaatttgtttaataggagtataaggaaagagagtgagctctggagacatgaatatgacgagctgtgatattctgataaattcatatggctgaaattgttcagctcttggtgttattaagatcataatagttgatgtacagactgcagctttgaaggaagcagtcgatgatcttgagtggcctggagcaagcatccagatcactctacaaccatctccgccttgtgttaccttcagaagcgatgggcatggagatttgcaggtagatttcagtttttaaaattgctttgaagtaattacttgtgtatttatgctctaaaccttcatttgccttatgcagatagacttcatgtattatgcaaatgccgatcttttaatggcatttcattgtgatcatcaagtgtcttacaggtaatttaatagctacagagtaatcatctccggttttatagtctacttgctttgtttaatctcttagttcctcgatgatatgactaggtacaaatacaagttccttcgagccacaacttcgaacataccaggcagtgttgtcagagaaaatcgaggaagcaagttgactattggccgaggtggattgcttaaagttcagcacctagtttctgtggcaagagcatcaactgcacatccacacgttgattctgcaggttatcagcaaccaagccgaattgcatatattgaatttttcgtgaaaccagaggaagatgaagacagctgatggttcgtatcatcatgttgtaagatattcattaaaaaagttagaatgagttgctaactatggagtctctcacactatccgatcttttttaatcctcttctcgtgcgtgtcttatagatgtttgcacaatccacaaat

SEQ ID NO: 20152 - DNA, 5213 bp, Cannabis sativa
acgaaatgtacctctcctatccatatcaaaatctccaaattagagggttcataaatcacggaagaagcatcttcacagactttacgtaaggcacatgcacaagaactcaaggaaagaggttctgacatccctgtggcaagaaataatctgtatgcaacaaatcagtatgaaaaagtcaaaattgaatgttgacagcaaggtcaaatgcattgatagttactattaataggattttatacattctgttcagtagctaaagcaagaggaactaagttaaaaaagaaagtacttacaataaggatctggtgtttacttggaaagcaaatatacacttcgaataagagccaattacatctgcaagcgatctataaacctaaacgaaaataaacatttcaaatacatggaagaatgaagaaaatagttgactttttaatacgaaagaacgaacaataaattcacagtaaatgaggaagaacggttaagatgtttaacgtacaatgcacatgaagcccttaagttcatccgaggatctagtggacaataaattcaccaattccatgaccatggagaaattaaaagtttggccctcttgtaggattacctcagcaacctggaataggaaactttgtttatcaaatacacggaacattgacaaaataagctccaatctacaaatgatatcaatgttgccaaaattcacatggggtatttcaaaagaaacatcgacgggtataaataaaattgtaacagaggcaacaagtaacagaaccctggtatggaaaaaattaagctgacaaaaagtaagttgtgctcaccacattaagagcaaacaatttggcctccacctctttccaaggaatttgtacgtttagagaggcccaaccaccaaagaagagctacagtagaatttcgtaaaatattatcaaaaatatacaacaattacatttatatatgtgcaaaagaaaaaatgcatgaatatgagaacataaatgcaactagtggaaatctgttcaaagaatcaagatatccagcatcgcttggaaaccattttttttgtattgctacacatggggtccgaaccccggccccctaacatacgcacctaccatttgagttagcctcaagtggttgtgcattggaagatatatgctcctaatagaatttataacacaaagtacaattaaattatgtttccattctcagaaaaaaaaaaatgagaaccaactaattgctactgagggtgagagacaataataaaaatatgcacatgcactgtatacatgtagaatttcaagttctattaaaaagaaaagaagaagaaacaaactccctcagttttcttagcaattttcatgataccgtaataagagtaaaacacgatggagatagcgctgtcgtgaacatatcccaacaagtacgcaatgcagagtacagcaaagaatccaattaagaaaagctaaaataaaaagcatgacttgacacacacaactaatcaacataaagcaagcaccttttgtgtgaatttagcagatcttaagagctgacaaatatccaccaaaagttcaacaaggttcgatctaaaatggacaaggctatcaggtagttctgcagctcctctcttgtcatcaaaagtagctacatctacctatcaaacacaaaattttgatttgttaatatcgttctcctctttagagataagcagcaataccatcataatccataaagtgaacatagaaaccacacaggacataatatctctacacaacgaggctgaacttatcccagagagcatttatcatctatatattgcactagaataaaaaaaatcttcctttctcactcaatccattacttaaaacaaaaattgaaatgtttcacccaaggacgatgttgtggtcaccgaacatttaggatgttaactccataaatgaaactacacccggcagttttcagtgactgaaatgtatgttcacgctatttctactaaatttccatttcattttctgttttgaattagacaaaaacatctagggcagtatcttttttcttgtcgtcctttcgaacattgttttcttgcagaaaaatattatagcatattgcaccatgtttctgccacaaaagaatatgtttttgtcttaaagaacatcttcaaatttcttttaaagaaaacaagtatctaacaccccaatcgtcttttaatgttcaaacactaattaataaagtgtaatagaggaataaaaaataaagaaatagaaccaagaaaaaaaacatatattagaataagaaaattaacaacggagaaacctgagcacgcaataagagggcatcaagtaatgttgagtatacagaagaaaacatgtcttcggcatgcttccttttctgtggactgtcatcacagatgccaagaatatagcttgcaagactagacctggaggataaattattaagaattatcatcattgaactctaaaataaatagtaataatgactacttaaaatgaaaatttcccaaataaaataagcaggaaatagtaactaatcatgaaaattaaaggtgcttcatctagctacacacttactgagacagtatgccatatagcatcacattatacatatatatgaacatttgaacacagatatcaaattgctctacaagataaattaaagtgctcgaatactaaaaagtaacaagcatagccaccttcgaataacctaatagcatccaaggtattgaaggtagaatatttaagtaccagaattgcaaagttgaatctgctatctcccagtcttcacttggaaatgcaacacaactgtaaatatgcaaaacaggttaaaaaagattcaattttgatataaaatgctagtaagtaacaaaggaagtagctacacagccaacaagaattcaagcttgaaataaattttctagacaagcctatatcttccgatttgaagaagatttaaatcttagtttggaaactttcatgttttacaacttaactgcgatgcttaggccccaatcacaagtcagtgatcgaatcctgagaagttctcagaaaaatatagagaacccagaatgtaaactgttccaatgatatcttcttcaatatctcttcgtacgttaattgtctttgtggtgaaacataatcgatatacaaaatccttgaaatctagaaatttttatgtcgaaattctaaccttaaaagtgcatctgtcagtgcaagtgcttcagcacttgcttctacaatcagtgatggtgcctgaagtaaattaataagcaaaagacttaattaattagggagaaagataaccgaaatgagtgaaccaatttattctacatcaaatgtgttacaaccttaaatcatgttatggtataacatgataaagcacaaacttgaacataaaaattcatattggacacgtacagcttgcccaatctcagacaataagcatgcgataccaccaataactttctcatccctattgttaagagctggaagaagaagtgattccttaagaaaatgtatcctacataacaatgcatgaggtagcccctatcgaagccaagaaaaaatcggtaattagaatagagaatattgttataatttacagtgcagggagtaagattagcagcaacaacagcaaaaaaatttaggtaaagttgagatgattaatttactaaacataaccataggattgtagcataattctagtgaatcacgatatagaatgccgcttcatgggattaaagataataaattacttaaacttacatctgaaaagacaatgtcaaaatcctagaaattgacaaacatttttatgattaattctagcccatatgttcaacattgtatgctaaattatataaatgtttgcaaatgtcaaaaaccgaaatgaaataaagaaaggattaactgatgaagtacaaatcgaatttataaagagcatcttaaaagacaatgcatacctcatgtcgactaacaagttcaataagaacttcaacagccaaatcaaatgaagaattcacctataaaaacacaaaatacatatcaaatctctaccatatgaaacaaacactagatattttattttatttattctaaataaaaatacctgcaaggaattgaatacaaaattaagaagtggatgtgctggcaacgaaccatgaggaatctctgagaaacaaccagctcgaacctaaacaaagggaatgagtgaatgtgatcatcaagatatcaagagagatgattgaatatcatcatgatattgattctaagagaaatgggtgggagtgtgatcagtatcatcatgatattgatacaatgagagaaatgagtgaattgaatcgtacccaactgagaaagcaacggagaatttttctgttcctttcatgttgttgcatagcaccatcaaaggttttctctgattgctgtagtaggaactcaagaaccattggagtatgggaaagaagctgcatatcaatgtatacatattaacacacgcacacacacatatatgcatatagataatgaagagagaattgaaaagtaagaaagagtagaacctcacgggcatattgagttctattggttaaagagagtttagtatcaccatgttggttttcaataacttcttctggaagaacagtaagcatctccaaaacagcaatattaccatcatcttgctgagtctgaagattctgaagactgtaaaacagttgctcaataggctttccatgttcaacagctccaagtaaaagggcagacagagcaagacagatttgggttaaaagctgttttgtcaaaaagaaaaaagactcaatttttataatgaagaaagaaaaaagactcaatttttatgaatttagattgagaaagtgaacctgaggagggccggagctgaatcgtttggcggcgagaagaagagcattaagcaaagcttccttagcaggagagtgtaagaattgggattcattttggatcttgcgtttgagaatctgggcagcgaagaattcgagctcgaaatgagaaaggaatgaattttgtgaagaagaagaagtgagaatggaggtggccacttcccatgcggcatcgctctgctgaaattgaaccaaccattgattcgctgccacgcggttacacgattcactgtcgtgattcagaacgtgaactgcttcagccaccttcatttgcaactccattctctctctctctctc

SEQ ID NO: 20153 - DNA, 5037 bp, Cannabis sativa
gatgatctagcaattttaaatcctaggaagtattttagttgtcccaaggctttgagttgaaactgagcatgtaaggaattttgtatttgatgcaggagctgaatgttggggcctgtaataattatgtcgtcgccatagacaaggagagcaatgaagctttctttcgaactgcgtgtgaacaaggtgtaatcagcttgtgattgtttgaatccatctgaaatgagagcatcagaaagtttcttataccattgccatgatgattgcttaaggtcgtagatggatttatgtagtttgcagatgagatttaaagtgtcttctgtgtgaggaatagatagtcatggaggcagggtcatgtaaacttcttcatgaagatcaccgttgaggaaggtgttgttgatgtcgatttggagagtatgccattttttgatggaggagatagcaagaagaagtttgaatgtcgccattttagcaacatgtgagaaggtatcaaaaaaatccagaccttcttgctaattgtaaccttgtgcaacgagacgagctttacatctttcaatagagccatcactattgtacttgaacttatagacccaacgacatccgatagctcttttatttggaggaagcttgatcacagtccaagtcttatttctcagaagtgcataaagttcggattgcattgcttgattccactccttatattggctagcttgcttgtagtttccttgttcgaatagggctgtaactgcaagaacaaaagctttgtgagaatctgagagtttatcataagaaataaaatttttaagaggatgaggtgtagtctcttaaatatgcttgaggttttgtttgtcgacttggtcttcttggttgggcagggcccgagttactggcagtatcaatagggccaggagtgtcatttgtttctggtgctggtgcattgactgattcattgtcgatgatgtgatcttggggtggttgttcttgtgatggtggcacaggaatctgaggaactgtaggaaaatcacttatgtgtgtgttagaaatatgtgaagaaggaaaaaccatgcgagagagtggatcaataccagtagcttcaacattcaatctttgaaaaggaaatatattttcatgaaagacaacatttcttgatgtgaagatttgtttgttattgatatcatatagcttatatcccttaattccttgaggatatcctataaaaacatacgacctggatctaggagcaaatttcgttcgattagcaacaagtgtggtggcaaaggcaaggcaaccaaagtttcttaaattggtgtaatcaagggcagcattaaataaaagctcataaggtgttttatttttgaggagaggagtaggggttctattgacgagaaaagtggctgtcatgatacattcacgccagaactgaatgggcattttggcttggaagaaaaggccactagcaacattcaagaggtgttgatattttctttctgctatagcgttttgttcaggaatttcaatgcaagtaaagtcatgcattattccaagttcagcaaaaagatctttgaacaccaattcgggagcattgtccgatcgaaaaacgtttaaaaatgcatttgaattgtgtctgaacatataaaataaattgaggatttgcattagcaatatcaaatttttgtttaagaagataaatctaagtaaatctactatggtcatcaaccaaagagaggaaatacttatagtttgaatgagaaggaatgtgatagggaccccatgtgtcgcaatgaataagatcaactttgttagcagtaaaagtacgtttattaggaaagagtaatttcttttattttgccaaaggacaaatataacatggggagtttttatgcatagaattcacattacaattcagttctttacttaaaagagcaagtctttgttgagaaaggtgtccaagtctagcatgccaaagatcggcagtaacagagtgaacttcagcacatcgaggctggctgtccagtacatacaagccattgatagttctacttctgccaatctccatcttgttgagtttgtcttgaatgtggaaactattagtgaagaattgtacactaattgcatcatcaatggttaaagaactaactgaaatgatgttgtatttaaaattaggaacatataagacatcattgagggtaagatctttattgatgagaatagaaccactttgttggatagaaataaaatcattattaggaagaattaacctgattttagacataggacaaacatattggaacaattttatgtttgtagcttcagaatctattatccaagattcattatgaggagtgatgcaatggttggatagtatgatacttgtggaacctgaagaagaactaggacttgtgtttgtcataccattttgctggttagcaatgagatttaaaagctgctaatattgagctgcattgagttgaggtaaaagagtatgagcctcgtctgtagatgtgttggaatcggttttggtttgcatttgatttgctgaagcatctttcgatttattttctttgaaaccaggagggtatccatgaatcttgtaacatttctctatcatgtgtcctagaatattgcaatgagtgcaaaaaggtctattccttctaggtggatggttcttgctgctctgagaatcaggcttggcagtggtatttttatcagattgaaaagcaaaagccaagttggaattagagtcattaccagtagtgaagccacctttttgactctcttcctgagtcaccagatgaaaaacatgatttgcttctgctaagggatccattagcaagatattgcttcgaatttgagagtagtgatccgagagacccattaagaaagacatgatgtgctccatgtgatagtgttcttgaagtttcttcacgccaccacaagtgcatccattacaggtacaatttggtatgtaattcgacagctctttccagatggtcttcagcctagtatagtacatgctgatggtctggttttcttggcaaagattcatcaaatttttcctaagattgtatatgtgtggcccgtttctttgatgaaaacaaatttttagatctgtccagatagctagtacagattcatcatacaacaaactagaggaaatttctttagacacagaattaagaatccatgatataacaaagttgttatttctaatccaagcattgtaaagattaaagtcattgggagagggtttaggaatagaaccgttcaagaatcatagtttgtttttgacagctccatagcacgactctaagaaatttaattatcttggctagtgaggggttgagagataaggatgttactagggttatctccatgatggagataatatggatccgaagggtcttcaagaggatttcttaaactcacgacgcgaaggctttgattgttaggacctgtagcttggtgttgatctccagcgatgacagtgcttggaatttcagctctagatccaatttcttggccgtcattggacatggtgatataagaaaagaaaataccctggataaggagaaccaggaaagaacacatgaaatagagtactaatcggagaagaaggaacagcggacttcagagagtctgattagtcaccgccattttcggagaagaaagcacgacaagcaaggaaggagaagggcggaagtgattgaaatcagatctgggaaagcattctttcctgctctgataccatgttgcgaaaagaaatgagagcaaaattgaacaattgagagaaatgaaaatactctctaattgaatgaaaacgagtacaagaatacaaatatatatacaagagataaccaaccaactaagtcggtaaaatgaattaacagaaataacggtcaaccactaactgacataatgaacacaaaccgacttaaagacaaatttggagtaaagtctaataagaagaacgaaaactgtcttgaattgtaaaggttattaaactactagtttgcaaaattactatgtacattatacaatttcaatacatgtatagatttaaacaaattattagtcaaaagaatgttaaaaagtatcatggtcaagtaatcaagtagtgttcttcttggtgatgatgatgattaatgtgtatgttatacaatataagtatatgaagattgagatgagagaggacccattcttctatatatctccagccattagttgctgttaggtgatgatggacccgacaatgaatcaatcaaaatacaactctaataaatcaaaccacgtggtcttcattaatcacctaatgcactctattaataataataataaaaaatttattcaattatttttattttctcaaaaaaggatatccttgcatttcactttcgatgcacaaaaaacatactaaacccaactcaatcattcatgagctttctattttttattctttttcgaaaatgtgaaagtgaaagtgaaactgtatctgtatctgtatacattatgtagcgattattcaaaattttgtattggaaaatgttctagccaaatgggaaaaagaaattggaccattttctaactgtatatattgacatttatatataaataaaataataataaaaacaatatattattctattaacatacacttttctttacattcaatgttcgaattcaatatctttaacataaatatataggaccactcataataaatctcatgaagatgacatgaccttgaaataaccaagctgaaacaactataatgtatattttgccttttattttttttcctttcttgatcttaaatctcgtggctaatatcatgtactccagtctcaattatttgtgacaattaaaattctaaagaactgcatgcatgcacgcattactacatatacctactagtgctgacaatttaagcatgaattgaaatcgattgatttggtgcacacacatcctgattgcatgtaccagatttcatttgacatcttcttagttttcacattattcaactttctagttttatatcccata

SEQ ID NO: 20154 - DNA, 3620 bp, Cannabis sativa
  modified_base (3555)..(3585): a, c, t, g, unknown or other
tgacccattgcatcaatattaacatacttgtggtagttaacaccttaaaatcttctttagcatttatcgagtaataatgatattagcctcaacactatctattataaataaagtccacaataaacataaacctagttttttaatgatgtttcacttgtgaaataactaaataacttaattagataaatttatatgtttatgatcaatatatacacgtatatagatatttttggttcgatataaacatacacgcatgtatgcttttcaacattgttctcataaaatattgctgattggacataaattacatacgtacgtacgtttacacaccatcaattgatcatgattaaacaaacacacaaatatatatattagttaatttcgtgaatcttattttcgcatatgcttaattataagcagcttatttattgttaagattacagatactatatatatcataagtatatgtgtattaatcaataaggacgctggccaacatagtttcctgggggatcatagctgcagataatgaaggtacccctattattattgcaccgaaccttagcacacccaacacgagccgtgttacgccataccacctgagtgtagtgtccgcaaaccttaccagagcggcatgagtttgagttgtaattgtaatccgccttttcggcaacccacaacctcacggcgtctgtgccggaaagatcaccactgctccctgcaaggttctcgccatagcgtcctccagaatggacaagcctacagtccccgatgtgttcgtttgcataacggagtgcgtatgaggccaacgtattgtcccaaaccaggttccccacaccgaccgcggaccgagcagagttgtgggcgttcaggtagtcttgttgggagttttgggcgccaagggtttggagtagggctaaaccaaacaaacaagttaatagtagcgacgatgaaattcgtggtaaaaacgccattgtgttacttttttttggggtagctcttaagattaattaattaattattggtgaaagtgggggtatttatagtgatgaaattttgaattttatttgattagagcatagtgaaagtgaagtaataatatatagaacttaaatttttggtactaccacgtagctagcctttaatttttccaaaggtattatataaatttatccgttgacaaaatatattttatgattatcactaagaaaaagctaactttacgtacaagttattatgaataggaatttatgtatttggatcttatgttttataaaagttgcaaattaaattttatgttttgttaaataataattcagaccggacatgttatactagaaaataaaatagaaatgaatttactaattgataattatggccgagtcgtgaactatatcgctctttttaagacgttttgcagttctacctgaagagtgcatatgacagtctattatcaaccacgacattcccaagataacataacttctgcatacgatttcgttatatgttagaatatggaagcgtatggttaaggtagtaggccgggataggtgtgtatggtataatatgcatgatgagagatgtagcccatgcatcatgtatagaatttagtttccacatattattaatgtcacactctctaacatcctccttaaggatggtggctattttcttcctcaccaatcatgcatgactcaatacaagtgactcttttggctcacagtggctatttttggctcactatccccgaattacaagcgcagctcttttagctcgtgtttttggactgattttttttaatttggatcgattactcgttagaattttagtttagctctgataccatgttagaatatagaggtgtatagttaaggtaataacgataggtgtgtatggtgtaaggtgcattttcatctcaaaactaattgacaatgcgagaaatatatagtcaatgcatcttatatatggtatttagtttccacatattattaatgtgggactctctaacatgttaagcaccgaatgaattcagtaattagtaactaattataactagttactacttacacaatgtaaactaattactaagtttctcacaattaattcatattaatgtatatattactaaaattcttgtttaagtttgttcatgttattaagttgtaaaagttataattaactaactagggtagtatttagttgattgatgtagaattggaatgactttttctaaagttgatcctattcatttgttttggtttgtcataaaaaaataaaccaaaacttcccaaataaggttctttttctattttttttaatgtcaatgagctttatgttgtgatttggtaaaaatagttatgtacaatgtattaatttgactgctcttgaacccctcctattcaacaattaattaatggacgatttttattttattttagttatagaaaataaggtctttttatgttgtactcttgttaattttttgctatctgtatgctattttttgttgttgtcttgatattatttagatgttattttcatgatacatagtaattttcttgttgttattttttgttaatttgattttagttttcttattgttttcgtgttgtttctatgaaaaattgtaaaaaaaaaaaatctttaaacataaaaatatattttttttacaaaaaaatgatcccttgataattatctcaataaaatacgagataagttgaggaataccacttttttgcatccattaatcaaaaatactctcatattatattttataaaaatataccaacttttatgagtgggttgctcaaatataccatcactctctacttaagtctagaatataatttacattaacttaacgggtctaatggagaaattatttataaaagtgtgtatatcttaaaaaatagggaatatactcatttagtaccttatgttttcatgaaaaacatattcagtatcttatgttttcaataatacttaattggtacctcatattttcaaattgtacatatttggtccataaagtacgatttaatcaatacaattttatcaatttaaccaaacagatctcagttatatgttatcaaataattaaatttgaattcagaattcataaaattttagacagtttgattgtattaataaaattttattaaaaaaaattaaatttaggggtaccaaatatgtatgattttaaaatacaaggtaccatttaagcattgttgaaaacacagtatacctaacttgtatttagataaaacacaaggtaccaaatgtgtagacaccctaaaaaatataaagtaaaggtaaaaattaaaacaactaaaataaaataaatatacaatataattttctcaaaacaaaaatactcaaatttaggcttctataaaaaatagtcccttacttgggaacatactgttaaaggccgactcacgcttaatccgacaggaatatttttggactgaacatggtggcgtttggttgggatgaatgaaaatatagaatcatgaatagaaatgggaattggaataggaatggaatagaataaannnnnnnnnnnnnnnnnnnnnnnnnnnnnnnaattattaaattttttcaaatcttacattggaatg

SEQ ID NO: 20155 - DNA, 2106 bp, Cannabis sativa
tatatatatatatatatgttgtattggtaggtgaagcagaggaggaagaacagcaagagcaataaatggacatgcgtggtctgcaaccagaatcaatcgattcgaaacgtgttcgctcaaggtcctatggccaaagaccttcgcctcttcgtccagtcattcaacatgtcccgtcaattctcatcggatcttactacgccattggagccaccgtcgcactctccacctccgcccgaggaggcttgcaagaggccacggaccgattggaccgagtttctcgatttcgatgaggaaattggtccgaacgaaggagaagatcgaactggtgagtaatttgggcttatttgaagtttttgatccgaaaactgagtagtacttaatttgggggattttttttagggtttgatgatgaaccggagattgttacggaattgccgatgggatttttgaagaaagcaaagttgaataatgaaaaagatggtgaccagttggagaatggtggattttgggataagcttgtcagacctggtttctccaagagaaaaatctctcaaggtaatatattcttaacatgaatattctttgaattggtcttgatttttctgaattataaattataagtttcacatggttgaatttatatcaaatttgtaacaaccataccttttgaatttgtcttaattcttaaaaatatataatattagttttgaacttgtcataactttactaataccccacaaaaaaatgctataattatattatatgtaagaaaattaaaagtataatcaaatactaattaatttgaattcaaaatttcatcactaaaaaataacttagggaacaatttgataatgagtattttgtaaaaatagcgtttatgaaaaattttattagtaaaataattttttgttgtcgcaaaaacaattatgaattatactgtgcgaccataaatgattattataattgcaaaacgaccataaatttatattgtgcgactatcatggtcgcatagagtaaattaagtgaagttattttgtaaattttagtatttgaaatagttaatttagcaaattgttttgttaataattcgcagaacattttagatgacaatcattattcaatttgtgtgtgttttattttatttttcttaggtgtagcagaagaattagttttgttaaatttgagatttggaacgtttatggtgtcatagatttgaactagtcacaaggagtggaagagcatagttcttttgtttagcaataatgatgcctaacactatcataagtcgtcattctataagtgattaatggtttttgataataattgttaatttaaatgtttagcttattaaattacactaataacaataaattatgtttaaatagtattgactataaccaatgctctttagtgattttcttagtcaatcttggattttataatacttgactgattgataatgttgtagacaaggagaagccaatgatgaatcatgacttgaaatctgccatggaagatacctcagaatctagttataaatcaaaagaatgtaaccaaaagagaagaacaaagggaaagggaagagagtcttcttcaaaatggagtagctacttaatcgaagaagatgacgtcccgccacattgcagtacaagaaaaatggaagagagtttagtggattttggggataatatctttcaaacattggcaactgaggaaatagtagaagatgatgagatccatcctgattttcttttaacttctgtttgagcttttagttttttttttgtctttgtatagaactctttctttatcaaaagccactttgatcacaaaatatttctatagaccattggtattaccactatgaagtgaacctttatgagtgattaataattttcttaatagtattagatgctactcgtgtaaacataaccattattattaaaactatattttgctatatgtatgagcaaatgtggtataacaattgtatttatttatttatttattttgaaagaggaagtatttaggtatgacatagtttattattgtgtgaaattaaggtggccggtaaaatgaaatggaaacaatttttattttattttt

SEQ ID NO: 20156 - DNA, 3527 bp, Cannabis sativa
tatatttttatgaaaattcacttagcaaccaacaaaacaatctgaatcgtaaccaaaatccacatataaacttacataaaaactaccgaagcaactaaagaacaactcaaactttaaattttttaaaaaataatatacagaataattctcctatagagtattaacaaatttgaaaagaatatgaaaaaggaatattaaaaataataataaaaaaactaacaacaataaaagtaaagtatattaaaatttaaaaaaagtgacaataataagaaaaagttaaaaaaaatattgagtgacagaaaaaaatgacaaagacattaaaattaacaataaaaaaattgataagaatacattagtttggacaaaggcatgttgaaaataataaaaaaaaaattaacaacaataaagtagttggaaaaaaataagcgtatgaaaaataaataaaaatgacaataataaattaaaaaagaaaacatttaaaaatattaagttatctataacataatgaacaaaataataaaataattacaaaatgacaaaataatttgactaaaccgaaaaaacccacatccacatttaacttcaccaaaccaaaaaaaaatcatcacccatctttatatatatgttatattatatagattatagatagatagattataaattataaattattgatatagattatagatagactatggatacatagtaagaaaagaaaaaaaaaaacgaggtcaaataataattctagtcttccagctcaatgatcttcaccacagatgcatcaccaattttctgacaaacaacgactcgatcatgagactttataagaccagaggcctttccatgatccaaggcaacttttaaaatagactcgtttgttgcactagtagattcagcctgcaaatacaaccatgcttaaacttagttacgccaagaaattaagttaaaggcccaggaagtgagagaagagtgtacacaaacaatgaatagtctctcttctagccttgcaaaagctaaaactaagcaagattgaaatgctgcatatattaattaaggtacgaagaatttgccaatgtggtcatattgtggtagtaatggtatctgactaattgcttttgctttcaacaaatacgttaaatgttctcaaaacacatttttataacgaaataaaaacaaagcatgccagtcttctgacgtaaactagaagttacactgttgtagattaaactttaaaacttcataaactttctgaattaattatttttttaaaaagaagtacgaaaaattatgaagctgaatcatctcaattaatggaataaatcttacaggatgtcgaggatctgcaagcatgggaaaaatgcctcggataatttgtgattgccttacctgtcacaaaattaggaaatagatgtaaatttactacaaatatatgtaaagagccagcaaaaagtatttctctaagtgagattctagaaagaggccaacttaatctatctccctcagagtaaagataaccaaacattgtagcgatctgcttacttttgcaggattgtatgactagtaacaagttttatctagttgacaaaggcatttgcgttgtgcattattacgaaaaccagataacaatcatatgaacaacaaacctcaaaagcaccagtgaaagtccagcggagttgatttgtctgtagcctagggacaactacagacattacgggcattgttggcctatactttgcaattaacctaccagaataccaaaatgaatgaaaacagtcataataaatatctactccataataaaaataagaaaagatgaagcatcaaaatttaattaataaaataaacaaatataaatatagaaaaccttgcagctctcccagttgaagtgaagcaaataattacagaagcctttactttgattgctgcacgtacctgcattgcaagaacaaagaattaatccaacatcatgaaaatcaaatgaaggaaagtatatatttctgttatctgactctcctttaatatagaacaagaaaacaaagattaagaagaccgaggtagaaaagtactgctgaggatgcgatagattccaaatgggtcataggttcgccaacatatttaacagtcctcttgaaatatagatcttgattgaaaaccttctctgcctgcatacagcatttagtaaaataaatccactttagagtgtgacatacacatatagtgcacatgaggaatagttttggtggctataatccgctctaggtgtcctaactattcagataatttctttctttttacaacaaaacataacatatataaaagtgaaactcagtattacatagttcaattaccaaattgggaagccttatctcaaagttttccttaaataaatgcaaatgcattatgtacacaaaacttatagatataaatatacatctttgtgtgtgaataaacagagtctgaatgctaagaaaagagaaaaacaagacaaaatttgagttctgactaaaacaagattctacctcggcgcaaatctttccaactatggagatagtctctacagggtagacacccctaagagtctcagcaccaagaattattgcatcggtccctaaaccaatagtaaatttacatgagatttgagattgctaagatattccacagtatattagcagcaagaagtaaatacacaagtgacactaggaaaaaaaacaagttttggcaccaccagctaaaagaaaagtaacatcccattattcagcacaatcaaactatgatatcatcataacaagaaagaaaaacctttttcaacgttagaagactaagcattaccatccaatactgcatttgcaacatctgtggcttcagcacgtgtgggcctcagattttcagtcatactgtctacaacacgagtcaccacagctggctttccagccatattgcatttgtaaacagcagctttttgaaataaaaatacctacaataatatcaagaaaattactagcacatccaagccagattttaccataaagattcattttaaaaagtaacctctcatatcaagaaaacgcacatagcagaatatgtgagtcacctatccctgtttactgtaaataccatattaatcaagatcagggccactttcagccaaattcttgtcaccccagaattattttttgtaaaaactctggaagaagaaattcagggacagcactgaaatcaatttcttgaagtacgaaactgtccctgtcttgaccaaaattattcatattcacatcaaataagtgctaagtcacacattcatatacaccatcatatatttcattcagccatgctagtaaatgtgcaggttttggctgtatttctcaccaaattcatgcactcatctatattcaatataattttctcatctgatcatatagccatgtacatactgtatatcataattattattcagaacattaattgaagagcatgatcaaattcttttcattttgatacactgatgcaaaagctgcaacaaaaaagct

SEQ ID NO: 20157 - DNA, 2477 bp, Cannabis sativa
  modified_base (354)..(386): a, c, t, g, unknown or other
tttttaggttttaaatttttggtttaaaaatcaaattttttgattttctaagcatagaaaatcaaatttccctattggaatgtgtatatatgtatgtatgttagtacgtatatgattccaaaagtgtgagtgactgattccgtgacaagagaaagcgaaaaaacttggcttacctttgggaaaaaggcttttaagttttaagtactcaactcactagtaacaagcaagcactgctgcacgcgcactgtggtgtggtctattatcgctctcacccctcatcatgaaccaatgtgcactcactcattcactcacccattctgtgatttttatttatttattattattataattatnnnnnnnnnnnnnnnnnnnnnnnnnnnnnnnnntattattattattatcaataaaatggaaatagaaacaaaagctaattttgtttaataaaagagataaaacttgtctgtcatttcattgaattaaaaaaagataatagtacaaatcttaccagtttacttggtgcattgcccttttcggttttactgtcttatccaaatttctttatctctttctttctttttctttttcttttttattttgccataaatattgaagttacatgaaagattaacaacaactatatatctgggtttgccaaaacattcaaatgtttttttttttttttttttttattcagatatatataggtcgattggtctgactcccaaagtgtcaagatttggagctaattttttttttaaaaaaatatgatgtttctaaggacaagaaattgagttggccacacattcatatggagataggcacttttcttttttttcctgaaaggcaaaagctgcccaaaccacatgcttgccaactatatatggtttttcgactttggaaaatacatttaatatttcagaagggcattcgaagacttactgggatatgtccctagaaaacaaaggtagagttggtcattccattaacttttagtttatcaatctatgagtcttgttactctatacaggccaatcatatcggtgcttcatgctgttttttcacttcaatgcattttattctatttttgtatcctaaattaatttctgacaaagagaaaaataatacaaaatgagcctttttttggggacaagaaaaaaatgattactatccacgacaacattaacaagagatgtcgtaacacgtacaacttgtcgaattagcatttgataatgcaataataataataaaataaattaactttattaagcatatttttgagttaaaataatttaatattttgtgttttgtaaaatttatcaaatagaatttttgttttgataaatgataaattagattgtgtattttttaaaatggtataataaaacaagactttgattgaggtggaaaagcaagagagaattgctactctccttcgtatggctccttagtcgggtctagtcttttatagactctggagttccacttttggtgtttgctatatgttgtgtatgttagaattattattgtggattaatataatcataaatataattctataatcacaatcatttattatgtgtctatagtacttttcaataatgataatgagatgattcacactaactaattatattagaggcacatgaaagtactcttgtgactataattggctcattaagttatagtctatcattaattaaaccaatagatcctattagtccataagtgcttaagcttagaagggtgtgatatatatttgatataagaaggtttaattaatggcaatgagattgacataaggcgattgctccacattagcttttcttcaagatttaccattgaatctttttgcgcattcatcacattagaagattctaagtatcaaatggcttacatggacatgagtgtaggaggtgtgttttatgggtcattataataccctaaataaaatattggatcttggttgacatttatgagcattgttgaagatagtaaattaatgatgtggtgtttaatgttcatatcttgttatatacttcaacaatcggtttctgcagggataatatatttgattttagggcctaatttttttttttgataaaaatcatacttttaacgaaatgaataatatgaaactttagcatatttttttttttggattaatgtgttcatgacgaataaatattaaatttattgttttagatgagtttatatctatttttggatggtcttttttatattttccattgtagaataccaagtttagaggtgtctatcaatagagaaaaaccatattcgagtttatgcacttcgtaatgtttttcgtaaaatgtggatgaaatggatgttgaaaattgatagacggttaaaaatggaagaaagcccccaaaaaatttgacaaaaacggtggttggacacgtcagtttcaggcgggtccgattttcggtcttgtagacccagttcgtcgacccgcgcac

SEQ ID NO: 20158 - DNA, 1700 bp, Cannabis sativa
gaatattcttttatttttaaagtatattctgttaaaccaagaaaccaaaaaatgtcattagataagcacttttaatatataaaaatatgtgtgatttaaataatataatattaagattaaaattatgacatggtatataaaatgtattgggagattatattatatagtataataaaacacaaattgtaatatgtgaggaattacaataattataatattctaaaaaatgttttgaaacttaaaaaattacattatttaaccattagacactgatattatttaaataagtattaggagtaagagtagttacaaaactccattaaatattgtggtagaatagtcgcttggatgtattttttgtgtaaaatatttagcattttaatggaagtatttccaccattaataattactatcgtctagaatatcatttataattagtgccctaaacctataagggtgtataacaactatgtgagtgtgtaaataaattaaatagctaatatttttgcgatgtagctcaacgagtacgtaagtacaaaagcttcaagatttttgagctgcaaccattaatggaaatcatatatattcttgttgaaatcccattgtgaggggtcagcaatgtttatccatacttattgtgatgattatttttgagcttcaagattggtctttgtttgttcatgctttcacttaatatatgcgagacatgtacacagacgtgtttagactgacttactagcttggagtgcgagcaactagtactgcccattccgcctactaggggtgtccaaatagtcgatccgcgacacatggcatgcaccaccatcacgtatgcatggctagagtaccacactcgttcacttcacaacaccaaaacgccttatggtatcacaaaaaatatatatatatataatgaagaaattaatgataaataataaatatgaaacaaaaaaaagtgacagcaaagaaaacaacaagtattagtaattttatataatttcatggaatattgttcaacacatgcattatataataacttaaaagctacccagcaaatccctttccagtttcatcgttcgaaatgtacaagctctactccgattcaactctcaaaaacctattataataacttatagctattaaaatccatatagcataccaatatatataatcaaaatcgatcactacttgtttttatgaaatattattattaatatttcttttcgatcttcttcttctttttccccatgatgatcattattcttctgttttgttgggccaaatagatcttgtgggctatggaaagaatatggtgatgatgatgatgatgatgaactcatatctacgtacttggtaagtaatattagggcttcagcaaaaaaaaaaaaaaattaatattagggcagttggcaacaaaaaaaaatattatgagaaattaaaaacccaaatctccaaatgatagagtcgatcaatgaagaataaaaaaaaacaatacttaaaattcaaccataaataataaaaacatatataaaattcaacctctctctcccggaaggaatggtcagggtttgtgttgatgaattgaagaggttatttattggggtaagttgaatcaattaactaaatgtgcctctaattttatatttatttgaaacatacttctttttatatgtattgtacccaaaataccctgacataag

SEQ ID NO: 20159 - DNA, 3401 bp, Cannabis sativa
gatatgatatgattttgcctataaatttatgatcaaatggtatgattcccttttcctttctctttttcttcttccataatcaaatttcctagacaagaaatcaagacggaactgaagtccataatcaaacatctaaacacaaccacaaggcctttgctatgctgaaatgtaaaaattcaccacccttaagatcatagatggagcctagagcagcaattattgattatatttacacacacatatatatattcattacttgctattagtacctaaagttaaagcagataaagaaatgggaggagaaataccagatgagattcacattagaacttgtatttgcaatttttgtacatagtattagtacagaaacagagagagaaacagagttactaaaagtcattccatttgggaattgcagctttccatgtgttgatgtggagttaagggagaaggaggtagacaagaggtacggcaagtgggacaagaagagtgggaagacagccactggtgtatgcattggtcatgaaatccatggttacatctagccatgacccgaatcccctgcccctcctcgaattctgacaagcaaatggcacactctgtctcggcccctgccagcttagtctgaacttcagccgagtacaccagcgctggaaccccctccagcgcagctgcagccacacctacattacttttctgctgttgctgctgctgctgttgctggtgttgtagcctgctgctgccttcggtggccactgggcgactacgatggttgtgttgttggccacgaaggaagcaacgtatggcggtgttgagagccagggcgcaaatgagtgcacacaaaagaatgatgaggatcatggcagcgttagcttcgaaatctgttgtccccgagtaagggtggaggtggcaaccggggccatcgcattctgatgttgtggttgtggatgatgctgctactggtggggagaggtggatcttataggcaggcgctatggttgctctcatttgcctgagttttgaggggtccctcttcttcttctcctcctactttttcctcctatatgttatgaaagagagagagagagagagattgcgtggagtttgagattaagatgatttatagtaaaatgaaaggaaggaagaaaacatgaaatgcatacgtgcactagaggtttatttttctcatgtgtgtacgctcgtttaagaacccctctctctctctctctctctctctctctctcttataattttcatatatataaatatacctttttcactttacatgtctttttgatattcttttttcttttcttttgcttacattttatttaatgataatgaggttagaagaggatggcattgattattgtgaaggacaaaaagatagacctctgccaagtgccaagtaagtaatgtatatattattgtatgatacggttatggttgttgttggtacatacgtaattaattactgatcatgtattattttttccacctctaactctaactaacttcatttataacacttatgatgaaatttcatataacaaatcaaaatgaggaaacaagagatttggtgatattgtgtgtggcatgtggataagcagaacagaacagtagaaactagaaagtagtcgtaaagcagataataagggaaagaaagggtaagataagagtgtgattaattggattattgggtatgaatattcattttcagttatcagatcacacatgcaatgatgttatactctgagaaaattcagaaacatgtagatgcttctatatatatttctttatccatagagataagagagagaagagattagaatgacagcaaaaggagaaaaaagacaaagacttgtaaatcaactcatttatgttttttctttatttattaatttttaaaacagcaaatgtgacccacctagacgaatagggtgaatacaaaccacacaagtcatgacaagcatatttattttagcctgaaattatgtatatatatataagtaagtgtcctgatgaggaagcaattgagtgcatagagagtgtgtgtgtatatatatatgtatatgtatgtattgaattcttggaatagcaaagaacaaaaaacagggggaattgcctgcaacccacggcattctcaagaaatggacaaaatggggaccatcaattgtcacttggaggtacatgtagatgatattacacacatggcatgcaggcactgcaatttcaaatgagaatagtgagttgtagactagtactatactactagtagagcagtggtggttggctcattaatcctaatcataatgttaatgtatgaatgcttagttagccttgaggtgagagatgagagatgaggtcaaataaacaaagaaacaggcctggactgactggactacattggttgatgatggagttgagttgaggcccaataacaaattaacaagaaaagatacaaaggacaggtatagagccttgtttttcttgggaacaaatcaaggaatatgtttggttgattaatgatttgttgctgtccacttgttccattcccaacccaacccaacccaacccatgtatttattttggtattaatgaacaatcatagtttggcatctctttatctcattcttattccttcttccagtcatatgcatatctgatctgaatgagacatgtattttatcaacaaaataaaattgattatgattatgactatgaacataatacctctatcagttttggtaacataacatcataacatagaaggagggaaaatttgtcactactcactctatagagattgactttgactgtatacacaaaaaaagaaaaaaagaaggttgggggtccaattccaactaaattaagtcttatacattattcttgttgtagtttcctcgctgggctgctcatcttgaattgcatgcccattccattacaaatttctaatattattataattacaaactcatttgactcacaacaacactatcagtttcaaggaatattttgttgatcttgatcatcattctcatttatttgtccatcccttttacctttttgtaaagaagaagaataattataatgattacatgcatggccacacataaaggtgaaattaaagagaaagaaagttgcacacaatacacacaatgtttaccaatagtctaattagtaaatatccaatatttactaatagccttttgtttttaatattgagaaataaaaatcttattttttataggaatttttataaaagtattggattttggataaaaatttacaatcttactgttatagagatttttttacaaaaaatactttttttttttttttttatataaaaaaattgaaaaacaataaaacaacaatggaacaactaaaaaatatccgtg

SEQ ID NO: 20160 - DNA, 4062 bp, Cannabis sativa
gtattgaatgaacagtaaaaagtaaagtgtataaactaaaaattaatattattttcaggtcacgggttagaacccgactacaaaaaaactactttttaatatccgaacctgaaacccgtgtggggtaatttcgagttgaacccgactcgagcacacgggttttaatgtttttcggtttttttggcagcgggtcgggacgggtggctgggtttttcgggttcgcgggtctaaatgttcagccctatattgtattagaaaaagacctgtaggacgaacaaagaaaaaaatgtttactccattggggtcccatggacttgatcttgagcggtcgggtcttcttgattctgagcgactgaagaactctcattagatttccttgcttcatcttcaggcttattcattgcacaataatcgaagaattcagaacaaatttggttctttagataaccaaaattggtgtttggattcgccctccagaactcattgaaaacctccaacacagctgattcatagtcctcgacctccttttgatatgactctcgctcaccaacaaaagttttctctaaggaaattttctccttcagcaaagtttcatctttttgttgaagaacctcagtcaattctttgaccttggcctcctagttttgaaggagtgtgttgagtccttccctttcatcggttagatcccgcaccttcttggattcccgcttgaggtctgctttgagcttggcagtggacgacatgtcttctatttgctgctataagtcatcaataaacttgttcgcagaagcaaattgcttctttacttcgtccagctcctagtccttcagctcagtctctttcttgacctcctttaaagccttcttcaagtcattagtggttgcattagctttgagagctgtagacttggctcagaaataagtataggtcagttttcaagttaacctgcaaaaagaaacaaacaagttagattatcaaggtggtaaaatccatgcaaagaactttggaataagagcttacacttataatctctttcagaactccgttgaccaggagtttttatatatgactcaatatttttacatttgatatatgtgggacaatattgttcaatatgttataaaataatataaaatatataagaaaaaaagaagaagaagagagaaagaaaaactgaatgataatttctcaattatttattttaatgggatgaacctttatttatacaaaagtattgactaaaagaatataaaactaaatcaatataataaaaaaaatacaattaaacattaatggtaataattgatttggtaatttcgatatctatatataatatttcatgacagtatatatatgttagttaaaaaaaaacatatatttctaattaaaagtggtaatattaaacataatataaactgattaagttatctaacatatatattcaaatcccaacaagagtaaatttattttttcgcattttaattttttcttttgaacttctatcaataagattgattttttgagtggtgcggatgcaggagatatagggaaatttaatagattcggtatctgcttgattgatgagctgtggactgctaggaatcgagcctttcatgatcgtgtcaatccgtcttggaggggcgttttggctagagttcagggggctgcctcttgtctcttgactgcttgggacactcgacctaattcggaggtgattcagcatgctcataaggagatttatttgggcaaactggttttatttgtggatgcagccttcaaagaattgcgtgtagcggctgggattgtagtgtctgaatcggagggtagtttttcggacgcgttggctgtgaactttgatgcaaatcagccgctggaagctgagtcttgggctgtgtttcatgcgtttaggtggtgtcaaacccgaggttggaggcaggtggtgattgtctcggattgtcagctgctggtgcaaggtttacaggcgcgcatggccccggattggcggctcacgggtgtcttttggagcatgttggagctgttggatgatctccctgaagtggaggtagtttggatgcctcgttcccgaaatcaggtagcccataagctctcaaagtgggcgtttagactttgtttttctggtattttaacaacagaggagttggtccctcttgtgaccaattgaactggttttgttctgcttttggtgtttttattggagattctccagcaaaaaaaaaaaagatttctttttattgttacttttttttttctttattttaaccatatttaatactacaaaaatataaatttttaacatgtttttcttgttctctttctatgatgagttttaaaaaattgcattgatgacatgtactcaaaataaaaaccttttttttttttcttcaaatgttcattgtccatgttattttttccaatatatttaggactcacaatgtaattgcttacaatcagtctaaaattcaaagtagcctgtaggggtggatatataatgatgtagtttaaaataataatattcgcgatggtattgttaatcttataactttatcaatgaaagttgcacattactaaaaaaaattgactttttctgcctcaaaaagattataaagtatatgaattggagtgttctcgttattactatgaatatggacaacagattcctattgatgttttaacgtgaatggtcgaccaatccaatgaatttcctatgctgttacatcaccatctatctttataaatggctgtgaatattatctaattcatttaatttacattgttttggtcaaaatatctttatttgtttctgataaaattaatattaccactatgtttaacaataataaactagacaacttattcaacatgaatacacagtttttatttggaaaaaattacatattccaataatatttataatacagatccaaaatacaggtgattttgtgagtaacaacataaaaattatgggagaagaagtgaagctttatggcgctaggggaagccctttcagtgacagagtaaacatagctctgaaactcaaaggtgttgaatacaaatattttgaagaaaattatttaaacaacaagagcacttctctcctcaaatataatccaattcacaagaaagtccctacctttgtccacaacgaaaagcccatagcagagtcacttgtaattcttgaatacatcgatgagacatggaagactcaccccatcttgcctcaacacccttatgaaagagctcaagcccgtttctggagttatttcattgatgacaaggtaacaaatcttccaaaacaatctttatactttcatcgaacaccttatgtgtttattgtaaagtagcaattttttgacattgaatatgatttttcccagattgtgccaacaacacttaaagtagttaaggcgaaggaggagcggaaaaatagattagaagaattgagtgagtatctggagatgttagagaaagagttgaaagacaagtattttggaggagaaggcattgggatggtggacttagcaggaaacttcatagcccaatggatcccaacaacaaaggagcttgttggagtagatatattgacagaggcaaaatttccaaacctctatcaatggagctgcgattttgctactcatcctgtgatcaaagaagtatcgccctctaaagaagaaatcattgctatcttcaaacctcgtttgaatgccaccaactaaaaaaaaggatctaatttattatgttgcatttatttctgaatctatagtttactttgtaagagaaatattttcaatcatttgttccgaagtttattgagactgtttactctttttactttttaataatattttgtgaaaaatatatgactaggaagatcaaacatttctttaaaataaataaataaaaatctaacattgttagaagacagtaacacaatttaatcaatgaggtaatcttgtcagaattgtaagaagaacggtattttatttcaaaattaattgattatgataaaagtagtttatgaatcttatatattattttgttcta

SEQ ID NO: 20161 - DNA, 3731 bp, Cannabis sativa
cagtaccaaccatgggtatctatcaaaggtcaagcccttgctgatttcgtagtagagtgttctagcttaaatgatcttccggaagatccagtctcgaagcttcccacctagaagatctacgtcgacggaacatccaatgaaaagggatctagagctgagatcattctaatctcccccacaagggcattagctccagagtgctttacattttagttttcgtgcctccaacaacgaagtagaacacgaagctctgttggcaggcttaaaattggctaaagaagtgggagtccaacaaatcgaagtacacagtgattcccagctagtggcgaatcaaatttctgctgagtaccggacgaagggtgaaaaaattactacatatgtcatgatgtcccaggagttgttgtaaggattctaaagttacaacgttcgccaggttccaagagaacaaaatttgttcgtggacatgttatcatacaacacagagtagtcccaatttttcacttggagaaaccaagcattgaggtctaggagtaaaagttgtagtcgacaactctcacttctagatggcccctatatacaatttcttgaatttaggagagcttcctgtggacaaggccacttccagaaaggtttagtaccaagctccccgttacatgattatggatggaaaactttatcgccgaggactatcaatgacatacttgaggtgcatcactgaaacaaaaatcaacactgtgatccatgagattcatggtagcttttgcgaagactatactttcaaacccattttatccaaaaaaattctttgccaagagtatttttggaccacaataaagaaagattgaatagagtatgtaaagaagtgcaagcaatgccagaaatatgccaaggcacctattgagatcacacacacaagtagcccatgggcggcttttgcagttggaggatagacttagtaaatgatccctccctataggaaaaggagtcaattacgcaataatcgcggttgatcattttaccaagtgggttgaagcgaaaccaatgaatagtgtgacctcaaaaaaattcttgaactttattattaaaaacatcgtgtatcgatacaaactttgctatcaacaatatattcaaccaattaaatataacccaaggaataataaagctataattagttagtcaataaatattataggtctccccttacaaaaagaagatcacacaaatttgttgggtatattaaaaagagtgtaatgtttaaagactcatgtatatcatcacagttatcatatggggaagtctagctaattataagttaataaagatacatcaacacaaacccaatgatatactttgtagatatatatagtaagaaattgattttgcaacatcataggatcaaagtattgtatccatagagaaaggattgtagatgatattgtccatgtagtagtgagctgggtgagcagcatccatcaccacgaattgcatgtcctccgatggcttccagtgccgttttctctggtttataaaccagttgtttatctgtttcaaatccagccctgtactttctgccagacccagtttttgagcctcctacacacacaccatcatcatattaatatatgaaccctatttacacgaacactacaattatatatatatatgaacgtacgtacagaaggataaggccacttgtagtgtctactccaccactcgagcaactgttgcctggcttccttaggtagctttccgttctttttcttcttaagaaattcctgcttcagacccccaaggtatccgctgtacttgcgcaacagctgaactttcaactccttatcttctgcttgaggatctattaaaccaccaccaccaccatcatcaccatcatcttcatcatcattcatatgatgatcatccaattcttcttctgaacatccatttacaaaagaatttacattagattcatgcatgattcaccattcaatgaatcaatttacaacacgccaaaaactaatctgattatttgatatctacaaaattactataaagacgtttgactcaacacacagcaggtcagttgattggacaggaaattaaaatatatgtgattctaagatttttatatatatatatatagacagctgaaaaggcttatgataatattttttgtatttccaaaaccctgcttgctatgacttgtcttgcaaaatatagaatcttatgagtttttatattttccaaattaaacctgcagagtcatcagacattatttttagcaaaaatttaaaaggtcatggtattcttcatgaacatttatttcacgagaaactagttatttaaactttgtatttatttataatttttgcaaaacatgacaattatgtaaagataatatttgatcttaatttggaaaatcatctgaagactaattaagatttatatatacaaatataaagattcacatggagtttccctatgcaaactatgtaagagtataattgcatattaagtacttcattaatacaaagaataaaaataagataaatacacacagttcacatattggatatatataatttgactagcaatatatagttagaaaagtacgtgtttacaactgaattgaaaacctatagcaaacctgacagctaaatacaaaaccctaattacatatacttcaaaaaccagaaagctttagtaataagtaaaatttctcacaataagaacggaaaatatacgtaagaataacacttaatttagaaatctctcatgaaaggaataaactttaattgcgctgctgtatatatatcaactcatcataataaaacctagctagctactcactaaaacttcgcccagctaccaaaagaagctattttaaatgctttttctcagcacttaatagaaacttataaagagtatagagaatccccacgaaaagcagaattttctaagataggtttgctgttatatattaattaacaatcagctatgctgtagttttaagaattaatgaagaaaaataaattactgacccaaaacagaaaattaaaaatcttcatctctaaagtctaaacattattgattagttaggctcgggtgtggagaaggaagcagttttcacttctccctaggaaataaacaaattccataataatttgtaagatatatatgagatagatttggtgatgttgacaaataaaataacaagcatataataaattatatatatctccatgttgttttcaaaaggttcatttccaaactactaaaagccttgatgtcgttcatccaagaagtttcaaagacccagatgaggaaggagtacgagagaacaaaacaaaaacaaaaaagtaaagtgtttttttatttataaaaaaataaaaaatatacatatattatataataataccaggagaatctgaggttgaagaaacggttagggcttttagctggcactctactcttgagaggaagagcatggcttctttaaaaggctttgtaagctcttcttcatatttgatcagcatctcacaataagcttccatgaactggtccagagctgggtctggttgattatctgatgagcaacccccagttgttgtagtactacttcttgaaatattattcaaattataattaaactcctcctctaacctagccaccatttctggaggtgcccctacctttaataataataattaaaaatagatcagtatataaaatactaa

SEQ ID NO: 20162 - DNA, 3246 bp, Cannabis sativa
atttaaatggctataaataatttttataattaatcataaacaactgctaattttcaaattaaactaagcgggttttacattaagaatgtgctagacaatattaatacttagcatttgtacataaattcacatttacataccttacaagcagttaaaaaaaaaaaaggtcattcctgatcagtgtactaaagtggcttttgattagaaaataaaattattaagacatgtttagatccctgtagttttgtttagcttaaccttagattccttataattgttacggcatcatagaagtaaaaattatgttatgtggcgaaaaaaaaaactttatgataaattacatttgtgtacaattttaaaacttgatgcaaaaataattttagctaaggcttttattaaaaaatataaaatcataattattattataaaataataataaataaatgtaataaagacttataatttaatgcaatagttaaatataataataaaaatgaaaaaatccttaataaaataactaagatatataaaataaaataaaaaatagtatatttatggtgatgtaagtttcacttttatatactattggagagtattttttgttaggtgaattatattttagaaaaattacttaaacaattatttttggtaaaattttatacttttacgtttaaagttttttatttacatttgggtaaatagcggcataagtacctaaagttttttgtttgtaagtggcatgaatcaaatatttatttttagcggcataaatacccaatgtttgtaaaactgtaattttcttcgagtttcgtcagtatagactctgttttgaatttatttaaagaacatttggaggtaactgatactacatatttctatctagatccaataattaagaatttaggctttatatgtgcactgtttaagacaataactgagtttataatgacaaaattagaaaaaaaaattacagttttacaaacattgggtgcttatgccgctaaaaataaatattgggtttatgctgcttacaaatataaaattttgggtacttatgccgctatttaccctttacatttttacggttttttataaaaacacaagaaaataataagaaaattacatgaaagtaatataaaaataatattaaaacaacaacaaaacaatatcaaaacaatataaaaaataatatataataaataacaaacggaggaagtttcaacggttacatcaaatgtgtaaccactaaggttacatttattttagttatcggatcattgttagacagctgtgattaatttaaaaattaaataaaaataatgaatgaattatttgtatttgatattaaccatattttatttatttctttataaataaaaaaaaatatatttataaacattaaaaattaatttatttaagtataattaattaaaattattttgaatctaaaaataaaaattttatctattacgaacttgttatagcagctcatataataatgtaatcatcgtggttatatttttaatgtaacaattgaatagtcatcaataataaaaaaaaaaataataattagagtactacataaaaatacattaaagaattgtatttactataaataaaattttaaaattataaaaatatttaaaattcaatatgatatttttgtgaatttgtgaaattattacaaagatttttactttacaacacttattttctgtttttattggtgacgctggtggagcttaatgtatactttgtctataatggttgcgaaaatattccaaaccaaaatatgcctgcaaatttatttatcaatggtatttaaatttgttaattaacccagttcactctttgtcagttgagacatcaatgaagtttaagaaaaaataatgcaacaaaaggtacccctcttattatttgactatctaagaaaattataaaattaaaataatcaaaattataataataacaatgatgctgcactaagtaatgggcatgttgttttgaaactataagtttattaatttgttttgcttctttaggaagataaaagttgaatatagttttttattcttttttaatttagaaagataaaataaattgttgaatactgttttgactaacacagcacttgattttgtgatcctctttgagcttttattaaccaatgtttatttatttttgtcttgactcaaaatcctttcatttcccaaaataggaaaagcaatattgtaaagaaactatatattattatccatgattgttcccataaatattttccaattagatgttagtcaaaagaatttccaagggtagaggatatatatttatggtttctatatagtattattataatgaattcaattaattatgcccaaacctctcctcccttctagtggttcagtcaaatcattagcaaatggtcacgggaacgaattagtgctgtaaatagtgaatgccgcattcatctacctcatatttcaattttgttctttttaaaatatgagttctattgtgtcatgggataaacataaaatgttattgtcgtgttatattcggattcctataatattttatttaagttggccaatttctttatgtagactcaaatttttgtttattttttcatattttgttttataattaatgagatgattacaaaattatatatattttcttaacttcaattctttttatataatttttaataatattttataaataattatataaaaaaaattactaaattttaaataatattaaagtataaggttcttaacgtgttgtactgtcaggctagactattcgtgttatgtgtcgcatcaaagaaatagttagttagtagttagttggtcttagttgttctagctgtcatgtttgttacattggttatagttgttgttactgtaactattctttctgttgatcagctatgtaaagcttttctctctcgtaattttgtaaattgtattcatttttcaatctcaataataaagattcattattattcttcttcctctgttctttcttctttgttttatggtttatgctttactgataggtttcgagtaagccttctccttcgttgatttctcttcttcttgcttccgcttctgttttgtgttcatggctagaggaggaggagtgcgaactcgaagcaatcgtgatcttgaggataactcaaacaattctaatcgattctctgttcttggtgagaattggaagtcgacgagtttcaatgatctt

SEQ ID NO: 20163 - DNA, 5042 bp, Cannabis sativa
  modified_base (4946)..(4967): a, c, t, g, unknown or other
gacacccataaagttcaggatcctctcaatcactgtaagctattgctcaactttcatgacatccggacctcctagaaaaactgaaggggcctatttgcgaaaccaatcatacgaaggctcgatacggttgccagcaacaagttgttgtgctagcacttatggaaccaaaacggccgacacttgttgtggaggaacagtaggaggaacctcctgtctaagcctatgaatttcttcttgttattgattattgtggacttacatttctgcaaacctttgctcccaattctatagagctggtggtggattttcatgaccacccctttggaaccttcaacgacccctgctgtgtccatggggatttgggggattttgaacaccccgaccaccttcgatcttaaccaaattactttgactccttgtattttgctgggtgtccatattataggacttagccttcaaacctataagtcaagttggtgagacaacgatctagattgctctatataccacacttattgattttaagacaacgcattcaaataaataatcataaactattatgcttcctaacatgctttgctaatcacataaattaataaacaagtacatgcttactgaatcgtgggtcaagcttttctccgacgaagattgtacatgtctggacgatcttcgatagacaacctagcagctctgataccaaaattgtaacgctcaagtgattagccatgctacaataactttctaaattcaatgcaaacctttgctaatcaaagggttctctcaaaaactacaaaaaattaaaaattttgatttaactttatactttcataaatatatacatatattcacataaaattacgatcccattttaaacttaacattcaaaataacatttacagacatgtcgcacaacgactacaaaatgaagcccaagttgtcctaagaccgaactctctagttgcaccatctcgacatgtacaattctcccttgagctctgatctcactgttgtttagcttagggttttcctttacctacacatgaaaacaataattgtgcttcaacagactcagtaaaaaaagcatataacatacaatatatatacattatcgacttgtatctaggtgcctatacacctattcacaaggcttatcagatgagtaagaatattctttacttaggtacaaccactgtaccacaggcactgcataccgcaactgtactagtgttggtagggtttgcaccgtacctcaagtaccactaagtgttgtgccacatacactaagtatttatccgtattagtgttggtaacaccatattgtactcattgaacatcatacactatagcaatgcacttgatactgctactgtactagtatgagtagtatacgaattacaaattgcatgcatatattgctcatacacatattcatatataaatacattctatgctagtcttacctcgttccaagttcaagtgtgttggttgacttgttaaatggatgccctatggcacattcacgtaaatgggtaaataactttctaaaaccctttgtggaggcctaaactcaaaatcaaaagttttcccatcgataacaagcatgccaataccctaattattgaggaaataccaaagctagggctctaaaaactccccaaaatgataaactggatttcccaaatggataacttgttttggggttcttcctagtgaaacggctaaccggttctacaatactagcagaaccgattaatcgattcgaagcagaaatccccaaacattttgaaactctctctaattaaatctaaactccaccaaactttctagaatacctataaaagcaccccaacaacagaattcaagaaataacaacaacgtttaataacgaaaacaaaacccaccattattgagccaagtttgagttctttgagctcaaacttgcttaacacaagaatcaagcttcaaaacaaccccaaaccaactctaataaacctaaattatacctaaataacaaaccttaaatactacagatttggacagagccaaaaattaaaaattgcatgctaccacttattacaacataaagaattcaaggaataaaggtttctaaggcttaccttgggttgacctacctcaaatccttgtcaaattctcaaaaaactgataaaaaacaccacagttcccatagttttgcttcagccgaaagagagaaagagaaagttctagagttttggttttctaattgtcttttgtcgtttcattgcatattactcaatataataaaacctaggtttatctaaataaattcagctgaaaaatatagttccaattaatcccaataaaaatcaaacctcactaaaatggcaaaattattattttgcccttgcttcacacttaagcaacttaaaggcttaggggtaaaattgtcaaataccaccactccacctaaactcgactttcaaaatatctattatgtttgtcccactaagaattaagttgtaaacttacccatgtgactgtaatgaccatccatcgcattttccatcgtctctgagcaaaaataataaaaattgtatattttatatttaacaaaaataatactcttaagagtttaataaaatatctaaaattgagaaattataactcaaatgtccatttctaaaaatggggaccacaataaatataaaatcaaatataataataaaatcccaataattagtgctaattgccttttctaatcctcaatttagtcatgctattattataattatccctcgttcaaaagattttgtcctcaaaatctaacctaaataactctagatattgagccctcatgcctgactctagttcccaggtggcttcctccaccttactgttcttctagagtaacttgacaaaagctgtggtcttgtttcgaagaactttctctctcctatcaaagattcattgaggataaatctggctgtagttctcgggcttcataactcaagatatgagtcaggtctaacacatatttccttagctttgaaatatgaaacacattatgaacaactgataatggtggtggtaaggctaccagatacactacttgctcgaccttcgagagtatctcgaatttccctataaacttagggcttaacttgcctctctttccaaagtgccttatacctttcatcagtgaaatttgtaaaaaaacatgttctcctccttgaaatgaatgtcactgcgctttggatcagcataactcttttgcctactctgtgaagcaagtatctgagccttgatcttgtctattgcctcattggtcctttgaactaactcaggacctaaatacttcttttctccagtttcatcctaataaattggggatcgatacttcataccgtacaacatttatgagggagccatccttattgtactttgatagctgttattgtaagaaaactctatcaaaggtaagtatttgctccatgaaccctgaaagtccatgacacatgcttgcaataaatcttctagtacttatattattctctctgattgcccgttagtctgagagtgaaaagttgcactgaacttcaacttcgtacccatagctctctgaagacttacccagaacttcaatgtaaacgttggatccctatccgaaataatggatttggagctccatgaaggaaaacaatttctttcacatacagctctgcatacaaatccactgtataagttgtttctatcgacaaaaaatgttgtgacttcgtcaaacagtccactatgacccatactgagtcatacattgtcatggtactgggcaaaccagccacaaactcaaatcgtaatatccttccacttccattcaggaagttctagtggttgtagtaaccctactagtttttgatgttctgccttgatttgttgacaggttaaatagttagacacatattccattacatctttcttcatcctacaccaccaataatagggttggcacattttggtggtacccggatgtattgaataaggtgtagtatgggcctcgtcaagtatctctttcttgagctcatcacggttcggtacacaaacccaagccttctagagtaacattccattatttgagatgaagaagtccttaggccgacccgccaatacaatttccagaccataaactcaattcaacccttaactaaggccaactgaggtgctatcattgtgatactaaatacttaccaagaactttcctgctcaaagcgtctgccactacattggctttcttgagatgatataaaatctcgcagtcataatctttgagtaattccaactaccgtctctgcctcacattcaaatccttttgagtgaagaaaataattgaggctcttctggtctgtatagatctcacattttccccatatagataatgttgccatatttttagagcaaacacaacggcagtaagctctaaatcatgtgttgggtaacgttgttcatactccttcagttgacgagaggcataggctataccctgtcaccttgcattagtaaacaacaaacttttcttgatctaattacaaagctaacaccggtgatgtgatcaattgttgcttctactcctgtaaacttgttcacacttgtcggaccatacaaatcgcaaatttttcttagttgattttcttagtggcattgaaatcttagaaaaacttttaaaaaaaacttcaataataccctaccaacacgataaaactttgtaccacagtaattgttcttggccttggccaacttttagctgactcaaactttcttggatcgaccataatgttgggctttgtgccctaaataaaactctattttaatgtaatattttctattcaattatcaacaaagaaacaaatttattctcattacttattaagtaagattattggttcatgtgatgatttataaattcatccaaatcnnnnnnnnnnnnnnnnnnnnnnttattgtgttgtcagcacagtagaaagtaatcaagattgtgtgattaaatgtattcctggatttatcagtacaca

SEQ ID NO: 20164 - DNA, 3337 bp, Cannabis sativa
tagacgagaaaaagacgagaaaatgctaactttacatacccgaaacatacccgaaacataggctaaatataacctaacaaaatactcacctcgaagggccccattccaatttttgtccaactaactttttaagatttaagccttcgcactccttttagtgtgctcatcgacgaaaaaattatgtctggcaagtcaaagttgcgtgtgagcctcatctgcgtgaaccaaggtcaacaaatggaaggcaccccgaggaaacaattgcctttgaggtgattccagaggtagatgtattctgggagggcactgaagatttagacttcttggatgagactgacttggagtatgagtgttccttgcgttttcccttttgactctcaggcagaactattttgccctcctccagtaggatcacctttgagtcattttgactagcctctattggtcctcccagagtcacgatcacttttgggacctccgtagtaggtatagctttagccccctcgagagcatccaccatatccagcagggtgaaggtctcatccatggattgatctacacaataagagtgataaatcttcgtacgtatcaaatgcaaagcaacacaacactagcagcaagttagtcaagttaaacagatgttattagaaggaaccaatcctaccctggcaccctaattcctctctaacaaattgataaatcaaattattggagtcatcatcccctaagtagctatctgaagggaaggaccaactagagatgatgtaggaagagtggtctagaaggataggagcaataaggcctaacccatttgagacctacctaaaaaatctccaatatacaaaaaatatctctctttttcctattaccccaccaataatgaggcatccttaacctatacagtctcttgccaaaacctattggtctaacacgagtatatccccggacatagggtacataagttagagataaaggagacttacaaacaccaaatgaagtggctctaggagtcctagcattcagcattgggaacaagaagtgagagcgaggggcctcaagatccttatttgctccccctgttgtctcctagtcagtgacaccttgggcccgggctatctggtcctcctcttccttcattctgcgaaaggcatttggttgacctacgtgtttcctcctccgtagccttatctcgggcgttaggacaaacaacatttgagaggtttgagtcgtgaacactttggggagctttcaggagaccaaaccttcgataattggcggtagtcaccaaatccctaaaattcatctcttccttgctaaaggtttgaaattctgctttgtgattcctgaagagttgggttggggccgtccacaacggaggagggatcctagtccattcggtcaagagatttgggcgttcaaaggcgaaaaacccatatgaaaaaaaaaaactagtgctgacaatccttgaagttcttttaataattataagggacctagcccttattgtctaggtgttgttgcaaagaataaaaaaatatctttaaatttatctctcttctttatgagtaaaacaagtttgtaaaaatataaaagataatattttaaaatgatgtgtgtacttttggcaactatagatgttgctcccattcaagatgctctaatgtgagtgctcttagcatatctaatatcatagaagagttgatgttagaaaaaaaaaaaaaaaacaaataaaaatgactaatttttgtcttttgtgtttttttttttgttgaaaaataatatttgtaatctttttttagggaaattatttttatattattattgttatatgacactttaagatgctcaataccatatcaatgtggtacatatttccaaatcagttattaaattaaaatttttgggagttgatattgaaattcaccaataaatgtatgctaccttttgtggtgcttgataccttaatgtaatccttaacattttcgttattaatatataatatgtacatatctttattaactggtatgctatcttttgtggtgcttgacacgactcctaatatttttgttagtaatatatacatatttttattaacttcaattaaaattttaatttttttttcttaagggctcaatactataccgatttagtacctaataattaattattaattttttaaatcatttattaaattaaaatttgtgagaactgatattgatatacaacaatgacagtatgcaagaattttaatgtgtcccttaaaatttttgttattattatgtatatatctttattaacttttattagaattttaatatttttttaattatgcataagtttgcaagaacatcttcaaagagagatgtaaatattgtactatatttggcaaaaaaaaaaagactttgttatatatttgtattaatttttagcattatgctccaatacacaattgtaaaacttaatgcaaaatttaatatttttattacaagtataaaaacattataattttatcattaatttgttaatgtaaaacaagaatataaatagttcacaactaattagctaaatatactaataaaatattaaaagtaaataataaaattttgcatttatgataatgtaaattttacatcataacaaatattgtgtcaaaaatttagcataatatttgttgtgccaaatttccatcaattttgggcacacaaagcaaatttggtacactagtggagtacaattgttattaagcgagttatattttaactttgcatcacttattactttgcatctctattaaagatgctctaatctttcttgtttaattattttttgtttttgttttattcatatgctttataattaattatttttattagtattttatttttatcaatttatttagttaatttttctttttttataatgagatatatgtacataaatatttttaaaatgtgtgcattccataatttaattattctctattattaaaatttgaattaaatatattcattttgttgaaatgaattaagtaatttagttggttagataattatgtattaatttttttcaaaaccataagtaatttttatagtaaaatttatatgggatcatgtatgataatacttgagtacaataatattttttaaaatatattttatgttaatttttaataattctttttggattttaaatgttaaagaataaaaagtaaaattatttttattcctaaaattaaattttaattttttttgtgtttatatttattacttgtaattattttaaaaaattaagaagaaatgtaattttatctttaaaacaaaataaatattgatacata

SEQ ID NO: 20165 - DNA, 6683 bp, Cannabis sativa
tccctatatagtatatcccaatttaatatatatggtacatgtatatacacgtaacttaattatagtttcttgtatagtacaatatatagtatcatatcttttaatatccaacatgagactacttttcaaagatttgagagattcatgtacgcgtataataatataaaaatatacattaaaaaaatattaccgcacgcatggtggtaattaattatttatattatttataataatattattattagtttattaattaattatattttcttctttaattaacttgattcttaagctataataatacgtttatccctattgattttctaccattatttaatgtgcttcatgtttcttagtgacccaataatgtaagatcttgctaggagctttacatacacagaaagattttatgtggtaaaatatagggatatatatatatatatatataaatataatatattatatatattatatatattatttgctatgtattttagctttaaaaaactatgatactaaattccaagcgataagatatgcatgacaagatgggaatcaattaaacttattattaatgcaaacacacgaactaacactttgattagtggaaatttatttatttattaactatatatataaagatttaatttattaattattatatatatgcttatatagtgatatgatctcatcaaaatttatttggagctggcaagtaacatcactgagagcaagtgcttaatttgacatcaaaggctattatagctaattgttttgccaccatgtaatatatactggatcccatttatattatatagtaataagactcttccaataaatggattagaccttttattatcatcaaaattataaaaaagagtccaaatattaaaatgttgcacctaaagattattagagaatacttaagttcacgtatattgactttcctaaccaactactgtattaaccaaatcaaaacttatatttaaaaatttagaagaagtatctacctaaacataattaaactcatacaaaattagtaacagactttattaatacacaggctacatcatttgttaatgtaaaatgacataacaagaatcactactaataaaaataaaattttatcaacaatagacttaagtacaatattactttgcgggaaatcaacccatacacaaaatagcagaatcaatctcaattttagaaagcttgaaatccaaattaactgcccaaattaacaacaaatgctaatcaagcaacccagccacccaaccatcagaacttcaaactttacaaccgccccaaacgcccaagccgcccacacagctacatcaccaccctgaatgacacacccaaacccaacaaacccccttcccataaccatagaagtattggtgcagatagaataacttcccatcgctggtgggacccaacgagaaagatgcggaagagcttcccctagctccctgagcaaccactaggacactcacaccacgaaattcctctaccactacaatagcccgttcatcaatcatctctagtcttaaaaccttcttcccaaacaggattgaattcctatcaaaccatagccaccaccacaccatcacaagctttgagaacatctctatctggcagctcatcaaattgtacaagcataagctctgggaaaggaacagaacggtgatgggagatcttcccccatacacccatgtgactccacaagctggacaacgactagcagtagatcaaggcatgctcgtggctctccgcttcttctccacatctcaagcattacttttacacatgtacatttcttttcactagctgagttgtaatatgcaaagctctataatataacctacatagaaaaaatttcaccttttgggaaattttcaaattccacaatccattccaccaatgagccaatcccattgaagaatttccaatctcctctgcctttagctctaaagccaatgcgtagccacttctaacagagtaattttcactctcattatagtgtcaacactagcgatccctatttcggctagttggcaatgagatgcctcaaatcacctcaatgtccaaggtaagaaaaaaattactacaatttaggaatattccaactcccatcaacaccagtaaactcactaaccaacctagcatcctctggtttagaagtaataggttgaaacgatctcgaccttggaactcaaggatcccgaaaagccacaacattggtgccatccccaatagataatctcaaacatttgcccacaagttccaatccccacatcagactcgtccaaacgcgaaacaagccattcttctccttagcatcaaaaactaaagttgtagaaaaatatttatgtttcagcactctaggtggtaaggagttgagttcctacagtaacctatagaactattttgcaactaaagtttgattaaacaaaaccgaatccaaaaaaaccaatccacttttggcctttggttgatacattgtatcccaattgacctaagaaatcttcttcttatcaccattagaaccccaccaagactgaagtataatagacttaagcttatcataagtcgcaactttgagcttgaaaatactcatcaaatacgttggaattgcctacaaaattgatttaacaagaatttcccttcccaccaattaagaaaaaactcctcttctaactttgcactcatttttgaatatttctcacatatgttttcaaacatccttttcttgttcttgccaaccactgtaggtagtcccatatatttatcataagaaaccacaaaactcgatcaatcccaaaaatctcaaaagaccagatcgattagttggtaatacattaggattgaatgtaattgacaatctctctatattaacacactgccccgatactagttcatacgttctcagtacacttcgtatagtggcaacatcaattgcattcactctaccaataatcaaactgtcatccgcaaagaacaagtgagacatcctaggaccaaaccgagaataccaaaatccaactactttgaatttgctttagcttgtcgtatcaatgacaagagagcttcatcacagaataaggattaaggtgaaagtggacactcttgtctcaacccccgggtaggcaccacacaccctctaggcctctcatttaccaaaaaaacatattttggagttgttacacaatccatactcaacttaatctagtggaataaaaaagccacactttcccataatttctctcaaaaaactccattcaactctaatgtaaccctttttcatgtcaagtttaagcgccataaaaccctttctaccattattcttcttaaataatgagtgcaacagttacaaaaccaacaatcaaattatcgtgaataacacgttcagacacaaaatcactttgaaatgatgaaataaagggactcaaagtacctttcatcttcaaagtcaaagctttagtaacaatcttctacataacatttcatagtctaatatggtattctttcacaaactttgactttgtaacattaggaataaaaaccacatttgacttattaaattacttaatcgatttaccctcgtttagaatcactagacaaacaaccatcacccaaggtccaaccacatcccaatatctatgaaaagtagtgcatgaaacccatttggctcttgagctttagtagtaccaatagctttaaccgcatgacaaatatcctctaaagcaaaaggagatacattgaacctagttttaatcccatcaattcccttcaggacttgccctaaagaagggaagtgatgagactaaaaaatatgattaaaattgctctcaatttctttcacaatatcttcctctagactcagatgttggccactcgcagtcatgatctcagtgatggcattccttttattcttagaggaggccttgttatgaaaatatttcatattcttatctcctaacgatatccattcatcccttgaacgctacttccaatagcactcttctcttgacaaaaaaattgaaccaaatgagtagttgtacttaacaaaacatcaggctttttctggatcttagtcacaagtttaggcagtgagccaaacttattcttattctattccattaattgagaagcacactgctgaaaagcctcatttaaactatcttaactgtttaaatctgcacttggtagttgccacaaattagtcacaatttggtgttattcctcaactttcaaccaatgtggttcaaaataaaacccccccttaccaacttgtctactttgtcaaaccacatttttaagtatagaaacaaaaggatggtggttcaaaagacaaaatgctctattaactactttgactatagggaacataccattgctaattacaaacaaaacaatcaagtctctcttggacatgagctcccccacccccttattcatccaagtaaagcatccaccttcatagcaaaggttctctaatttatcaagaacgttctgaaaagcatgcccccatagcactaaggcttcgatcactatcacctttcttctcgttcaatgaaagaatttcattaaagttacctctgaaaagccacagaagttgtaacatcttctcaagtcatttcaatagcttccaagattcaccacacaaatatgatttaggattaccatagaagcccgtaaccccagacatttgataaaggcatcaatatgacccttagtataagacttaacaaaaacttcccatcatcattccataataacaacagtccaccacttttcctttgacagttaacatgaaaattactagcaaaattaatctatctcttcaccccctccgcccacccataataaagttcaatctaaaacataaaaactaaacttggggatacttttgaatgacagctcgtaaggtcgttaatgcattaggatcccccagtccgcgagtgtaatgatcacatacttagaatatgagattaataagaaaatttgcattaactaattatatttatgattatatgtgaataattgattatgtggcccctattttcaaaaaaaaaaaaaaaaaaggtattaggattataacttcgaagattttattaaactctaggtgtattatatatgttatatgtataatttaatattattatgatttttgcttggtaacaataaaaatgcaataatttagccattagagtcacatgagaatggtttagaacatttcttttagcaagatataattatttgatattagaaatatcgggattagacagagttatggtatatgactattttatcctaagccttaagataacttaagtgtgaaggaaagggtaaaatagtcttttgccttatgagtttatgttatgaaattagtggaatataagtaacccttagaatatgttagagttatccttgctgaataaaaaaaaggattaatagataacgattaaaaattagaaaataattttctctctctcccaaaacccttctctttttcggcccaagggaaaaatagcacaaccaggtcatttcttcatcaatatttgaggaaattaagttggaacgtgaggaatgattgcaagactagaattgtggtaagagccctagttctttttccctttgttttgttaattttgaatgggtgtaagcatgcaaattttgggaagaggttctaaccaaacctaggtttgtcttaggttgttttcagaggttgttttgagttgtttggagtgatttttagggctgattgtggttttgagaaagtttgatttcaataactcaaacttggcccaacaatggttatttctgattctgtgggttttggctgctgttgttgcttgatatatgtttattgaggtgtaattaggtattttagagcttggtttaaagtttgaagtagaattgagttgagaatcaaaacattttggaatttctacaaaaaaaaaatggtccaccatttgatccaccagtttcggcagttttgggagcctcaatttttgtattttctaaatatttacagtattgccacgctatttatcgatagaaaaacttctagttttttgagttttagtcaccgataaggttttagcagattatttacctattttatgtaaatgttacatagggcttccgttcagcgagcgatatctccattcaggttgaccgacacacttgaatttgaaaatgagataagattagtataagatatgcatatgtatatgtgtatgtatgtaatgtacatgctaatttatgtgatttagttaacatcaacactaatagttgcggtacgaagtacattgatacagtatatattgttaaggggtctaacacatcattaccaaccctagtacaacacgagtatggagtgcgtgtcgtacaacactcaattgtactcaaggtgcgattcaactctaccaacactagtatgggacgagtacttagtgcatgtggtacagagatcgtacttcggctgagaagatttttaattcatcggatgccttgttggtaggtgtatgtatgcctatttgcaagtcggtaatatgttatatattttataatcttcttactgagtccgttgactcacaaatattgtttcatgtgtaggtaaacgaaaggcaaaagctaagcagtagtgagtcgagagcttgaagatgattgtacatatc

SEQ ID NO: 20166 - DNA, 4033 bp, Cannabis sativa
aaaaaggaaaaatacacaaaacagagaattaataggatgttcttcttcacctagagagaaatccctttttggcttcttgaaaaaatggttaagagagaagaaactgaaatagcagagagctttgttagcttctctagtgacagaaccagagcagaggagagagtagaatttattttctctttcttttatgatatagtgaaaatgaaaatgagagaaggagagagagagtggaactatggccgttggatcgatctgtagggggagtttggaccattcattcattaaatgggcctagtttgagtctagttgcatactacaacttttaaatatccactatttctattttgtaaaattaattattttataaaaatatacgaaaagatcgactttctatttttccttttgaaaaaataaaaaaaataaataaatgacattctagtctacagtgccagatatgctcccacacccacattggcaggaaaagactaaaataaaaataaaaaagcagatttgcatgtgttctaaagtagatggtttaggtttggggaataaaaaaattaagtgaaaatgaagaaacaaacaatacaaaacaaaattaagatgcacacaataattagtagtttttgaatatttgctagttataataaaggtttggttttgtttgagaaatgtattattttatgtggaaaatgaaatgagtctttttgtcatttacatatccttcaatcttagtttagtgaaacatgttagtgtccaccatgtcaaaaaataagaaaataaaaaataacccaatatgtaatgtaagtaataccctaacataaataattcgttttgttagtcatttttgtttattatagaaaagattatgtagagtgtaatttaaaaattataatttagtgatagcaaacattttgtcaaaattataaattttttgtataaattaagtgaagaataaagttgaaataggctgtgcgtatgtcttttcttaattatttttatttaatttctaaaataattacaactatttaacaataatccaataattatattttatgtaactattaaaatctcttatatatataattaattatatatttctatttttatttagaaaaaactatatatttctaattttattaaaaaaaattatatattcattgcaaaaaaaaaaaaactatatatttctttttaggaaaaaaaactatttgaaaaaaaaaattatgcatttttaaaagtttattttcaatatcgtacaaagaaattaattgaaaataaactttactataactaataaaagttttatagtttattttcttttttatatgtaaaattaactttaacaccaaatttattcataatttttttgaaatttggggagaaatttactataaccgtaatataatatcaattatcatataaaaaataattagataatattttttaaaaatatcaaatatttcttcacttttaaagttttttttctctcctcttctaaagtctcttctagggtttcttatgcaccttgggcgtcgccgcccagatctagatcggtggcacccaggaggctaattagtctcgacatgttgcgtgttggggaggaagtctcctcttagtgggtttcggtgttagcgggtcaggtgggtgttggacgttgttcttcaggaccggttccttggcgcctgttttttcaggcgaccggtcactgcttttggaggttgtccatctttgttgagatggttcttaccgctggtcagaggtctatggtggttctgtcctattgagcagcgtggcgctggtggtgggcttctttgggttctcaccatttcatttttgaggaaaatgcttggttgtggtccttctcagatgtgtactttggctttggagtgttgtttttttttttttcctctttttttcagatctcagtgttttctcgtgggttactattcaggcatcctggctccagtgcacaatggttgttgattagctttcggagtgttgtagatgtagaggggggactcgggtcttacccatatggatgtgcttctcttgtcatagcaccttcaccattcggttagccgatatttgtgtcatctccttgtgagtttgtgcgatttgtccgccaggcatgtagagttttggcccctttcttaaccttgaatgaagtcttgtttcttaaaaaaaatatcaaatataaaattaccttaccaattaaagtaaaataatatttattctataattgcttttagtagatcccttatctatttggacatcctaacaaaaaatttagtctatttttttaatgatcatgtgaattgtagaaccacctgtaaattttttacaaaatttcaaatattttatagtgtagaaaataagaatcaaatagttatttaccactgtgtaaaaaaacagtcgcgtgcaacaaaatattatttaaactttatttttagtattgtaaattattttaaaaaaattatagataattttaaataactataatgtacacaattatgaaaataaattggactaataaattattctaaatgttgaaacagatataaggtctactgaaacatctctttaaggaagtgtatagtagacttatccattgctctttattcttatttaaaatagttgaaaaaaattaaaaaattgctaaaatatattattggtacttagtactcttctcggtattatattgctattagtgtaattaattagcggatttcatatataacttaagaaaatagtttttaaaaaatattattaactaatcataaggtattacttatataaaatattgggacaatactaatgccttatattaatgttcaaaaaattatttgtaatttgagatttgaatgtgtttttttttttttaagcaattgagagtgtggttaaactttaaagaaaaccctatcccataatattcttggagatggatatatggtactagtccttggagaaagaaaagcaaagccttaaataaggacaattatattattcagaattgtaagggttaataaatacaacaactaaaatttaaatttcatggtgaaagagagattttttgaattcatgtaactgaagctcatacattattggtgtttaattattatagtttttttttttttttggtgaattattatagataattatttgattgtagaaagaaattgagcatttaactggttggtctttaatattaaaatcatcgaagaggggttcgaaatttatgtcgtgttgggtccagagtactagtcttacaattacatgtgccacgtggtttcatacagataagcagtttcagtacaatcgagggagctcagctgcgtttgaattcaaaatctgatgatctgatgcgttcaatttacggtacaccctagtcgcttcatgatattattggctaagtcgtcagcggaagcatttaattggtttggaattcaaaattcaaaaaaaaaaaaagaataaataaattagtggtagaatagtaaatagtggactccattccattccatccatctctgccgttacttttttcagtttcagtttgtgatgtgtgtcagagagctttactgactccatctccgtttgtctctttagccccacctcagtagtacttcatattttcttggcaccacattccctatttattttatttttactctcccaatcccattttattttcttgctaaatcagtagtatttttcttttgaattatcgctggaatcgttgaccaaaaacccagtctaaaaggccttttactctttctttgttaaaaattatgaaatggactggagtgagctaaggattgattatatatagggtcgaaagataaaaaaaataagagtaacttacggtaaaacttataaagtttcaatctacttgcaactttaaattaattttttggacttgtattctcttaacatttaggggtttggttaggaggaataaaaatataggaataggaatgggaatgggaataggaatgaaatggaataaaatttaaaatggataaaaaaaattgataaaaaa

SEQ ID NO: 20167 - DNA, 1969 bp, Cannabis sativa
tagcccaagaatcctcccaaattgcaattcggcgaaaagttcctcctcctggtgggaactccacctgatctcccaaaaaaaggacgatgagggccgggaggccaaactagagccgggaaacggtcataatctccaccaacgaacgggtaagggttaggatctctcctcctaaccaaaagggaagacactctcctcctctcttctttcttccgtctctcatgggcaaaagcactcttccaatcaaaggcttctctctcatttccgaactcctccttaaacttaatcttccacaaatcattgttgcttgacaagtactgcagttccttgcttacacaacccattttggcgatttgggcagccggaagcaattccaaaattttcatttgaagttcagacgggagacgcatgaaacatggtggtgagggcaaccctgcctttgcgcaaagatcaattaacagaggtgatacaagcttgtccttaacaattttccaaaattcgtaaacttttctttcagaatcaccatcgggggatagtgcaccaatactcggcacaaatttgtgttcatccaaacataaccggtacgttcctgaccctgaaccgccactagataatgatccaaatacaattacaaaacggcccataatctgaaactttaaaccaactctttcaatcacttgtgaagtagagtcttcattttttcccagaatctcaggcagggtatagtgaaactgaggtgaaaatgccatggaaggtttccaattttcaagaccagaaaatttataaacaggcgtcccagaaaccaagtcgaacccaacaaaaccagattctagaagaactgaatgaaccgccattaccattagcttgtggtcatgaccatcttcccccaacccttggttcaaaactctcttcatcctccttacgaaacatgactctgggaacttactccccacgctaccgtcagactcgtcctcaatttccatatcctcagccccgaaactgtcttctcctccatccaactgcaaattcgaaccctcttcatttaccttatcagtttcatcagcaagagtatcgatatcactcacctgggtctcctgattcaggggagtcggagctcctagggtaccgtcgtgaccaacatcgagatcgcttcgggtctccattgtcacaggagactccgaattaggcagtggtgtttcagagacaatagaatagaaaattaggtcaccagatgcgatacctagggaatggagcgaatcgtgaggagaagaagcgaagagctcatcgttcctgttgagggaaaggcggagagacgaagaagaggttgttgaggaaatcgattgagcaatggcgtccttgagttggagaagagaagaggcattagggagctcgattctgatggtctgtttggattcaatggatctcactctaagtttcatggttgatgtctgttttcttgcttagcaccgcaaatgttcctcgcttctttctatctctttcctcttattatgtgtttggtaaaaataaaataaatctattatgagtaatataaaattaaaataaagaagaagatgaagtgataatttgagagaagtgctaaggagattgctagtagttttaaattggttcatttatctattctagggacgttctttatttatttatttatttatttatttgaaagaaagagataactcattaagataaatctactattacaaaaatatttaaaaatcgtaaataagtatttgtccaaacacacttttttagtacagtaacagaggttgttagtgtgtgggtaacaccattcgtcgattgcggaatggtgctgcaagaactaccaacaacaactaataaaaaaaatatctaataaaattgacttacaaactaaaattcaaatgaagtttattaatccaaccaattgctactgtagaatcattattaataatggagatactaaaactataatgat

SEQ ID NO: 20168 - DNA, 2113 bp, Cannabis sativa
aaaaaaaaaaaaacaaaatgagatgaggtgaaagtggcaaccgatgcaagaacacctttagtcatggaagaatgcaaccaagatagaagcaactgatctttgtgtttccattgactgtgatttgaattaggctctcttgtaataagtttggcaaatggagggatgctagtgagtaagatttcatcaagatcgtgcccagtaggtataacctgagatttccaagaaaaaaaatagtacaatctaagtagaagagagagaatgagagaaaggattccaattggagttcagttggttcgagtggacgacagtagcctaaactgtgttgttcatcggagctttggagttcagttagttcagttgtttgtgatcaatactattttgatttactaaatatttatatatatatatatatatattgtgctctttatttagaaagcagacatggcaaattgcaataggattaattcccccaatctctcattccagctaagttcattttgtccactaaaaaaaaacacctaacaactaattaggttctatttttttgtatttagcaatattaattgatggttggggataattttctatatgtaggacctaagttagttgtatcgactatgtttaaaacctataaaagagatacaatgatgaacaaatagtaatactagggcaaaacaaaagaaaacaatctttcaaaaaaacacatacatattattatttcacaaaatgaatagtgttaatgtaataatgttgatggtattacaaacatgtattatggtaacattgttttcttgtgcatatggagtcatggatgacattcctcatacacctcatgccccggaactaggaatcgaagaaattaagattcaaaatgttttggatggaaaagaggacttgaccgttcactgcaaatcgaaagatgatgatctcggtgttcatgttttaccctacaaaggcacttatagtttcaaattcagccgtaactttcgaggtacaactctcttcttttgtgggttcaaatggggaaaccaattccaccggttcgatatttacacgccacagagtccaaaatgtaacgttcccaatgaatgtttgtggtttatcattccttctggtccgtgccgttttgacaaaaccaccttcaagtatagttgttcttcttggaattaaacgagagtaatattgtgacacttctatttacatattatataattttgaccatatatttctaataagtgagaatcacatctcatttaattatatggttaagattaattatacatcatatattatatgtaaattatatcatattactcttaacaaagatccacatacaaaattaaatattaaatatatatcgtaaatatggtgtacttctttctctaatttcttaattaacatgttgtaaaataagtgtacaataatacaatatatattttaacctatatatgcaatgcttgaaactattttattataaaattaagggttgctagagacacattaaatttggttatatttataggctcgtttggtatatgttgttgtatttgtgttggattgtactgaattatattaattatttaatataatattatttggtattaacttgtattaataatttgtgtaaaattatattatctttattataaactcaaccccaacttcgacccccgttcgggtccagggtttgaatcaaggttggggttcggtatgctggagcccagtccaggtttcgagttcaaattcgaggttcgaggtccgagttcagggttcgggatttgggataagggtcggatttggggctggggtctccaacccggccaagaccatttgtaaatattattaccaaattcatttgatctagtttcaaatgattggtctggattaattggggttttaaaccacaaattgtggattatataaactgccctagctaatatatatggataattaatttttatattaaataataccatttgtattgtattaatttatgattgtaataattaatacaatacaatattaatacaataccaaacaaaatcttggcaatttcatatatggaggtaatttaatgcaacaatttaagtacaaaatatatggtggcgtttgg

SEQ ID NO: 20169 - DNA, 1667 bp, Cannabis sativa
actaaccaaacatgacttgtttttaaaaacttcaaaaactatttttttctcatttctaaaaataattttttgaaaacaaaaaaacagaaaacaataccaaacatgcactttaaatatctataagaatttcattttttataatacacctttagacaaatttctcttcgttatggtcttttaatgttgttcagattttttttacaaaaaatgtatatattttgagatttaaaagtttattttagtgttatagttagtttagtctaattaaaatttaaatttatcattgtacttaattttaaatattttttaatttatagtcattcttttattttgtagtatattttagtttaattttgaataaaaaacatacatactttatttttaaattacttttatatttgattacagcattaattaacatagcaaaaacacattagaattcctagttggaatagttactaaaaaagaagtaacatgattgtataaactcaatccaacaaagaaacaaactttcaaagacaaagagagcttgcctcaagcaaccaatttatccaaaatcaaaattgattttaattgtatatttttacattttaaaaataaaataaaataaagaataatgattagtagacataaaataaaaaataaaaaaaagtatacctgatgataattatatactgaagaccactagctttgatgaagagcagtccctaaatcaaaacacaaaatataattagaggctatatcaaaataaaaaccaaaatctttcatcacaaacatagtacataccttttctttttttaagcttttttcccacctaatatataaaaacagagaaataaactacacaccaattttttttgttttataattttatgaaagttaagtaaagaaatgagcaacaaagaaaacaactcaaagtaaaaaataaaaataaaaactctgggcaacaggaagaaaagaaaaatggttatgaagacagttttttttttttttttttgagagttgaaagagagcagtgaagaattagatgagaaaatgagagtggtatatgagtgagtagagaagaagagagaccagctttgacatgactttgaacaaactcaaacataaattcccaaagtcccattcttttatttgtttaatcctaagcattttttatttaattaaataaacaaacaaaaaaaaagaatcctaagtatgttttgattattataatatagctataataagagtatattgaaagtggggagacgaaaggtcatctcttctctttattttgcatgtttttgggacagagtttgcttttgggttattgttttttaatctttctgtaaagaaaagccactggtaccacatttttaaatctatataagaaaaaaaggcacatctacctaaatcatggagactagtaatggggatatgtatcttaaaataataacaatagttgagagcaattctccaatatttggatttggagatgatatcttatcatcttttggttctttccttaacctgttttgaacctatgttttcatccattattagtttgtacggtgcattttcaacattagcttttaaatattgttctctaacacatatataattataactagtatattgttacgtgcgatgcacgtatactatgttttatattaagtattatatta

SEQ ID NO: 20170 - DNA, 4561 bp, Cannabis sativa
  modified_base (4080)..(4081): a, c, t, g, unknown or other
  modified_base (4180)..(4183): a, c, t, g, unknown or other
aaattcaaaccgcgaccgcatcgcaaagaatttcaaaccgcatttttttttgcagtgcggtgtggtgcgaacggtttgagcgatttgatgaacacccctaaaaagtactatcatcgttaaatttatatacaagtattcaagtgctatttatgaaacactaaggtatcgtttggttagaatgaatgaaaacatataaatatgaataagaataagaataggaatcgaatcgaatttaaaacgcagaaaaaagttgatgaaaaaattatcaatttttttaatctttcattgaaatggtttttctttctatttcaaaatggaatagtcatttcatcaaaataatgaaaaagtcattctattataataaaatttcaatactttaaaatacaatcaaacaaaaaaaaaaaatataataaacgttatttcttttccattccattaattttttcttgctaatagtagcaaatgctctattatttatacgtatacacacattctattaatatttccttttaaaaagatgttgaaagtggaaattcgtcaaccaaattgtggctaaaaaatcaaagacttaataaaaattgaaagcaaaacttaaaaaactaagaataactttcagagctttagtagagaagaaaaatgaatgttgtattgctttatgtgtcattgattacgataattttctacctcctttcacattctaaaaatggagtatatataggagagttctattggctttgatttacaagatgatgccttaatagtcctaagacgacatgaagaatgttgtactcttgcatgtaacatgttgcagggagtgctcttgtgccaagtagtggttgtcacgtgtcaggtggtcctaaggtgaaaaggtagtagttgcagcgtaccccttctcaggacgccagggcatgcaggcgagatgcctccactactcgtactctctcttgtaaccaagtcttttaggttgtgtggttgtaccctcacttgtacttgaccgcgtacatgtcttgtccttttgatttcttgtctaatgactttcttcccaacacttacgaaaatttcactaattattggtcatgttgcatggtcgagatgcttgttgggcatatggccaagatgaggttcttcaaaggggcttgatcgagatgctcatatgatactttgaggagggtactgagttggtgagataaagagaatgtagagatgcacttgtaaagtgcatgtcgagttgcacttgtgaagtgcatgttgggctgcacttatcaagtacatgtcgaaatgcactaataaagtgcatgctgagatgatcaccatctcttggtgccgagatggtgcccttggagggcatgccaagatgatcaccatctcttggtgctgagatgtcaccaagtgacattgccgagatgcatggtcttcaatactactccttggtcgtgatggttgagaccttaaggcttgaagctttagtcttgaaacctgaagcttgggacttgagaactcatgtcttgaagcttgcatcccgagactaaaaacttgaggctctaggctcgttggactcgaacatattgtcttcaatttatcgataagattctattaatggtgtattttacttgactaattttagaaattattctcgttaattttaagggttaacaaaaaaaaaaaaattgccaataggtaacaaaatttattgttcacgtaagattatttatggaaaaataataaggttaagaaaaaaaaaattatatacaaagaaataaattaaaaataaataactaaacctatttcaactgttaaaactatggtttcaaatataaaataaaaataaataaaatgttaaaactatatgcatcatgtatgatagaattttaataataagataaatattacttaatgtgaataagtttatcaaataaataaaaaaaaacaatatacatccttattaaaaaaaataatgttttgaaatcttcattttattcggaataatatgctgtcatagtaaagtagaatgtatacaaaaatttactctttcaagtaaaatattatatattacaatattcccaaatataaataattctatataattcaccgaacattgtcatgttataaaatgaatgtatcatatctcattatataaacaatattctaatattaattatatgctccaatattataatatcataacattttcagctaatttaacatgttcttttgaatataactaatgtaacattaattaatgatatgggaaagtgatgacataatatattagtattatagtatagatatttacatacaatactatatatatagataaattgcctgaagatatgctgaactcgcacattaataatcagctgcagcaggttctataacaaagagtgcgtaatagttcacagatcaaacgttcataaaaataaacagggccggactaaacaatttgcggcatatcattagaaatgaaagagaggaaaagtgtagcatgatagacaagagccagtgagaatagccaaaggagcttgcccaaaaaaccaggtgaggtcatatcatcaatgatgaaacctagttgaagaggattatttaggcaagtcatccttggctaccaaacatggctcttcatcttcatacaacacttctactcttcttattaatactttgatgagtgtgtaataataagtattacttactccattataaacaattacatcaatatgtatttatagggtagagaaagtatagttggaaagttagtggctaaattttggttgttctattccgacacaaacatgtaaaagagaatatattctggcaattacaaacggtgcaaccatatccattaatcttcaatcttcatccatataaacgatgtcgttttcactctttgaccgacaccttcgattatacaaaaatatattaattaattgcaaaagtatattatttttaaagaatataattagcaatttagccaatataaagcttaataaaaaaatttctcccatgatttatttagtatatatttatcgcttttgcaaatgacttttgaaatttgagatttgactttattcacatattacttattttttattaaattgtgtggtaatagagttttattgttattttgtaggttgattttgtggagggcctactgttatagagattttgccgataaatttattataaatatattttatttgagaattgtcatctttttactattgagattttttttattagttttaatatcatcgttaggggctaatttactttttttttttttttatatcttattttattttgtagatattttgtggagcattttgatatgttaatgagttggtgtgtaattttcgatgttacaagttgaagctctagctttcttggtatactatttgaggacgttatagctttattatttaaattttcgggagcaattttgtttcatgttgctcgtttactttagcagtttatggtttgacaaagcatgcccttcgattagacgatgaactatcttggttcgaggagagttcctgcgcattttgtggatatctgcactgtaaatttatgagtgattctaatcactacgtaaaaaaaaattctctgaacttttacattaacataaattaagttgtgttaggttttgtttcattattttatttaaatactgatgtatcattgtaaattagtaactttgtctcttaaattttaataactatcaaattgtaccctcttaaaataaaaatgaaaaagattcaatttttttggtaaatcctaaaaaataaatttagatcttaaaaaaattatattttgaatgattaagaaaattaaaaaagaaattaaaattttaaaactaattaaacgatttaaaaaattaatttttttttattaaaaatctatttatatataaaaaaacgtatagtaaaaattaaaaaaaaaaattacgagaacaagtttgagtctattttttctccaaaaatctagattttttagtttttatttctatatatttttttaaaaattaattttatatttttattaaatttttaattatttttctctattttttaatatatgaatttatanntataaataagtttgattttttttatataataaaactttagtttgtttaaactatttgttagatttttattaattttagtttgattttttaaaatatgtnnnntaaataaaataaagtttgaaatatatatttttttagaaaaaaaattcattttttaagtaaacttaataattttttattaatttaatatttttatcaggtttttttaataatttttttaggataaatagaaaaaattaatttttaaaattaatttttttaaataaaaaagggtaaaattttatattaattaaagtttaagaggtaaaaatattaatttttaacggtaaaataaacagaacttaccatacagattattattatgtaagtgttattttataaagagtttttaatttttcatggacaaaattaaatagtgttcaaaatttaagtgataaaaatattaattattatatattagaggagaaaaggggacctgaa

SEQ ID NO: 20171 - DNA, 2086 bp, Cannabis sativa
catatgtacaaattacaatgctaagatataaatatatgctcccttttaatttttttaatatttggaaaaagaaaataaaaatctggtaaaatattattgattggtatatatgtaattagcctgctaagcctatatatgaagtagtatttattgtaggaaaacgatcgaaagagaaagtgaaagatcagagagtatatattacgaaaaatacacgactttaatatgtatgattctgtagattcaaaaaataaagcccaaaaacgcattatatttatttgatttttgataatattttcagcatagaaaaagctagtatcttaatttgagcatgacaaaatcaaaatggggccatgccagttagggatatagttgaaacataataagtactagcttttacgaacaccacacccttggctatacctagctattcaccattaacaactttactaccccttataacttattattattattattagcttagctacgtacctatagctattaaagaatattcaaagcttctacaacaacttacattaatttccatgacagtaacaactgcattttttttaaacaaagctaaccaaaataaatgtcttacatattttctacctaaaaaaacaaaaatccttctttttctcattacattacataacaagttaaacagtatggatcgagtaatgggaatgggagatatcacgtatattcgtacgtaccatttttatttattttattttaaataatcaattgatgtttatattctatatagtataacttcagcttcactcataatactttaagatcgaagttagatcttgagttttattattaaaacaaaaagtttattagtgatatatataatataactcttacaaatatatgcatgttgtggcaaatattgctaacgttacaaaaagatatataatgttgattaatcaatataattaatacctagttattcttgttacgattaatcaattatatatatattatatagttttgaaaaatgtcatcatgcatttttacaacttgtctttgatatatggctgcttcacgccaaaaacatccctgtttttttagagtaaatgctatacagtatttttttttaatacatattgtactaatattttacaaattcaataaaaatatatatatatatatatttttcgtgtgagaaaaaaataaaaaacatatgatactaaaattctactatatttttggtgaactgcatttaataattggagttgccgtggtgggtttacggagagttgataaaaaaacattgtgcatgatggtgggcccacgcgactgaaacaaagatatatggatgtttctacaatatgcctctttaaatgagaagggatgaactaatttactctctattaattttggcaaaaaaaaaaaaaataatctaaattttttcatattcgtgtacattatctttatctaaaacatcttgcaaaattttgaaaattttgaaaattttgaaataatttacaatgtagatcgcaatgttcaaacaatttattttagacccgtataaaaaataaaattatcaggcatacaacagacggtgattaaaccttatttttagcatgttaatttttttaaaattttgtaaaattttacatgcatgatgtcttaaataactactacgtacatgaccatgaaaaaaaaactgaactattaatttttttagaaaacgaaacagataggttgcatcaatggcctttttagtgggtgtgggtgtatattgcaaaattttcctctatatatttgttgaaattaaattctacaatgcacatactaaaagaggtgcactgatatatctatatctattttggtatctgaaataatttttaagttattttttttatagttgtgtacattgaattatttaagacatcctgtaaaatttagaaaaatttaacacgataaaaaatagagatcaaacagtttgttgcacgtgtgacactataaaaaaggaccatttttagtaacaactttttaatcacaagataaattttttgtgactaaatgtgacttttagtcacaacaaaaggttacttgtgactaaaagatagta

SEQ ID NO: 20172 - DNA, 3965 bp, Cannabis sativa
acaaaatcatatccctaataatatatattttatagtttttcctttttattcttgttaaattcattttttataataaccatatatatgcacggtggagctaatttcaatataatcttaaacttcattaattatatataaaatattccattaattagtattatatatgatcatgaagtggtctctctaaatatatctctcttagtgaaaatgatgcagaatatgttctccaccacaaagaaattggccagcaaggccattatatatatacaaatacatatatatacatatatatatatataaatatatataagcaccccgggaccaaaaagctagggtatattacatataaatgttcatattggcacaccaaccacaaaccaatatatagaagatgcttaatttgattcttttgccaacaatttggtacaattttctaaggccctctaatgataacttgaaagagtgtttagtttttcagtcatctcatgtgaaaatgccaaagaaaaaaaaaaagtggaaagaaaaaaattcatatatatatatatatatggtccacactttgctagtggttggaaattgtacttatctcctttactataagtagatcaattaatatatattttgtaagataaagaggaatattataattagcaattcacaaagttatatatatttatatgtagatacataatagtgccacatatttataagattagacatgtccctatattggactaatttggacacatgcaacacaaaaaatatatattatattattgaaaaaaaaaattgagaatagatttacaattcaaatatatatatatatgagtgtagtaatgtgtattataattattgataattagtgatgagtaggtgaagaaaatttgagtttttatagttaatttttttatttagttagaattttttttattttcacattatatataaatcgaggttattctatcagctaaaaaattaattaagaaaatatgtttttaggtaaaaaaaattaaatttagcttaaatatttttgtatatacatatatgtatataaatataagattattcgatatgggttgatatattttcatgtctttttcatgctaattatgaactgtagaaggagaaatggaatttgttaatttgtggaataaaatcaaacttaagaaaaaaggtagcctagtttctttctttctttcctttttatgtgtttttttttttaatattattattattattagttttgaaagtgaaaattttgtctttatttttaattgactgaaaaataatataatgcaattaattgagatctcatcgctttcgctatattcataaaaatgatagtttgacgttttctttttcttattaatcaacaaaagatgcctttcttctttttattatttttttttatttgttaattgatgagaaaaaataatatatattggaaagtataaagttttgccaagtgtccatactagacaaaacttcaaagaaaaaagcattattatttggtattttatggacgtgttatattgacatgaatgtatatcattttaaaattagtaagtgtttttcgtattaattattaaattataatgtgtaaaattcgaaattaaaatgtactaataataatgtgttacttttgtgatgtttggtacttaatttaaaattcaatattaatatttgggtaaaggttaaggaaagtttttgtgtagtgtaatttctcactaaaatgagccaaaaactacttggcatgcacacatatacatttggtccatatgtatatatagatatatataatatattaacccaatcattctctatagacaagttaaggttagttcattattaagggcaagtcatgattgaatcactatatatgtcaacacacaacacaaggtattttcttagctagggttttgaatgatcatatatatatataatataaatatattacatgaacaagtggtgaatgtagattcattttttgattttgtggggaccatatatattattgcgcatgatgtaaatatatatacatgcatacatgtgtatatatatatatatatgtttctattatattgattgaattacaacaactaaaaaaattcacaacaaaatttattatgaaaaataaaaaaaaaaaaattatgactaattataaataataatttctatgttgtgattaaaaaattcgtgaccaaatgtattagtcacaaaaatcacaatttattgtgagtaaatatgtttttagttacaatactcatgtaactaaaactaaattatagtaacaattacttgtatgtaaatactatattttaatcacaagtaatttttttgttgtgactaaagatcacattaaaaagttgtcactaaataatatagtgttttttttttagtaaaatttagtacttgatagaattttaattaattatttgatgatattttatataatgcattaattgatttatttctacatatatatggactcaatcccttgcattaattaattacatgtattactatatttatcgtttaattatatttggaacattattcaagaagcattagatataagttgaaaaccctaacacataattatttaggattatttagtcaaacattaaaaatgcatggttttgttgttttatgattatccttatataatatatttgagttttaattaaaataatttaatatatatttatgattaataataaataagacttgtttttttaaaataaataaataaataaaaccacaagattggcttaataattaacagtacgtacgtatgattggttagctatatgtttgttaagtttgttatcagttagttctgttatggtttgtagtcattgtcatataatatacatatataatacatatatatatatatatattacaataaatatgattatgtttaaggtttatgatgctaatatagaaaaacaatattatattatattatatagtaacaagatatttcaaggacatttcaatctatatgcgtaaatattgccttaattagtctttaattgattatagtaattagtagtattttgaaagctagcatgtatatataaaggataaatatattttttttttttttgaatgaaagatgaattttattcaggtaaatattattttgaattctatattttgtaaaagttatattaaatgataaaatagattatgtattttcaaaatgatataaataggattttgaagtgatctaattttgtcaaaataaaatttaataataatttgatttagagatattatgattaacttttctatatttatttgttcatgttaaaaattgttttcagattgtctatatttaaaaaaatattgaaaatttagctcagaattcaattttaatcattttgaaaaatataaagtttattttttcatatttaacaaaacagatctaatcggtaatttttgtaaaacacagaattcaaaataatattactcatatataaatgaattagccttttcacaatttcatctccataactcaattctcgttcttcttcattttttttttatcaaaactttctagcttcaacttatcataataagtgaaaaagatgagaatagacactagtaacaataaacgggtaatattaattaatttaattaaggaaatttataaatattgtaattagtataattaagtataactattataatttataacaatctcattatcatattttgtaatatttacttactatatcctatataagtataggttaactggtcatttctaagttgaacaatcataaggaaaaaaaaaatagtactcattttacagtaatgtgttttaaattaaagtattatatataatttatgccttttaatcaattatttacattctcaatcacatgtatttttgttattttctttgaaaaatcattaattattctaattaaacactcatagattcaatctttatc

SEQ ID NO: 20173 - DNA, 9798 bp, Cannabis sativa
ggagtttggacaacagtaattgggtgatttcttttttagaagatttttaattaagaaaatggagtatcaattccaaaataaatagccatgatatgaatcatacaatcttaaaaaagcaaaaatctagtttttcagagtgaggaaagtacgaaccatggtcagtcaaagaattcacgggaccgtccttagattgtacttgttgctttggattgagtccactttgagttgccaattcgccattatttccactgggaccgtctccaagcctaagagatatccaatcctccccgccgacgccatttgacacatctggatgatctctaaaatcgggctgcaatgaggaatcagaaggcttggatggaagaaataactgaagaggtgggtcatcaccaccagcaaatgccaatggattatcaactaaactatcattcatatcattatctgatcgaccaatagcagaattagagactagtgctgcagaccccaaggcactctctgaggccaaactataaccgttcatagctgaagaacagttgatggaaccatgctgtagatcaactaaagcatcagtcacatctgcatctgaaccaaataactgaaaacctggtcctgcttgatttccagtaggtaaatgccattgagttggcattacaaactcatcatcagttccattaaaaagacccaaacatgcactgccactagtcacaagggttggatcttcatgataaggatcagtaattacaggaggaggcatggaaaaactaatcccagcatctgttcgatgattttcgtacatggatccagagtgtacaaacatgtcattgtcatcatctgaatcactgagtacaataacttctgcatccccagttggagcagaaggcatttgatcaggaataccatatatggaatcaacattaagagagatagaatccatctcaacaactccattgttggtgaagtcaaaatttccaccaccatcttgattcacacttggatcttcaccatcccgaccactttcagttgcactgctgctcattgggataactttttgctcgtagtttccaaatccatcttgtaatctattattgccagcggaggtgtttgtatcttcaggtttgctgacttcccaaaaaccattgctattttttctgattccaagcctcaaaccatgatgattttccgacataccttcctgtttgatctgcttcagcatttctgttttagctttttctccatcagggggaagacagagagtaccatcaggaaagtgccactgacaaagatcaccgagatctctacgttcactttcacttttagtcttcactcgccaagacccatcgggcttaacctcaatctctgctacatcttctccacagtgcctcatctgcaacaatcgcataatagaaaaacaatacaacctgagtaaaaaaatacattagggaaaagtgttcattcaaattattcagtaaagaaattaccagctttgtaataatgttaaaatatggatccacaatgacatattccagggaatagttcttgagacaaatagggcactgccactgcagagaaaatcaaaaggttactaaagcacaaggagaaaattatgaaagcagaaggcgaattttccaggtgagcttgccttccttgaacgttgattcaactccacaaaaacgtcaagatcaaaacagcccatgtgagcacaaggtttgaaccttccagcaaccttcattcttgaaccactcatctataattttatatgcacaagttagcacatgaaaaaacaaaggtttaaaaatgaataatattttataaacaaaaccttaaaaccaatcataacttcacaaatgatacttatacaaatacttttcataaacatatatatatttagataatgtatatctatacacttgcttctatcagagattgtcccaatgaacatcaaaaaaatatttcgcgggtgtttttccaaaaggtagccacaaacatgccagaagaagtgtacgcaacaaaactacagatgaatataatataccggttaactatctatgtttaatgaaatttaactacatgtgcattttacatataaagagatatacaacttacaggacaacgaagattgacagaaaaagaatctgcaacaacttcaatatcactgtcactatcagcatcatcttttgtagctccaccaccaacacatcgccgaacacgagcaagagcttcttcaaatggctcaccatcagactccttgggaatcaagctaaggatctacggaacatatatacatacataaatgtacaatcgaacagaacacttgtagtcaactaaaggcgcataatactttgcttttattttaagaaattacgcctaacattggatcaatatatattaaatattccaccagcaccaacaattgtcctatagttattcagagatttgtaataacataaaaactaccaactaacagccctcacacacacacaaagacatacctgaggaactgttcgtcgcttcacaatgcgaacccctaaacagaaaatgcgagcatcacatccagttaaggaaaccttattaagcccgtcttttgtaaatgttgtaatctgacaaaacagaaacaaactaacaaattaaattgcaatcagaataaaaaccttttatacaaagatttgtagaaacatggcatgggacctgaaaagataaatgtaataaaggagcttgcttttatatgggaacagaaactcacaattggaccgtcatcacgaccattagtcccaagaagttgagagcctggtctattaattgcacgaacaggcatacctgcaaggtaaaaggcaataaatacttgcagaaagaaataaaaatgggaccatctaagccatattagcagaaaaaagagaaggaacttcctcagtaatgcaaaaagatcaataattgatgacattgggttcatataaattataataaacaaacagaactatttttcttgctaaaaactatagacccccccaaacattagttagtcagtaatcaccataccgttaacttgtagatctgcatactgtggccactgcatcctgaatgatactttgtcattcagaagcatacaccaaacctgaaaataatgtcacaatgagcaaaccaatagtattgtttaccaaatggataacattcgttaatcatcacataatagacaaaccgacctgaacatcatattcttgttttaatgttaaatctttgtccgcccttgttagttgaaatgttctctccacactctgtactggattgctactgaacaatttgcaaaacgaagcgggttagagaaaggaaagtaaaaaccccaaaatctaaatatgaagcagcatgtgaaaaggcagacatgcacggattggaagactgtttcctcatgtctgtataaagccttcaccacaagttcctctgtggacatgttttatattaaataaaaataaaatcaatagttttagttataacatttccaaaagaccatattatacaagacaatttatgcattagttagcctaattggaaataccaaaacaatgttctaaagcagtaaataatatttcaaaaacatagcttacattctaaaaacaatatagagaagaacaactttccacgcacatgctttaattaaacctcatgtaagtgattttgcaaattgtgagaaacagtacaatgcttctgaagtatatacttactattactgaaatctatcactacctttaatgatcacatcactatcaaagggacaaactttaagagcattcatggttttctaaaaagaaagcatcaaatacaaatatgcctaagcatttaatctatcactaaacataagcacgcaggcatttgcacacaaaacgcgaacacacacacacacacaaaaaccactactgcttacatttccagctgcaagttggtccaaattattaagcattaatcacgaataagtagagcgggtgtatgttttgtataattgagttgagcatagtgaaaactaaaaattatcaaaataattatgcacctacccatctgctggaatatttgtagtgctcagcttcacaggatacaaaggatgtgcaatggataaccagaagctgcatagtcaaaatgaaaaacttgtactataaataaaataacaaagatacaataacagcagcaaagatgaaaagatagtacagcaacacagcaaatcaaactaggaaacagcctagctagcataaataacacacaattcaagatactcagttcaggaagcaaacagatatagcaaggtgattatgaaaaaggagaggaaaaatagaacaaaaaactgaaatgtacactttagcattccaagcagcaaacaaatatcacaatacatgaacttcagcaattcacactttaaaaactaaattactacttcaaagacaactctaaatgctagaacagttgctatggagatcaggtatcaaacagaatgcaacatataatatgtgctgcacagtttaaatagtattacaattgagagggaaggctattcaggaataggattggcgattccaacttaaaaccaatctgtgttaaatgcgggactatttcttatagataacagaaacagctataaagaaaaaatttacactatctacaaagttattaaaaaaacagttgtacatacggatcagctcgagttagtcgacagatttcacaataaaatgggtcaggataaggtggatggctttccataggcttctccggaattataacgcagctaatgtgctgccacacattgcatctcctatcttcacactgcgatatataacgaaaatgaagagcaaaatttatttgcatataaaagaaaacattagcaacattcagaggaacagaaacaaagtgcgtgacacaaataccttgatcattgactccttttctgatgaaattccacagaggcaccgaacctttgtttctgactgaaaagagtgatcatcgatttcccctttaactttcacagtactgctatctgacacaccctgccccttagtcgctaaatcaggggctgtagacacttgcatttttctgcaaaccggaactcgcattgaaatagaggaaaaaacagacggtagcaaaaagagaataatccagtgacttaataaaccagatatagagaaacataagacaaacctataaatgtcatctacaagctgtgccacctgttccttccccacagcattcttctttgcccacaatttagaaactgcaaacgagaacaaatattcagccacaattaatttcactcaaaataagagaattgaaaccgcagccagaacaatgaataagcaagaaacctctgccagaaacataaattcgaaattgaaactaacctataaaaacataataataaaatgttcataaaaaacaaagatgtgctacgtagcagactacattgacaatctgaactgaaggtaatcaacagtcactggtttagcatttatacctccagacaaacatcaactacaccgccaaggtacaaatatataaatgtcatgggaaataaaaagaaataaaacaaaaccgagaaacgcagatgcaaatgaaaggaatttggccattttcaggtaggaaaggaagaataacagcatccataccttgatcatcagataaaacaaccaatatccgatcaacaaggtcctgcattaaatacaacaaacataaagacatcataaaacaccaatccaaataaattaacaagatgctaaaaatgaatccttaaaacatacattcttctagtaatagcataaatagacattatttagacttcaattcaagtatggcgccaatcacataaaattattttcagatgagcaactgttacaagatcttgatgttattgtatcataattacttttagtcatcaagttatgtaatgaaatcccttccccaactgacaaactgtatgcctttctcacatattaaagggagaggcatataaataagaaagtcttgacatttattgagaaaaatacatgccaatacaaaacgaactgcatatgaattctgtattaactgaatatcaaaacataccagtacagcctctttcttactagtgggttacacaataggaggtaaccctctcccttgcccataattccttccttcccataagaaaggcaaaatttgactagaggttctatgatatgacaccaaatgacaaacaattaccaattaaactaactagcactttctcagtaaaacctttacaaagctaacatcataaagaagttattggattatgcatacggaaaaaaaaaagagcaaccccaaatcaacaaaaaaaggagcaacaagtaattttcgaacgctgaagccaaagtgtgataaattgccaaatccacatgcaggcaacacccagcacaaataatttctttagcatctcacctgcttcttcccctgctttgaaagacctaagtgagtgagaacatccttgagctcttttattctaaaatatgccaatttttcctgcagcataaacacatatatcaataaacctagaatgcaacatcaaaccatgaatgcaatactttaaaataaaattgtcacaagaaacaaggacaagattaacaaaagaagagcattgccattgctatcctctttactagacaagtttggatctatgtagagttaggtaaatgatatttcaataactcttcttatcactctctatctacattatttttcattcaaaaaccatgaattggcaattctatccccaaatattattttaactcgtttaatgggtccaatttccaaaagaattagatagccagcaaaatagtgaaggcttaaatatagttgtagcttcaatatttcatttgagatcacctatcacagctaaattagacaacattagcataatacaatgtcttcaaccaataacaataccccattaagttgatttgctttgtgggaaaacaatgaaagcagctcatgcatcttaattattaacaccatcagttttttataacttctcagcaaatgcaaaaggcttgccccaaaactttaatcataacatatacactaaatttcccaccaaacaaacatcaactaatgagaaggcttctcgcatggaaacatgccaatgttgccactttaaatacatgtgacaaaatggatctcaaacaccaataaatgcagaaacagtaccccattctgatcaccagctagagaaaaactactcatcccctcattgatgcctaccaaaatcaatgccaactaccttgacaataagattgttgcacaagaatccaaaacacgcccgtttaacatacacaaaaatgttccttcttgtatttgcatcttacacgtaactggagccggatacatattattaatataaattcatgacactgaaattaagatactaaaattaaggcatatgcacaacaactgcataatctatgatcaataatcccacttcatccaataaaaaacataataaaactatctagtgcagtgctttcacaaccaaagctacttgtttaagttgattttcattgctacaaacaaaaaaagagatgttaatactcaaatagcatactaaaaaagctaatttcaaccaaatatcaaacttcatcctctataattgctttgctgagctttcattctaactaaacaagtacatttgcagagaatataaacatcaaaaacccagtaaatcatgcatgtacatctcacaaacccaccaaaaaaaaattgatcacgctaagaaaaatacaataattaccttacaactggcaaccaaatccatttcttgaccccaaaacttaaatgcccaaattgcataaagaaatatcctcagctgaaagggcacccaataatcaaacaccaaaccaatgataaacccaacacatagccttcttctccaaacaaggatcgatcaaaatcaaactaatcacaacaaaaacaaaaccattaaaaaaaaaacatagaaccaataaatcgtaccaaatcaaaaccctaataaaaaagcaatagaaatcgataaacataaaataaaaaaataaaaaaattggacaactcacatgcggaatcaagaaccggtgtgaagtgaactagggtttcgattatctgtctcttcacgccgactttctagtatcttactctctctctctatctatctatctaactcgtccctgttctcacgcctttgctgcgtatcttttttgaccgagactccaaccagaaccaaatccctccatttacaatgttcggacctatcgccgattattcaatccggtttttcgacggagacacgtccgggttgtgttacagtgcggtcacgtgcattttcgtaatttgcatgccctcctcaaaataaaactcccctctctctgaccgagtgtcttctatactactatagccaatcagatgcaaccacgtcatccagtagatcgctttattttagcgagtttgatcgctaccgttgcttacagctgtctacacgtggcgtgatcggagtggggatgtgaagactttcctatggagagtagagaaaggaggaggaaggagaatatggcaaatattaaatagaattgcctaaagttaatttgtcccaaactttctacatttgtatttatatgaatataatatatagcacgtcaaacaaattataatatatagtataggctaattaaattttcatatgtattaaattatatctttaaatttttaaggtcattaaaaataaattaaaattattgagaatttttttttttgaataaaaaatattgagaatattgaatgtaaggatttttatctaatcttagtaaggaaatcgataaaaatttagaggacatcatttgatacaagtaaaaaattcgatgtgcatgaattgaatagatatcaaagtctacggagtatgatttagtacataaataatcaccaaattaataaaattatttaataatttcaataattttagaaattttaacgaccagataatatattgtgggtataaacttttctttgatgtggttattgaataaaaaaaattaactaaatataattaataataattaatattatttctacaaaaaaaggaaaaaaaatcaaaatatatttgtttatatagaaaatatataaaaaaaaaatagtttgtatatgcttatatttttcgagaattactttatatactattttttatttttatttttaaatttacagtttaggttgctctgatgatttctatgtgggttgttatgtagattttaattacaatttaaattgttttgttggttactttgtagatttttatgtaaattttcatgaaaaaagaaataaaaaactacttttaaagtataaaaatgaaaaaactcttatatttttatcgttggtacattttaatttatactacattctaatcaaatgttttacacacaaataatgttaattttaggataaaatgatgtgatctaagaaaacgaattttgcaaaattatggtatacaatttaatttaatttaagtcaatgttgtaacattttaaaaagtgtaaacaaatctagttataaatttgtatctttttctatcacaaagtatttgtgtaataaagggtgttgttacacaaaattcaatttaaaattcaaagttatattattttgtagttgttagggtcgtgtttaatactattttatgttggggtgttcatccaatttaatctactattttgctcatagtgcatttgattcgcactaagtgcggatttcattttttaaatccaatccaatctacacaatagttcaaatccaatccaa

SEQ ID NO: 20174 - DNA, 2299 bp, Cannabis sativa
aaaaggttgatctgtctacatttccaactttcaaacatttacaaacaaatgccgacaaaagatatggtagtctaatttcattattaatttatttatgcatataaaataaatgataaaaagggtgtgaattactcaccgttgatggaggtgggaaaatagagccaaagtacaagccagatgaggcagaagttgaagaagaagagtctttgggcccaaaaagatgatccaatgaagaggatccatgactaccactttgcttcttgttgttctccataagtgtttttaatttctttctttttttgggtgggtggaatggttagaagtagttgtatatatatgtgtgttgtaatgaagagtatagtatatatagtagtactagctatagcctatagtgctttctttgtcaaccaacgaacaaaacgactcctattgatagagatatataaaacttttcaacggcctggttgaagagagactagtaccttgaagaatcggataaggtggttttttttttttttttttctttttgagaagagaaaataaaacacaattaataaaaagcaagatcagagcttgacagaacgaacataagaaaagcacgtgaagatattagatgtggagtactgaactgaaccggtctcaccctatttataaccccaaaatatggagtgtgatggtgagatgctgccccccatgtgccttcattcatttcccttgaaaaataataaaaagaaaagaaaatctctcatttcctatcttccaatgccacatgggtgcaccactttcgaacaagtggacatgttgccagccctaagccccttatgacacgtgtcaccatcctaaatctttgacctatgttttcggtggtccattcaatgtatgatcgacacagtagtgatagtgagtatatatatacatgaccatgtaaagactagtcattcttctctcttttaattgtccccacaacaacaagataaatggataaggcctcaacttgatcatcgatcaccttatttgctctatattaaaatattatatatgcggatatgccattgctcgcctatcccaaacagttgaccattccaatctcattttcactctaccttttccttctttctttttttcattccattattttatttttcaaagtaattctatgaaatttctttactttcaaacaagtagtatatataacttattattgtgattattattatgttcctcccaaatctttgaacaatctaaaccgatcgaatatatatatataaattatttgatttgcatgattatttttctttttctggcttagaatcagtattttacatgtccttgttattcaaacgaacattattttatatttatatgcgtatgttcttataccatacatattattattacatcagtttcagatatgaaatatatttaaataaattgttaataaaatccaatcaatttatacaatgaaaaaaaaaaaataagaaagaaagaaaagaagcttccaaacttttcttgagtgcttcaaggacggaagtataactttactatcggatcaccacaataattaattaaagttagcttaatctttaataaatagaaccatatgatatgatataagaaataatatataatgttatcgaaaaccaagtatatctctaaagatgccaacaattaagatcagcacatatgctaatgttgttaattagatatttaactctctctctctctctcctctctatatatattggatctaataactataaaacattatttttctaatcctaggaaaagagatttgctattatatatatataataataagtgtgtacttatggaagaattaattgtgttcaattaacaagccaaaaatttgtgatgggcaagaacagtatacgtaccgttcacaccgccacactactctctaaagttgatttaaataaaaaataataaagtgaaatgataaggatatagatgaagattataggaggctattggaatactatatattgctaatgtataatcctatctcaaatattattaatatagtatatataaattcatatattaaattgaaattatatttcatcacagtaaactttattagcacttaattagacctcattggacattaacttattcagcaagaagtccatttatcttacagcatataaatatatgggtataggatatatatatatgactaggtgttcaaattatattgaagtgcaagagaattttccttttactaactaggttatatatatttattcatttatctattttagataaaggttatatatat

SEQ ID NO: 20175 - DNA, 5483 bp, Cannabis sativa
gttatataatggaaagattgattgttaagcaatgagaatgtgaggataccatgaatgtgatatacgagttcacctcattaggtgatgcaattatgtgacatgtgagtaccaggtgtaggtacgggctcgtcttattaggcgatgcgatatattagtgtcagattttggcacgggctcaccttattaggtgatgcgattatgtgacatgtcagtatataggtagaggctcgtcttattaggcaatgcgatatattagtgccaggtttttgcacgggctcaccttattagttgatgcaattatgtgatatgtggtaccaagctatggtacgggctcgtcttattgggtgatacgatatattggtgtcaggttttagcacgagctcacctaggtgatgcgattatgtgatatataggtgcgaggctatgtcacgggcttgcctgattaggcaatgcaatacaagattattagattaaagtatcgacttgcctgattaggcaatgtgatgtaatgaagatgattactttatgagaaaaaaacatatacacataatttgtattattaaatgaatataatagttttgtattaccaatactgatgtttattcgtgacagatgccactagtgaattggatgtcatcttatgagtaatgtgtgatcttttgattctgattatctgagtataaatgatgatattcgaataatatactatatgattattgttattacttttcttgctgagtccttgtgacttagatcaattatgaggtgatagtcttctccaacaatgtacatattgaccccaccggcctgtgtgctgaattaccaggagttgttttaggccggctgtatctgctgtgtattttgattttatattttgaattgttgtcgtatataattttttgtaaactttttataatagagatcctcggaacatgtttttaatgatgttatgatgctcgattttagtgttttattttaatcaatcaaatttttaatattatcactgtcttttaattataatatattagtattaaactagtttgagagcgatgatggagttgtcttttctcggtagggtagaattttctttctgatattaattaggcctaatttataacgtggattaataacgtgtgtcttatattttaccagagaaaagatcaggaaagataggtataactggcttggcatccaaagatccagaaaagaaaacatgcaagttttctggattcttctgaaaatattaactctgcatgccctacatattaaagtttacgtatatactcacattattaatgttcacacttaatttgttcaacgccatgagtactactactctctctctctctctctatatatatatataaatatatattattaatgcaataaaatattcatataactcacaccaaataaaaattatttttagtgataattttttagtcataataaatttttatttgtaactaaacataatatatttagatataagttgttactaatttatttttagtcacaataagtaatgtgattaaaaatacatttagtcacaataaattatgatttttgcgactaatacttttagtcacgaactttttaatcacaatttaggaatgataatttataattagttacaatttttttatttttaatcacaaattttattgtaactaaaagtaaaattttttataataaaggtttggtactgtgggcatgtgctgatcattatttgatcattattacattacaccatattaatgattcatctttatgatcaatcaacaaaaatattcaagatataattattatatatatagatatacatacaccacccttaaattatgatttttgcgactaatacttttagccacgaactttttaatcataatttaggaatgataatttataattagttacaattttttttttatttttaatcacaaattttattgtaactaaaagtaaattttttcataacaacggtttggtactgtgtgcatgtgctgatcattatttgatcattattacattagaccatattaatgattcatctttatgatcaatcaacaaaaatattcaagatataattattatatatatatagatatacatacaccacccttaaattgatgaataaaacatcaagtatatgtataaaccactaaaccaataactatggtagcctcttctttattcctttccccatttttcattctaaccttgagcatttttcaaccccaatattgcactagggttctttccttggccactcaacttgaaaatggtacatatatatatacatatacatttatttaattatgtttgaacattttcttacatacataacaatgtaaaattatgaaagtaatttttttttgttcaaaaccctaaattgtacgtatacgtaatgcttattatattcaattatcatcaaaccctaattattattatgtgtatgcagactttagttacatgaaggtggtgaccaacgccaccaacctaccaccgtacacggcagagtatgactacattgtgatcggaggagggaccgctggctgccctctagcggcaactttatcagcgaattactcggtcctggtcctggaaagaggcggcgacccagaaacctaccaagacttgtttagggcggagaatttcgagcaacaaatgacaaaagaagacgatggagaaggcccggtggagaggtttaggtcggtagaaggggtagaaaatgctagggcacgggttctcgggggaggcagcatgatcaacatgggattctattcaagagctgagaaggagttttatgagagattaaaaggagaaggaggagtagagtgggagatggatttggttgaaaaggcttatgaatgggttgaagagagtattgtgtatggaagtgagttgttagagtggcaaaacactatgaaagaggctttgttggaaggtggaattgggccctataatgggtttagtttggatcataagttgggaactaaatattctggttctatatttgatgagtttgggggtagacatggtgctgcagagcttcttaataaagggcattttagtaatttaagagtggttgtttatgcaacggttgaacagatcttgttctcaggtatgttgtcaatatatatagtattcttttatatcttaatacataattaattagaagatatttgcaaaataatattatttagactacaaagttgtcatttgataaattgttaaaaaatataaattacaggtaattttgtcgtcaatattccttactcttattattattattattaattaaaaaaagaatctattcaaaatattttaacaactatgtaatataaatatttcttgatcaataatgagagaaccaataattgttcgtatctgcaaaaattaatttctaatcatttatagttaatacatgcacttcttatatttttaatattttttttttcagagagagagttatatttttaatatttaaatagtttaaatcttaatatgaaggaatgcattggtcacttattttagaggtcaccatagaagcaggtctagccttggccataggcatgataagcatttgcctaaggcccacctagcttaggggctaaaaaaaaaaattcttttgaaattacacttttttctactaatttttaaaagtatcatttttttttttttctaaataagggcctaaaaatattttttttatgaatatatttgaggaaattgcattgtatacctactttactttacctattttaatttttacttgtgtttctatattatttaagatatactcacttttatttttatagatgatgcccccatataccctttaggctaatgtgaattatgtgtaagacttaagtggggggtgagagtatattgagcaactcacttacaaaagtgggtacattttaatgaaatataacgtgacggtattttagattaataaatacaaaaaaaaaatattcctcaatttatctcgtactttaaggctggcccttcataaaagcaccctaaaattttgctatcacacattatttaattataataatttgagtatacatattaggtttgactgcgaaaggagtgatctttagagactccaaaggaaaatcccacaaagcatttgttcgaaacaaaggagagatcatattaagcgctggcacaatcggtagtccccaactcctcctcttaagcggaattggcccaatctcagacttgtcatatttaaagattcctattgttcaaccccaacctcatgttggaaagttcatggctgataatcctcgtaacaacatcaacatagtaatgcctttcacactctactcctcgtacttacaaatagttggaatcaccccagatttctaccttgaaaccgcttctttcatggccccatttacttcaccatttgctgccaaacccagtagcctcacaggaaacctaacttcttcatccattgatttaagtgtggcaactatatgcaccaaagtccccggaccttcttctcatggaacactctctttgtcttcggcattggatgtcaaagccatccctaacattcgttttaattacttttctgatccgacagaccttgctcgatgtgttaaggccatgaggaaagttggcgatttgttgaagactaagtccttggctaagtttaagtttgataaaaatattgatgatgtgttagggtttaagtttttcggtccttctttgccaatggattactcattaagtagtaatgattcgtcgttggaagatctttgtcggagtacggtgacaacatggtggcattaccatggtggatgcctaccaggcaaggtggttgatggtgattttcgtgttattgggattaaagggcttcgagttgtggatgcatctgttcttagtagctcaccgggtaccaatcctcaagccacaattatgatgttaggccggtaagttgaatgaatttatatatttaagtattaagaagcattattggtgttttttttaagtatagcgtaatggtattacaattaactaataatttaagggtcttaagttcgagtacactgcctccatcactactaagctagtgttagtagctaataacttaacatttactacttgtgtaattttgtatcagatttcatacatggtatttaagtttgaccttggatataagtggttcaaacttgaatttagggccctcaattaaaaatgctttatttattttctaaaatgtcattatttgatgcgaaaattacacattttataagtttttatataatgtgtgtaaaaatatgttttaaaaaatatacatatatttaatggaaagaattaaagaaaattaaaaaaaaaatgagaaaattgtataaatttaccctagggaggtaaatggttactttccatattttttaattttttttttttttttttgaaattttatttataatatatatttaaaaaaactcatattttttgtaaac

SEQ ID NO: 20176 - DNA, 5205 bp, Cannabis sativa
cagacatcaaagaacacagttgatctacgtggcatgcgggtagaggaagcttctttccatttggatatggaaatctcagctcgagaaccaggttctgttctctttatcatacatggtatgggcaccggagctatcaaggagaatgccattgagattttaagaaaccatcctcgagttgttgatcatgaacaggaaagctccatgaactatggctgtacaattgcatacataaattaaaatctctgtttctatgtgttctgtcttcgtgcatatcaaaccgaaaacccttttcaatatcgtctttctgtatattatgaaaaattcgtttgattttcacagatttgttagttataacagtaaacaacttcaaaatctttttgtaaagtagtcataaaaaaattgtttttaacttgttgagttaagcattcatttgttgttcactgttgctttagtaaaactcagatgaatcttatcaccttcttctattttcctctgttttttttcttgtatattgtgtataaatctaatggtcactatcaaactgccagtttttctatctctaatttcaatgactcatacataagatttcttgtaactgatattcatcatggttgtttaactttagtcatagcctgcatactctctctctcatatatatatatatatatataaaatgtatatatctttcttgaaaagcataatttgactgaataagactaaagggagattgaactagaagccaaaattggtttttgcttctttggcactatgcctgcatcttttccttaccttctttctatcaaggtacacgtttctctcctaaccaaagcaatttgctttactttttacttctttatttaacattttcatatacacttgtcttgagatcatcttgaattgtttctgaaaaaacaagaaaaatgttagctgtttttgaaaaatcaatctctaacccacctgaagagctgaacttgccttcattgggtttagagaactccatgaacagagaagagatcttgcagacttttcggtcatcttcaacagaggtcactgtttacaatcttacaaatgggaatttcatggctttgtctcatgatgacactagctattctcacccaaggtactgactaagttgtatattgtttgttattctttcatttttatagaattaaatagctgattatcttgtttttatgtcaggtctatcgttgttttggacgatgtattttgcattttcattggaactttggtgaacacttcagatctcagacgccattatgggctcccgagacaagcaacagaagccatagttgtggttgaagcttataaggtcttgagagacagagctccatacccgattgatcaagtcatcaaagatcttcatggaaactttgctttcgttctctttgatgcaaattccggtacccttttcatatccagggttagttctaacttcaaccatgtgaactttcattaattattttcatccatattttctgcaaaataagatgcaggatatcgaatgtatcgggaatgttgctttgcaaagaagaaactaaaaaaagtttatttttcttgacaccctttgttaataactacaaacactaattaatgaatgtgattaggatcgtaatggaagtgttgaacttcattggggattggcaggtgatgggtccttagtcttctccaaccattccaatatcatcaaagaagcttgtagcaaatcttatgggccttttcctccaggtaatttcaaccaaatctgaaattatacgtatataatcaataaaagtaaaataaaaatatcattttgcacctttatgttttttaaaaaataatgatcgaaccttttgttttgttaaacgatatttcgaaccaataattttagaaatgataaaacattatatttcgattcaaattttcatttaacaaaacatagagttcaatcagaaattttttctaaacatagaatccaaagcaggaaggtgtatgtatagtgttatacaatatattttacttactaatgttatatatatatatatatatatatatatgaatgaatggcaattcagggtgtatattcagaaatggaagtggactgttaagctttgatcatccattgaataaggtaagagcaataacacacaaagatgatgactttgaaaacatctgtggagtgagttttcaggtggacttgtacactcgaatcccaagcattccacgttccggcagtgcttctaactgggccgatcaggaatcaccaccaccgcatgatcaccacgatcgcgacgatcacgatggtcagatcgaattagacttcatttcttaatcttcttttctattattatgtattatctagtcttctgctcagtactagctagtgctgattttatgaagatttgcactaatattgaaataacaccaaaatattattggcataattaagcttttgaatcttaaaatacaaagtagtaataagttttttaataaaacattattttttcattcataaagttaatcgataaagattaagataacaatatttatttagtatgaaaaattacatttaaagcaacaactgaaacaaagtaacaaaacaaaccacatttattcttgattgtatatagtttcttcttcacctcaactagttgaacttaattattatcattgtttcttccatcttcattttacatcttcttatctttgtcaaacgacttgtcgttagatgagctagtattactatcactagttggtttcttagtgttagttaggtcaccaaaggaattaagattttttcccaaatcgcacttttctatattagctttgcattcagctagtaatggcacacatatttgaggagaggcatagctattaccgccctccatgatggtgccaccctgagaaagagcatagccattaccgccccatatagtggcaccaccttgaggaggagcatagccgttaccgccccatatggtagcgccaccttgaggaggagcatagccattaccgctaccgccccatatggtgacaccaccctgaggaggaacatagccgttaccaccctgaggaggagcatagtcattaccgccctctatggtggcaccaccctcaatggtggtaccatcgaaaccaattctggttccaataacaattggtgattgcggcaatgacatcaccggaggtattggtgggattgtcagaatcggtgggattggaggcataggtggtataggtggcataggtggttgaaatggcataggtggcagtatatttgagatttctcctgcgatgtttacatcattcggctttattagagctgtttgatcactgtcatcatcaccaccaccattgtggtgatgatgagccgggatagtaatagtagttgttgcaggggtgattattacacgagccgagcaaagaataagtgattgaaaggctattgtggttgtgatgagtaacaaggcaaagaaggctaaagaagtagtaccacattttgctgcatccatagtgtactatgttttatagtttatgaaatgtatatgtaatgattgatgataagcttactatagatatgtatatatgtgtgtatagagtgatgatgatcatgaatatgaggaggaggagtttgttttggaaggttaaaacaagaagagggtttcatgcattttctcatatcatcttatttatgtgattattattaaacaatacataatacttaagtacaaaattaataatattaattattatttactttgaatttttttaggaagttatataaggaagaaaaagaaaaattcttatatttgaggaattttgaaaagtagtacaaaattttaaacaacagtaattgtgtacttatgttattgttagtactgcctaaaaatatttctcttagagctcatttggtacgttgtattgtattgtattgtgttagattgtattagtattattcaatacaatattatgtttggtattgacttgttttaatagattgtattatattgtattgtattatattagtattatttaatctgggtctgggtttcaggttcgggttcgggtcccgagttcgagttcaggtctgggtccgagtccgatctgggttcaggtccgagtttgggtttgggttcgggttcgggtcacggtcggagtcagggtacaggttggggtcgggatacaagtcggggtccgggtccaagtcggggtctaggtccgagtttggggtcctgggtccgagtctgggtctcgggtctgtctggggtccaggtctcgagtccgggtccgggtccaggtacgagtcggggtcagggttcaggtctgggttggagtccaaggtccggggtttggggtccaggttcggggcccgggactcggtccgggtcccgatccaggtctgggtcccaggtccggattagagattggtgttgaccccgaatcctttgtaaatattataatacaagctaatacggatcatttgttatgtattaaataatacaacatacattgtataaaaaatttggtcgtaataattaatataatacattattttatccaaacatagtgttatttattattcaatacaatacaaccattatacggtgtaccaaacgagctcttagagtagttcttcatacgaataacaaaaaatatgttataattatttatgcacatttaatatactctacagataaaagaatacataaagttaaataaagtaaaataagaaattgaaatattttgttgaaattgtttgtttggaaattttaaatagtagtatatccttgattatgaaatatcgattgctcattgatcctgtaaatttaaattgtgttattatgacgtaattgaagataaataaaatataaattttcgtatgagattaattgagaatataatgtgtataatctatttttaatcataaaatatgaaataaaaacattgtaactaactcatcttaaacacatgatatgaatattattatgttgaataataaagtggttatagcatatatgaaatattgtcatttactctaaattatctctcatttatatggaaaataactaataaattttcacataaagtattttgcacattttttttttttactgacacacggtattttaattttattatatatttttttacaaaatctcataaagcaacataaaataacgtaaaatcatgttgagaatcatggggttc

SEQ ID NO: 20177 - DNA, 11697 bp, Cannabis sativa
ttgaagagcggattccaattctagatgcagacgggtttcagtttggaaactcttgggtgcctgcaactccagagaagccacatattttgggaagatctattgcagtctcaggtatccaacaaggtggacaacaggacccaatgaattcactagaattggcatcaaatacaggaagatatgcatcaaattttgactgtttgggtcaaattttcaatgtaaattcacaatgccaaaatatggagtattttaggtatttagaccgacctttgacagataataacctgagggctaatagcggagctaattctcttcaacagtctttgcctgaggattttggtgacttgaataataatttaccgttcacgcaactgttgcaacatggaggagctgcagtcccctcatcaaacacctcacttttaagacttgtagaattagcagcagaaatgccaaaacattcacatgaaatgaccaatatccaacaagattgtgtctcagccagtttcaatccaggtgctgggttcattggcagcatggagggaaaccaaatcgattattcgcattggcaagtcgggaaatgttcgactgaatccaacattgctaatctgttaatcagagaacagagtggatgttcgagttctaacccactgaattatggtagcaacttaccccagacactcagctgtaagtatttttgttattgttttgagtgcctaattgttttactttcttctgaaaattatcaaagcaccgttgtcactaagaaaatatttcatttccatgctttgataataaaggcaaatatcttttagtttgaatgaaaacatgcttcctgttttcagttgtcagcagtggttattggttccttgtacaattaaaccattaaaataattaaattaataaagaaaatatactcatttagtaccctgtcttttctttaaaaacacatttagtaacttgtgttttctataatatttatttagtgccttatattttaaaattgtacatatttagtatcctaaagtaaaatttaatcaatataattttattaattatacaaaatagtttcagttatatataattaaataatttaatttgaatctaaaatttgtaaaattgaagacagtttgaaaactttgagtttaaagtaccaaaaatgtatatttttaaaatatagggtaccaaataaataatatgaaaaatacaaagtactaaacttgtatttagataaaatatagggtactaaatatgtatacacccattaataaacacatgcaaaatgaccataaaagtaattacgagttaatcagatgaagattcctatcttagattattataaggtttcttgttaaattgctgaacattgaaatagtaagctatagatgaataatatacctatgttgatgtcatgaaaactagataaactagcatttaaataagaaagcataaagagtcttacccaaaaaatctctgaaactgattacaaatatgtaataatcagtagagaggcatttttttgatgcatcaccatattgatgaacaaaactatctctgcagatgatcccttcacaacgtccaagccaagctatgatttgaatttctcaccaagtaactttaatgctcccacaaatgttgtgaactcgcattatttcacaccagtaacaccaaatcatgttgcaatgaagaaccagcggtctgcattactaaagtccacaactgatgaaaccccaagtcaggaaagaaacacagcaaataatctagttgaatgcagagaaggtgaagcaattcaactacatagtgacgaactcttgcaaaagattgtcgactcatcctccacagccatttctacaccatacaaagaaaataaagattccgaggagataactgatctgggcattgatctgaatgagacaccacagcagaaaacaccaaaacgtaggaaacacaggcccaaggtaattgtagaaggcaaaccaaaaaggggccgaaagcctaaagttccagaaaatacagaacctaagcagccaaagaggaaatacgtgcgcaaaaatgtttcaaaggagtcaacatctcaaatggtggatattttggagggtccaggaaattctaacactgcattgcccaaaaagagtagcaagaaagtcttagattttgattcggaaacaattggagatgcaaatctgggcaacatagtggctcagcaggagatgcacaacatgaatggaaaagctccaagtgttaccttggactaccaagcaacaaatacaattccatcaatgaatagtggcactcctgttgagcatatggtagaaaaccatttcatgaatcaaatgccaaatggacatgttagtcaatttgaaaggcaagcaactgttcctcagtttgattcaatacaagatatgcatatgaaaaatttcaatgtaactggaggagataaaataaacagaaatgttgatcaacagctaaagaggaaggaagatgaaaatgttctgaaacagcaacatgcatgtgcagtagcagtagtccaagatagagttcaaggaagagataattgtgagaaacttcagaagattagagaaacaatgaagcaggctatgcctcagccagttccaaagaccccctcctccaatgaagcaaaggggtcaaaaagggaccattgccacaccactgaacatgcacatctctcaactgcaaatcatatagatgctagtacattgttgtaccaaggaatatatgagttttgctcaggattttcacaaaccactaagaaaaagaagattgggtatgactgcagagacatcgtgaacgttccttctattgtcaatgcagctgagggtttaggaaatgttgaaacaacaactgcacacggtgtcaatgcaagtagactatcaaaagctaattgcacattattgaatactgaatcaagcaaaattgcttatagagatatgaatgaagtcagcatattcaacagcaacagttatgattactctaccccttcagagcataatatgaagcaacattcacaaacaggaaagacaggttctgcaagggcccagaattatgctaacagactttccactggaatcacaattgagaaaagtaaacatctctcatcccttcttgagaagtccaccacacttggaaatgggcaattatttcaagctcgttatgctgccatgtcagagataaagcagactgtaagagccccgctgatagaatcatctttgacagtattgaacacatccttgcccaagaaaagaggtatatttctggttttacaatacttgaatggtgattttattaggttaacttaagtaacctaacattctatcaatttttttatgtaggtccaaagaagaaacaaacacatcttacagcaatagatgaagtcatttacaaatttcagaaccttaatctcaatggaagcagcaatgaattactaaggccagaccaaaatgcacttgtcttatacaaaggaaatggtccagttgttccgtatgggggtttcgagtttatcaagaagcgtaaaccacgacctaaagtggaccttgatccagaaacaaacaggatttggaatcttttgatgggcaaggaaggaagtgaagaccaagaaggaacagataagaaaaaggagaagtggtgggaagaggagagaaaggtattcagtgggagagttgattctttcattgcacggatgcatctagttcaaggtatactttcttaaaattacatttttctgtttaataattaaataaaaaaagaaccgtcaggtagcatttggatgggaggaatgaaaacatgagagtaagaataataataggaataggaataagaatagaatggaataaaatttaaaatgtataaaaaaaaattgataaaaaaatcattaaatttttctcatgttacattgaaatggtcttttcttctatttcaaaatggaatagtcattccaccaaaattgtaaaaagagcattacattggaatgatattccaagactttaaaatacaaccaaacaaatgcatgaaatgaaaattgtttcatttccatttcattacctctaaccaaacgctaccttagtgtttttaatttaagaaaaagaatcattcattgttgcaataaaaaaaaagtccaataaaatgttaatatatatgcaataaagtttaaagtgctctcctattcagaaaggatgctatgaagcaccaaaaattatcattatgatcatcatctgcatgcaatgtaggttggaaagtaatttgatctgcatcatattaaaatgggataaatcttgtttgacatgaaccttagagtgtgttaatctgtagtgccaaccagacaaacggttatgcatgtccgtgcttgatggataccagaaacaatataggaccaagttagcaatttttattatagtattattacttagaaatccttatatcaagagagctatatacaaatatatatataaaaaaatagatttcagcaactaaccaaatatatccctttgtaggagacaggcgtttctctagatggaaaggatcagttgttgattcagtgattggagtcttccttactcaaaatgtctcagaccatctttcaaggtacactcaacaacagataattatttttaaaccaaatggccataaaatgttcaataaaagcattttgtatcctttatgcagctctgccttcatgtctctggctgcacgatttcctcctaagtcagcacgcaatagcacgcaagataattttaacacagcaataaaaggtaaagcaataatccccataataaatctaaatgacaccatcaaatggcacgacgactcaagagaaccaatcaacaatcaacacacagcaccccatcaatctgctgatggtcaatggagagataatacagcaatgaccataggaaacttgacagaaccacaaagccaaagttcagaagaagaaatcatattgtcccaaaattcgtttgattcctcagtcactcaagctactggtggaattagatcctgttcaggctcaaactcagaggcagaagatccctgtactggatggaaacctagcaacactcaagtttcatctctaagggattatcctatgaaacatcctgatttcccttattcaaacaatccagactatctgtacaggcaaccaggtccccattctggaaatagtcagttgtgtatgacaactgggcctagagcaccggaagtatgttgctttgaaaacttcagtgaagaaagcacatcatcttggcattcaaccagttcgagatcagcaaaagggccagatacaacttccagaacctcatgtagtgaacaagctgaatgtttcggtaacagctctgagcaacagaatcaaggctggaagtctcaagaaacaccatcagctgacccttgtgcattattaagctcacaattaacaagccaagaagcacttcattcagacaccgaatacaatcgatcttcttgcagtaattatcagcatttgaagagtgatatgtttcaagcagaaagcagttcactaacaaaccctgccaaattttctgatgcacctgccaagatgcaggaagcaactgcacagactgtttcacatgataataagctcacagaaaaatcttttgaagctggcgatagtatttctgcagtaagtatccagatggagaaacataataagttggtagagcaaagctctgaccatactccaaatgctgcccacaaaaaattttcgaaagcaaaaagaggaaattctacaggtcaaaataataatgaagttgactgggacaacttaaggaagcgggtagagattggtggtgacaaaaaagaaaaaagcaaagatgcaatggactcaatcgactatgaagctattagaacagctaatgttaaagatatttctgatgccatcagagaacgaggaatgaacaacatgctagcagaacgaatcaaggtttttcctgaccctcatacacactcgcagtcattgtaatgtgaaaatattaagatcatacccaactgtataaaatagagtgatgaatagcagtatcaatgaatcagacagtagaacaattcctagggttcaaacatattagaaatggatccaaacaacactaatttgaagtttgcaacacctatacgtgtgtgtgtgtgtatatatatagatatattctaatttggtgttttcttcaagtaagagtttattttaagattgaggtatccttgaattgaaaaattgtttgacaatgttacaggaattcctaaaccgcatagtcaaagaccatggaagcattgaccttgaatggttaagagatgttccccctgatgaagcaaagtaagctatttgaaatatatcaattttcctgagaatataacaaggtcaaaatcacaaaccaggggcaaggttatttgttacacatttgattttgtatattttctctacaaaatatgctacagggattacttactaagcatccgaggactaggtttgaaaagtgtggagtgtgtgcggcttttgacacttcatcatcttgctttcccggtaaggtcttattggctgagctttttagattataagagttgatggaaaaaaaaaaacttaggaccagcctatcagctttctgtttcttttgtttttggctaacctagcatttatcatttctatgtttgtaaaggttgatacaaatgtaggaagaatagcagtacgactgggttgggtacccctccaaccacttccagagtcacttcaattacaccttctggaactgtaagtataatgtatgcttcaaataaaaggtaaattatattagatgaggaatttctgaccagaatcttctgtaggtacccggtactggagacaattcaaaagtatctttggccaagattatgcaaacttgatcaacgaacactgtattttcaaaattccctcaacttttcaagtttaaccttacaagaatacattttgctattgaataaaatcttgtattttccataaaagcttttgttattaactattaaacttcctaactacagatacgagctacactaccagatgattacatttggaaaggttaattatcaatcattactaaataagttaaacatttggaaatattctatttaaaaggtctcacccttgaatgaatatacatacgcaggtcttctgtacaaagagtaaaccaaactgcaatgcatgtcccatgagaggagaatgcagacacttcgcaagtgcttttgccaggtatacaccctaataaaactgcaatgatgtatattagttccactacccacacaaatatcgaaaaagcaagtaaaatattaaactaactagctatccggaaccagaattcatatgtttaggcagacatatacaacaacacccaggttatctactaattaattgcacgtttaaactacaaagttcattaattacataaaaatagtaagaaaataggtggggattactttctatggtaaattttaaatttcattatcacaaatgttctagaaattgtgaggatcaacctaaaaatcatggctcaaagatttacatgatacaataatgaaatgtattttccatgcaaccactatgacccaaaatgatatttgaaacttccaaccaaatcaaatatggaattaaaggaaagcatctaacaagttcaatttattttttatttgcaaattgttgaattttctgatatgtgcacaactaacaattattaacaatgagactaataagaattatgcttaatgcagtgcaagactagccctaccaggcccagaagagaaaagaattgtgacttccattgatcctacaggacccacaccagttaacagtcctgctgtagttatgaatcctgcactactacctccaccagagaacaatgtacttgcagaatctggctctaaaattgacaagtgtgaaccaatcattgaagagcctgcaacaccagagcaagaatgcatagaggtgtcacaaagtgacattgaggactccttctatgaggaccctgatgagatcccaactataaaactcaacattgaacagttcacacaaaccttacaaaactacatgcaaaagaacatggagctccaagagggcgacatgtccaaggctttagttgccttgaatccagaagccacctccattcctatacctaaactgaagaatgtcagtagacttcgaactgaacaccaagtgtaagtatatttttacacaaacatactaagtgagttttcagtgctgtaaagtttaaaccagtaatgatctctaatcttgaattagtattaataaccactacccaattaatatcctcaaaagttgtgttatgaaaactatactagcaacacaatcagtctaattcttaagagatgtaatacaattttagattctcaacaaactgatctgatgcaggtatgaactaccagactcacatcctttattggaacgggttagttaatttctatctttggacttgttaatcgaactatatcaatcatactactcacttcatttcagctgagcatttacattgaatttaaacagcttgacaaacgagaaccagatgacccaagtccttatcttcttgctatatggacaccaggtatttgtaaagcataatattcctgatattgccaataaatttagaaagcaaagaaagaaagatttaccctagaccaaccaaacaccaccaatagaaataataataagtggatggggtaacttttgtacaaattctatgaaaaagaattggaatatttctatacttttgcaattgatacctctattttttggcacatgtggataggtgagacagcaaattccattcaaccatcagaaagaagttgtagttccaaccaaccagacaaattatgcgatgagaacacatgcttttcatgcaatagtattagagaaacaaattcacaaaccgtaagagggacaattttggtaagaaaatacctccttgattacatacacatacaatttcaaaagcaacacaaataggcttttttcagatgcttactgaagttttatgacttcactgcagataccttgtagaacagcaatgagaggaagctttccacttaatggcacatattttcaagttaatgaggtaagtctcttcaagaaaaatatgttcactcttacatcctagaaaaataattacttgttacacaccattctgtagatacattagtatgagttgaatagatataccaaaacatgcttcttaagcctaaaagaagagtcacaagcataagtttggtatggttagatttatgtatccttacttgatggggcaggaccacttgtcctgcacccattcaacccaactaattgaacaagaatatttctttgcttacccttgtaagacaaaagtgcatttatctttttgtccaactgtgtcatcttgcagatgtttgcagatcatgattcaagtctcaatcctatcaatgttcctagagagtggatatggaatttgccaagaaggatggtatactttggaacttctgtatcaacaattttcaaaggtactgtgctacaggtttataaacactacataatttcccaaaatgaaaagataaagtaactgacaaataaaatatgtatcaggcctatcaacagaaggaattcagttttgcttttggaaaggtacatattactgctcttcgttgactgtggtcattatacaatttttagtgacattcaggcatttttcatagttactgcactggagtttgagttagcaactcggcattttttaaaattataagaatgatggattccacaacaagattttgatgaacatcttaactatcaagtaacaactttgaaataccagcttaaaacacactagctaaaacattcttgttatcattaagtatctcgtcaagccattgaagctaggatgtgataaacttggaggtctgagtggcctctgttatttttttcttaagatcaccagatgtgctggctatatgaataataaaaaaaaaagaaaaacatctcaaccactctggatcacatgacattacatgttctaacttctacaacaagtaattgctataaaatttatgctgtataatctttacaaataataactgctaacattagtgactcttgtgtgcaatataatatcagataccacataatgtcacttagtacattctacaccatgcaaaacccaagacattcataaaaaaaacaagaattttaatcattaacacatgttatatgctgaaaaaatcatttgcaggattcgtctgtgtgaggggatttgacgtgacaactagggcacctcgacctttgatagccagattgcatttccccgcaagtaagttgatcaagacaaaaaatgatgacaaaagatgaaagagaatgagtgacatatgcttaccagcagcaggtgcaaaataagggtctgttgcgcaaaacagataagactactcacagggtaaaataggtcactaactgattgttgtacatcaccaaccattcttcttcctctaacctgaaatggattttgccacattttggccaagcagggagcacaaagcatgttcaacatgctatcccataataagcgggaagtaatttgtacaagactagatagataaacattgttattgtttcaactttgctaagcaaagcacatttcattatccaatgtcactccccaaagagatgaaataatcgagtagttttgattcatcctaaacaaaatatcacatggtatacatataacatagctgtgttcatactacatggccggttacattagagaagacaatgtgtagcagtctcatatgtgcatattgtctcttgcattgatgaacaaaaaagagtattgttttttccgtgagacgcatattgactagcatattattaaaagacactaaacgaaaataactattaagaaattcgtggaagataatcattaactgggttttaaaaaaggcatttttggagttttatatatttatgtatatatgtggttgggtgtgtgtatgtatacatatacaaatgagtgactggatgatcatgaattagtaccagtcaacaaaacttcaattctaactaaaaacaaaatctaagactctttaagtttctaaagtaagaaacttgaacaaaaacgattgcataagatgcactatatcttactctacagacaaaccattgaactccagtaatcttgtaaccatggatggaccaagctgaagatctattctaaattcagggtgatcaatttcaacgcaaactcggtttgtttatttattcttatacgagtcctcatgagatcttggtttcaagccactatcttgatgctaaaattcaacatattcacacattatcacacagatatatatatttatgtatgcaaattataatttttgtttcgagcaagaaactatatgctaagcgcgcaagcaaacaaacatattcagaggttcacgtgcacataaaaggataaatgcaaatcaaaatcaattgactatacagattattatgaggcgtataaaacaattctttttagccataacaagcttcatcctcacatcaagaaaattttgcataactacaataaaatatcaataaccagaatcattgcggaaactgtatcgatctaaaattcggtacgaacttaacaacaatccatctgaactaaacaaatacgataatatccactattcgaaaaaaaaaaaaaaaaa

SEQ ID NO: 20178 - DNA, 1490 bp, Cannabis sativa
gccaaatttttaccttttagcaccctgacgtggaattttaatgttgaggggctaccccactgtttccaattctttaatagtagaagctccaatcacactgaatcttttggatttctattttggtgctctagcaacaaagtttcatttaatcaatcttttttgcacttttttctcgaattttctttatttttctcgaataccaaacctgaaaatattttgcaactaaaagcataaaattgcacaacatacaactaagaactaagtaaaaatactttaaaaacctacttaaaaattgtactaattaagtcctaacagatacgagacttgttgttgttctttttgtttttgctagtgttgttatgtgatgagaaatcaatggtgcagtagtattttttgatagtgttgtattattttcttagatatgagatatatcttcaattagatatatatttgtaaattaatttaagtatttagatttctaaataaatttgtagcttatatctcagttctagcatttagtttattatacattgttgttgttggatctcgaatatgtatatacattttcctagatttttttggtataactatcgtagatttatttcattttttaatttttttttgttgcgtcgtttcaaaattgacgttaacaagtaaaataaaatatattgctattttttgtctattattatttactgagtttttcgacaaccgaatatttttagagcttgagaaagtaatgaaggcctgaatcatgaaataatgaagaagacatttttatgtggttcaggcgttaactatcctaagtccacgagtccaatttcctagggtcattggtcgatcatggtttacacgaatacatatacaatagacttttactcctttctaccgtgttcctcttaaagaagagaaagcttagtaggaatattatgcagttaataatagggttacattcaagtgttttcttgatgaagagtaagtcttcaatctcaaggtgaaggtccaaaaaaaaaagatcgccccctcctgctatctgtgaggtatttataagcctattttcttgcatgggccgttgttggttaggtcactgataggatggaatcccaccattggattggtaggtggcatgtttcccatgtagtttttaagggtgtcagatcgtactggttgtagtggctgggcctcagacgcgtgaaaccctagggtcattattgtttgaatttctctttctcctagatgttggattatttaggtcagtacatgaggacacgcatgccttgcactatagcgtgtcgtgagggacaacctccgacattgttcacgaaacagcctggtcccaaggcctatagcctcacatgcattggtaaaggtctcatgagtcaaagatgtaccatggacttgtgcagcgctatagcctgatcgtgtagatccacttccctcgcggtggcaaatagtttcccctcctagatgggtgagactttgactcacag

SEQ ID NO: 20179 - DNA, 3573 bp, Cannabis sativa
tattaattagtaaatctaattacattgaaatgtgttttatttaggacataaaatctcaatactctagttacgctaatttgatgtagaatattctacttttagtacaacaactccaatgattcacactaaatatctcactaaataaatatattttacttaagagatctcacattttatctaatttacaataataacctaaaatagctaatttatgatataataatatcgtgattactagtaaaaatttaaaatcttaaaataacttagtaaaataaaatatttattaaatcaattaaacattatacattttttaaaagagaaacttcaataaaatcaaacctaatgtttattaaattattattttacttaatgtttatttttatttatgttgctctttttagtttcataatttagtgttatgttatttttattttatttaatattagtatttttgttattgttacttttgtgataaattttaatttgaggagtaaaatataagattaatttttaaaataaattaaaataagggctggaatgcaaaaaaaaaaaaatgtgtttaacaccaaattggtgtagactgaaaatccaatacccttaatattatagaatttggtgtacgctaatttagtgtgctattggagtgaaatagtgtgaagattccacaccaatttagtgaaatggtggaccattagaaatgctcgaataatgttagattttaaatatacaccaatttgctgtaaaacttttttttttctttttttgcatttaaccttatattttattttttaaaaaataatattatattttagtcctcaaattaaaatttattataaaaataataattaatttagaacatgagcataactgaaaatacaaaataataataacaaaaatactaatattaaataaataaaaacaacataacactaagttataaaactaaaaagaataacagaaatgaaaattaacattaagtaaaataatatttaatagtcaaattgattatttgagtgtcttagccttaaaaaacatcaaaatattagctatacgaacttgaagtatttgagaatcttaatattcttgagatggttggtattgttattgagttttttttgcataatctttatttgctcatttaaaaaatgatcacgtatactatttaattgatttaagaaatattttattttactaaattattttaagattttaaattcttactagtagtcataatataattatatcataaattaattattttgggttattaatgtgtataatataaaatacaagatcttttaaataaaatatatttatttgaggagatttttgattttaaatcattaaagttgttataccaaattctacactaaattggtgtaacagtacatatctggtgtttagcaaaattagtgtctagttgcaatactgcgttagtaacttagtagtaggaattctttagttaaaactagagacttacacacaattacataatcaaaaaacaacacgcagattaggtttgcatataaatatgcgggttaaagtattaagtcaaaatcaagtccatcggctaaattccaaattgacctgattaaaaaaatgatttaagtatcaaactaataagcagatcataaacaagttcacataaaccccttcatcaaccatttattaaattaaattgaaagctaatccatgttaaatttgacttcatcaagttaaaagttaaaacaagttgcattatatatatactatattaatatataaagtggttacccctgttacaaggcgaatcaaaccaatgagcattaagtaactcgtttagttaaaataatatctcattaactaatctgtgtagtgagtgtgtaacctctttcctcagcacctactcaattatgtcatagctatagccaatggaatggtccaatcttttcttttctttatgttaaccaaaggacaatggtgtgagaacaaagcagctggtatctaagtggacggctgagatctgtttgtcacatgatcattaataaagcaagtataccataaccataccacatctctttttacctaaataaaaaactaatattaatagcttaggtcatgggttttcacttttcagtacatgaagttatcccaaaccccaaaccaaaggaagcctagctctgtaaaatctctttcagtggtgaaattaataatatgttctttttttaatacccccattgttcccacttcccacctccttttcatgccttttttttggggggtggaaggcctttttgtaagagatataagcaaagtaaaagatgacattcttctgtacaggaaccttgttatataaagagaaaagaaataaatatgagaagagaattcattactccctcttgtcctcttcaagatcttcacttagtccaaacacaaggtgatcagctgcagttaatgtcttcctttctttcctttctaccatgtttgacaaatctccagccaccttaactccacttccagtaagtggaataccttcctcatcatcgaagtcatctccagtttcctccgaataggcatatctgaaacggacacagatcatatcagttacacaaagtcttttaggaatccttgacatgtaaaagagtatgataatactgaaattcaaaatatcaatgatggctagaagactcgccagtgtcttgtaacctattgaatctgtatcttaatagtctggtattcagctgatctcacaaagtagtactcaaacacaaaattcttaaactgaaaattggtaccaaataaagatacagcatatttggcaaaagtggcaaggacaagctttatttgttcctcatttatttacatgtacacccctaaaatatgacgggctacaaaatatcagaaagccttcttcttcttctttttttttttttcggaaataaggatcctcgcctaaccttaacaatatttggggaccaaaaagctagcaagaaagccatctttcctgatatataaaccagtcattcaagagatgataggcaacgagagtgaggggcaaagtggttaaataatataataacgacagtagaagggtatatgggtagttgtagtatgagaaatggacgagatgaattagagtagtatatatagtattggagaaggaatgagagaattcagaagagatatattgtaattaagtttttgctctagggagagttgacgtttctcgaataactcactgttttagtttgttcttatcattgccttcattcaatatcacataccagatccgctacttatttccatgaacttttattctcaatcttctccatcttggccttttattattgtcattgtttgaggatcctgattggggcttatcaagagactagtgaatggtataaaaagtacagattaacattccctcataatgtgtgatgcgtcaagggattacctagtattaaatatctagttatgaacaaaattgatagaccttcaagctagaatatggttcaagttctctattttatctaaacactgttgttcttccctgtaaagccttttctttttaatatagataaactaataatgatt

SEQ ID NO: 20180 - DNA, 3454 bp, Cannabis sativa
  modified_base (1711)..(1711): a, c, t, g, unknown or other
agagagagagagagagagaacggtcatgggcctcatggtaactttggagaaaggaccaagaggctcctgtgcacacaaacacaaacactcacacccgatcaaggccacaccaaagcgcaaggtgggccgatagagccctagtgacaaaatcaaaggaggaacttgcggttagctactagagtagagagaaagaaatgaaacaccaaaggtataacaaacacatattatggatggcatcatagattagtgatcctcttagccaaaatgatgtactttggttcacctcaaattttagttgaggtgaaatgtattctcagcttataccaaaataaaataaataataataaattcttgaaacaatgcatggtctagatttcgatattttagtcttggtcaacctttgtttataaataatgtgaaaaatatatatatatacatatatattttttttttttggttatgtgatgaattttttcacatattttaagtttataaatgcagaaaataaagtaatatatagtacgcccacccaaaaaaaaaaatcatattatttataaaccgttatacctcaaagttggttagttcactaataataatagtcttaatgaaaaaaaaagtagtaaattaagagtaggaaagaaaagcttgaaaatgtttcactttcagatttctgaaaagagcaaattaaggtatttatttagacaaatactattacttacgtaaccacacgtctgtctcatcattacgtaatatatttctcatcctaattaaaaaaaaaataataataaaaaaaatacatctaaaataatagttaaaagggaatgagccacaaaaaaatataatatatatatataacaaagatactatttggatagaggaatttgtgacttaaatatttaaaaataaaatataaaaaagttattagtggtataagtacttaaaattttaattaaactttgtcggtgatataaatttaatgtttttttttaacggtataagtaactctattttttttcaagtttcgtcagtacagattctgttattatcttaaacaaaatacttataagaccaagattctaattattgggtttagacaaaaatctatagttacaattactttcaaatatttttttaataaattcaaaacgtagtctgtacagataaaacattacaaacttatgccgctaaaaataatattgtttacaaacttaaaatttttagtacttatgctactagttaaatttatgacacataatagtttttgattagtgtaggtcattaattttttttttattttaaaactagtttaaataaataaatacgaatacatgaataattaatggcttaaacttttacagtcagatactattagagtttcataaatataatttaaatatattaaatatatctataattaaaattaaattaaatatgtatattccaaattactgtattggatttataatatctctataacaaaaacacttttcactgtactcatatccataaattcatgaatctgttatttttatcagaccaaactctcatttaattactaccaacaaaagtgacacattcattaaatcatacaaattttttgtaggtaacaaccttacatatccaaaaattaaaaaaaaaaaaaattattgaagtcaaatcatgttgcaaacgaaacccattaagaaatatatattataatataatatatatntatatatatatttatatgaatgttaggccaatatatggggtcccctatatatagctatggccaaattaataataattagagttaaatattttttcagcataaacgagttagagttcacattaaaaacatgcccaagtgaagtgaaagctgtgagtacgtgtaattaattaattaattaatttagttaaattaattaacatttttattattattattatttattgatcaaattaattaatatataaagtgagctctaattatgctgaccaggctcaatgcacctttatatcattattacttgattttgttttattttttattttccaaatgtttctgttttcgtattctaaaagtaatttctttttagggctttacccatgggtgaaaacttcaaaataaaatgataagattccattttttttttaaaaaaaaaaaagttcaacaattattggtttgtagtaatgttcttacccaaacaggttaattgaattagggctagctagatatgaactagaaccgccgccctatatatatatatatatacacaaatatatacatatatttatataggcatgcatgcttaatcataatatatatatacgagtattgttattggtatcagtagtgctcagcacattctaaatatatttcattgtaattgattaacaatagtcttaaaaaattattacattaaactatatgagactcgatatttaattggaccaataaatatataaacacgtaagaggatgctagacactactgatgcattttagcatttatctaaatatataagcattactattggccaccaatagatctggacctaacattttctataagttgcgccttataattagttaattatgttatttaaaaattattttttttaaattaatgacatcaaaaaatatgctaggcaccaatttatctgttaacatttctccatatatatagttgaagagtcattttcttatataatatatggtatggattgaaagcttaacaagaatcaacttcattacaatgatggcttacataatttcaatcataatatttttagagagagatgtcatattcatgatatgaaaataattgtccaaactagacttggcattttgatgattctagtgttaaaaaaaagtacaagaaactaaagtctttacattttgtcttttattcaaataatagagtttttagcggctaaacttttttaattattatttcacttgtacttaatctttttaagcttaaattttagtagtaagagcatctccaatgaagaaactcaaatttagtgttaaattaacacaaaaaaactacaattttaacaataattttttttttcaattccaactacaacactaaaaattacactaaattttatattctttattattttattattttattaatataataagagtattttaattataaatatatataattatttagtttttctccttaaaagtattatttaattattaatttttttttaaaaaaaaaaatagtatggtctacagtgtcctactataaatttggtgggacacggtagacaaaaccatttatgagtatagctttagtgtcccattggagtaaatatagtgtgaagctacacaatatttggtgttttagagttcggttggagatggcctaagaccttccaaactactaaactattagcaaacttaaggtgtcatccagttaactgctatcatgggttgcttatgtgtatactct

SEQ ID NO: 20181 - DNA, 3606 bp, Cannabis sativa
ttaaaaagtaaaaatagttttatacaagataagctttgaccgaactattagtattagtattaccactagcataccttgcccctcaattttttactaaaaattccccctatgttagccaatctatatcaggccaagtttatgttataactgcaatatgcattttcttaataaacactcaaatttgggcaatacagttctttttcaaaaaaaaaaaaaaaggcaatacagcaaattctcatcacaaaaatgtcccaaaagagtataatgaccctttgaggatttgttacatgccatttcattaacagatccaaacaataaaagctcctctatgcaactgcattataatttcttgatgtgattagttaggctgaacttgagagtcgagtaggattctttacaccctcagaatcaggtatgggccggcgacccttgtgaggaccaccaattactccccacgtctcaaattgcctttggcgggctcttgccctctccttctcttcttcagatttcgatgagtaacagtgaggacatgaaactccgagctcccatagaggggattccatgtcagcatcacttactggttgtttgcacccatagcacagcttataagttcctggtattaaaccgtgctccactgaaacccgcttgtcaaacacaaaacattctccctcccacaggctctctggctcaggaatgtcttcaagatacttaagaattccaccttcaagatgataaacctgggaaggaagaaggatgtgaagaaatgtgtcaagtcagataaaattataaaaaaaccatttccctttatcaatcctctctgaaaatatgttaggcagaagagtgtgctccagttggtagttttttaattcgtcggtgatctaataaacaatcttgttccaatttatgattgtgtggataaaacctgttcttgcttcaacataattttttggacatacacattcctggaatagggtggtgagtggtgaccataattatcagaagaattgacaaaatctaaaccagcagaaggaatcacctctttgaaacctttactgaggagaaaacttgaagctttttcacatcgaattcctcctgtgcagtacatggcaacccgctgaggcatgtcttttttaggactccctacttcatttgaactcgtgttctcaatctctgaatgctcattatctggtccagaaagttggaactcatcctctacccatgatgggaacttccgaaatgctgttgtacatggatcaactgctcctttgaacttcccaattctagtttcgtagtgattacgtacatcaatcacaacctaaaaatgtgtatgagttaaaatttaaaactgagtagggaacattcagaccaccttatgggaactttacataaaaactttaccacagcatattccagacatagaaattttagattatcatcttcaccttacagccaaatgtccagaatgaattaagaaggcttccagtttttcaccattaagaaaactaaaaatggattatattaccagatcaagaagaaatgaaaaactcaactcttgaccaaaaataacgttctaacttctaatcaacattagttgtaattgaaaagaaaagaaaccctttgattggaagataaaacaaccactcacggtttcaggatcacttatcaattcattccactcccttgggctcacatacttcccaaccttttcaataggtgatacagtaggcattccaagagaaacaatctgctccattgcacagagaaaataaacccgtcttagaaatattgtaaaattaataaataaataacaacacagcattgaggacactccacatagtttgtgacaacttcactgtttaacagaaagttaaaaagtacctctttcttcaacttcactctgacatgatcccaacggaaaggtgcatcttccccagctgcaagaggagaactgctagtgtgcccatgatggatagcttcttcctcgggactcacaggagattcaattcgtcgtaacccttttaacctttcatcgtcttgaatgaacccaagaactctttccactgattcccgagtcccacatatgctgccattgattccttctggtgcaagaatgatacctcctgaaacacgctgaacaggatcagcttgtgaggctttaactagtggatagacaaccaaacatatgaatactatcatagcttgaaatacaaatgtgagtgaggactaaaaagtttatcagctaacagaatgtgatcctgatttctagcaaaccaaacaatggtcaatatctatttaaaacttgctgaccttgttcatcaattatctcaatacaatgtaagaaatgtaaatggtcggaattaaataaatgcagcatagttcatgaacaaataagttgtcatacatcaagttgcttcaatcctcataccaacatttctttgggattttgcaattgcaaagtaaacagagtcaacatattaaagtcagttcctttaacgacaccacattcttagagctaacgattaataaaactgagagaaaattatgaataagcaaatagaaaagaaaaataagtaccaattcctcgcagagttctttcaagggttgtcgtaaatgggcatggtcgggaaaatcagcgaacttgtagaaggagaccaccacaagaggttcagaatcggactcatcaacttcaagttcttcgcttctcgttccagcggcggtcgaaatgggaatggggttagcatatccacagaagattgtggaagtaaggttcatggttcgtgggaaaccggagagagaagaacgagagagtatggggattcgagagagaggtttcgggagggagttcaaattagggcttatggaaaaggacggcgaggaagacgatgatgatgttagcatcctcatgggaactaaagaaggcgctctacacctgagcattgagagaaggcagtgtttggatacggtactccctacgggactctattcaggaccctctctctctctctttctttctttaggtagatgcaaattcacggtactatttaagatttttacctttaaataccctaaactttttttactaaatttttggagttaaactcttcaaattttagttctgttttactattcactattccacccatttatacacaaatatacaaatttttatatgttaacgtaatattaattgattaaatattataaaaataagattattaatattagaaaatataattttaaaattttaaaaatgattaaaattaatatattatttttcttttttcttttaaaacactttgaattagaaaataacattattctcttaaggtgtagagaatactccaaaagatccaaaatgtgagtactattcacagggccggtcagagggtggggcagccggggccgaggccccaggccccataattttgaagactccgaaaaacttaaaactaatatatatacatataaaaacatataatatataaatatttaactcaataaattaaatgaaaaacatgtagcatagttggtaagaagatctttcattaaccttgaggttctaggtttgatccttaccgaacaccgttagaatcgaaaccgacgaaa

SEQ ID NO: 20182 - DNA, 4131 bp, Cannabis sativa
taactaaaaataacattatattagtcgacaaaaaaattctacattatatgactaaaacattgtcatttattttagtgctccatggtgcaaagtaactatcaaacacctcaaaattcatagtaaggttacatatagaaacacatattacacccacattaatacattatattgcataatatgaatgatgtataaatttatatatacaatcattacacctttagagtgggatcccattatttgaattgtgtgataatattgagactaattacacacattgtgtgtaagtataatattattagatgatgaagttagcattaatcatatatattaattggcacacaatactataaaaaaattacaagtagttatatataatgaccaaaaatgaaaaagagatatatattagttcaaaagggattctaacttattaggaggctgcatattgaaaggaaatgtatgtggtcagactatgcctaaaatttcagtactaaatttgtgattatataggaataaatatctatacgtcttttacataaatggaaaagatattaaagctgaaagtatcccccaatatatataagatataatatatagtacacactgcattttaattgaacaatgtagttagaaagttagtttgttgtgaataaaaaccatatataacaaaagaaaaattaatttaattgatcttgaaatttgattggttaagagtgaagttaatacacatcagcattgattttgacgtttaatgaagtagaggagacacacccaactaattatatatatatagcattgctatttagcaccagtattagtgtttaacattttttaaacgtgtcgtctcgagattagttagcgatacattctaaaaactattacattaaattatatgagacttaatatttaattgtattaattacgtaaaaaaaaatactaaacaccactaataacttttaacatttttgttatatagatataatgagaagaaataaggattaggaaatccctagaactgaaagtatgagttgtaaacccttaagtccacttggtgggtgccacgtcagaaaaagctctagtgggacccacatgaagtttgtgaatgtaccatgaatggtactagtaaatagggcttagctggtgaaaaaatcaaaaatgtgaatgtggggtgttacttgaagataaataataatccaaatacggttaaatatggcaatatagccaatagccaatagggtctgcaaaaagcttttaagggatcaagttaatataaagtaaaaataaacaactggaaggaatcaatttctttccttttttatttttaagagtgttgttatattttgatcatatataatcatattattaagtaaattataatacttttttacatttttttaaaaaaaattatatattaatattttatgcaacttgctgagttcgatggctctctcatctccctatataaatagcttaacttccttcacttatgaccacacctcactgagttgcgttatatgagctaagagcacttctcttaagaatatcaaacactttattaggcaagagagtttggagtgtgtgtagtgagaaatatatatataaagagattttctcaatcttcttatatattattattaactccttcaaatttcattaaagagatttatataacatggctgctcctcaccactacctcatctttgcattcggtctcttaggtattttatacataaattatatgagcatgtatatatacatcaatatatatatattcattctttcactcgatcttctataagtgtattattagattatactcaaaaatatatatatagtattattagataataatgtaggttgtaatgtacgtagtgcaaatatttttggatcataagtacaagtaaactaataattatttgaaaacttcctttttttttttgtatattttgtaggtaacatcgtgtcgttcatgatgttccttgctccaatgtaagaagcccttttaactatatttattattatatataatgagataaattattagtattcatatatattaacataaatttggattttatgtatattttttacagcccaacatttcacaagatttataagaagaaatcagcagaaggatttcaatcgctaccatacgtgattgcactactgagctcaatgttgtggatatactatgccttgcttaagaaagatgctttgcttctcattactattaactcatttggttgtgtcatagagactatttacattgccttgttcatcttttatgctcccaagaaatctagggtattaaaacttgatccaccgactattcatattttatttaaacattattaatattgagatcacaaaaaattatattatattatatatatgttaataaaattaattatttaattgattgatattaatgcagattgagactgtgaagcttcttatgttgttgaatgtttttggttatgggttgatgcttgtgttgactactttcctagccaaaggtgataaacgtctccaagccgttggatggatctgtcttgcttttaatcttggtgtatttgctgcacctctttgtatcatggtacgtacatactccataatatatatattgattaaaattatatataatatatatatttaatattttatataatatatgtgcagaggcaagttattaaaacgaagagcgttgagttcatgccattccagttatcatttttcttgacattaggcgcagtcatgtggttcttttatggtcttctacttaaggactataatatagctgtaagtatatttatatatatatttatttatatataaataaattctgactgacccatttcacttcacttattaatatattattattatttttgtcttattatatgtatacacagtttccaaatgtattggggttcttttttggcattgctcaaatggcactttacattgtgttcaagaatgccaaaaagagtgtgatattagtagttgaggatcaaccaaacaagcttcaagaattatctgaacatgttattgatgtggtcaaaatcagcacacttgtttgcccaactgaactaaatcaagtagttctacaccaattgactacttcgaccaataatgatattaatcaagctcaaggaaataataataatgacaaaattgaagaaaataaagtccaagaaaatattactatcaataaggaagttgctgttgtggttgttggcttagctagctctagctagcttttctactcaagtttgaccgattgataatatatatatattgaagggaatactattatatatcttattattattattaatttttataatgtaataatattttgcttgtatttaatttgctaacgtgtggtgtcttaaatcagtcccctaagctctgcttaattattaattagctagcaatattatatatatatagctttgatcaatattattattcccttcttatatatatattattaatatatatatataatttccaaaagaattgtaataggtcttggtttgcatgtaactttcaaaggctcatgccacttgtacctcttcttttatgtaattacatgctacgtacggttattcctttaattatttcttttaaaaccaacttttattatttttggtatattcttttctttattctctttataatgcattagtatatatttatatgttcatataagaaaaaagtatggtaagataacgcatgtaaaagatacataatatttatttactaaataatgattataggaatgaaaaagctatgatgtaatgcaatgaatatttatatatttccaattttatatataatttggttacacacgagtaaaaagatagtggccttaattcaatctgaagaaagatgcaaacattctccttatatctatattattaatttgtctaaagttgaataataaagcctcttttttaagtatatatacatttgcgtgtatgtgcatatatattgtgctttatatgtatactttagtatatataaatttataatttattaattactaatgcgaaatataagcttaattacggccaccatggagaccaatttaagtatagttttccaatttcttggaaagtatatttcaca

SEQ ID NO: 20183 - DNA, 6937 bp, Cannabis sativa
  modified_base (6432)..(6438): a, c, t, g, unknown or other
tatatatactaaacaagccacaataaacacaaaaaaatgaatgaacaagaagacaaaaattttctacattcattcttttttctgtttaatgtaaagatttttttctagtgaaaaagtggtaaaaggaaaaggtaaaattaatttaacaaaaaaatttaaaaatcaaccagtggggtaaaaaaattaaaaatattaaagtagggataaaatataaaattaaaataatttctctaagtccctggactttatttaaattatgaaaaggtccaatatttattcgttgaacccacaactttgtgaatttacaattcattaccactttttcttcagctgctttggcccagtgaagagagtaaaaacttcttgcgttttgccccaatttctgttagggtttcctcttctcctattcttccttcgagctttaatttcacagtttttttgtaggtttttcttacgcgtataatcacagttgatttctatattatttttattatattttttttcactgagaagaagctaaaaattgcgacttattggaagtaggttgacgttggaaatggacggcgaggagttgacggagcaagagactgccctgtatgatcgccaaattagggtttggggcgctgatgctcagagaaggtgcgtaaaccctacatttcacacttgggcttttgaattatatgatatttgaaatgggttttcgatttttttttgttagattgagtaaagctcatattttggtttctgggattaaaggagttgttgctgaggtaaaaaaaaacatattgatttccttttaagctaaatttcgattaatttaattttattgtataatggtttcttacatttgaacttattttggggttaattttaattaaattatatgtaaatagttttgcaagaatattgtactggcgggtgttggtagcttgaccttggtggatgatcgggtagtaactgaagaggctcttcatgccaactttttgattactcctgatgatgtgtctagtggaaaaactttagccgagctttgttgtgattctttgaaagattttaatccaatggtccgggtttctgctgaaaaaggttcgtacctatagtggccaagctttttagttgaacattgttattgagtaactaattttgtttgtttgtttgttagtacattttcttgttcaagtgaatgaaaactaagtgaagtagattttgaattttgatcttacaggtgacttgtcgagcttcgatgtggatttctatagtaagttcgatgttgtggtcgtctgctgtagctcgctttcaacgaaagtaatatcctatccttcaatttttttacagtgttttggtaattctcttgtctaaaggttatgatacttttctgcctatattttggttttgccctttggcagaaattgatcaatgacaagtgccgaaaactatcaaaacgcgtagcattctatactgttgattgtaaggattcctgtggagaaatttttgttgatctccaacttcatagatattcaaaggtgattgtcactttgtaattatttagtatctgatatatcgtatcaataacttaacatgcatcagatctgatcattatgaaggtactttagatagctctttgattttcttgattgattttgctttacagaaaaaactcgaggaaactgttgactgtgaactgaagtatcctagttttaaggtattacttggtttctaatggtttttcttttaaaattgtttgtttcactctgcttctcatgccatgattgccttcctttttcacccatccttaccaagcagctctaacttttttggtttgttatattcagacatttatttctgagttctgattgactatatgccattttgtgtttgcatcctttaattgcaggaagcaatttcagtaccttggaaaacacttccacggagagcgtcaaaggttttctttgccatgagaggtgtgctttcgtggttttcttagttttctgtgggttgcattaatattgcctgtcacattagactctctcgacacttttcagtattagaaagatttgaagaggccgagggacgaaagtgtggagaaatctcaattggtgatcttcctggtgtgaagaagttgaaaaaggagctgtgtgagtcacaggtgtgacactcttaataaactttttttatgttttcttttcttatgttattatctctttaatcttcttcttacccttgattttcggtataacatgcagtctttgaatgaatctcatatccctgattcactactagaaagattagtagctaatggaagagaatttcctccagtcagcgccattgtaggcggcattcttgggcaggtgtgggatctttcgtctattttattttcatctataaatatattgacatagtcactagtgctgaactacatacatagggcatagtcacttaattttaactaagtgcaagttttaaaacttaaaaactccacaggaagttattaaggctatatcaggcaaaggagatcccatgaagaacttcttcttcttcgatgccatggatggaaagggggtaatagaggacatatctaacccagcttaacagaaccaactgccatcattttgagaattgagtattcattaaaacaattatgcagaagaaactgacttcttatctataactgttgctttagtatttatgtccttaagttaagcttatgtttgtgtttgtacatctaacaaaaaacatagaaagaaaatacacaactcgtagaggtcaacatcatatgctttgtagacaaatatggactattattgtccattattgggtatgcaactttctcttctatgaaagctaaaagttttccacatagtatatatcctcgtttatcttttcataaagatctcatttaattaatggaagaggatgatgcaacacatgatgtcttggtttccaaaagccaattatagttagaaagtggtatcattatcgtttgccatcaaaaatagaaaaatttggagaaaacctgtggactatgcctaaaagccttgtcatttgctgagttggactaatgtgtatgtgatttgattttggtgtggctgatgtggaaattgagaatctaatcatggtttttttattaattattattattttgataagtgttcagaaatggggtcaacgttattactcttactttttcattatgggaggtgggtaggggaagaacaatcactatgtctgataaagttggaggaggaaaaatgttgaaaatcatagctactgcctactagtctatactaaatattttaatcaaagaaagaaagattttcctcattcaaatgattatgattttcattattgctatgtgatatgtctatttacgtttagaaatttgttggaagccatttttgtagcttaaatttgagcattttaaaatttattgatattgtatcaattggagaaatttttaacattagttagaaaatattttttccatgatagccaatagccatggtcggttgatcctaccaaagagataattaaaagaaagaaaaataatgtctcaaaatataatttttccaaaaaaaaaaaaaaatccaaaaaattattacatatatatattttttaatcctaaatcttcactctcatcatttagttaaggcaatttttttattacatatttttttttaaaggttagtttaaataaagaaaaaaaagagttggattttatcttttagataagcacaaactagataggcctccttaaaaaaaaatcccacaacaattcaactttttcttcttttgaaaaaattgtaatatgagaataacaaactatacaccaagttatcaaaaaaaaaagaaaaaaaaaaaccaccaaatcaaagtaaataaataatcatatcatccttcaaaaaaataaataaaaaaagaatcatatcaaagtcatataccataaatctaattttaatggtgtagatattttcattcaaaaaaaattacaaatatcaaaatttgaattggtagggatcataagaacgtggggagttaatattgtcccattaaaaggcaattttttgactatctttttaaaaatttaagaatcctcaactaaccaaccccaccaaattctctatcaccaccaccttattcaaaaatctcaaacaaaaaagaaaatgttaaataaataatcatatcatctttggtaccccaccatgcaaagctcaaaattagtagaaaccaaagacaaattgcaccagaaattttatcaacttcaacaagaatggctcttctacaaacattgtagaagaactagtaagagatatcatcataatcatgttcatgttgattcaacaaataattcaaaatttatgatcaaaactctcactcttatggaaacctctcccaaaaatctcatgtcttcacttcagagtggaccaaatccatcagatgtagcaatggtgaaggtgatcaagagtagctctgattcggctgtgagagacaagattagagagcgaagagaggccattaagggcggcgccttaaagggtaggcgccgtctttttgagacggggctcggtggtggtggtggtaatgattgttggaacagtattggtagtaataatgttcaagaaagtgatcatgaagaagagaggtcagtgttgtcgtttgatgaagaaaatgacaattgctctgtttttgttgagaaagaaaagaataaggaaggagagaaattgaacaagggtcttgttcatgaagagaaaagggctaataatgtcaataagaaaagatcattagtggccataatgagatgctttgctcttgtatctgttatttttgccattttcataatcagaagttctggtcaaaataaggtgattctagttccaacatgactggttataaatctttatcttattacaacttttcttctgtggtactcaagtttaaatctttttcttctttttgtgtaaaaactttgatgaagtaatcttttctcatctcatgtgacataattgatcattttaatcaagtttttctcattattccaatgatatatgcaaagaaaatttacattatgtatactttgaaataataacaatacaaaagtttggccatttttctcctttacattatgtaaatttctagttgaaaatgatctccagctgattttgtggttaatatacatatatatatccctgcaaaaaacattagcatataaagtactactttgcaccctcttcaaatatatatatggtcaaagtttaaacttttataatcatgatcaatagaatgattatgcatcccttcatatgttgtgaccacaacaccttcatctatgcaaagcctttgaatttgtttcttcacattgcaaccttgataggtacacttgtaatagcttctgcttataattaattacataaactataccaattattattcatataaaaaccacactaccatccatacatattacatatcaacatacataagtaaacaacattaatattaccttggaaatttactattcttgactgttttctggccatattttctccaacgatatccatcatcaagtacatcaacttggctccttgtttgaaaagcaaacttgtgcattttcaccttgggaggatgatgaccttgttttggtgatgatttcttcccatttttgatcccacaaagactattattattattattattataagatgttccactactctgataattagtaccaaccttgttgttgttgttgtcactattaaacatttgtagatcaaatttaagcccttcttcttcatcatcttccttcatgattccatgaccatgattatgatcagtactaagtacaatgtgatgatcatcatgatgaccatgaaaatgagcaaacaactgagcacttcccatgtctgatgaggaaacaagagacgttatatgagttagtaattttaaaattccatgactttatcaatggttaatatagctaaggaaaaaggaaaataaaatatcatttatttatgtcacatcacaatcaataatatataccccttaacttaataatatgtatttgatgagaatttacatagtaatttactatgaatgcattgcatgtatttagaaaagtggtgaataataataaaagagaaattaaaacgtgggcggcctcttgtaatggacaataaggtttgtatacagtgacaacagcgacaattgacgacgcatgatctctctatagtatatgtatagatatatagatgagatgagttattattatagttgatactgagctgatgttttcttgtaccatttcataaaacaaaatcaaatcaaaactaatgacgtgattaacacgtaaaagaacacttcaattcaattcaatggaaggggtggccattaggtggtgatagctactacatgtgcatctgttatatatatatatatatnnnnnnntatatatatatatataaaggattttaagtcctcaattacaaatgaaaacactgtattttatttttagcattactattgggtattaattgttaaaatcaaatacagattatgagtgatgatgattagtgtacaattttttgtgtttcaatgctcataatttgtgtttgattttaacaaagctctgataccatttgttaaaatcaaatacagattatgagcattgaaatacaaaagattgtacactaatcatcataactcataatcatcaaaccaagatccaagtatttatttagagcatccaaaatatataataagcatacatacctcctattgatgcatccatgtgagccatctaagtccaagaatttccaacaaaaatcaatccaatttcaagactagagaggagcacaatgtggagctatcccctcttctctacctttttaccattaacctctctaaaccacttcttcacataagacacacacacacatatatatat

SEQ ID NO: 20184 - DNA, 3651 bp, Cannabis sativa
aaaaacaattagaggtacaaatagcctatcttttcttaggtgcaccataagtccatgacattaattatcattatcaatacgtgtattgaaaatcacaatatgcatccattcaatttcaatttgggattaatatttctttttcttttatataaattagatttaaatcaaacaattatttaattacatttatcatcataatagagcaatccagaatatcgtagataattcaaatttattctgtgaaaaaagaaaaatttgccacccaaaattgaatatttccctaaataaagaggtagaaaaaaaagtggtgtgaaattgtgaatgaaaaaacaagaagaacgtgttctccttttacgtccacgttctcgattccaatttccaactaataaagaggaagggtatttccgtcatttaaatattttgtaaaaaaatcttgtttgtaccgaaatcccagcgtggttactagttaccaatatcaataccagatcgttacccatttctctctcagcatcagtttttgggtattatggcgtctttggcagggaagcttatgcaggctcttcagtttgatagctatggcggaggagcttctgctctaaaggtatgcctttcttcttcttcttcatcttcttcttcagtatgatagattgtaattgtgattttgatttggttttcagcatgttgaggttccagtgcctactcctaaaaagaatgagattttggttaaaatggaagcattggctctgaatccagtggattggaaaattcagaaagggatgttgcgcccacttttcccacgcaaattcccctacattcctggtatttatgatttgatatgatatgccctttctttcttagtaccaatctgttgtgtattttgtataattgaaaggaaaaattttgagatttagaagtgaaacaggtactgatgtggctggtgaagtagtagaggttggacaaggagtcaacaaattcaaagctggtgacaaagtcttaacatttcttggccaagccgtgagtttacctctctcatatattttttaaattgttcttactttcatttattctttgtgccctatttaaatattccacttacaattaatttattctctgaagcttgatgattctgataatttaatatttcacccataaaaaaaggtttttggatggccaacataagcatttgaacatttatatatttattttgaggagtgatacattcttcaacttctctgtcagacaatatataccggaatatttttttcaaattttattttcatagcggtattttttatacttataacatatttttcaaataatttacattagtgaaaataagtttgaaattttttgaacaatgataaacttaactctattttttatattgtaaactattcaatttttttttaaaatttaataatattataactataacgaatactatagcgctataaataaaatattctgacattgtgatttcgggcatagaagttaattaagaaattgtaataggtgattgtatttatttatttgggttgggggctgctgatattacatactgttcaaacaactcatttttctaatatgtaagatataaaagaattgatgagtatattaacaagtctttatagtttatacacattgaattatagataagaaattggttagcggtactatggttttaggttgaattgatgatatttacatgtaatttatgtgtgatatgatgttgtgtaatgacagaatggaggtggacttgctgagtttgttgtggctggagagaacttgacagtggctcggccgcctgaagtttcagcagctgaagctgcaggcttgcttgttgctggcctcacagctcaccaggcgctcactcaatcagccgggatcaagcttgatgggacgggcgagcaaaagaacattctgataactgcagcctctggtggtgtgggtcagtatgctgttcaattggccaagcttggaaacacacatgttacagccacttgtggtgcacgcaacattgaactagtgaagagcttaggtgcagatgagattcttgactacaagaccccagaaggggcagctctgaaaagcccttccggacgaaaatatgatgctgtgatccactgcgcgacgggaatttcttggtcaacttttgagcctaatctgagtaagaatgggaaggttattgatattactcccgggccagcagcattacttacatttgctctcaaaaaggttaccttctcttcaaaacaattagtaccacttctcatgagtgccaagagtgagaatatggaatatcttctgaatttggtgaaggaaggaaagctgaagacagtgattgactcaaaacatccattgagcaaggctgaagatgcttgggccaagagtattgatggccatgccactgggaagatcattgtggagccttaagtacattcaatgcacactcatataattatattgcaaatcttgtgtgatgatccaaacactttctcgttaccattatctatttaaatgtctttcttgtgaggactatagttgtcctgattgttggtatgtatgtactatgtacagtttattataaagcatagaacatattatttataaagtatttttacaagagtgcatttcttaattctgtgtaaccaaacatagagattagattagaccctttgaattttgaacagaaaagacaagtgttatcctcgtcattgtattattatgaaagcgttgtttccttagctcttcttacattataagggggctattctcgtaatttaaatgagtgatatgtgatgcatgtttgtccacgtaatgcataaactgttccttaaaacctcgaagagtgtactccaagctctgccatctggcatctttgctcgtaaagaggtcttcttctaatcttctatcatgtcctctaaactggtagatatggcagagaagcttatgcaagcggttcaatacaatggttatggcggaggtgcttctggcttaaaggtcatttaccctttaacagttttcattttttgtcttttgaattaactcagcttactatatcatcaaacaaaatcaaatcttgaccaataaactagactagcttgataaaattaaattaacactcttttcatatattgcttcatatagtattattgactgagtttgcatattttgtgaacttgtaaagcatgttgaagttccaattcctaatccaaacaaagatgagatattgttgaaagttgaagcagcaagtataaacccatttgattggaaagttcaaaaaggcatgctcaggccttttttgcctcgcaagttcccctatacaccttgtaagttctctcattcaaactatatttatagggaaccaattatgtggggactcaaaaattaattcttttgttttgggcaaataaaaaagaaagaaaagaaaatacagcagtatcaaaatttttaaaaaattgttaggataaagttataattcatctagtggagaaaacaaaaaagtgcactagttatatagagagaatttagaaaagctcttagaagattgtccaaagatttaacagccttgaaaaggctttacaaaagtaattagtgaaactaatcaataaagctagctgttaaaacagaattacacttaactgaaacagt

SEQ ID NO: 20185 - DNA, 2698 bp, Cannabis sativa
atttatttccttctgaactcataatataatacttaatataaaacatagtatacgtgcattgcacgtaacaatatactagtatatatataaggtcggtttaagagtgagatagaagtcacacccaaaaccttttattcacattcaaaaaaaaaaaaaaaaatttaacaaaaaagtactgcatttatttttctttaaaatattatatttttatttttattattacttattaaaaaatataattattttctaaatcaaatacttgttttcatctttttaagatactacatacatttgatattttattaaaaaaaaatatgtttaattatattcttaaaatattatatttaaaatttttactaccatatatatatttaaaaaaaaaaaaaacataaatttgttatataaaaaaatcgaattaggtagtattaaacttgttaatatcacaaaaataaaatttcaactttgaatcattctccctttaaaattccactaaatatctctttttcaaaaaaatataaaacatgcatcaaaatttcaaatccctatactatacatgcaatttttctttaagcttagtctaaaagaagagtataataactaataataataataataatattttgtgaattatacctgaaaacagataatcatgatcttataatgaaatttattctcgaatattaatatttatgttgaaaaaaataaaaagtactactttttgactggtccaattccaagtctcttctcttctctgttactgtgaatataatatgaccaaaacaaaccagtactcaactaaagaaaaatattaaatagtattattgttgtctactatttttttcggtgtcatattgtcattggtgtaattaagtatcgaatcacacataacaatgctcaaatagagaaatgttaaaaggcaccagtagtgtttagcacccttctatatatcactatcgctattggttcaattaagtatcaggtctcatacagtttaatataataacttttagagaatatcgctagccaatcgcgaaaaaacatgtcaagaggtattagacactagtggtactcgatagcaatgctcataaaaataacttttaaaaaatattactaaccaatcatgaaacgtcacctataaaaaatattaaatactactaatacccactaacaatactactcaacaaaaatatactaaataatttgctacacaacaaattcccagctaaaaaaaagtgtatatataaaatctaataataataataataaaaaaggtgcctttattacgaattttaggtctataaatatttaagcatctggttttctctgtttcactttcacatgcacttgttttttcaataaagtgaatatcatcataataaacacaaaaatctatagaatagagaaattaataattagctatgcataccattacaacaaagttcaacaatgaagaagaaattgagttaagaagagggccttggactcttgaagaagacactcttctcattcattatatttctcttcatggcgaaggccattggaacttgctcgctaaacgagcaggtaagaagaatgtcacgtcactctgtgtaatattttagtacatatttttattattattaattactattgtttcagggttgaagagaactggaaaaagttgtagattgagatggttgaattacttaaaacccgacattaaacgtggtaacctaactccacaagaacaactcttgatccttgaacttcattccaagtggggcaataggtaaattaattaaattagattatacctatgttttattatgtgtaattttgatgtcgttttgagcaataacattgtcgtttttgtttgtattagatggtcaagaattgctcaacatcttcctggaagaacagataatgaaataaagaattattggagaacaagggttcaaaagcaagcaagacaactaaatattgagtcaaatagtaagaaatttattgaagctgttcgtggtttttgggtacctagattacttcaaaagatggagcaaaacactactaattatttaattaatactaattgtgatcattctttaatgaccacaatccaaaatggtcaaaattccaattcaggttcacttctacttccttataattatactactcacgagtcgtcgtcgtcatcgtcgttatcatcatcaacaacaacatcagcagagaataaggccatcgaaacgacgacaccgtttgatttgggctcaaatgcccaaatcatcaacacaacaagaagtgatgatcaagaagaccaacaacaactactcaaaacgacaacttcttctttaataaacgacaatggtaataatttattgttattggatgatcaaaattgttgtgttgatcatgatattatgatgagtagctatgggattgagagtctaaatttggacccccttttggaaattgaagcatttgacattttggaacccgagtgccagatggcggccggtgattgggtgatgaatgacaacatgggagatgctctattatggaatatgggagaaatgtgatggagatttattagttgatttaatttaaaggtatatataggtagctagatgggtatctaggatggtggtgtgggtgtggtattgtttatataattgtgggaaatattcaatactcaaaaagtatatttacatatatatatttacta

SEQ ID NO: 20186 - DNA, 2733 bp, Cannabis sativa
agccaatgtttctaatcctcatgttgacaactctctcactgccattaatttgtcaaatattttcacaccagatgtaggatctgccactagaccatccctacccgtggctatttatccaccaactctgacacccaataatacttcctctactcatccatacattatatcacctttctctcagcccatatattgtcccacacccgctgccacttcaaccatttctgcctctcaatctttgggtttcactgctgctaataacaaagaaaacattccacctgcttctactaccaagagacaaagtgattcactctccatgaggcagcttctcaaaagatgtcgtaatcaaaactcccccttgtcattgggagaaaattttggccaaaatgtttcctatgatgatatggattcggatggcttcattgataattccgcggagattgctttgcaatcccgcaattcattatgaaaatcttaagttggaatgcacggggactggggaacccgactgcattcaggcatcttcgattgcttgtcaaacaacaatcgccccatattttgtttcttatggaaacaaaacttccaccaaacttccacaaaacttccaacaatcgacaaactttgaactttaataatggtttggaatcaccacgttctggtcttagtggtggtttgatgctcctatggcagcaaagtgttgatgtaaccttacttaactttggatgaaccttctttgattgtcatgtcaaggctgaaaatgatgcttgttttcacttttctggtttttatggtgctccggatgctcaaaataaggctgattcttggattcttttacaacgattagctgatgtcactcccactttaccgtggctcgccattggtgattttaatgaaatcctcttcaatgataataaaactggtggctgcctcagaaatgaaaaacaaatggacgagttccgtaagtccttggatcattgcaagttacatgaaactccttacgaaggtgatccttatacatggataaaaaatcagactgctgtagacacgatcaaagagtgacttgattggtgctttgtaaatctactttgggaaaacacttttactctgcctcaagttcaccatctggattattttagctcagatcacagggctatctctgctgttttcacaccagttgactctcggcttcagcaagataaaaggaaaagtagattccgttttgagaaaatctggctttctgactcacaaagcaaagacatcatcacagcaagatggaaatcttcctcagcaactgatcccattgcgactgtgataggaaatttacaagattgtgcgactaacttacaaagatggcatgttggcaagtttggtaatatgaagaaaaaaattactcaagctcatttacaagtagagagtctgaacaatgctccccttcgcaatgctgaagctatgcacaatctgaagcaatctgaagctattcttgatgatttgttagaacaagaagagatttattggcaccaacgctcacagattgattggttacattcgggggatcgcaacaccaagttttttcatgccaaagcttcggccagaaaaacaaataacactatcaagtttcttcaaactgctgcaagtaatcgggtttcttcaaaaactgctatgctttctgaaattcacaattattttgctggtattttcactgcttcagacttagatgaagaagctcttgctgctaccttagacgccatccctacaaccgtgacacctaaattgaattcagagcttttatttccttttgtagctgctgaagttgagtatgctttacattctatggctcctgacacaagcccaggccttgatggtatgtctccaatgttctttcaataaaactgggatgttgtgggagatctggtcactaaagttgttttaagtgttttaaatgatggtgctgatccttctgggttaaacaaaacacttataactctcataccaaagatcaaaaaaccacagcgactccaagactttcacccaatcagcctttgcaatgttatctctaagttgattacaaaagtgcttgttaaccgcctcaaacatattcttccttatgtgatctccgagacgcaaagtgcctttttgccaaaccggttaattactgacaacattctcgtggtttttgaattggtcaacgctatcaagaacaaaactatgggtcgtaaaggtgttgtctctctgaaattggatatgagcaaagcttttgaccgtgtcaaatggaactttctcgaagctgtcatgtgtaaaatgggttttgctagtggctggatcactcttgttatgacatgcttacgcacaaacagtttctcttttctattaaatggagaagtgttgggttcacttactccaacaagaggtcttggacaaggctgtccactatcaccatacctattcctaatctgttctgagggactatcaagactgctccaacatgaagaaaacaatggtcatctccaaggttttaaattaacttggcatgctccttccatttctcacttgttttttgctgatgacaacctctttttttgccaagctaatgagtcttcatgccttgctatcaaaagatctttagatttatacgaaagagcattgggacaagttcttaattaggataaatctgctatgtctttctctccaaacacaacgctagctgcccaagttttctttcatagacaactatcaatg

SEQ ID NO: 20187 - DNA, 2446 bp, Cannabis sativa
tataatacaatcgtgtgtagtacttgatttgaacacgaagagtactccttttgttttcaattgtatattactctaagatatatttattttagagatagcatccctattgtggataatattttctatgtatatatatttaataagtaaatagtaagtaataatattataaattatgtttcactatgatacattattatatattaatataacattactcgaaagaaataattagcctagtgtggccagtaatgagtactattgacgcaatgcatgcaaatttcaaccaatgcataaaccaccaagaggaaagttaaccaacacatggtgacaatgagtcaaatgaccacagaaattaagttttatgattattattatttgatacatcataaaatatatatatatatatatatatatattcatgttttgtgctgagaatagcatagagactttgttgtatattgaattagttctcataggttcaagtatataagataaaataaaataaagcaataaaaaagaaaaatcacgcaatgaattggagaaggcttaaagagtttaaatgttaagtgggtgaactaaacccgttaatgtgactatggagaatcaaatattttaatgcacaaaatatatataaacaatccctaaaaacacaaaggccaccaacctcaccaagtcttcgattttgtcacttcagttagacaagtgcgtttaacagaattctcttgacgtactactgcttataacaaagttagtgtcttgagaaaaaaaaattatataatactatataaggctccactaaaaccagatccattgaagggtcaaaaaaatatttaaaatgatagaattgaaaccatatccatgatttgtgtatattagttcttcaggggcccattaattttttttttctttttactttctaaaagtaaaattcatagtggacctttgagaatcaagcttaaactactaatttagttttaattccataactatgtcacaaagtctctgactgatttatagttgctcgtccaaactcggaggtggggcaacaacccatgagggtattttggtattttcaaataataaaagttttggggtgggatgggaatgggatgataccaatgtgggttagtttatgatgggtcagttgttccacctgatggttttcattgggcttaattaaattttatgaggtatatataatgtatgtgtatgtacgtatatatatattttataaatttaaaggtatgtttataatagacaaaaataattatagagatatttttgaaattgattatgtgattttttgaatgttacttattgaataatataaaaaaaattaattatacaattaaaaatatatataactaaaattaaaaattaatctaatatacatatatgaatagatccttcaaataaataaaaattagatttatatgaaaaaataagtgtaacttccagtagttattcatcatacatgttcgtgttaagtttatatgtgtaattggtcaattttaaatcaattcatatatatttttcattaagaaatctcaattttaatgtgatcattatgttttcgtgtcgagctatcgtatgactacatattaatcagtatcgtatatttaattttatgtatttttaattaacaatttgtttgactcatttaaaaaatatactaaaaatatataaagtttcaaataaataaaattgattaattaaataatttatcaaacaaaaatttaaatgttaagttattctaagcatttttttatttatatattagatttattttttataaaagtaaataataatttaaatataaattgtaaatttaatgacataatacatataaataagtcaagttataccaaataattattgtaagttcgatctaatttcaaattacttatatatatgtttcatgaccttagcttgtaatagtttgtattaatgactaatgagttcgtgtggtattataatgtaaattgccaccctaaattttagaaacattttatttatggtaccagtattataaattaaagttgattgaattgagctgatatggagtaatataattgtatagactgtcccacaaatattttgacaaaagaagtaattataactagaacataattaagtttattatatataaaaattatacataaaatattgacgtacaagcgcctgtagctcagtggatagagcgtctgtttcctaagcagaaagtcgtaggttcgacccctacctggcgcgttctaaaagtctgtttttttttccttaaacagattctctcctcaactattcattttaggaataattacataagcaccattttttaaaaattatttccatttttacgttcaaaaaatatttttttacatttttacggttttctaaaaaataacacgaaaataacataaaatcaacaaaaaaaacaacataaaagtaa

SEQ ID NO: 20188 - DNA, 4428 bp, Cannabis sativa
  modified_base (4369)..(4377): a, c, t, g, unknown or other
aagttcatgcaaaaaaaaaaaaaaaacctccagatactaaatgttcacccaattgaattgtctaagattgcttttataaatattagcaaactatgaagcctttcataactaaggcacttgtattataaagaaagaaatgtggcaatagaagtgagctaatcacaaatttcgtcctctcattgctttgggtgttcaagtcgcctgggttgtagaaataataccattagacaaaatactgaaatagttacaaataaatggtatatggctatttaataaaagtgaaaaggcaacaaaagatctctgtatattttcatacgactaaatatcaatgtgtatcattcaaaatatgattgactctcacattctctaacagtagacaagagtacatttaaataaaaagaccttttatctcaaatatctacagattaatctagcacaaacctatttgagataaagattctcttgtaaagcgagtatctatcatcaaaataaacagtttctttagcttgatattaacatttgattaatccaaattacaaattgctcctcgagagaacattttgcaggtagacataaaagagatttttacttatttatttacaatttaaagttgtttgagaagtcagaggaacagatattttaaaacgacagcatctagaatggttattaagcaagaaaaggagaagcaaacatggtataaatacgaccaaacagagtgaaaaagaaaaatgagatcaaatgtgaaacacttcaagctagttcctagcatatttcaactaacagtaatggctatcacaaaaggtgtcaaatttctgggtagaaggtaagcagaaaaatcactattcactaaaagtgcatctgaagatgaagataggtgtataactgtgtgtgatcacataaaagaaaagatatcataatgtccttttagacaatgatagaaagaacacatgggcatctacacagagaactcatgtcactttcacatttttttcccgatacatataataatctatatttgcaagactataaaaacaagtgacagataactcaaaagtgctcaataaaaagagaagaaaaaaaattatgtattctgaatcacctcaaaatcagccatggtgatgcttatcccttccattacttcaggcatcactggttctttcaaccattccatgctttgttcctgatctatagaattcccacatgaattggactttctttcatacaaaatcctctctgctacaaggtgacctgcttcggaagccagggccttcaaatctgctgcaacaaaccctggggtagacctggctattttacgaagatcaaaagagccttcaagtctcatggttcttgtgatgacagaaagaatctctgccctcgcattttcatctggcacacctaactcaatctcatattcaaatcgtccgggcctccttagtgcaggatcaatagcattaggtctattagtggctccaattacaagaacataaccctgtatatcgtcagaagatttggattctgaagatgaatccatacaagtcatcaactgtgtcacaattcgccgctccatctctctttgtaagttttctctttttgacgcaacaacatcaatctcatcaataaatataattgaaggggcagtcttgtgtgctttctgaaaaagctctcttatattttcttcagactcacctaaagtagttattgaaaaagttgaaacatcaatcacaacatcaacatttatatgatgtgaaaataaaagataaaaatttatacctgaaactcctgagacaaaatcagtggcagatatattgtaaaagggatatccagtctggttagcaatggcatgagccaatttggtcttaccacagcccggtggtccatgcaacaaaaggccagaaattggctgaactccaagccactccaatagctgatgctgatagagaggcatgagcaccttcttctcaagctgtttcaaaacccccttcatcccgcccatatcctcaaaccctgatttcactttaacctcactctcaggaacatgatggtccgataccaattccaactctaaattctcatcctcattcttcttcttcttcttcaaattggcggatccagcatatgacactcgaagcatcgacttcgtcaaatcgaaatgtggctccactctctcattgtcccccaacattgatgttgatgttgatgtggacatcgacacaaccccattatcaacatcagactcactcaaacaattctgattgttttcccaactccttccatcatcaacatcccttttgtacttcttccgagagggggaaggggaggtgctcccctgctcattatgctctagagcatcatggagcaatttcatgaaaataggcctcttttgtcgtttgtattcagggtaactagagtacagataattggccatttcatcaacagttgacgaattgaggtttttgaaggattgaagacgcccacgaagaactttctcttctctcgctcctactcttgaccttttccttatcatcttcttaggttttcttaacctaattattatgaaatgatatatatgattattaagggtttcaaacaaatttgaatttaggaaatctaaataaatctgattattttcaaaaccttgatcacaaaaagggtatgtaaacaataaatctaaaaaaccacaacaagaactcatagaaagaaaattaaccacaacaatgaaaccagttaacctttaaataatgcaataacacttaatagtgaactttgaagttgaatccccttgccttgcaggctccagcttaaaattaatctcaaaaaacttagggagaatagcatagtcacatttcactacaatcataattattcctttattgctcaatgttcatatttttttactgatttagcataaatattaatctgataattgtcttactcatacatataccattttgcctctgtgcatattaaaactataccacactcaatttttatttttttttttcaaatggatagaacttgttaattaactcctaaattaataacactttaacaattcattgaggaattacatcaaacattgtgtatgcacacaaaataaaattccacatttatatttatattcaaaagatcctcaagccaaaattataaatcataaacacacacacataccattgaagggggcagtcagcagaggcggggatgaggtgcgccgctaaaagtatcggtgccctaatgagaagatatttttgatataataatttaggaactttattgaataatattcatataattttatatataatacagaaaatcttccatggacaagaaagttttgttgaatgtttggcgcgaagctttacagactaatgagaaatatgaccactccacatatatataatatggctactctaccacgattatggaatttgcataacttttttgtttcattgcaaaaccttgaagtttgaagtatgtaattttttttacggtaatactcaatggacaatattaataagagcattgccataagccaccaactcgacctgtcacgttgcgattggttaacgatactctctaaaaattatatgagacccgatacttatttgaactaatagcgatactgacatatatgagggtgctaggcccactggtgcgttcagcatttctctattaataaattataatttttatccaatgtaaaattatgttaacaggacgtatatagtatgagttatttttaaatattctttttttttaaccaaaggagaattttattaaatggcaaaaaagtgaaaaataaaagctcaatgcaaggattagaggcatggtgataaattgggccagcaaatccaagaagagtcaagatataaagtcgaacgtgcaagtgaatgagccgtagcggaccaagcatgtaaaatatcatgaacaataataccaaatttagtgtgatatttattcttgttattaatagcttggataagatgaagatgatctgagaaaataataatggagttgtaccccgaacggtgacacatcaacacccattttagagagttgttgcctccaccacattaggatgaaaggaggttgtcattggattactcgaagaacacaaaaccaccccatcacggtctatcaccactgccccgagacccatacaactgtggtcctcattgatacccgcatccacaaatagaattaaatcatctaacctcaaattctcaaacgagccactagagagcctaaccatagtctctgtcggcttcacatgagcagtcggagccaaattagattgagcatcttgataacgccaaagaaaactcaacgcatgatgagtccatatttgtcttataaatatgatcaatttatnnnnnnnnnttcttaaattgattctttaaattattgattagtgtgattttaatttgttag

SEQ ID NO: 20189 - DNA, 1251 bp, Cannabis sativa
tgtttcatttaatacttcattttattgaaagaataagataaagaaaaataaatatgttgaaacgtacgtaaaattatttataacataactttaaaacacacactataaattaatttaattaaaatcacaggattttttgtagatacacaaaataattaatcatgattttcttttaattaagagaatcatgtatagtgtgcccatggttctctgcatgggaggagtctgttcctcagctcactcctcggtgatctcctaaattattattgagctgaaggaatttgagataggatgtgcaccatctgatcccttttttcagttatcaaaaagaaagaaaatcgtgtatatctataggattgataatgaattttgaaatacgatcttttgctaaattatcttgagaactatgtccatctccatgttgatacataaataatcccattcttgcaaagtttttggcatcatcaaccaatgatgaatttccatcttcaatattaaaagtactattcatctccttccatgtttctcttattgaaaacttaatgtattcacgagcttcctctttagatacgttatggtcttgcatgtaacattgaattgatttaggcgagtcacctctttcgaattcctcctaataatcataagaaaaaaaataatatataatggtgttacagttaaatcataatagtaaaatatagtactgtaattaaatacaactttaaaattaacatttaattatatttatcttttaaaagttctcatcgataggtaatatctattaaaaaatgatccatatatataatattagcttacagatgatgttgctagatcatttgccaaacgtacgatcatggcagattgatgaattattgtgggataaccttgttggaagatttccaaaacctctttagttatgggatttgcaaaagagaaataagcatgcacaagaataattggtgctcctactgaaatccaaccattttcaatgtattcttgaaatgttggtgtgtatccattatagtaccattttgcctcttgtagaaaagatctacacatatcaacccactgcaaattttgaattttatgttaaataattagatcaaatgcataaatttttttggaataagtcaatctcaaaaaattagttatgagattaagttctttttcttaaaaccctaaacgtgatctctctccctccatgcacgtcgatcatgctttggctttgtattctcactcactacaaaaaatctt

SEQ ID NO: 20190 - DNA, 13931 bp, Cannabis sativa
  modified_base (28)..(34): a, c, t, g, unknown or other
  modified_base (200)..(202): a, c, t, g, unknown or other
aaaccttatgtgtttatttcattgtttnnnnnnnttcatatttaggatgttaattaaacattcttgttagtaaatctagatcatggtaaagtattcccaacagtttgcaccaccattgtgtgtgtctactaaaacttaaggcaaagagcaaatttggattcttactctcaatgaaagtaccaaaatgttgacctcgcttnnngccaacgacagtgagtcaattaataagcagttatgaatgtaattaagatagagcaaaaattagaaaattatatagaacacaagattttaaagaggttcggcccctttagttcggtaatagcctactccccttagattgtatttacttgagaacaaagaacacaatgtttcctctctctcaaagctcttacagtgaaatctctgagtattttctcttagatctctctctaaagcaattctttcgatcccttttatagtaatactagatcattatttatagggctaaatgcatgagggaaggtttcccttttgcttacaatatctataattggtaagaacatacattacatatttagaatacatgaaatgggggattgagacaacttgcgtatctctcttgaatgatcccaaaattatagggattgcttttgtgcttgagcttcacgatatcacccttggaatgattaagtcttgatatacggttcagatcactctttgcttggttcatctaccttttccctgcttaatcaagtaggctttgtgtgtgcagatgtattacttggagtcagctcagaacattcctccagctgagtgtaaagaataaagaacacgtgtcactagtacatttccacgtcatagtgcaaaaaaagggataacattaactaattcattactgaaacacgcgcatcagtcagaagtcttgagctcatattgggtagctagcaagttttatacagaaacaagctcaagggaattcgcctagcactagtgaagtcaaaactaaggaacactgccaagtaatttccttgagaagtggtaagaaatatgaggggccaagagcagagtagtaaggttaagaagggatttaggatcaacagtcaccgatcaccaaggagaagaaggctagggacgaacaggatattgaaaatctactagaagaatacaagtcataagtagtgatcatagactaccacataaaaatcccctatcgtaaaaggccttgctagaacaacctcgacaagaagctctaaaaattctaggaaatatttaagaagtttcacattaatataccctccacagaggcacttgagcaaatgccaacttacttgaagttcatggaggatattttagcaaagaaaaggaagttggaggattatgagacagtgacacttactgaagagtgtagtgcaatattacaaaagaaattactgcccaagattaaagatctgcataattttaatatttcatgctcgatattgggttcagttaaaacaaaagctctatgggatttggggaaagcattaatttaatgcctctatccatcttttgaaggctaaaactgggagaagctctccctacaacagtctctttacagatgacaaattgctccatgttgcatcctcgtggaataatagaagatttattaataaaggttggtaagtttatcttccctactgatttcttagtacttgatatggaggaagattcaacgattcccgtttttttaggaaaaccattcttagtcacagggcgagcgttaatagatgtacaaaagggggaattaacattgtgaggtcaagatgaagaaatgagtttcaatgtattttctccaattgaaagtcctacctgttgtaaggttgaattagtgaagcattgcaaagtcaaagttgataagaaaaaagggaagcccaaggaacagttttgaactgtttgacatcgtatcaaaagactgaagtttgggaattgttaaggtgaatttagtctcatggatagcttcaacaatggaaacattggaggacaattttcttcatttaatatgaggaccctattggatgcaagaggtggacttgatcaaagatgaatttttataaaggaaattagcgcctgactatatgacgttaacgacaacactcttgggaggcaccccaagtaagctctcttctctagcttttggtgtaacattgaggacaatgcgacaatcatgttttgaagggtcaacttaatttttcttttttagttatgtgttttaattttgtctccttaaattttgtgttaatgtcattgaaagccttagtaattgaagaataccattagttgttattcatttgatgaaacttgttaataaccgtgtacttggttgtttaacttttaatgattgctggaaaatttaatatgattagtaaatgtgaataattgaactttggtatacatgcttgactagggttagaggattgattagttgaattggatagaacttgcattgcttgacctttaaagcaaaatccttaatgatatatgttgtgaaagatgatttaggaaatttttggaacatttgtgtctttcaagcttacccttacttgattttctctagtttaccatttttgtgccttgacttgttattctatatttttacacatattatgagctagaaatgacttcattattatctttccctgtcccaattatgccataagcttagcataactattggggaggattataatttgggaaacttagggtatgatatgtgagaagtaaaggatatttatgagagaatttcaagaaataaagttacttacaactacttgaaccttctaaccagaactgagttttaagccttttcctcccttctgggaactcaaacataccaaagcttaacaatgagttcacaaaggatatagttgatgacatcctgtccctcccaccaccgcaactccaccaaccctacaccatcttttggcaacacaccacttcgggaatctacactgttaaaactagttatcatctggccctgaatatcaagaacttagccaaaccaacaactttaactcccaacagtctccctccaaaaattaaacacttcacgcataggctttgccacaattctcttccaactgccaataacctttttaataggaaaagtaggaccactcctctctgtcccaaatgtcaaatatgccttaagaatactgagcatgctctctttgaatgcaaatgaggtacgtcttttaagcctcttattaatgctatgaaaggaaagagtacttttgacacacttctttttcttagatctcaactgcacgaaaatcagattaaactaatcctttgtgttttgtggaagatctagaatagtagaaacctctttattttcaagaatatacaagaaatacctcttaggattgtttaagaagcagaggaatatctttgattctaccagcaaaacctgacagttttaagtcacaacatctaaggacgagatcaacccagccaggatacttggcaaccgccatgaaggtcattaaaagctcaatgtagatggcacaatgtcaactaaaagtgcacgctaaggtgctggagcactggtccgcaactcatcacgtcaaataatagcaactttagctcagagtactgtaggacaaattccaccacagtccgtagaagcttgggcaatgctccaggccctacactggtgtaaagattagagaatccccatacatcatgttgaatcagactgcctcaattgaattagagacattaagttaagacacatcatgcttacatgttacggggctcaagtagaagcaattaaagaagtgttatctttcttcactacatccctatcccacgcccaaagaactaggaatgctactgcacatcaccttgcccaagcatctttagggttacataacatgtggacttggtatggaagttgtccctttccttttaatctttagctgttgttaggctatttttagcctaagttttggaatgattttatagttgttttctttgttaatgttatcttttggaatggttttacgcttgatttcctttgtttcagatccctgaggcattagagtttaaattctatcgattgatgaaaagacagagcaaactggagaaaaatctactgaagctgacaagtatgcttctgtagttgcgaccaccattttccatggttgcgaccctttttcatggttgtgactatggtcgtgactatgaggcataggcagacagcttgatttttaagttttgcgtatggtcgcgactaggctttatgtagtcacgactatgggctaaatacgggaattttgggtagttttggaatttcgccatttagagatagcaatcctaatttttatttaaggggctcatgttacacaagaaggatactcagaggaagcacttgtggcgacccggagtaaaatcaccaactagttctttcttaactcttgatttctatgttaatttctattttgaatttgattatggagattatgaactaaactcctatttggggagatgatgaatgttgattgatattatttcttaagctaatgataattgttatttctcctttcttgattgtgaatttatctatatttgtgcttaattctatgtttgagattgatcaccttaggcatgcttaatgatcccaattcaaaatttgaaaagtgagttttgggaatgctaaaattggataaacaaggttttgatgtgaaatgaaaatatttgcataccttaatgacaattagattattgtttaatgttgattatatgttagtctatttcagagatgattagataacatgtgatttaggacccaaaagatctgaaaaagagtaaggttaatttttataatctgtcattcactttaagaaagaaatagtaattagcattaacaattgggtaattaaatcaagaggattctttttcataattttttatccttgattaaacacttttattgcttaattttattttattgtattccttatttttattgtcatcaaaattattgtttaccaaatagaagaaatataagtctaatttagtggtattcagttcaattcgctgtgggatcgacctcacctgtgtgagtaatacttgattacgtgcactcgtgtagctgttcatatttttttgtaataagtttttagtgtcgttgccggggaattgcttaaaaattgatattacaaaaattagattaaattctaccttggttaattctttctacttattgttaatttgtttcttttaaattgtcttattctatgtcaggcattaggggtgcatgcgacgtcaaggacaaagtgcaacactgcctgttgatcctaaaattgaaaagacttgtagaagaaacaaaagaaaaaaaaaggcaagaaagaagtgcagcaagagctgaagcagagaagtcatggctgacaacgttaatggcggtaataatggtggcaacaacggtaataatggaggtgccgtagaagaccaggcaaacggtcgtaatccccccgaccgtagtctgagggactatgttcttccaacattgatgggggtacagtcttgtataagacaaccttctgtagagcctaataactttgagataaagccagccatactccaaatgatacaatcttcagtccagttttgtggactcccctctgaagatccaaatctgcatctgtctaattttatggagttatgtcaaacattcaaagtgaacagagttaacgatgatgccatccacctgagactatttccattcttgctgagggagtgagccaaaagttggttggtttccttgccacccaactccattgctacatggactaacttggtaacaaaattcttgtcaaagttttttgtcaactggacaatgaatctctgtatgaggcttaggagaggttcaaggatctcatcagaaaatatccacatcatgggatcgaaaagtgaatgttggttcacaatttctacaacgggctgatttgtaataccagaacaattatagatgtcgcagttggtggggcatttttgagaaaaagtgcaaaagaggcatatgatctgctagaagaaatggctatgaataaccaacaatggccaactgaaagaagccagtctaagaaagttgtgggtatgcacgaggtagacgcatcaccaagttgacagcccaagttgaggtcctaacaaagctaatggttgtttagacaaaataggctcaagttacttgtgagctctgcgagagccgtcacacatatgacacatgccctgtggatgtgaacagtttgccaatgaatcaagcaaaagccattggaagtaactatgggtacaatcaaggagggggtcggcaataaaattttcaacggtagtcctctaatcagttgcaacaggggttttaccagctgagaaatcaaccccaacaaaatcaatagtagccacagcaacaaggttctagtggagggtctagtctacaaatagatttgctactacagttcatgacagagactagatcatccattaaagccctagagaatcagatggggcaattggctactcaaatggctacccgccctcaaggtagcttgcctagcacaatgaaggtgaacccaaaagaaaactgtaaagcaattaccttgagaagtgggaagaagtatgaggggcctagtgagaaacaacaagtagaagaagtgattcaagatcaataagcagagacatcggaagagaagaaaaatactgagggtcttacatcaaaagaagcgtcaccacctgttagcattgaccaccatgtgaagatcccttgtccgcagaggctctgaaagatcaatctagacaagaagttttcaaagtttttagaaatattcaagaagctgcacattaacatcccctttgcagaagccttggaacaaatgccaagctatgtaaagttcatgaaagaaatcatgtccaagaagagaaaaatggaggattatgaaatagtggcattaactgaggagtgtagtgcaatattgcaaaagaaactccctcctaaacttagagatcttgggagatttaccataccttgtaccatcgggagaatagaggggatgaatgctctttgtgatttgggaggaaacatcaatttgatgccgctgtcagtttttagaagattgcaactaggagaagcaatgcccacaaccgtaaccttataattggctcatccaaggggggtcatcgaagatgttctagtcaaagtagataaattcattttcccaacagattttatagttctagacatagaagaagacagtaacgtgcccatcattcttgggagaccatttttggcaacagaccaagcattgataaattttcagaagggttaattgaagctaagggtgcaaggggaagaagtggtttttaatgttcttcagggaatgacttttccaaaggctagttacaattgtctctctattgatctcgtgtacactataatggataagaagaaattgattgaggattcgttaaaagtgagtctaaccgaagaggacttgaatgagcaagacgaaagtgaggtgatagaatatgcaaatagcttgactcttatgggccattgaatagaaaatactttgaagagttgggggtcgttctaaagaagcatgtgttgtctatagataagccaccagagcttgagttgaagcttcttcctgatcattttagatatgaatttttgggttaaaacaagtcgctgacagtcatagtgtcagcttcactttctgatgtggagactaataagttgttgagagtacttagaggacatacgaaagccattgggtggacattggttgatatcaggggaatcattccctcaacagttatgcactaaatcttaatggaagatggagctaagtcatgcatcgatgcacaacgaagactcaacccaccaatgaaagaggtagtgagaaaggaagtgatcaagtggttagatgtgggggtggcctaccccattttggacagtaaatgtgtcattccagtacaagtagtgctaaagaaaggagggatgatagtgatcaagaatgaaaagaatgagttgacccctaaaagaattgttattagctggaaaatttgcattactacctaaagcttaattaggcaactagaaaagacctttttcatttgccattcattgaccagatgctagaccgattggctggacaagattactattattttctagatggctattctggttatcatcaaatagccatagcaccagaggaccagaaaaagacaacctttacgtgtccatatggcacttttgcttttaggagaatgccatttggactatgtaacgctccagcgacatttcagaggtgcatgatggctatcttttttagattggattaagggttgtatagagatttttatgaatgacttctcagtttctggtttatcttttgataattgtttgagaaaattggagaaggtactaatcaggtgtgaggagtcgatcttggtacttaactgggagaagtcgaattttatggtgaaagaggggattgttttgggacacaagatctcaagggcaggcatcgaggttgatagagccaaggtgtctacgattgaaaatctacccccttcgatttctgtaaaaggagtttggagttttctaggtcacgcatgattctaatggatatttatcaaggacttctcgaagatctctaagccattgtccaattttcttgtcaacggagtaccctttgagtttggaaaggagtgcttggaggcctttcaagctcttaaggagaagctaatctcgacacccatagtcactacaccgaattggaagctgccattcgaattgatgtgtgatgcgagtgagtacaccattaaagctattttgggtcaacgatttgatagggtgtttcataccatctactatgctagtagaaccctgaatgatgctcaattgaactatgccactacgaaaaaggaaattctagccattgtgtttgcatgtgacaagtttcagtcttgggaataaggtaattgtgtatacggattattctgcaattaagtacctgatgaccaagaaggatgcaaaaccaagactaattcggtgggttcttttgctccaagagtttgatattgagataaaagacaagaaggggaccgaaaatctagttcttgatcacgtgttaagacttgaattggaagagagtcaaaacctgaagtgtacagataaatgaagagtttcccgatgaatagctctttagtttgagggagagcttgatggtaccttggtttgcagattatgtgaatttcttggctaccaatgttacacctccagagatgtctcgacaacaactgaaaaacttcttttcagaggtgaagcactactactgcgaagagccaatactctacaagcactgtgctgatcaaataataagaagatgtgtgcatcaagaggagatgtactctgtcttgaaccactgccatgctttacaatgtggggggcatttcagcaaaataagaactgctgccaaggtttttcaaagtactttttactggccaactctttcaaggatgctaataactttgtgaaagcatgtgatcgttgttagagaataggcaacatttgaaggagaaacgaaatgcctttgactggtattttggaggtagagttgttcgatgtgtggggtatagatttcatgggaccttttccatcatcctttaacaacttgtatatcctgttggctatggactacgtatcaaagtggatggaagcagctgcaacacaccaatgatggtaaaatagtcttgtctttcctttaaaagtatattttcactcggttcggaactcctcgagcaatcatcagcgatgaagggaatcatttttgtaataaacagtttgaggcattgttagcaagatatggagtctaccatagaacaaccgtaccttaccatccacaaagcaatggccaagctgagatttccaaccgggaaattaagttgatctcagagaaaacgattcaacggtctacaatggattggtcaaggaaactagatgatgcattgtggacttacagaactaagttcaaaacacctattgggatgtcagcacataggttggtctatggaatagcctatcatctaccggtgaaattagagcagaaggcattttgggcgatgaaaaccttgaacatggatctggtaggagcaggagagaagagactgctacaattagatgagcttgaagaattcagaaacaaggcatatgagaatgcaaagatatataaagaaaggacaaagaaatgtcatgacagaaatttagttagaaaagaattttaacctgggcagcaagtcatacttttaactcaaggttgaaactttttcctggcaaattgaagtcaagatggtctggaccgtttacggtggtcaaggtatttccatatggagttgttgaactgaaaggcgagagcccataaactttcaaagttaatggacaacggttaaatctttacgtgggaggtcacattgaccaattcaagtcctccatcatactggcgcgtctttgaagaagaaattcagcatctgactatatgacaataaagacagtgctcttggggggcaacccaagtgatttcatttactttaattacttttgagacatttgtattttcatttgttagcattttaatttttgttctttaaaattttcagacatttgttgttattttaaaatagtgcaaagcgtgaaaagtcaaaaaaaaaaagaaaaaaaaagaaattttttttggccaatccctagtagttgccgctatcctttccaaagtcgcgaccttttccaaagaaaatttcacgatcgcgactatggtcgtgactagggaaggttggcaaaaagtcgtgtttttgaccatctcatagtcgcgaccaattttcatggtcgcgactatggtcgcaacttggaattttggcaaaatggtgggtttcaatcattgaactatggtcgtgaccagcatattatgtagtcgcaaccacggtttgcatctaaaccctaaattacccatttcacttataaaaaccgatttttacccctcataacctaaacctaaccctcatttcaaatttcattctccctctcagttgccctctcactaaatcaccttcaaatttcaaattcttcattccacccataaactctcacctccaaccaaatccctctcatcattctcttatttaccacaaaaattacaccccaatttcctcatcctcaccgaaatctgaattcgctatttatcatcttcaagcttgggaagatcttcaacaatggtgcttcattaagagatttctcactttgtaagtgctaatttcaaaaattttctatttgggttggtgaaattaacactattgtcaaatatttgaagagtggattttaggtattaaaaatttgtgattggaattttgtgcataattgggattttgtggattttgtgtgtgatttattttgcaatttttaatctgcacttgttgtattgttgatggtgctttgttttgtgaattggtgtttactgggaagtgaagaatttagggaagtgctgtcaaaattaccaagaatttgtgttgggattatttgttgtggttgtttatgaatatgggaccaaaaggaactagggtgagtgaagagtttggttcatcatccaacccatctcgattcgctcaaaagtcgcctttcgacaagacttgatttgtaagtgaagcggtgcaagagaggttcctcaacttgaaggataagccttacactgaagaccagggaattgactacaccaataccccgctgaactgccaaccaaggtttgaaattattcggcgtcaaattgatagcttgaattggaccacctttgtggatgccaaagaacgagccaatgtcattatggcttgtgaattcttggctaattggcctgaaaggaagaatggcatggtcaaggttcgcaataaggaaatcctatacacgtctgatgctatcaacatgccttaccaattaccagatcatactaaagatgaacaatgattgagagtgattgagggggatgaagaacttgactatgtagacattgttcaaacagttgggtcccagagttaaggtttcatgaattggatgggtcaccgaacttgctttataggtgtgagatcaatcttgtggccaaggtatggctctactttgtgagtgcccaattggttcctagcaagcacttctttgatgtgtagattgatcgctaaaaatatgtgtataccatcatgaaagggtacaagataaatgtgggccaagttgttcgtagaagttttgacttaatggttcaaggtgtcacgggagatggagttgggttagttggaataatcactgacctttgtggaacttatgggataagacaactatcttatgacaataaggtgatgtcacaaaggaagatggatgtgagcatggttaataggctcaaggagcctcatccttatgggaaacccccacttgatgcccaaccacaaggtagaaggtgtcttgttggccaagaagaagaagacgaggacatgccacaacgattgaccggtcccattaatccaataatgtaatacatgcatgcccagctcaactatattatccaacagaacaatcatatatagaattacatggttcaaaggagtatttatgatgacgatcaagtcactcaactcaactctcctatcactcgcatggacattgggatcgaggatcccaactatttggcaccacctcaatttcacccatatgatcagccgccaccaccgaaccccttctgatgggggtctcaaataagtctctttccctttggctattataccacattggggacaattcagtttggggtgggcttaaattattttttttgtggtagtttattttgttttagtttagtctatttatttggatgttagtggattaaacaagctgaagataattttgtgctgctgttaattgtgaaatggattgaaattttaaattgtgtgcttgattctattaactctttggattaattcagatgcttgtaaagactttgtagtgatgaaaattggcaatgtgtgaaatatgttataattgttttactttggtttgtggtaagattgactgaattacttagaacttgcatgtcttattctcttgaagcgaaatctttgacagcatttactaggaatgtgatttaggaaattgttggatagtttgagcctttcacgcctagcattaaatgaatatccgtagtgaacccttttgagcctaaacctgttgaactaaaaatatatccacactgtgttctatcctcattgtattttgaatgataccataacctggataataagtttgggagaataaagaatagtgtgagtgaaagtgttaaaaaataaaaattgcgtgactgagaaaggtttgaaacaaaaaattttaacccgacatcacttgaaaattttagaatagtgtttgctctcgaaaaaaaaaagagagaaaaaaaaagaagaaaatcaagcgagagatcaaaagctaaaaggtgaaaaaaaataagtgatgtttggaaattgttaaaaagtctcaattattgtatttgtgggaacacttcagaaaggtcttaattggtgaaaagtttgtgggttctaatatgcttatggtatttttagccaaaatgtctttcatttaccgaatatctaagctatcaatttctaaccttaaaagcccttttgatttcgaaaaagatgttgtcaacattagtggagagaggtaagcatgcaagcatattagccattggtttatggactggttttaatgagtaaaacaattatgatattaattcaatactgaagttaatttgtatctgtacattgtttgatagtatatgagcatcctaattaattgttagagtttttagaattgaaattctagtttagttaatggaaggaaa

SEQ ID NO: 20191 - DNA, 5916 bp, Cannabis sativa
  modified_base (2459)..(2460): a, c, t, g, unknown or other
tattttaaggattgaatatttatttagaaagttaatgaaaattgttatctatttaacatttttgcccactgaattatgatctatacataattctgctcccaaaatcattaatccgttaaaaatagtcctcaaactattcataatgtcataaagtagttattatgtcatagtggcagatattgttatatgtgacaaacataatgatgatatgaaaacatcacggtataattaatttttaaaaaataatttaaatttttaccttaattttagttgaattttttaaaaattattaattgatttttttttcttgataatttttaaaaatatatatatattaattttaaattacacataacttgctaatgtgataataatataaatattcacgtcattattatatttgccacgtgtgaaaaatttgacgaaagaaccactttataatattgtaaataatttaaaggttatttttaacggagtgaaagttaatagtacaatattagttatagttttggggacaaaaatattaaatagctaaaattatttgtatggtttataatattgaaaaagattatggctttgatatgttttgcattaaatatcatgttaaattgtcaaaagctttgatttttattgattttgttgtccctagcttagctttgtatatacaattaagttagttaataactaggattgcctaacgacaatacctaactattttgctttgaagtttccgactttagccattttatttcaaacttgtgtttacttatactaaacttcttcaaatatccaattaatattattttttaaagaaattattttatctttttataaaaaatcagattcgcatttgaatttttttaaaaataaaaataaatgggcaacattaattaattattttaaaagttatcatttttttaaaaggatcaaaaatttaaatttaaaaacacaacacattaatatattttgtaaacaatacattaaccaattaaatatctagaactttgggaataaaatcttctcattttttttaataatattaatcatgtgagtactaattattgttaaataaataaataaaagaaaaaatttgggaattcgatgccccaagactataaactattcatagaaaaaaaagattaaaataatttgaaagtaaagtatctacaatagacacgtaagtgatcttatccaagtgtataaactatactttattaaataaaaataataaattttgtcacttttttaattatattaagaaaaactaattttaatttaattaaattatacttctcggaaaaaatcacttaaaattaaaattttaataatatctatcaaattatattttcgaggtttaacatatactttatcgcgttcactgaattttcattcatgtaaaatttctgttaataaaattaaacaaaaatcttttcgttaaaaattctaattaactaaaagaaaaaaataaaataaataaagttaatatttctataaaattaatataaaaatctcaatttaactttgttaataaatatttaaatttaaattatcatttttttattagtatattaaaaaattaataacctatatcaattaagaattatatttattaataagcgaaattaaattgatgcagtaaattattatttttaaataatgacgtcataattaatcatactactttgtttggtttgcttccttagctcaatacacattcatataatctctctctcttcacacttcttaactgtaaaaaaaaacccaaatctcagaatggtcgccggcgccggagctcagttaagtttccgtacagctaccggaatggggatcttcttctccgatcaaactagtaatgtcactccttcgatgatgatcacttcatcatcatcttcttcttctagttgttcgtttcagttggcttttcgtaccaaacggtgtcgttttcgttacaacagaaaccctattctcattctctgtaaatcttcttcttcttcctctggctctagatctactaataatggcggtggtggtggtggtgatcctgatcgggatgattatgttgaagcttccttactcctttcaggttcgttatattcttaactttcattatcaatttcttgttttttggtttggtttctgaaattgaattgaattattgttagtgcagaaaccttgtcgcaccaccgtatgcggagacgtggttttaaggaagatacatggcgaccttcgcaacaatcgagtcttcctaaaaagtttcctttttctgttcaaaggaaggaattccgacctgattttaatctcattagccaaagctttcttaatcggtttcaaaatccaactttatttctaaagatttcttgtgatggtgactttttgctcccaattgttgtaggtatatacacatccatacatacataaatgtcacaatatcattttttttggaagtatatatatatatnnatatatatatttatatatacacacttttaaaaagatgccatgaaatatacttattgtgttcatagttcataatttctctaatgtattttcaggtgagtttgctattgagaaactggtagattctacctgggtagatggaaaagaggtaagtttgtttaactctctgctattggatcttttgttttgtttagttttcacctctgaaaaaaaaaatgagcttattcaatttttggcttgcagaattctccaaaccagtttcaatttatgagaaatcttgtggagaagcttggttatgaagtatgaattctttccttaacacttgagaaattgttcgaagaatcaattagaatccagaattttttttcttactggtttttaactcttatgaactttttattgtttgtttttattttcctttatacttcttcctattcaattttcaggtaaatatggtaaaaattacagaaagagtggtcaatacttactttgccagattatattttagtaaggtaattaaaattggaatctgattcttatttcatcatctggaagaatagtaactagtaagtaccattatgaagtttcttattctctgcagccagggggaaaggacattcttagtgtggatgctcgtccctctgatgccataaatgtggcacatagatgcaaggtaatattactgaaaatcttacctaaaggggaaaaagggaggaaatttgttcgtttcgtttcgatttgttatttatgatttgtgattatttcctgcaggcacccatatatgtaaataaacatattgtggtaacagatgctattagaattagctatggaatgggcagagtgcgtgatacaaaatctatttatgatgtatctcttgacaggtattgagtcttaattgtttgaatctctcaagtttaccgtcgttattcgagtagttactctaatcgctatctgtgtgttcttcagtgctgtagagggtcctgattttttatctcaggaacttgttttggtgaagaatattgacttagctgtcaaagaggaaagatacaaagatgcaggtaaaattttagttagttcgtttagcctttcgattgcatattgcttgtgattcgattatacaaaaatgataaccaatttaattgctgttgatgcagctatgtggaaagacaaattattgcaatttcgaaagtcaattcacagctagacatattcgcctattgcttgtccattgttcagatgtgtatgccttctaaaccctttggtgtatcgtttgactggaaaccactctaagtggatggaactcctgcataaagagatttcaactatgtacagctacttaagttatatatttatatattagttattatatagggcaatatgtacatgtgaaagcatatagttcagttcaggtcaattttattgtcctcttaccataaaatttatatctatagtgatgtgtgacaagaaagaactaccttgttttcatttatactattctactctgaatctaatacagagctttctttgtaaatattactttttattctataacaatggttgttcttttaatatgttgaatcttgatatgtgagcattttctcaagttggcttatcttctgttaatattacaaaaaagtacactttttaagctgttgtgaacaaaacttttgtatagttttcatagggatcacacatgaaacatttacagaaatgaaaaaaggaacacttaaagaagtgattttagctagctagcaatttcaattgcggcggaggcggatgatggaagggattcgagggcgcatttgccaacggcgatgtgagctcggtgctctttcaccatcaccccaaagagcatatacttcttcgccgtgcacagcatcatcaccgatctccaaatcctcttcactcatcctcagattaactactcgactaatcaagaggcaaattaatgaggtaattactacattccaaactgttatgaaaactgctccttccaactggtaccccaactgtttaaaccatcctcctggttttccatttgagacagcaaatctcacactcgaaccgtacatcatttccagaagatcggtttgagcaaagacaccggaaagcagacctcccaataggccagcaaccgcgtgtgtatggaagacccctaaagtgtcatccacactttggaaaatcactgattttttatgcaaaaccatcattgtataccatggtattgaaccagacaatattcccattattccagctgcccatggatctacaatccctgttcagtccaccatagatgatcattagattccgaaagagttgttattacatggaagttttgttagttataagaaacatacctgcaccaggggtgatacagaccaggccagtgatcatgccctgaacagccccaatcacagagcttttcttgtagactatcatgtccatggaaacccagaccaggaggctggttgcagtacatatatgggtgttgagaatggctattgatgctatcatgttggctgcaaatggtgaaccaccattgaagcctgcccaccctagccatagaaaccctgcacctcccaacatgtgaattatgttgtttgggggaaagtgtctcctatcgtctgacaatctaggacccacctataaatgcgatcttcattaataattataatctaaaaaaaatggttagttataaattaaaatatgtgtgacatgatattaaacattacgttaataacaacatcatataatttaagtagagtcagatatcatttgtaaatctactatgctaggaatatcaaatcaatgaatccgtttattgaaattgcttaatttactcttttgttggttcaaaatctttttttactgattggaattatataattagaagatttgttaccaaaatctatctagttctatatattcttgaaactctttcttttaaaattcggtttgaacaaaaatataatagagaatttattgagttatcaaataatatatgatacagttcaaatatggtactagaaaaaaagtaagactcatcaagagactctttatcctttctcttttcacctaatcgatacttttatattgtgtcacttttaacttgtatccattaacatttatttaatctaaaacaccaaaaaaatcatcctctctataacactagattgcattatcaactataaatgctcaagtgtatctatgaaatgtgacaaaccttgtttcatcacaagttgataaactaatagataagataaatatgagagtacaattgaaagatttggttcaaattggatgtttaaaaattttctgagaagttaattataggttcctttctttattggaacaatgcaatctataacacttattactaaataaatttgttgaaaagataaaatataatcaatgtatattttttttatcaaagactaaatcgatcatcagaagaataat

SEQ ID NO: 20192 - DNA, 3756 bp, Cannabis sativa
taggcacggtcttatacataattttatatgattttttttagtataatttgcggataaattttttatgttttaatttttatatacttaatttttaattaatatttctttaattttaattctgtttgcaaatttgaaacattagttacacatgcatatacatggcttgtttttatgtcacagcagtgtacaaacccttttatttgacatttaatagttaaatttaactaatgttttaaatttacaaaataaagttaatgtcggagtattcctaaaaaaataatcagagaattaattgcatgtataaaaattttaaaaaaaaaaaaattggcaactaattatttatttttctatactaatatataaagtactaataaattaagattatatatatgtatgtggatgcagttagtgaaccatggtattaagggagatgttattgatagaatgaaagatgcaagtaaaagattttttgagctgccttcgagtgaaagatcaaagtacatgagtaatgatatgtgttccccagttcgttatggaactagcttcaatcaaaataatgataaagtgtattgttggagagatttcttaaagcttagttgccatcctgctttgtctcaaaattttcctcaccattggccttcttctccccttgatctaaggtaattaattaagcacttatatatctatattattgcatgagattgtaataaaaatgagtacataattatgatcatatatatatgtatttatatatatagggaagcagctgttgagttctcgttgggaattagatccgtgtatatgatggtgatggaggctattcttgagagcttagggctaattaaccaagatgatgatgatgataatgatgagattaataaagatattagtgaagaggggagtcaaatagttgtgatgaactggtacccagcatgtcctgagcctgagttaactctaggaatgccacctcactctgactatggattgctcactcttcttcttcaagatgaacaagttgaaggacttcagatacaacatcaaggaacatggcttaatctcaaacccattcctaattcttttgttgttaacgtcggtgatcatcttgaggttagtagctgttaattactatatatattcaaaactaaaatgtatcacaatattataagtaaatactaaatttaattcctgacacatttactaatcgaaatcctagattttaaatatcatactaaggttaaggtcacttgataggaatatatgtttataacttattcaactaatttatatatgtaaaccaaagatgactcttttaaaatagaaaagtatacacacttttaagtgtcatttttgaattataaggcaaaactaatctaatataataaatggattaacgtgtcaaccccatatataatgatacttaaacccctttatttaaaaaagaaaaaaaatcaaaatcccatctatttggagtagtggtaatataattatcatgtcttactcatcttgtccctcctgcaaaatataatgattggaaccataacaaaaggtgttactgttaagccaattcgtgtttgtcatgcatgcttatctaaatagtttttttgctatagtttatcgatcgattacactaaattatcatctataataataatgtatttaatttttttatatatatgtatattttcgaaatttgataatcgtgatagtactataggtgtcgaccagaaaaatcctagtggccccaagttttttatgagagtttattattaggagagaatctaattaattataactaacacattccaacatttaatccgccttaacaatgcaccaaaatagataaaattattccctaaaactagataattaaatatgtattagatgttaaattaatcggggttttttttaataataatttcaaaaatatatatatatatatatttaaagcatgagacatcgccattaaccgaatcttcatgcactggttggttactatcatatatatatgtattgacttttatataaagaaattatgtgaacagaaacaattcaaatattaatataagacttttatgtgtgtgtgtgttctgtgttcagatattgagtaatggaagatacaagagcgtgttacacagagtggttgtgaacagttcaaagtcaagaatgtccattgcttcacttcacagcgtgggtttgaactgcatgattgaggcatcacctaaactcatcgatgaaaccaacccaaaacgctatatggacactgacttctcctccttcctccaccacttagcttctcgtcaacacaacaacaacaagacttttttggattctagaaaactgttttaattattattaaaattaatattaatattacacaccacattatcaatccctttgattgtcttatatatatttaccctactatttacaattgtgctcattagagacaatatcaaataagaaaaaaatattggttatattaatagtcattatttaataaaattttattaagaatatgaaaaattattactatttattttttattatttaaataatggtaatatggtaaataaaaatatttttttttatgttttatttacgaatttactgttaaaatttttaattataaaaatacatttgtaaagttataaaattacataaatacattttgttcggcaaaaactaaaaaagacaattaaaaaacaaccagtaaggttgcgataactataattcaattataaataaattatacaaacaaaaaataaccagaaatataaactcataataactataaataaaccataaaacaactaaaagaaaaagtatttttataaataaaagtaaaaataaataattttccctgttgatgtattttataatttttaaattttttgatttattatgtaagtttttcaaataaaaatatgaagtttaataaaattaatttatcataataaccagtggtattatagtaaataaaaaataatatttattatgtactaaatattttgtactaaatttagtacaacttttaacatgtattaaatttaacacactttttaaaacactgttaaaataataatgtttttaaaatatatgtaaaaacataacaatacaatatatacattacttttcttttcaattcattggatggtcttaataatttattaagattattgactttctcctaaatatatatgtatttattaattaattaatactatgatgccatttaaaactcgaccgtgttattttttgttggactcttaatacaaagagattgagagagacacgtatatatggacaacactatgtatctattatgaatatgaacatgaccacagtagcgcgcgctagctcctacgtactcctatacgtaataatttattatatgaaaatgataataaagtattgtaaataatgattaaatacgtcttcatcatcatctttcttgatatgacctgaaatagtggaatgcgaatgattttaactagttgcggtcttttaagggaacctcatgatcaaacaccttctattttttccacgaaaataataagtgacttcaactaaacgaagccgtgaaaatttatttcaatgttttctttttcttagttaatttgaagtttttatatgtgaaaattttatgtcttacaagcagaaagacacaaaaaaattgtatgttttgtttcttccaagtttaaagttttggaaagtgactcaaatcaaatgaactcataaatctctctctctctctct

SEQ ID NO: 20193 - DNA, 3976 bp, Cannabis sativa
ctctctctctctctctccaacataacatggtatcagagctgtagtcgttcacagctatggaacaccaaacggctagtaatggtggagcctcaagattgaaccaggctcaaggtcagaatcaaatgcaaactcttctcccaagatcctttcctatatcgttctctcactcactgtcaattaaacttgatgaacacaatttcttgccgtggtaacatcaagttcttgcctcgattaaaggcagcaaactctagaaatacctggactctactcaagctcccttacgatatctctctgctgaagatgaagctcaaaaaaaggttaatcctgaatttgaagattgggaacagtaggacaatcttcttgtatcttggctcttatcgtccatgtcagagaaaaccacaaatcgcatggttggatgcgatacaacagctcatatctggactaccttgaatgaatattacactgcccttaatgttgcaaatatcagtctttacaaaacttagcttagaaataccaagacgacaggttttttaaatgactatctgttaaagatcaaaggtctggttgatcttcttgcaacaataggtcacaaacaatctcatcaagaccacatcgaggccatcttcaatggtctccctgctgaatatgatgtgtttgtaacttctgtcacaaccaggaaagatgcctacacagtaccaaaaatggaggctctactaatggctcaatctgctcgcatagataagaatgctaaagctctcgacattagcaaaagtgaggaaaatctttctcacaccagaccatttcaatatagttttcccaacagaaaccagttctttggagcacaaatgccatcaggtttcaatcgtggttttcaatttcgtccatatgaacctatgcaacaacaaatgaatcgagggatgtataattcagggtgaggcaacaacaatggaggaaatcggggtcattttcaatctggtcgtggacagacagcttcatcaaattcaaagccccaatgccaattgtgtcacaagttaggacacactgtgaaacaatgcttttacaggtttgacaaaacctttacaggacctgaatcttttaaccaaatgactcctgttgctaatcttgctgaaatgcaagcctatgttaccacttcagatactgttgctgatgacagttggtacccggacacaggagttactcaccacctaaccctagatgcctccaatcttgcctctagtagcaattacacaggtcctgaacatgttttcatgggaaatggaactggtctcaacattgacaacgtaggtaaatcctctttcatctttcctttcacctctcaaacactatccataaacaatcttcttcatgttcccttaatcacaaaaaatttgctaagtgtctctcaatttgccttagataataatgtcttttttgagtttcacccctcccattgtttggttaaggaacagggtaccaagaagatcttgttggctgggaagcttgaaaatgggctttacaagttcactcccacaaccttcactcatctcccatcccatgtctcaccacagctgaacatgccatctatttctcattgtcttagtcatcaaatgcattcatctagttctaatttttccttatggcatagtaggcttagccaccctactgccaagattgtaaaattggctctcaattcttgtaatataccaatttcaaataaaaatgatgcagatttttgttcagcttgttgtcttggtaaacattataagttaccatttttgttttccactacgacatatcatgagccactcgaactccctcactctgatctttggggccccgttccaatgaattcttcaaatggctatagatattacattagctttgtagatgcatattctaggtatacatggatatacatgctaagaactaaagatgaggctttatcaacattcaccaaatttaagacccaaatagaactgcaacttggttttaaaatcaaaacattacaatcggattgatgtggggaattcagagcctttacaaatctgttagaacagtgtggtgttgttcatagacttgcttgtcctcacacacatgaacaaaatggggtagttgaaaggaagcatagacatatagttgaaactggtcttacattgcttgctcaagcctctcttcccttctctttttgggatgaagcttttagaaccagtgtatatctcataaatcgaatgcctaatgacacaattcaaaatctttctcccttagaaaaattgtttcacaccacacttgattataacacccttatagtgtttgggtgtctatgctatcctaacctaagaacttacaacaaaaacaaattgcaatataggtcaataccatgtgtctttctaggctatatcatgtcttataaaggttttaaatgcatgtctaaagataaaaggctatatatatctcgggatgttatatttcatgagtcttgttttccatatgctgagtctttacatcataaaaacatcactcacttccctacaccatcacatagtattcctcctctgtcatctttacttcatgtgcatcccattccaccaattcccactcccaacaacttaccaactacccccactgttactacagtacctgagtcaccatcgttgtccaccaactctcccaccaatcccattacaaaccctgtcatgtttgatatccctgtgcaatgtacaactaatcttccttgccttacagagacagaaccaattccttttactgttgcatctggtgttcccactgttgctggtgttgaaactgttatttccaacacttccaacgatcctccaaatcagcctacaactgctactagcaccactgtaacatctcatcccatgataaccagactaaaggcaagaattagaaaaccaaaagccctgatagcctcgtgtgagccaagaacagtacaagctgctctcaaaattccaaaatggaataatgctatgaataatgaatttcatgctcttaaaaagaacaacacttggatcttggtaagacttccaccaaacagacaaccgattggctacaaatgggttctcatagttaaacacaacaaggatggctcggttgagaggttcaaagctcgactcgttgcaaaaggttttcatcagcaagttgggtttgattactctgaaaccttcagtccagtggttaagccaatcactatcagagttgttctcaccattgccataacaaaaggatgggcaattcggcaattggatgtcaacaatgcattcttaaatggtgacctcaaagaagaaatatacatgcagcagcctccgggttttgttagtaccactcatcctgaatatgtatgcaagcttaacaaagctatatatggcttgaaacaagctcctcgagcttggtttgacaagctctcaattgtgttaatcaatcttgggtttcattcatcacctgcaaacacttctctttttatcaaaatcacctcaacaacatgtatctacattattgtttatgtagatgacatcttggttatgagcaacaatgataacatagtgcatactcttataacagatctcaacaacacttttgctctcaaagatcttggtgagcttgattattttcttggcattcagacccttcacacatctgacggcctattactcactcagaccaagtatctacaagatttactctgctaagctgaaatgcagaatgtgaacactcaaagtactccaatgaacagtggccttaatctgtcccgctatggaagtgagcctatggaagaccctactctatacaggtccattgttgggggacttcaatatgcaacaataactcggcctgaacttgcttactgtgtaaacaaagtatgccaatactgttgggttttatgccctaaataaaattctatttcaatgtaatccagattattcaatatcaataaaataacagaagtatttttcattca

SEQ ID NO: 20194 - DNA, 2942 bp, Cannabis sativa
ataaaaccagagaaaataacaacattccggtgaaagatcaaaagttgaaatttcatgaattcgaacctgagaacagtagatgattggggaattgatggaagaaaataaagagcgaatcaagataaattaagctaaaagactgagaagataaatagtagaaactaaaatgagaaaattgaaagcaaaccaaggaagagaagaagaagaaagaaaatttcttaccagggagagagatcttaggtcgtagataccagatctgaaagtttcagcctctaaaactgaaagaaaattgaataagaagcaccgttcatttcggaccgtcggatcgtgatcgttgaaacacagagatgccaagatatagaaatatcaaagttcagagaccgagagagagaaggagagagagagtactggtgactgactgcccgtaattcttccagtcaggtttagggcagttcggtcagcgtcttaatcttggtaaaataggaaggatcgcttcttgagctgcccgaagaggcactaaggacaagtgtgggtttcgcatatttaacttttaatttaaattgttttatacaattaataatgtttattttaaaataaattaggaataactaaccttatttataaattaggttgttgttttccaacctcctattctaacttcttattcaatcttaaccacttggggctagctcaagtggccatagggggtgcgtgtgtgttggaggtcctagattcgaatcccaagttatgctgatataatatataaacgcttaaatcaaaaaaaaaaaaaaaaaacttcttattcaatctttggaatcgaaattacatgtcaaaattttattaaaaaaaatttataataatatttattataattatataataattataatattatatttataaattttttaaaaatttaaaataatttactgtaataaaaataaaattatatgacgaatattattataaaaaattacaaaaatattctaccatcaatttttaagcacattacttaatagagaatttataataaaaggttgataatatattactactcatattgatttttatttgtcacgtgtttttcacgtgctttaaaatctaatataaccatggttgggtttaggaaatcaacgaagattaagtggagaaaaacgacaagaagtagttatcataaaaataagaaaaaaaaaaagagagagatattatttatttaatattattataaaagccgaccatacgataacatttaatgaatagtacttgggttgatattatccattgatttagagaatcttgcaaagatttatacacataataattaattggataatgaactcatttgttaattaaataattaacacatttatacacataattaactcatttgttaattatttaaataaatttaacttgttacttgtggaaacacaccaatcatttgattatcttttaaatgccgtgacccatgcctatcaaagtttttttgtctctcattaaagaacaaattattatacttaacaaaaaaaaaaaaagaacaaattattattattattattctttttttattgtgtgtgtggttttttttttaataaataatagtgtgttgtttcttttctaaaagaaagagtggaagtgttgcggattatattgtttgatttatttttcatacatatatgtatacggtgagacttatctgaggcacttaccccgttaaagtacatattaattaatcatatatcttattttatttttattaattacatgtaaataaaaacaatataatatatattctttttaaaaataaaatgtatctgttatactattttattttattttttaaaaaatactttgttctcgtaaatcaaaattattattataatctttaattttaaaattactattacaatttttaatatttttagaaaagtgagatgataatgtagttaccattacattatgcagtgaaatttttattacatttatgtaattaaaattacatcataaatattaaataaaataaaataattcacgtatccttttttatctaagaataaaaattaaagtatggatactattgtgaatttatcacttattctaatatttcttcgattaaatagtgacataagtactcaaagttttaggtttgtaagcggcatagacccaatgattttttttagtagcataagtacccaatgtttataaaactataattttcttccagtttcatcagtacagactctgttattgtattaaacaagacacatataggacctaaattttagattatttggtctggacgaaaaaatatgtagtatcaattacttccaaatcttcttttaataaatttaaaacggagtctgtactgacgaaaatagaaaaaaattacagttttacaaatattaagtacttccactaaaaaaaatagagaaaaattgtcatgtaattaattatcattaccattcttattccattctattatcaaactaaaatatcacctaagctcgtataattttttacattattatttactcataaaaaaatatgaaacaatttaaaaaaaaaatagcaaacaaaattataaaaaacaaaaagaaacaaaatacaagagaaaatagataagtaaaaaaatacaaataattatatatttaatgaagtacataatagaagagatattttcttagaaaaaggaaaaacaaagaaaaaaaaaacaaaaaagatggtcaaacaaaattgaaacaaaaaggtaaaaaaatgcataaaaaactaaaaaaaaaaaaatgatatttctttttaaaaaaatagagtaaaaaaactcaacaaaaaaggtgagttttttttttaaaaaaaataaatatatatataattgagattaaaaaaaaagattgatattttttttttgaaaaaaataaacctacaaaaaattaaaatttatatatata

SEQ ID NO: 20195 - DNA, 3738 bp, Cannabis sativa
tatgtgtttatttaatatcattttaaaagttcatatttaggatgttaaacaacatacttgttagtaaacctaagatcctggtaaaatatttccaacagaaattggtctgcagccttctgtagaccttgatcgttgttggtgttgtgagggatgtactcttcaatgggagtggaatttgagatttcaaaggggttcttttaagcttgtttttgtggaggcacggaggcattcttgtatcccaattctggaggaatggggaagttatcacagcgcaagaggaattttccacatttgatataagtgtggttcaaaaggccataaaaatagcagaaattttgaagaccttcaaactaaaaactaatccatttgggacgatcgattgagcgaaaacagatgtttattccccttctcaggggcttagtaacatcaagaaggaccccaatacggagataaggaccaaagctttcgagaagggacagcgagtggcttttgatgaggtctcccaattcgttagcgatgaattgagcagttggggggtcttgcgcccaaaaggaatatggtgagcttgcacctagaaaggaacataaatgagttgatcaggcatgggggtatcagtgacataaggatgaggaaagaccatgaggaatttgtcgaaatgccacggctggtcctccaacactctgcgacggtctccgtcgcactgaaaagtggcgagaaataggccagaatgatactcagatatttcaacagggaaactgagggtccatgcctcagtcatggcctttttgatccaagcatgtttgacagattttatcttgaaaattataattatgttaattttgatatattttattaaatgtgtaattatatgaatattagagtaggattataatcttacttaagctaattatgagaaaattagtgatatggaataaatgaataattaagcgcaatttatcaattacagtgattttattggatcatgtgggtattttatataccatttttgaaataaaatattttcgagttcagcgaccgtagaaactcaatgaattggtcaaagatgtcatgacggtaaatgatgagttatattggaattataccggactagtttagaaagtgaagttgtcagtttaatcgtgatagttggtttgacaaaaattaccctaggttattaaataacttgactatttaaatgagggtgaaatagccatttactaagttttatcttattttgtattatttagttttctagtaagtaggctgaatattggagttattattagtttatttaattttttttgttagacaattaagaatcaaaactcaattaaatcaagaaaccacataactctttttctctctcctcttttcggctcaagaagaacccaaaaaagaaactcataaaagctcagcctaattctcaaatttcttgtcaatttcttcaatcctaggtgccatccaaagttgaggtaagtctttctttgtgttcttgaaggttttaaggcttcaaagctagatttaaagagggttttcgatgaattaggttctgtgtttgtttgatttgttagaacttatttttagatgttaaattaagattgtttaagtgtgattttcatgttcataagggttgttaagtttgattttagtgagttgagttcaagaactcaaaaactcacccaactatggtgaatttgtaattttaatgtatttcatagttttgaatgtttgggtatgttcattttgtgttattaacctgttttggatagtttcaacaagcttggaggagatttggttgggttttgaagtgaaatccaaggttttccacttctgcaacaagaatcggttaaccagttctatagggcactctggaactggtcaaccagttgaccagcaagggaaaccctctagttttctatttttcagttattcgttcgggatgtttttctagaacttagtttagggtgttttatcgatgtttaggttgtttccaaattcgtaatgattggggtttgttcgattgtgaatttaggacttatttcgggattagttaagttgcttacaaaattttcattatcgtgacataagactcgggattttcgagcattgttccactcaggtcggcccacacacctgattattggattgagataagaaaagtcaattgcactatttagcatgtcaaataagatacgattattatcgtttgtgactctattataatcgaggtaaagatatggtagttaccgttatttagaaggagttattactacttttggaaacctctcacaggttacctaattaagtaacgatagtgacatatgaagctcgttggtaatgagttgtaagcatgctttattaagcatcaacgtttgaattgactacttagcatatatgatgcattattataagattatgttttatgtgttgaatatgttttatctactttttttgtcgattctttgtgactcacgggtgctctgtggtgctggtaaagaaaaaggaaaacttgaccagccatgagtcagaggtctttcgaaaatgtacatatcaaccgccatgtcttgactctcagtggataggatacctcttttgttgtgatctaaaaatgtaaccctatttttgtaacaattattttgtaatatgttgtaaaagtttataaacaagtagatcctcgaatctagtagtattttgaatgaaaatttaaatttaatttaaataaattttactaaaagttttaattgcgccacacattttctaaaatgttagtttattgttataaactaattaatataagtacacacacatgttgcctttataggttagggcgttactgttagcttttctaaattctatcaatatttgttttattaaacgttctgcattgtattggtcgtggttcttgttcatattcagatcgtactttaagtgagaataacgcttctcctaaatttctatccattataatagttgatgctatttgattaataaaattctattctattaaaaaggaaaaaaaaatgataccctattataaaaattttcaatataaaagttaaaagaacaaatgagagaaacctaaggactactcggactagaagccatgttaagaaagtgttgggcaagaaatatagaatataataataatttcctcaagttataataataataacttataataaattcttcaaataacatataataataaattttatatatgtgaatatttactagatggttcaccaattgacattgttaacattttatatgagaatagaggcttagaagttagaaggtgtagtgagggacgacttgagaaaatgtagataacgaaaagaaaattatttagttttgtaaccaccaacattccaacaaaattatttgaatgatttggcattgttgaattaatatatatggatggtaagcaatcctattcagtcaccaccaccatgacacccaatcaaatacatatatttataagatgaattattaaaaatattatattagtagtaattggttcctttctcggtgtcatatcttatataatttaaaaaaataacttttaaaaaatactgcaaattaattaaaaagtgctggtagatattattagtgcccataataatgcaatatataattatagggtaaattgcggcaaaaatacttaatattctagattttatacacttaaatacctaatgtttattttttagaggcaaaaatatctaatgttacaattct

SEQ ID NO: 20196 - DNA, 2990 bp, Cannabis sativa
ttttctatggattctgcccatatttataagaatataggttggaaattattttattgggattgattcatttacaattattgatgaaatatggacattccccacatttcatttatttaaacatggataatatctaataactactcaactgcctcttgttttatcctttagacggctatactaactgggatggttgtatctcgtcaaacttgagttctccttcttatccatcttaataggaaaaaacactaagtgttagaagcacttcatcttgttgtttccctttatttgtattagtgatgcgagatgatcactacattgtgaataatgcgaggcagttgagtgttttattttcaccctgctcctgtaggagagttaatgaatcatgagatctctggataacagtatcatatatattgctactctgtttattccaaggcgaacatatgtctcgtcaattctagtttaatagtttttattcatgtctcacataagactaagtagtcagtgagtttgatcatttctatcaaacttgtatttaattgacacgagttatttgaattacatttaatgatataatgtcattattatatgcattgagttgattcatattccttctgtaggacacgtgttagcttttggtacatagccaaattttgggtataacagctatgtatctgttttgtcttacagtgaagttgatcgaagaattatattgtctttgtgcccacttctcgtggggtggggaaggagaggctgtgttgtcacaagtctaatggtggtatggaatttcgtgatctatttatattcaataaaaatttattggcaaaacaagcatggcgcctctattctgttcttgactctttggatgccagagttatgaaaggtctctatttttttaaaggggactttctgaatggggaggaaatttataacggctcgtatatttggactattattttgtagggtcgagaactctttgtggatggaggtgcgttaacttattggtgatgggaataatgtcaatatttgctcccaggtgtggattcagaaaaaattcgcctctttatcttactcctttcatggtcatccgcatgtttctatggtgagtgatattttacaggataatgagaactagaattgtggtctcattgatattttgttctctagtgatgaagctagttagattttggctattctccgatcctctaagcagcaggaccacttgatataacactattattcttttggtgactttactataaagagtagttactagaatgctatcagattattgggtagggaccaatgtgattcttctcgaaggtccaactttgtggtggaatttttatggaaccttaccattctgcctaagattaaggtattttatttagaaagcttgtttggattggttccctactaaccataatcttctcctccctaaggttcctacgactcctctttgtcctgtgtgtggcactgaaattgagacttccttccatgctctttgggggtgctctagcttgaattctattacaaaattggtagagtttccctccttcctctttgccaatggctagcttgtatgctttccttaaagcacatgaggtgattttggtgaaagatgaaatggaacaacttcttgttctcatatggtgtatctgattctgtcgaaactattgggtccacaataaaaaacttttagatattgaaggggtgttggggtggtctgttgcctttactcaaaacttccagacagctaacattgtggtctcgaaacctccttctcattgtcatcggtctggaggtcctacggtggcttcaccttggttgtcacctctgacgggacgtgtaaaacttaatactgacacaaacttttgtgtggaagataggaggacgtgatttggggcggtgatccatgatcaccgtggtctttgtttggcttctacgacctctcctgctaatggctctctttctcctcctgtggtaaaggctttggctattctccatggtcttcgtctctattcaacacttggatacaatgaagtgaaagttgaaactaattatcaacgtgtggctctctaactttgtaaaaaaaaacttttttacgctgaacttggcttaatgcttcaggatatctatgcattttcttctcatatttttgttattaagtttatgttttgtaatcgtttcgcgaattatattgatcataatcttgttaaattggcgttattgcttgatgaggcaggagttttgtggctcggattgccgaactttgtgtaaatctttagacttttgattagtattttggcctttataaaagtttcattctattaaaaaaaatacacacacccaagttttttaatagatttagtcacactatggttgtatttatcttattactaaagacctattgtaaacttaaaacttgttggcaactatttttttaagaatttaaactaacttatatccacaaaggcttttgatacaaactacataattgacaagttccatttcaaaaattgacagcttggtagagtttttccttgccacgtggagtctctattggatggcttatttatggcacaagcactgcaaaattgtcactctcatgaatgattgagtttgtttgaagaagttgagataagaatatatttatatatttttttaaaaataaatatcccatattagatctatctaaggtaagtgaaggataatttgtgtggacaacgtttatttatagatctttgattgtataaagacaagacaagcactaaagtatggatatatatttgtggatattattgataacttccatgttaaaataaactaaagtattatagagctattaatagaattaaatattgaattttacattatttaatttaataattattgttgaatattactatatatttcatgatagtattaggctgtatctaatagtaatgctttatttttaaagttacaatttatgggttactttcctcttc

SEQ ID NO: 20197 - DNA, 5112 bp, Cannabis sativa
agtagataggcctctgcagaagcaaacaagagcgcttaaatctgaatcacacaccattgtcacttttgtaggacccctttacctcttacccccataacctcactcactcaaaccacgtaagttaccaccataaagaagactttaaagattgatacgacctctgatcaaccactcactcgcttgtgccaacttttgttaactcaagaactttgtgtggtgtttattactcccgtgcttttttcttcttcatttataaaacaagtacgtaaatatatgtatatatatatatatatattatgtattaatccaaccaagggactgtaatatcggaaatgcagccttaatgggtcccattatatgtgaagatcttgccaaatcatatcgtcggcaagatctagtcacaatgaaaatatgctaaatagaggttagggatgatgatgatttgaacctaaaaacagttatgtcgaaacccctttataggttcaagttattgtcagcttaagttcttggccactttggttcaaagattatggtacagtaaggagattgcataagattcagaagatctcgccaaaaataataaatgtgtcgtttgcatgaactagctaggcttacaataattccaaattaacaaatccaacaccaacatatgatgatgttttggccaattcattttggcaactttggttgaggacaaaaatgatcagacagcactaggatttatgaaatgtttaaatttacatcatcacagcttatcatagccaaaccaaagactgaagtaatggcaagtaagtaaactgagacccaggtaagtttgtgaattacttctcatttttaagttgtttgagataaatatatatatgtaggtacaatgtataaataacatgaattgaatatgaataccgaacgaaaatttaattcaaggaagacaaaagccaagttcgtctttgttacggctgcattaaacacatgctgaacaaacgcatatcatgcagcaaatcttgactataagcagatatttgtacattgactgtatagacaagatctaaattatagagttttgaagttctaattgatatacccaagaccaagaagatacagaaaaaaataagtatatgaattcgctttcctgttcaaaattgtggaatacaatcaaaactactgttaatctaccttctagtattcattaaaatggatggcacctactttccacacaatgaaggtggtagcaaacattacagtgctgataaacacgaatgagaagataataacaaataaatcattaccccctggaaactggaaagtgagtccctttggtggcatccctcgtttactgtcatcaagcatatttccaggggcttcaggaagtccctttttcttcccacgatcactttctctaatggcatctaatactttgctgctcatatctgatgaagatttagctgcccttgattcagtgttgttgtaacgattcaaaacccgggctgctcttagtctctcccttgctgtcaggggtgaccttttcggtttctctagctggctggttgctgatgatgtctcctcttgatttacagaagctgatgagctagtgttggaagcctcaggggcaccggaatcacctgatgaaatcagatcattggagagcaatcttcccgcgttgccagggccaccatcactgccttctgctgtaagctgatcaccttcagcaactgaaacataaaactccctccttttttcctttacaaatcttctcgaccaaaatgtaccgacatagggctttccttggcagaccacccttgacaatgaagctgcagcagcagacgattttgagacattctggtactcacttcgcaacttctaaagaagaaaacataaatacattactcaaataattttattaaacaaagatatagtcttcaaatggagcttctgaatcatctaaacacaaagtttggaagaagaagaccttcccttccaagtttttaacactaacagcaaagtaaacatgttatcatcctaaaattttcccggaaataaagtcatctaatttacttttcttttcttccttttacacccagatcaaattagcatgaaaaatgattgttgcagataacttttggagcttttggttaaattttggtcaagattccctaatgaacttgtaaccattgattagcaaagctatagaactatcaatgcatagtatttttgtagtattttactgcctcatctcagtacaaatccacccttttataattcgtacaacttgaaacatttagagcttattcggtaacctcattccctcttcaacgttttttcactagttagatgatggtgaatgaaaagaaaggtgtacttttgatgatcataacaataattgcttagtctccttcgacagattgtttcatccatgtaaaaaccaacttaaacatctagaaaatctctagtaactattaccagtacaagtccttattattctcaataatggttccaattacaaaccacataagtcaatttctttcaatcaaaaacttagcacaagttttagtctaatcacaattcacaactgagtactaataatactctaagctaaattgcatcatgcaaccaaatcaatcttctctgagctcctccctctactaccataaataatcccaaccagcattgattgaaaactatccagagaattaatgggcatatacctaaagtaacgaaaacgtaaaactgaaaactcaagaaaatatatgagtgcagtgcagctttttcaagtaaggaaatccaaaagtgtgcatcgtaaattggaaaaagaaagaaagggcaaaagcaaaagagtaccgttgaagagaagccgaggacggaattgaatgaaacggccatagtttttgaggtggacgttgggtcctaacggccaaccatgaaaggagaaggaagaatttggtttgctttgggttggcgataaggtgaaggtgggactgagtgagagcctctacctctatctcagcgcgtgtaaaccacgctggtttttaataattcttatttgtttcaaaatgggtcctttcgggacatcccataaatttagatcacttaatttatttacaaaataccttcaccttttttttttttggaaaaaaattacaactaataattataataattataaggagaattactccatatattatttttttaatttttttttttaaatttatagtttggatttctaagatggttgcagcgctcgttgcagtaggggtttctatacgattttgtattgcaatttaagttgcagcgctagttgcaataggaatttctatgtagaattccgtaaatatacaaaaaaatttattttaaagtgtgaaaatgaaaaagcccaataattttaacaattaggtaaataacaattataaaaacagttgaatgccaataattttgtaaatacgtgtagagaaattatataatatatacgtttgtaatttccatccataccaaaaaaaatccatttataaaactacatctattcatttataacaacaaataatataagagacgtgaaatcctccaaccaaatagagatttcatctaattttaaaatatatttttctaagtcatgagcagatttattagcaatggattggcaacatttaatctaattcaattgaatcgaaccgatgtaatccgatctaattataaaaaattagatattcaattacaattgaattaaggattctagttggattaaatcagttattaaatgtcaatctcaaaattcaattaaaaactgattcaatccaattacatttatatatgttaaaaaataatttatattagaaaatattataaaatataatatatattaattatatttttattagattttttgtgttgaatttgtaatacttggttattttgtgtatttatttgcatgatgttttgttttatattattacttagcaatattgttgttttgattattttaatttttagttgcattacacttgtaacaattgcatgtttatagagtattaaacttaaataaatagtgatatttagtttatgcatatttttcttcatatttttaagttaatatttaaatctaggtgtgtaattggatattcaattaaaaaactgatccaatcttattagtttttgaattagattagattggattttgaggtctaattggattggattggatgatgattttccaaattcaattgctaattggataagatcggatgaggaaaaaaatgttagattagatctgatgtccacccttaattaccatctctacgaacatgagagacaactccagaaaaaaaataataataataataaaaggccaacaacttctacaataatatctataaaagtagataatataggagagggttgattgattgtcgtggaaactttaagcgcatccgtttctatttcattgataggcaactacaattgtgaggcccaaaggaggctgtgaaaaagagccaaggctttcatctcataagccttataacaccctgtgagaggtttggtataagcagcaaccacatggtcaaatttatttcgaataatagctctgacacttgaaattctaccagcaatattaacagttgcattaacgctaagctttaggtttcctctagcaaggggcttccaagattccaaggggcaaggacaacagttggaggaatgaaaattagattagctgatgaatgagttgcgctatattgcagcagaaaagagggaagttttacagcaggtcgagcacgattttcatgtatcactttactccttttagtccatattgaccacatgacgcaaagaattgattccatttcaactttagaaaacatagatgacatatggactaagtcgtctacttgaaccatagaattagacatgtgaaagtcaaaacaaaaatacaagtgtctccaaacagctttcgcatacttacaaccaaacagtacgtgtctaataaactcccaggcatgtgagcataagaaataagtagtagttgtgataaattttgttttgactaattttgtagctactggcaaagtatcatgcataatttcccaagcaaaaatttgaattttaggaggtaattggagg

SEQ ID NO: 20198 - DNA, 2297 bp, Cannabis sativa
aaactcgatattaccaccttcaacgggcacataacctcacaaatatagaagtgagtagaagagatcaagattagggtcatctaagcaaggaattgtagtgcaagatagcgatagcacaatgagtatgggtaatggagataaattttatttcatataagatataaataaaataggtaattttagtataacttaagatgttagacacatcaggccaccacctgagatatacaatgttattagatgtgaaaatgacttaacactttatggttttgagatccggtcaagttgtaaagtgtcaatgactcactataaataggatccttgaactcattataaagagacttttttttgggatgaaaaaacaataattcttctaaagatcaaaggttgtgaaatttttattttaaatatttttcaatcaatatctttaaatataattttaagttcttattattttatcgatgagttcttactgtcaataggaatatagttaaagaaaatagttggaattgtgcaaattaagatgggacagtgagcacagtggtggtagtggaattaatttagaagctgaaaggtataaatattgtgcagtttaaagaaagtattgagagtattttattaaatatcgaattttgtataattttttaataattattttctatcttataatatagctattgtctcttatcaaaaacacaataataatattaatatcacaagccttttgtgcaattatacattaatgaacccacgttgtagtgtaaagtgttgactctagctaatttaacattgtgtcaattggatttatatttatagatatatattttttcaattacgatggataaaagaatttttaaactaatttattatctggttgtaccacaaacataaattagtaatatcttacgaaaattaggaagtaaattaaacatatcttctaacagagtgtttaaatcattacaggatgaataatgcataaattaaagctaaacaatcaaattcaatgaaattaagtggaaattcaaacataaaggaccaatataatactaccattatagtttcactctgaatgattatgctgctaggaatatacttggcctaaaatgtatgtagtgtgtacatattaatatgtatataataaatatatgcaactctaaatttatatatatgtgaatagttaaggatgataattatcatgattcaaaaaggaaaaaagtgatatagaataattatgaccacaatgttcaatatgaaaagagtaataaataattaaaaaatcagcttgtatttttctatatgatcttttacgagacatgaaattgtgatcaaaagaactatcttttctaactttattcatttatctatttattctctttgctcacttctacttacaaatgcaacaaaggaataccatatattaattaagggcatgtttggctttaacttattagttttatgatatatttatctttttacaatatatattattttatcattgtggaccatgatgatgatgctggtggatctacaagtggggtcatcatatcagaaaaatattaataataattatatatagattaaaaatacaaatcataccttgtggtacacttcttttgaataaggcattgctttaacttaaaggctataagtgaggtggagatcctcattagagaagtagtaatttgaattaaagttccatcattctttagaccaaaattagctctaacatcctttctagttgtacatccaccaccacaacttttgggtttttttttttctttaaaataattaaaaattaaaattcttattttggctcttgtagaccctctattatactttattaaatcatataatataattttaatcaattttatattaataaaagccagcattaaaaattaataaataagtgggaatttagtaaataaaatcagtttatttattattataattaagtgcttcacgtgaagtcatgagttatagaaagttatccattgataaactatatgataatgagatctcatattatttattaattaaacttattttgttttgaattatagggttgataaacttgtgcacttgtttgtacttgtgttacatttttatcctttgaatttactttatcagctcaattaaagattttgtaacactaattaattttggctatcaaaaattacttttaattttacaaatttagagaaaatgtataaatataacacattaatacaattttttttattcataatatattgaaattaagataagaaaaagatttatttgtaccgtaggtcctt

SEQ ID NO: 20199 - DNA, 2656 bp, Cannabis sativa
  modified_base (41)..(52): a, c, t, g, unknown or other
aggttaaagaaaaatgtaaccatatagttacaataaaaatnnnnnnnnnnnntagtcacccatatatatatatattgttcattattagctttaactaaaaatatatttacgtacgtactataaagaaacaaaaaaccaacgtacgtaagtacgtaaacttaccatgccagctccaatcaaatgttggatagtccgttcaaccatggtcatatcgacccgacccgataaatataaataggtacgaagcaagtcaccgtggcgattctcttcggcggaccaagcgcggatccaccgagcccatggactggagcaaactccagtcctatccttaacggcatcaatagagttcataatggtctggtaagtaggcaatgcttcctccgtgatcatatccccaaccaacacaacaaaatactcatctggaatctcagccgcacgatcttgaatcgaacggatctgatcgaagaattcttcatcataatttgatgggttgggtaacaagtcttggggctgccaacattcctccaccggctttagcagtggaagaatcgattcagtggcccacccttctagcgacttgaacacttcttctttagccggcgacatcgtcggctgatggagttttatcggccgcggtggtgaggccacggctgagactcggaatctgggttttggtgatgggcttctcagttggagcttgtttgggctttggtggccatttaaggcccacaatgaaatattactgacctgtacttgcatggcttgccttggctgagctttgagatgagtttttttgtgtttttcttttgaagaatagcgaaatgaacatttggttttatagagaggaaaagtggattgttttttaaatataaatatcaagactgatatttttattgttatgagttaaagtctgtacgtacttagttggtttcactttttaaatttacttaattttttttttttttttgcaggtaacaacaaaaggaaaccacactgagtattgaattatttcccaacggtatctgttagagttttatattagtaatgtgtggattgaaaataaaatatataaatttcatcagatatttctcttatactcaattgattttgaaatgaaccttaacgtattttaaaacctttaacatgatattagatcaaaaacaaaaaaaacaaaaaaaaaaaaaaaaaactctaaccatctgattcaaaaaaaaatgacaaaaaaaaaagtatagtaaaaagaagagctaccaaatccaaaaaaattgatcctagagtcaaaaatcaaaaaaggtcctttgtgattttccactaaagttcaaaaatctgatccaataaaagtagagtagaaagagttgtttataatttaaggataataagccaaaattttgagatattttacaaaatactaaaaataaaatagaatatataaaaatttaaaaattactttttttattatcaattaattttgatatagaaccactacatctgtcaaactgtaacagtattcaatttgtgttattaatatggtaaaactatgtatggctcggttttaattaataactttaaaagttattactacataggattgaaattggtaagtgaatcatataataatctgaaatcccacgtgaaattttagttgtctataataactacaagtagtacaaattaatttatagtgtgggaaattttaccggtgaggcttctactgtttctgattcccacttcccagtacattgtcaaatggatacaaaggtgggtaaacgttaatgtggtgggtttgggtatacgagattaatttagtgttgtggtagtactgttaggtgtgattcatatttaataggatcatatgactcattattaaacgttggatatatttccttggcttaaaaggtatcctttgaggatccatactaacgagagaaaccttatccacgttaggatagcttaagttgttataggagagtaggtctgtattgaaggttttaggttcgaataaaggttatacattgtaataaacgcttaaataaaaaaaattaaaaaaaaaaaaaataacgagacaaatcatgttaatttgtacctcttattacagcatagactccacgatcaaaccaaaaagcagtaactactccacatgactccaactcaaagacaataaagaagtacttcgatcattttttcagacaacaatgctattttctgtatggcatgctttaaaaaatctcttttttcacaattttttagaagacaaccacattgacactgctccacttcagaactcttttactgaacgaagctggtctttttaaaagggaaatttgcttaaaactttactctataactaacaattcaatctaaaatttttataccaaactatatttatatttctttaacatatcaattttactctttttatttcaaaaactctctctctctaagtccccaccgacaatatccaccccgttcactacaagaaatgtcacttttaccaacacagttcacttttaccatcgcattttacaaactgcgttggcaaagaggtcaaagttataccagcgtacatttgtagtagctaaaatttaaatgcgctgggaaaagtcattttaatttgccagcgctttttattttatactggcaaaagttctaataccaa

SEQ ID NO: 20200 - DNA, 7419 bp, Cannabis sativa
  modified_base (5894)..(5907): a, c, t, g, unknown or other
ccattaacggcgaacatggcttctctcgatcctggcaactcgaatcaccaatctgcaacccaagggaatcaattcacagctacaagaaatcgcaccagatctcaagatgaaactagtcccgtctacttcaatcacacagtctctatcaagctcaacgatcacaacttccttttatggaagcaacagatcttagctgccattcgtggcaatcgattgcagaaattcattcaagatgtaccgcctccaccccaatatctcagtgatactgatcgtactgctcaacgatttaatcctgaattcttggattgggaagtccaagatcaacttctggtttcttggcttctctcctctatgacagagagcctcttgactcgaatggttggttgtaattcagcacggcaaatctggaaagctttggagcaacactttacactgaaagtttcgtcaaagatccttgagtttcgaaccaaactccagaaattaaagaatggcacaatgaatcttaatgattatctccttaaggtgaagcagcacgttgatcttctagcttctgttggtgaaattctctctgatcgtgaccatattgctgctatattcaaagggcttcctagtgactatgacactttcatcatctccaccaacacgcgtgtcgaaggctacacagtgggtgagatcgaagccttgcttcttgcgtctgaatctcgaattgagaaggaggaccaagaagctgaatcgagtatcaatatggccacggttgatcaagattctgcccttgaagccttctatgctcaaacaaatcgaagcttcagaccccctgcctatcctcgaggtcagttctttcccaacaattttaatttttctaaccattcttcctactccaattccagaggcaatgttagaaattcagtacctcctcgagtaccttatatttctacccaaggcagaggaaggggtggacgattccctgctacacagaatcgtgtccaatgccagctttgccacaagcttggccacacagtcatagactgcttttaccgtttcgacaagagctttactggagtgtttcctgccaatgaacaatctcagttgcaagcaaatgtagcccaaacaactcctactgctgatgataactggtatcccgactcaggtgcaactaatcactgcacaccaaatggccaaaatgtcatgactgctacggattatgatggccctgagcagctgtatgttggcaatggagctggtcttcccatttctcaaattggtaacacctatcttattcccaagtcttccactaaacctttgattctaaataaattgttgcatgttcctgatctcaccaaaaatctgctcagtgtttcgaaatttgcagctgacaataatgtgtattttgtgttctatcctgatgtgtgttatgttaaggatcaagtgagcaaagctgtcctcttgactgggaaacaccacaatggcctatatacttttgactccaatcaacttcagttgtctgcctcacccaaatcgacaccagcctttcagttttctcaccaaccatgcacaaatcttgccactgcttctcaaagcccgagtcctcagtcttgtgtttgtgtcaattgtaacaaatgtattagtgattttgatttgtggcacaaccgtcttggacatccctctgagaggattgtcaaaactgtgctctccaactgtaacatttctacttcaaataaaatgtctacttcagtttgcaaagcttgttgtttaggaaaaatacacaaattccctttcccaaaagcttctgaaacatgctacactaagccacttcagcttattgtttccgacttatggggcccctcctttacaacctcacacaatggatacaaatattacatccatttcatggatgcctattcgaggtttacatggctatacctcttaaagtctaaatctgatgttgtcaaaacttttcagctctttaaaactgaagttgaactacagttaggcaccaaaatccaatcctttcaatctgattggggaggagaatatagggctttcactgaatgtctaagagaagcaggaattgtccatagaaaaccttgtcccaccactcatgaacaaaatggtttagccgagcgaaaacacagacacattgttgaaaatggtctcactcgtctagctcaagccaatctcccattacgtttttgggatgaagcctttaggaccactgtttacatccataataggcttccaacaccagttctctcactaaaatctcctattgaagtgctcttcaatattacacccgattataccaaactcaaggtttttggttgtgtttgttaccctaatattcgaccttacaacaagcataagctcgaattcaggtctacaccatgcactttcataggttatagcttgaaccataaaggctataaatgccttgactcctctggccgcttgtacatctctcgagatgttatatttgatgaatcccacttcccaaatctgctcacagaatccttatcacctgagtcttcctctcttgagtctcacaccctcagtcacattccaaaatcaaatacatattacactgccgagtttcttttcccacatgacacacttgttatcacctctaccactgatgctgcaatctcatctcatcccaatgtcccccctgccacatctccttctgcaacacactcagtatccaccttgcctgagcctaactccaaccccatttcactctctgaacacccaccagaccttgctgcatcaccaacacctgctataccacctttgccaccaactcagccagcctcaccagctcctgtcccacccatatcacatcctggcaacacacaccagatgcaaaccagaggcaaaagtggtattcgaaagcccaaagctttacttgctactcaagttcccacatcactccaacaagctcttcaaaacttaaaatggaataatgctatggcagaagaaatccttgccttaaaaagaaacaaaacctacactctagtgagattgcctcctggtaggacagcaatcgggtgcaagtgggtatatagagtcaaagaagattcagagggcaatgtcactaaacttaaagcaaggcttgttgctaagggcttccaccaacaaccaggctttgatttcacagaaaccttcagcccagtggtgaaacctgtgaccattcgagttgttctcactcttgcattatacaaaggttgggacatcaagcaattggatgtgaataatgcttttttgaatggggatttgcaagaagaggtgtacatgttacaaccacctggttttgaagaccctaatgctcctgatttggtttgtaaactacacaaggccttgtatggcctcaaacaagctcctagagcttggtttgggaagcttcaccattgtctattatctcttggcttcacctcatccaagtctgaccacagtctcttcataaggcataccccactgtctatgaccgtaattttggtgtatgttgatgatataatcatcacaggaagtgatccctctctcatctcttactacaccactgccttgaatgaaaaattctccctaaaggacttaggatctcttcacttcttccttggtattgaggtcacaaccaccccaacgggtcttcacttgtcccaagggaaatatgttcgagatttactccaaaaagctgatatgactgaagcaaaaccctgcaatacacccatggtgagtggtctcaaactttcagcatttggcagcccacctgttgacaatgcacaacaatatcggtctatagtaggtgccctccaataccttgtcatcaccagacctgaaatcagctttagcgtcaacaaagtgtgtcaatttatggctaatcccttacaaacacactggttggctgtcaaacgcacattgcgctatctcagtggcaccatcgactatggaatccatctcaccaaatccgactcacttgagctcactgcattttgtgatgctgactgggccacggatccggatgatcgacggtcaacctcgggttttgccatcttccttggctcgaacatcattacttggcaatgtaaaaagcaacatacggtttctcgaagcagtactgaggctgaatttcgaagcctcgctctcacagtgacagaacttacttggcttcactccttgctcactgaacttcacctcacactgcctcgaccaccagttgtgtggtgtgataatctgagcaccgtccttctcactgccaatccaattttacatgcccgcaccaagcacattgaattggatctctattttgttcgtgagaagatccttcagcagctcgttcaagtgaaacatgttcctgccattgatcaagttgctgatggcctaaccaagtctatctccagccaactgttctcctcatttcgtcacaaacttaccattggtgatcctacctatgctaagtttgagggggcgtgttaggacagtttgttaggagttagttaggatggtagttattactgttgccagctaccattatgttatattgcacatgttgaattcgtttctgttgttttccacatgtatataaaaactgtgtaatgctcagattcaataacaagagatttctttctctcttctcactttctttcctttcctctgtctttcatcttctttcttgttcctctgtttcttgcttatggtttcatggctaagaggttgaatacctctcacagtgttaaaccaatttaagtttgacacgtcaactaatttttcaataattaaaaaattaaccatctttacagttttttttctcttaaaatgctctaattaattgatgtgtcacaatgagagattggtttaatacactgtgaaacacaattttttaatagaagatcttgattcttggatagcagcagaagccaccgagaaaaacgagcagccacaaccaatggatcgctgccacatcaccgactatggccggctgggcttggctgttgagcccttttgggcttaggttcttttttttttcttttcttcaacaataacactttaatttctacaaaataataaattaaatctaaagaaaatattttcaaaaaaatatatattttataaatttcataaaaatattaatttcaacttaatttattttaaactttaaaattaataattgtgcatttttcaccattaattaatggtgtcctatgattagttacaatgaaggccagttttaagagtaggttgggtaggcacgcacctagggcctccacctaactgaggccccgaaaaaataaatcattttattttttaatataaaaaatttaataatactaatataatatcatagtataactttagtgtggtgcaaccgaattgcttgagttggttaaacaccttgccactaagccaactcaagcaacgaattgccaccacaccaaaactaacattatgtatgcacaattttatttatgaagggtcctataattctattattgttttgggcccctattttctctcgcacaaacctattataatataagaaactctaaaatatattctattaagttatataagactcgatatgtacttaattgcacttatagcaatatgataccgggtaggtgtaaagcactagtagtcccttttagcatttctcattgtaaaagttatggttgtacataaacttttataaactgctcaaattgaataattcgtccaaactaaatcgagataacccgataaaaatacaaattgaaaaactcgacgaaaatataacccgcccaatctttatattgggtgggttgaaaataataccaatccacccaatcaacttgaactaacccgaccaacctgattaagagaattttttatatatatttatatgtctttatatatatatatttatatannnnnnnnnnnnnntgactatttaaaaaatataaagttaaaactaatatatttttttttattgtagctgatttgaactttaaattcaatttatatatatttgtcttattattaaaattaactaaaatgttgtaaaaataaaaaattatatattagtagtcagtctggacgtgttaactcgaccaaaccgaccaattttatttaacgggttattattttttttttaattgagcgagttacacttaaatttttgtaatctgatcttcatattggattaaataaaacgtacatacattaaccgaccaaactgacaaacgtacacagcaaatctatcattatccaattattttttactgtttatctttctcctgtggtgctggcgtggacaattaagccgttgcatggttgcacgttgactgttgactgaggcatctgtaaaagataggaagttggtcaaggagtgccacgtgtcgtaatggtgggccacttctcatagccacgtgggtaccatgcgaccactataagaccaacttcagtaaaaatgcaaacttaattgagaaaaaaaaattaagtttagttttctaattacaaatagtttaattaataaatatattaaaattatattttatttaataaaaatttataattattgaaattaaaattagtattaaaatagtttaaattgaattaatgaataaattggtaaataggaattattttaatcaagatttgatttaaaattaatgaaaagtatccaatttggttcaatttgtcttttattattttattaatttaataaagtttaaataaaaaaaatataaaaagtatttttggttggaagagaaaatatattacatttattagtttttattaataaataaaagatttaatttattttttcaaataaaaaataatattatttttggaaaacttaaacctaaacttttggctataattaaatatatagaaagagaagatgacgtggagttaaagcaagccaagacaactaaagctatcaaagactcataaaactctctctctctcaatttcacccatagcaaatcgataaaagtgttttgagtattaatctacacttatcaagacgatagttatggaattgtgaaagatttagagctcaatatacaacttcgagaatagattcatgttctatacttgattatacattgctacaggaaggaatcaaaagttataatattagagcggaagaagatatgatattctgttgtgatcctaatatgataattttaaacttttatgtgtataattcattattttatgtaaaagcatacttaaattagaatgttagatcatataaatcaaatgttatattaacacacatgattagtgaataataatttagtaaaataaattccaataatattattattggttgttgttgttggatatgcgattattgatatatcattatagttgttggtggtatctcaaatttatataaattttttttgtatatgatttaagatttgacatgtatagtgttaacga

SEQ ID NO: 20201 - DNA, 3315 bp, Cannabis sativa
gggtgcccaaggttatgcctgcagggagtgtttcaaggtttgctaaaaatggtaatagagttggtgtgattttgaatgaaggaggaaagtcttttgtgccatttcccaatctactacctccgtctcaggccgatcaggtgaataacccgttggttaatgcagataagtgtactggtggggcccctttggtctttgaggcaagtaaaggaaattttgatttgggccaggggtctcgtgggcctgggggtttaaagaaacagagttttgggcttggtttaattgatgttgaaaatgctggagtgagaggtgggccgattgattctcgtgggccggtttactttaattccactgggccgaacaattctcttgagccgcttatgaataatgggttgaaatttaatgaggtctctatggataagcatgggccgagagtagttattggaccgggccatttggaagttgggggaattaatttgagcccactccgtggcaatcttcaggaaaacatggggggctttctcgaatttgatggtccctctctggacaatggcacattgttggttggcaaaggacttcatcttgtcaattctaaaggaaaagaggcagagaatgatgttgaagagaaaaaggccttgtctcaattttttaaagcccaagaagaattactttatgacttgaaacactttggtaaattggacttgtatgagatcaaacaattgggtggtgatattggagtgccaccttcttcggaaactaatgagcgtactacaccttttaaaaagaggaaatttgagggctccgcttctctatgctcgagacctcacaaattagtgagaacttatcatggtgtagttagagactttccctgggacactaagaaaaggattcatgaggcacgtgcggatggtgatgatctttctgaggaaccttcggaggagccctctggtgagagctctagttgcaacaatggagttagaagaaatcacctgattggctcatttgtgattgaagaatcttgatctagcttatctattcactcgattaaccctgtggaggagaatgtcaaatctcctccacaggcgacatgagaggtgttgcttggaactgtagagggttggggcagacctctacagttcaggagctgaagtccctgctcagatcgcgctctccagattttgtgtttttgactaagctcaaggtggatgtcaatcccctggtacgtattctgaaagcttttcacttttattttcatatctctgtgccgctcattggtaataccgggggaataattttagcctggaaggttggattttgctttgaatgtatcgcttgctctcgtaatcatatttcgggcatagtctattcggaccccccaaccaacccttggcttctctcgtgtgtgtatggtccgccctacaaccatgcaaagaagcatttatggagtgagatcatggcgttaggggatagatttgggggtccttggttgatatttggtgataccaattttgtccttaatccttctgagagggagggggtcgtcgggtagagacccctttatccctttcatatcaaacctggtagagtctcgtggcctaatcaatatgcacatcaaaggggacatgatgacttgggacaaccaccggtcgggagagggccatgtgaagtcggccttggataaaggcattatgaatgaagcttggattcatcttttccccaaagctattttctgctcgatccagacgagtacttctgatcatagaccgttgtgtcttgatacggttgggactgtgcccaagtttaagaagtacttcaagtttgaggaaagttggacgagggatgttagaagtaatcttgttgtggccaacgcttgggattctgtgcgccatctttgggctcccgcccgagtttttaaaaagataggagctacaagagtggcgctctttcagtggaagagaacgcaatttgggaaaattgatgaggttatcaaagatttggaggtgaaactttatagaattcagatgttgcctactggtactagagattggagtttggaatgtgacatcagacggaacctaaatgaagccagaaccaggaaagctgtttactggaaacaaagggcgagaattgagtggcttaaggatggagacaaatgctccaaattcttctttctctctgccgctattagaggaagaagaaatgccatagattgcattttgaacaaacataatgtttggataaatgagcgggaatcaattggtcaggagttcttggaattttttaagggtatcttctctggatctaacaatgctaggcctctgaactgtggccacttatttagggaaaggatttctcgtgaggaccaggttgggaatgtcggggccccatcccgggaagaaataagaagtactctgtatgccatgagaaatcataaagcccctgggcctaatggaatgtctgttttattcttcaaacactactgggagtctgtagggaatgttttctgtgatgctgtcgctgatttctttgacacgggtagaatgcataacggtgttaattccatgaatgttgtgctgatacctaaggtgcaaaacccgaagagaccgaatcattttaggcccatttctctttgcaatgtgatatataaggtcatctctaaaatcattgcaaatagaatcaagcctattctcccctcgctcatttgcccaactcaagttgcttttgttccaggaaggaatattcaagataataatgtgttggtgcaagagattatccactctttcaataagaagagaggaaaagaaggtttttttgcgatcaagattgacctggtcaaagcttatgataggctaagttggaattttattgatcaggttcttggatgtttcggttttcctcaaaaagtttgcagttgggtcgctcagtgtatttccactgcctccctcaatatttgtctcaatggagggccggtaggtaagatcgtgccctcgtgcggtattcgccagggtgacccgttatcccctacctcttcatctgtgcagcggaagtgctctctagacttttagaagaagcgattgggaaggggattattcacgggattaagctaagtagggggggcccggtgttatcccatattttctttgctgatgacctcattttggtgggccgggctaacataaatgaagctaaatccttttgggattgtctgaacaagttttgttcgtggtttgggcagaaggtcaacaaacttaagacttcaatattctttagtaaaaataccctgattggtatgaggagaggaattaaggaagctttggg

SEQ ID NO: 20202 - DNA, 5080 bp, Cannabis sativa
ccctcccgggggctgtcccagccactctccctgttgaggcggcgaatcacctccctgagaaaagttctggagttcacggaaaccctggaggggatgacgtggatgcaatcccagctggacgaaccagagtggaacaggtgggtatggagggagttgtctctcagaaaggagataatgaattcaacgtggcatataatgattatgtggatatgtcccatttcccatctaaacatgtgatccatgtggcaaacctattcaaggagaaattaggcccaatcaagtttggggcgacccgtgaggaattgggccagagtgggtctaagtcgggccttcctaataagcttaagaaacctaggctaattgggccaagaggaatcccaaagccctctctctttggaagaaaacccaccctgttgggccagtctacaggagctaaaagaaaaaagatctcacatgtcataactaaaaacgacccttttgttgatgaaagtgatggtctgagttgtctggtgggagtggataaatctggaatcaaggatgtgtttgcagaagaaagtggtgttaatcatcttgaaccttctaatagcagcgatgggcacctggatcccaacaagaaatctcgtcttctcattaacagtctgcgatctaatgaaggttcctttgggtttattacggagcaaggcgaaggagctaatggtaaggccccaagtgatgaagccacgatggttaatccatccccagggcgtaagagcgggtcgatacaggttagtgataacagtgtgtctattgcttctgatgccagagtttgtgctgaatcctcgaatatgatggtcgacggagacaatgtgaatcgggattttttcaaggccgaggaggcgggccgaatcatgccccccaaggacccatgaaggtgctttcgtggaattgccgcggacttggaagtctagcggcaaaaaaagctctcagagccttggttttgagagaagacccggatgtgttatttctaatggaaacgaaattaaataatagacgtatgaattctatttggcgtagcttgggatttggtggtgcatcttgtgttgaagcatcgggcagtgcgggaggtttgtgtctttgttggaaggcgggtgtcgatgttcttataagatcggctgagtcaggggtgatctctggggttttttccaatgtcctcaatggacctgattggacaggtctcttcatctatggtcctccggttcgttcggacagggcggtgttttgggaagctagaattatggaaatcctgtcgttaaaccacccgtgggttctggttggtgatttgaatatcatctctggccaagttgataagtttgggggtcgtgcggtcgaagcggaggagggccaccatctctctgaattgatgaatgttacgggtggagtagaccttgggtgtacggggaacttcttcacgtggtctaatggtcgaagacttccatctctggtcaaggagcggctggaccgagctatttgtgatcccgagtggatgatttagtatcctaaggctggagttaaatctctggctatcaaagagtcggatcacgcccctgttcttttggatttgctctttgatcgtgagagattcaagaccccgtttcggtatctggatgcttggtctagagatgaaagttgcaaagtcataatcaaggaggcctgggatattgtggttcatgggatcaagagtttccaacttgtctctaaactggaaaatactcgaaaatgcttatctaaatggaatagaacgcattttggtatgtgtaaggagaaactaaaagctcttaaccgtctcttgatcgaagttcaacagcgtttaccctcggatgctaatcttaaacttgaagcggatattctcttggagatggaagaagttgagacccgacaatctgagatttggaaacagaagtctcgagaactttggtataaagatggtgataggaattctcgttttttccacggtgcgacggtcattagaagaaagcgaaacttcattgatgcggtctccccggatgggctgggatggatctccggtagaaacgcagtggggaattactttcgtgatatgtttatctcggtgctatcaagctcttctccccctcctccccaactacaatccatgatccagcctatgattttgaatgaaatcaacttggatcttattcgaattccctcggccactgagattagggaggttgtgtgggcgatgcatccgctaaaagctccgggcccaggatggaatggccggggaaagttttataaggatcattgggagattgttggtcaggatgtcactgctgcagtttgtaaattctttgaagctggcgaattggataggaaaattaaccagacttttatggtgctaatccctaagaagcttggtgcaaattgctttgatgattttaggccaattagcttgtgcaattttacttacaaaattatttccaagcttctggccaacagaattaagccgctcctctcggatatcatctccccaacacaatcggcctttgctcctggcagatggattgcagagaattccattttggctcatgaaattatggattctttccggaaatgcaatggtaggaacggatttgttggtttaaaattggatatgtcgaaggcttatgaccgcatagaatggggattcttggagcatgttcttggagcatttggtttcggggagaaatttatccgccttataatgaaatgtgtgagctctgtttccttctcgatcctcttgaatggaggacctctcaagcaattctatcctacaagaggacttcgccaaggtgatccgctttcgccatacttgttcatcctatgtagcgaagttttgtctcgtctcttgatgcgggaggaaggtcggggtcatatcacggggtttaaggttagacgatgcagccttcctatttctcatttaatgtatgctgatgatacgtttatattctgtaaagcgaatatggaggaagttgagatagtgcaaaattgcatccgaacctattgttcttggtctgggcagagtttgaatgtgaggaagtctgcctatgtattttctaagaatgtggaggagcaaagtaaggctgagattgttagtatgctgggattcaggtgtatgaatagagatgataaattcttgggaaacccaattctttggtcaaaaagcaaggtgaaggactttaagctcattaaagagcgactctgtgctagaattgaaggttggcgatgtaaacttctctcccaagcgggcggtctaccctcattcggtctgtggcggctagcactcctgtgtattccatgtcgaccttcctcctcccaaaatctttgtgccacgaaatggatcaggccattaggaaattctggtggactggcagtaccgagaaagatcgttatcttgctcttgccaattggaactccctgtgtactcctctggaggatggcgacctcaattttaaaaaatttgaagatatgaacctggccttggtagccaagcttgcctggaaattagctaatggggaagagtcattatggacaagggtcttctataccaagtattgggagaatggaattaactccttttggaatcccgaatcccccaaatccctatcctttggagctcggagtatcctagcttcccggaatctcattcgtaaggaatcgtgttttctcattgctaatgggagatcgattaacatgtggcatgcaccttggatcccttggttggagtgggatcaattccgagctgccttcaatcctatgatagttccgaactccactcttgtttcttctctcttcaatgaggacagggagtgggacttccaacaatctgctacttggatggtcccaagtgtagcaagttctctcaatttgatccctatgcttcccaataaccatgatgataagttgatatggaaggatgcgactagtggggagttctcaactcgggtggcctataaatcaatcatcaaaggtcgaagggctgaaaaagatcctatttggggtaaaatctggaaacttaagatctcggaacgtatgaaactcttcctttggaaacttgggagagatatcttgccttttggagaaagacttcaacgcatttttggcaacgaggtggtgtgtgcaatctgtgatgaacaagaagactccgtggttcatttgttttgtcattgcccgcttgctaaatccctttggctggcaagcccgtggggagtccggagtgaagagttgaatttcaatagctccctgcagtttacgaagtggttgcttgaacccacccctttgatgcaacatggaaactttgaggtggaggaattcaggaaatttggagtctctctctgtttcattctctggtcagttaggaatcaagcgttccacgaacacgtccaaccctccttcttcatcacctttaatcggattaagagcttggtcgctgagcttaattcggtgttaactactcctcaggacacttcaattggtcaatcttctctgcatgttcgacagggagtgttgcagggagagtttgtggtgtttgttgatgctgcttgcaaagacctcaggtcagtcgcgggtatcatcgttactaaggctaatttcgaggttgttgaagccttttctgttcagcttcaggctgctctgcccgtggaagctgaggcttgggctcttctacatgctgtgcatcggtgtctaagccaaggatggcacaatgttacttttgctgtggactgccaacttttggtgcggggcattaaggctcgaaagactccggactggagggttgcaggggtgttcgcacggctcttggatgctctggatcgtatcccgccagccttagtcatttggatccctcgtactgggaatgaaaaagctcataagcttgctaagtggtcctttaactcttatcattttggttttttcaatgctgaggagttggcacctcttgttgccatctaaaactttcttgtgtgttttggtttgtttgccttttttaatgaagtgatctttcccagcaaaaaaaaaaaaaaaaaacactttaattataaaaaagagt

SEQ ID NO: 20203 - DNA, 1864 bp, Cannabis sativa
cagtgtttacatgatggttagcatgccaaattgtgtaattacctcaaattacacacaaatctaattatattgtggctttccaaacgcacccttaattaaatcaacacttaatgtaattagtagtaacaattgcaacaaaaaagtaacatatagtttataattcatcgaaaaaacatataatatataggtgtgaaactgaaaaataatatatttataccgagtaattatcataattaaataaatttacatcttttgatcttaacaaataacaatgcataacaagattactcacccaactatctctaaagagataacaatgtattactagtaatctattctatattaatgtgacttctaacaaatttgttaatttaattttatcatctagttgagtaactaataaaattcaactatgcacaaatacgtttaatccactaatatgactatttaagtttttaaaaatgatggtgtaacactaattctttttcattatcaatgtgacttaaaaaaatttgttaataatgttgtaatcaataattcatttaaaacccacatggggattcaccatttcaatttatataatattcatacaaattttatttgatcacagaaaacattaaacaaataaaataatcatatatattttttatttgaaaaaaaaaatctataaattttcttgtgcccacgaacccaaattagcaaatcatggtgaaatggacatttttagagagagagaggaggccagcctagccttatgaatacaacgtaccacccagaaaatcccaaggccaaaacaaaatttcaaaggtggggtctctagaaactgacacgtggcaaacgatgagtccccacaaaatcaacggctgagattggaaagggtcgataaggccagccgttggtgttgattacattcctcctccgcacgtttttacagctcacgcgcggttgttgggcgtggtggggtacgtgtccaggttggccaaacgtgagaccaatcatgttcgttggtctcgccacgtcagcaagaaggacaacaccaccacctgcggctccaacacacatgaaccattcccacgttcttccacagtggccttccgttgttttcaatcattggtttctctcactatttgaccattttacccccactcaacagttattgtttgttacccgtgtttgtctttaccataatgcccttactttgagtttatttttaaaaaacaaaataaattaatttcatacttatctttcctttccttctacctaatcatcattataaaattaattagaagtgctcccaaattttgggtttcttttctttttagcttcattgtttggtattgataagatttatggattcatagtgtgatcttaaagagttaaatcaccaactatttgaaaaggactcatttttctaactactaatgaaaagtgagaaatgagcataattgtgcaatgctcggatgttctagtagtattttatttttaggtaaataattttttttttgggtatgcagaagaaaaaaagaaagagttgatttggtttatagttcaaaaaagagaaacattccattaaaaaaataaaagaaaggaaaagcatatggtagtttttccttacaaaacatatttttttctccttttgttgtatagatgaaagattcaaaatttgatttaaatcttgatgcttcaagttggagcaccaaactaacatttttttttctttctaatccggccatgaaaataactatctataggatcccttttaaaacaattaatacatcataaattcttaacacaatacaaccaaatattaaaattttatttcaataaaattatgtttgaaagttggattttaatagaaaatgag

SEQ ID NO: 20204 - DNA, 3903 bp, Cannabis sativa
aaattagactaaaaaattctttaggatgccgaaataagttaagggtgcatcagtacatcccttttaagggggtgcattgtagaatcaccctaaaattttagtgtacgcttgaaaaagaaaattaaaacgttttaatttttgatcaaaataacttagagtacttccaataattttttacttaagttttttaaaatacataagtaaaattttattttttttattttattttaaattttcacattaaatcatagataagtttctctacttactcacaaacatcatttaaataatacatctttttaatatgtatatatttaaaatacatattatcaagataggaataaataatttaaatactattaattatttttaaaagagcaataatgtttatcaattatcatctctggttgagtatgattttaaggaatagctttacttagactgacagaagttgtagtgagttattaattagttatttaaaagtatagccgtatgattacagaaatatattaacaagatattttgcggttaattttcatatattattattatttttttttacagaaatgagagtcaacgcgcacgtgtaattgaaatggcaccgtcaagatcttatcaggagtagaaacgaatgtacaaaaaaatgaataatgatgttggagatgatcatgtaatcccaagaagcggtttacacaacaagaatctggaaaataataataatgcccagcccagcctcttctcatcggcaacttgtccccatctcaattctaactatatatgtagattttagaagactaatttgcagttgtaatactaagtttagctcccagtttttttacagcattaatatcttccctaagagtttttgtacttccgttgatatttggccggttaagtagttagtactcacgtgacactttttttttgaataaatattagaattttattaattgtaatcaattaaaataatagtacgttgtaattcaacggaaatatctctctatttaagtcaggactaacattaaaactaaaagactaattaaataatcagccgcctaatttttaaattgtttgacaaaaaattaaatgaaaaaattacggcattacaattaacattaagaatacttatattatgttttatccaccactcaaaatacataacaatagaaattgttgcagcagattcattcaaccttgtagcttgagcacacaactattgtgtcaggcacgtaactgcactactaaaaatctcttcagtcatagaaaacttgttattctcaactgttaggtctttttttttagcaaattagttgtcaaaatattatttaatttattgtaaattaaattgattttattgtgttgatttcgtgcctctaattgctcttttcttctaagaaaagttttattctcggctggttttatttgtttaagaatattgtcttacaacggaagggattctcttatagaaagttgtctatttgtgggaaacttgactttctttttttctaattgttgaattcggttttgccatgattatatcagatcaaataaactttatttggcaggtattgaacatcaatttgtgatcttggtccattttggaaagttttctttctggtgctaatctgatgctacagaatttgaatttgatgatacaaattagggattttttaggaaagttttggacaactttgaaaacgtgtttgtggctatctctaggatttctatattctataaaaaggatctagagagcaactaaacatttctaatctcttttagtctcatattttcatattttttctttgtgagaagagtgtttcatttgtaaaaacttagagtgttcaactaggttttggttttcttattatgatctcgtattattcatagaataagttgaagagaagctttgaacaagcgtgggtcttcaaaagaagacttttccaagtctcattttgggaggaagtgagcatatatcttcgagagaagatttgtttaagccttattttgggaagacgtaagtacgtatcaatagctgtagggagttcactactaggtgtggttcagagatcagattagcaaggtgaattacaaagggttacaacaaattattagagggagtctaaatttgtttaaatcgattgcttttgtaatcattaataatttaccaactgatttctttctctggcgtggccctgtagactaatagtgcttgaaagaatactgataccacgtacaattctctggtgtcaagttttaaattctgcacaatttatttttatttctattttgtttcagaaagtcattacagtcacattttatttacagtttttaaagaagtatattggcatttgcaaaaatacagttttttaattggtatcagagcggttcactaaactcttagtgagatcttgtgattattttctttttaatttgttttgtgtgcaatgtccttctttgcaaaaagtggccctatatcttattcttcaaaggttggcaacaagaaaagtatgtctaagtccttgagaggtagtatttattcaaaaccttttacatccaacaataaaaaagaggtacaatgtagaaaatatcatggttttggacacatacaatcgagatgtgtaaatactttaaaaagaactaaaaaggttatgaatattacttactttgaaagtagtgatgaagagaaatcaaataatattgaactaacatctgtgttttctagtgttccatgtcatttgcagaaaaataagagctttatttgtcttgacaacaatgttttggtaataaagatgttgatgatgctttagggactgattttgatgaatcagatttggatgaggattccttaaaagaagcatatagaagtaggtatggtgagtggttgaaattgtattcgaagtatcgtttattgacaaaagatattaaatcactttgtcaaagaaatgaagaacttaaactaaatgttaaaaattttgaaaatgagattgttgagaacaataatgaagtcaaacgattgtccaataaacttgagcatattgagaagaatgcaaaaatgctaaatccaagttcttcaatttttgaagaggttcaagatataggtcaaataaaccatgttgggttgggatgtgttaaatatcaatctaaattgaacactaaatttgttaatttgaaaatatacctcctagtttttgtgatctaacaatgtaggaatctgtttctacaactaaaccttctgttattaaagaaagggagcagtcaggcaagaaatacaattttcataaaagaaggaaaaagttcacttccacgtgtcatttccgtggtgttaaaggtcaaatttgaccttagtattttaccatgataatctcttcaaaaataaaactttcaatcattatggaaaataatctgttaggaaaaagagatcaaaattcaagaagatttaggaaagaaaaatgaatctaaatatcttgctaattttacttgtcataatgcatgtgataataccagtgctatatatatattttcaaaaataatgttcaaaatttttgtacaaaatacattgatatgagaaattattttattagggaatttgttaataatcaaactttgcaattgtagtatgtggacattgaaaagcaattaaaagaattttcagtaaagacctagattcaagtcattttgactccctcaaaaaatgtttgggggtttacattacttaattttttttcgtatggttctctattttgtacaaaattttgagttgtacttttcttacatatctttatttcacacttagttgactaaatatgtttgtaaagaccgcttagctttaatttggaaattagcatataattagggttttaattatgaaaattatttataagtattgaattaattatttatgat

SEQ ID NO: 20205 - DNA, 3317 bp, Cannabis sativa
aatacaaacgagataccatcaacactatcatacaacaataaagttcgtatttgatctaacaaacaatcgacatcaaaacagccttcatcctttctttggattaactgaacggcttgtagacaatccgactctatgctaaatcgatggattttacgatgtattcctacctgcaaaccaacgagaatagcctgcaactccagctgaagtggagccagttcctgatgaactacagcagatgacgcatacaaagtacgccccccactgtcccgaatcacacaccctatgcccgacacccctccaccactttttactctagcatccacattaattttcatccttcccaactcaggtgccccccatttcgaattttcccttctgactcgactcacggcagtagctcctcctccctcaaactcagttaaatacttcctacaccagtccaccatctctcctgccataggagcgatcccaccatgtatgacactattccgtatgttccaaatattccatgtgagaaccaaaaagaactcgaacttacccttgtcccattgccgagccatcctcatcaaaaaagaaagcacatcttcatccttcagccttttcatctcatccttgaagccactaacagcccagaattccttgctccttttacactcccataaggcatgaatagcattttcttccacatggcctgtacacctctcacacttcttatgcacacccaccacgtttggccaaagtaacatttgtaggaagccaattataagcaagcttccacacaaaatgtttgattttgggtggaatcttaaacctccataatgctttccaccaatctaccaacaccttgtcatttgactgatattgctcttcaaccaaagagcttgccatcttatagccgcttttaaccgtatattccccattcttactataatgccacatgattttatcttctaattcccaacccgtactaggcatagaaagtatgagctccgcatcatcactattaaagacctcttggataaagattgaatcccaactaccatccccatgtttcatatcggccacaaccatattcgccgggagaggtggcttatcatagatcttaaacgtgactggtcgcgggagccacggatcttcaagaacccgaacattttccccattcccaactcgccaccggtagccattaacaatcactttcttcccccatatcaaacttcgccatacaaaagacgcacatgctccactctttgcctccaaaatggtcttatgaggaaagtaggatgccttaagcacacggctacagagattattcaggcatctaatgcatctccacacttgcttggcgagaatagcttgattgaaaaaccccaaatcacggaagcccaatccacccttatcctttggcttacataaatgtgcccacttacaccaatgaatcttcttgtccttctccgaagagccccaccaaaacctcgcagccatacgatgaatacttgagatagtcttcttagatagtcggaaacaagacattgcataagtcggaattgcttggactaccgctttgatcaacacctctttccccgccattgaaaacatagaactcttccatcctttcatcttagcccaaactttatttttaatttgatctagaaattctttcttgtttcggcccacaaatgatggtaaacccaaatacttcccatgattatctacttgtctaacacccataaataaagccagctgctgtctaacctcccgtgacacattcctcccaaaacacacttcagatttatggtaattaactaattgacctgaagcagccgaatataactcaagaagacttttgaaccgttgacaactctccatttcagcatccataaaaatcaaactatcatcagcaaaaaataaatgtgagactgataatccatacgtcccaaaccgaagcccgttcattgtaccctcttgttcctcatgttgaatgagattcgagaaagcctccgcacagaataaaaacaaaaaaggagagagaggatccccttgcctcaaacctcttctcggaataactttgccttttatatcaccattaattaaaaaagaaaagctaaccgaggtcacacatcgcatcaccttttcaacccaaaccgtatcatatcccagccgcaccatcatcacgcgaaggaagtaccattcgactctatcatacgcctttaccatatctaactttaaggccatctttgtaccattcctaaattgatttttccgcatacaatgaagcccctcatacccaataatagcattatcatgaatcaacctctcttgtacaaaagcactctgggtgtcggaaataacaacactcatagtggttcgcaaacagctagcaagacacttcgaaacgatcttgtatataacattaaacaagctaattggcctaaactcctccacacgaactggcttctcaactttgggaattagagcaataatggtttcatttaagcaatccaaatcagcatcttcattcagcactttcaaacagaccgcgaccacttcagcttggagtttacccgaaattttttgataaaacagtgctggcgatccatctactcccggtgctttaactggattcataaacttcacagcttgaattacctcttcttctacaaacggacgcaacaagtcctcattcatttcagcagtgactttcggtcaaaccctccgtaacacctcatttacttgttccatattgagatccgaagccgagaatagacttccaaagtaatcctccaccaatgtttggatcatgccaatgtcagtttgccatatccccatactatccatgagccctttaatttcatttctctttctcctagccgaagctttcctatggaagtacttagtattcaaatcaccccacttaagcaacaatgcccgacttcgttggcgccaatatttttcatccttctcaagcacaacatttaattgtctctctaatgttttcaactccccccaagtacttgaatcttgtctacttgagaattccgaaattgccttcttcaacttcttcgttctttccttcaatattttcttcttttttttattccatacatgtaaggccgcacctatcttccttgtcttaactttaaaccccccagtagaaaccaccctgccttcgttcgtccacaccctctccactatctcctcacattcaggctcttcacaccaggcttcttcaaaatggaatcgactcttacgcttcaccttcccacatcttttgcgttctacatcaatcgacatatctacttgttggatattattttacc

SEQ ID NO: 20206 - DNA, 1433 bp, Cannabis sativa
tgactctcaacaccctttttccatatttctttcttcctttctatctatttttcatttttagaaatgaaaaaaaaaaggaaaagagtgaaaaaaataaaacaaaagaaatacattgtattgtattgtttatttaatattttttgagtttttttatttttgtgggtataaaaggtagtatataaaataaaaaggtatgataaagagtgagaaaaagttaagtttgagacttgagagagagtgtggctgagatgagatataatacagtactgtttgaatatcatatttccagttccacaatattggtacgtctcctttcagtcctttgggatttggaaattactttttcagttttgcgacttgtaacgtttttctcaattaaagatattgcaaggtcacctccgttccattgggtaactatttactagtagcaatgtttagtctcttacgttaaataatatataaggtgaaacaatttcagatttttaactaaattcatataagttttgaattactcaaattataaggaaaaaaaaaaattacttcccattacaaagtgtggcttgctcctctatgccatgccaaaaactcaaagcatcaacttgtgctgtgaaaattttggtgtttcatcattattagtcaaattttgtactaatattttggtctttttatgcaaaagaagacctgatcggtgatgttactttacaggcatcttgggctaggttcctcaaacttaaaagggatttcactaaattggttgacattgcaatttcttagtgcataacttggccaaagaggcagatttttttttttttttttttgggattgctgagcaattagcgagacagtgcaccgtcttgctgaaaatactgcgtctatgtgttattttgatttgaggaggtagaacttgtttccacatccttgtgtttaggggtggactcacatgtaggcgaggcgcttctgaaaaataaaataaaaaatatatatatgcaatttaattagttactatatatatttataataaaaaataatatttataaatataatatgagcttttaatattttggttaaactagattacataaaagataaaatcaatggttcaattcttataaagatcattatttttttttttcatttttaagtttatttttactctcttccttacaaaaaaagaaaaattacacctcctattactttaaattctccatccgccactgcttgtgtttgagttagttatttataaagttgggatattaataatattaaaaaaaaaaataacaaaatacttagccaagtggactatgttacacctttctatcacttatataacgtacatgaccataagaaaaaattggactaaaaatttatttcgagtgctaaaacagataagggtgcatcaatgtatccattttaaggggtgcattgtaaaattt

SEQ ID NO: 20207 - DNA, 10290 bp, Cannabis sativa
tattattattattttattattttattgatgaatttttgaatttttgttatttatatattatttttaatgctgttttattgttatttcaatattatttttttgttattttttttttttgtatttttatagaatactatcaaaatatataaaaatttaaatgtaaaaaaatttacaaaaattagtattttatgcaattatataataaaaaaattagaaaaaaaaaagtaataaatcccattttccaaaaaaaaaaaaacaataaaagaaactaaatttgaaaagaaacaaaaaccaaatgggctttggggtgagtagttagagctcagaacagaagtaaaatcacggccaccgcctttcgacgtcacaaataccggttcccgaaaccttatgacgtggcaaaccatcattggataaaatcaaaacgacaacaatcttatcatcgtatcaaccgtacccaatcatatcccaaacttcttcttcatcacaggaacagaagctttatttttgagttttcctaaaaaaaaatccaatctttattctctcaaaaagaacaggagaatattcaatatccattctcaatggggacccaagctgtgcccgtggagataacggagccactgattcacgattcggagaagattaccaccgttgagcctattgatgattgcggcccaattccagaatggaaagatcagatcacgatcagaggtttggtggtcagcgcactgttgggtagtcttttctgcatcatcacacacaagctcaatttaacggttgggatcattccttcgttgaacgttgcagctgggttgttgggtttcttcttcgttaagtcgtggactggtcttttatcccaattggggttctctgttaggccctttactaggcaagagaatactgttatacagacttgtgttgttgcttgctatggccttgcatttagcggtactaactataaaactactagcttttgtttttgtttaccttacccaatttgattttgacttgttgtgattggtcaaacagggggttttgggtcgtatcttattgctatgaatgagaaaacttataatcttattggacctgattatccgggaaatagagctgaagatgttataaacccaggattgggttggatgactgggttcttatttatcgttagctttcttggtctttttagtcttgttccacttcgaaaggtaaagattgcatattatttttttaatatgtcaacatcatcaactttttcgaaatcggaccattgacttataaaaatgtaatttttattcacaggatgatctgtgttctcagttaatacttaaaagttgaaaagtaatgtttttttagttgaatttgattgttttacagtcagttctgcttttgtgtggtttttctttgacctgttgaattccgcaacatcatgccctttattgaatttgggtctttgagttatacatatcacagaccgttttattcaaaccatgatgatatgggatttcggttaaaactttaaaaatacttatttttatagttgaatttgattgttttacagtcaatttgacctgttggacttgttaataatctaatgcattcactcatcaatctaggctttcagattgctcatttaagaaatatttataaactatgtatttttcaaccatttgtatagatatagattaacttttgaacagtataatgaagtgaaaatagaaagttttgaacagtataatgtatttggataatgcttattgcattaacttccttggtaactatctattgactttgattaatcactggatttcacacatgtttttgcatgtaattcaaggttatggtgatggattacaagcttacataccctagtggaactgcaacagctatgttgatcaatagctttcatacaaacactggagcagaacttgcagggtaagaactaaagatgaactttcaaataagagtatgtatattgttgaataatggtgttttgtaactgttgacatttgttatgcattcatatcggtgctcctgctccacattgttttttacttagtctagcttatgcgtgttatggacatggaaacttcataattgtgaagaaaaaaataaaaaataacaatttgtttatgactttttattttctttttacaggaagcaagttcgttgtcttgggaaatatttaagcataagtttggtatggagctgctttaagtggttcttcagcgggattggagattcatgtggatttgacaattttcctacccttggattgacactatttaagaacacgtaaggctcttgcgctaccttagatcaaacgaaaaagatgaagaaaagatgatatctcctgtgtttagaaacagcagctgttagtagtgtgacactagtagttggtgatttgaaattggggaatgctgccttggagttcatattatatatccaaatacattcaatgccaaactaaatttaagatgatctggtttaggatttctgcatgttaaataaatgatgtttgataatatgacttatggctatccattaccatttatttatcttctcattgatatccatgtacgtgtaaatgcttgaaatttcactatatatccatactatattgctatgttgctaatattttacataatatacttcatgtaggttttattttgactttagtccaacttatgttggatgtggtcttatttgccctcacatagtcaactgctcagttctctttggggctatcatatcatggggtctcctctggccattcatatctcaacatgctggggactggtatccatcagatcttggtagcaatgatttcaaaggtctttatggatataaggtacttttttcttaaatgatttctatttgaaatatattggctgtatttcttcaatcgaattagattattatgaatttatatttatgtttaataagcttttgggctggtcataatatccatcttgatatgtgtgcttcaaactgcaagtaaattgaataatgttaaacacatatttgatgagatctgtattacataccgaatgaattatctatctctattgcattcttaggacaactgttttatacctgttttttttctctcttcttaggtctttattgctatttctcttattctgggggatggaatctacaatttggtcaagattatagccattactattaaggaaatgtgcaatgcaagcgccagacagagcaatcttcctgttgttgtagatgcagccgtaggtgagagtttactgtcgtaattttctaatatgttttccagtattccaccaacagttgaggaatctgtgctagtcatgtaccacgccactgaaatttaaatcctcatcaatttttattatatttagcttaccatatatcttttgtgaggcatctgctaagataaaaggcgagttatggcatggcattttggctctcaccaataaatgaaaagatttgtgtgaatcaaaatattaaaggttcaatctgttggatgtttaatctgttttggttgtttgtttggctcatcagccaaagaaaaagctctgtacctatcctaaaaccaattgtaaattgtaattgcttaagaacagttagcttctgattcagtgatgcatctctactttttttgctaatgcattttcttgttctgcctattttgacaattatatcttctaagcttcttgaagtgtaattatgtttctttttttctttctaattttaacaattgaaaatggtatgcatggtgtgaagaacctattgttttagctggacattaattgttttttttatatttgtgcccaacagatgcagagagctctaagctacaactggagcaaaaaagaagggatgggatattcctaaaagatgggatacctacttggttcgcagcttcggggtacgtagcgttggttgcaatatcaacggcggttatgccaatgatctttccaccgctcaagtggtatctggttcttggttcatacgtcattgctccagccctggccttctgtaactcttatggcactggcctcacagactggagtttagcgtcaacctatggaaagatcggtcttttcatgattgcttcattggttggaagcaatggaggagtaatagctggattagcagcttgtggtgttatgatgtcgattgtttccactgcagcggatctcatgcaagacttcaagacaggttacctcactctctcttcagctaagtctatgttttggagccagtttgttggaacagccatgggttgtgtgattgccccactcacattctggttgttctggactgcctttgacatcggagaccctgatggtccatacaaagcaccttatgctgtaatcttcagagaaatggccattcttggtattgagggcttctctgagcttccaaaacactgcttagccatgtgttatggtttctttgtcgcagccttggttataaacctccttagggacgtaacaccagcgaaagtatcacagtttatccccatcccaatggccatggcagttccattttacattggagcttatttcgccattgacatgttcgttggaactgtaatacttttcgtgtgggaacgagtgaatagaaagagttctgaggattactcaggcgcagttgcatcgggtttgatttgtggtgatggtatttggacagttccatctgcaatcctctccatattgagggtcaatccacctatatgcatgtactttggaccttctttgagcagctgaaatggagatacatgcagttgaggatgtctttgtaaaatgtgtactttggaattacaaactttgtaaataatgtccttatgtgcctgataatagtagttatgtcacactgtcatgtacatctcaagcatatgggcatgatagcaactaccaaagcccaacaccagtaaggtccaatgaaacatttatagctacctgcctttgttgttgttgttgttgttgtttcagcccttttaagtttagctatttcaaagtttatgaccaattctttctcctctccttttctcatgtcatgtacattctaatcaataaatttcattttatgataattatctatgatttacattccatgttaaaataataataaatgaccccactaaaattgtactttacacctaaaccccagtttgatttatttgctctttattttactttcatcataagattagaggtcaaaagggattatacattattgggtaagtctatagtagtacatttaggccttatctatttatgagatcgtgtatattatgattattaaataccttacaaatgtttagaaaattttgggacgtttacaaatgtcgaaaacagagtttaaatattttattacacgtgaaactgtttttttatacgcatagtaagtaatggtatgaattttatttttggcactataaactatttagaatcttttagttatttacaggtggtcctaaatagccaacacgtacgtgatcatgaaaaaaattgaactaaaaaacttttctatatatcgaaatagataggagtctaccaaaatacccctttaagaagatgtattacagaaatttcctatattatattctctccttctcataatttatttattacttttttttcttttctaagagatgctgctctcttaagactaactaaatatatgagaatttttgggatactttggttgaaagttaaaccatcaaacatgacaatatcttatattatagttacttttctttttcatcttaattattctccattatagctaatcaagcatttaagattcataataatcactacaacacatatccaatggatggaacaaggtgacacgaggtgtctttaggcacacacatacaatatatgtataaatatatattatcttcaaccaaaaggatcaatataagattactatcaataattaacgttttactaaaaaataataatactttggttcgaaaatggttgatgggatataataatggtaagcacgataaggactagttgatgttttccttctttaaatcttattagctgtttctcttgacttaaaatattgaaaaaaataatggctatatatatctatctatctagtttctatcaattatggttttgcctagctacttattttgtatggaatcttctatgtacaactagaaagatgaccaaacaagatgcttttattattattattattataataattttattttcatatatttatatggctaaccattgttgataatttagatgaggtttcttcactatttttttcctaataaaattgtgaaataatgagtgctttggagaatattagaaataaatttgtaatggttttatttgattaataaagtcttcttttttgataaataataaaaaaggaatattagaaattatatataaaagtggtgtaagtgagtgtgaaaggaaagccaaaattctcttatggctaattcatgatgagtgagaaagagctaagattgtgacctttgtatattgctttcaactaataagcctaagcactctccacaaattattattggaatctttaatttatttatttttctcatccaatttggatggattaatacatctcatcacaaccaccaatttcttcttcttagctaaatcccaatatatgattctatcaatcacatgtacgtttttctcaattactttcaacaaagaaaaaataaacatttttaagtgtgactatttatatatatatatataagcctgaataataactaaaattaaatcaactatacctatgtactatacatatagttgtgattgctttttttaatctatataaatttttagtatttttggtacaatatatgaatatggtgtatgatgtagttattaaagagaattcttcaaaaaatgaataatcgaaatttgaattcaaataacttcttacgtgcacaaaataaatgaatacgtgtgaataaatcaatctgatctaatctaatgacaactaactgattcaattacaattgatcgctaaacattagatatttaattgtgatcgggttggattggatgttatttttgattatccaattggatcggatcgaatcggatgttggatgaagtatctaaaaatccaatacatatctaactaattagtattttcatttagtttggataagtaattaaattttatattataattattatatgtatatataaaaattaatattaaaattttactcttttttgttggattagattgatccaatctaatccaacctaaaatattggatggatgtgatccaatccaaaaaatactatatctttaaaatgttgaataaacttaaattaaaccaatatatatgaaatacatccaacaaatagattcgatccaatccaatattcaatggatattggattgattggataactgaaattaattggatcggatcggatggtataatctaacatccaattgaatgtggtccaataaacacccctaataagcttgtattaattttgctaatttttatattttaaattattcgaaatttcctagaaatttgcatgagattcaaaattatatatcatcataaaaaacaaattattgctcaataatttttctatatatattactaactatatacattcaaacattataagttgcaattaatgaaactagaaaaggaaaagtagtttcaaaataaaaaagagaaaaggggaaagaattaatggcacatatatatatataaacaaaatagaggtgacataataatatggataattattgagagagatgagttctattctatcttatcaaaaggagtgagcaaatttgatcggttacagttacagattctggctttattggaactctctgtgtctgtgtgtggctcttatatttattgtgttggtgggactatatatcctcttttttttttttaattttttttaattattttctacacacaaacatatataatacaaactacttaaatactacttgtccaatctttttcaggagaaaataataaacttttaaaaattaaaatcatatccaattcaatatatatacacagcaagtacagaagatagattttttctactaatacttttatgaattggagtccatatatattaataaagaaaattaaagttttaagataaaaattaattaatttatatttatatttgtgtagtatatagatccaaaatacttgctgccaaatgaatacttttcaaaatcaaaatctttgttttcatttatgaaaagaaaattgtaaatatgagtaatttcagttttctattaataaactactgttttttttaattatttcatgaatttgagaaatatgtacatctaaattaagtaacatggctcatggctttcaaaaaaaaaaaaaaattaatatgtgaagtacataactatagctagctagctattatatatatatttatatatttaattatatacatgtagatatatatacatatataatataaatatatatattcatgtatatatagaatttgatcgatctaaagtaatcgaattaattgcatgcaaaagattgatatttaaattataatgtttttgcatatatatatataaatgtatattatataagagttctccagaaaataaggttcaatttgaattcttgatatatatacctctccaaatgaatagtatagtaccttattgttttgtcttatattaataatatatatatatatatataagagataagagttctcatacagaaattaatactaacaataaatgaagggtcaagcttgttaattattgggtaatccttgagaaaaatcaacattgtatatattaatttatacatatatttgggatataatataatgccttataaactcaaactcatcatatagagctttcaagtcttatatatgaatatacatccttattatatccttattatagccatatatatataatcaagagtatatatttttttttatatatatatttatatatgttgagaatgatcaatactatagatatagatagaagttggagaatgacttaaatgattaaagacaaacatatcatcacaagaagctataaagtaaataatagtctctttaattttttctttctttcttttacttgaagaagacgctacaaacctcattaatatatatttaataagaatataagtacgtggaaaatataattactttgttgttaacatatatatgtgaaaataagaaagaagaaagaaaaaaaaagcttgtttctcatataagtctttgaaaaaccccatatgaaagcaaacacgcgtacatatatacatatgcatcttttttatttatttttcaaagtttgaattttttgatgtgagctagggttagggttagtatatatatatgcatgagaggaaaggcaacagctaactttgaaagagggacctctcttgtctccatggtgggaaacatttgtgactaccaattcaatcaccaacacacatatatacatatattcatatatatgataatctctactatttaatatatatagccattcatatcattcatttcattccccatcatataatatatcatgccaaattataattggtttttctagcttaaaacggcataacaaaaaattcaaagaagaaaaatgagaagaatttgatataatattgtactattatttaattattaacacaccttctttagaaagttctagctagataataataaataaactttcctttgtgaacacgtttatataatatgaaattgtagaactatatttttgggtttgaggatgcatgattcattgatgtgagtgattttcgccaagttaattaaaatgatcattattatttcataataattaagtacattaatctttagtaattgtaatattcaacacagtgaaaagtggacatatcataattaatgatcataccaacttataaacttttgaataactaaagcaactttggaccaatattaaataaccaactactcacattatttttttactccactatatatatttattcaactatatacatatatatagttattaattataaattcttagatcacaagatcatatattgcatatataatacattatatattttgtcttagatccaacaccaccacaaattggtctccatctagagattcgttaatgattaagtgttgtaactttttctaatttattcaccaaaatataaagtgatggtgagatgattcatgacttgatctagcatactttctcaagcttgatatatatataaattttatcattgattagtaa

SEQ ID NO: 20208 - DNA, 1641 bp, Cannabis sativa
tcgtaagcatgaacatggccagcaaacactaaatcaacacttgcagcataaagcaatggctccattgctgccatcatttggtctccctcgccttgatgagccttgttactattgtaccatggtacatggaataggacaacgagccatggggtctttttccggtccacctttgaaagatcagcctatttgacaaagaatggcagaaacttatcattacatgtaactgaactgcccttaatttaatcaaccaatgttcaaattagtacactttgaagaacaaagcaaatcatattgattgactaaccttcaaccacctgtattgatcagaatattcatcatagtcagtgtatgaaccaagcataatgagatgaattcctgaaacttcaaaagagtaataaagattggaacttgatccactctcctcgtatggcatcttccatctagcattataagattgaaatccatcttttataaacggaatgtactccttttcgtggttgccttctgttaccatccaaggtcttgcacttgcaagaggctgcacaagctcaccaaaagtgtcccaccttctctgtacataattagcatatgaaagatctccaggaagcaaatgcacatcatacttgcactggtcaatgtgttctaaggttgatttagtccagccagtttgacccaaatccccagccactgcgaaagtgatcggaaactgagctggaggggtcttgagctgaaactcctcaccatcacctccacaccggtaaaaataaacagtgccatgttccaaaggcccaataacagtgtggtgtatcgttccagaactatataacatataatcataagaggtactttccccttgagccacagatgtgtatctgcctggggatgttccatactcaaccagagaaggagcagatttatcatcagttatccacgtgattcgcatgtggttatctccagctaaagatatgtgtacctgaaattttcattttgtattgaaaaatatatcatagtaaacatttaccattaataaaccaagaaaaaacgtttgaatcaaatgcagtcttaatggttagccaggatgtcaataattcgagctccacaaatgagtgtcacagatataatcgggaactagtaagttaaaggggcattttaagatccaaagcctataaacttcctcttgcttcaaaggttcaaagttttagtcttatcatgtcattatacatttctgaaaccagacatgcttccatttttagtaataattattatttattgttggggtttgaattaacaggataatgttgttttttttttggtaccaagtacgaaatctctttctttacatgaaattcaattaacaagtaagcccaactcacatacaccaaaagaataccatacaaataggaacaagtaagcacatataaacaaaaaactagctacagcttttcttcatcaaaaacattattatttatcactactaattattaaagcagcacatataattattaaagaagattaccccagaatcaccacagattataagaatttaatgttcataagagaaaacccagcaaggaatcatcaaaatcagagagaaatcctatttttttttcccaagaaacgttgatttaaaaaaaaaaaaaa

SEQ ID NO: 20209 - DNA, 3802 bp, Cannabis sativa
  modified_base (175)..(177): a, c, t, g, unknown or other
  modified_base (367)..(367): a, c, t, g, unknown or other
tttaaaaaaagaggtaaaaaagataaactttaaaaaagagatttaaaatagaagaatactatataaaaagggtatagagtgtaattttgtctataaactacgtagatgctgctgggataataaaagggagatttacatggtatactaattttgccattttttttacaaaaatacnnncaggcggtatttttttttatttttttactgagtttttttataagtttcatactgcagtatattgtgttaagttttcactggtgttttttagttgtttaactgttgttttgagttgttctattttgtgttctactggtattttataaaaacatagtatttttgaaaacttttccgtgtaacagtatttttntaaaaattaactcaaatttcagtatttttataagtttcccaagattaagagtttctgtactactttcacattttagccaaaaagacattagaatggggaacttccctttgggtatatttggttaaaagtgttttcattttcaatcaaatactttctataccattataattctaattcatatttaaatttaattcaattctaattctatattaccagttgtattcaattaatgtttaatacatttaaaaagaaaaaagatatattctctcgtatccccttcttctactttctttcttcaatcattgtttcatttgttggaggtagatacaagatcgtattccatttttgtaaaatgtggtctcttagttaatagaaatatagttaaccacaactatataacctcgtgtgaatattagtacaattgtatttagtcatgatctttccttatttcacggtttataaattgtaaatctgttaagatactaatacatacaattacaacataatccatgacatctctagtttatagtatacatgctaaataagagtccatatataaatatttatacttaaattaatcatagcctttaatatcaaaatccaatggaaaatatatggttggttggtaggagagaatacagcaagagaagagaaagggaacaaagaacattgtgtgggatagctaaccatgcatttttaagtaataaaaataggagaaaagaaagtgaaaagaaagatttcatgataacatgccatcaaaatgagtacacttattggtagaacatattttttttttttttttgctgattaaaaaaaaagaagagagagggagagagagagaatacatactaatggtcttttttttttctgagaaaaatactatactaatggtcttggttgctttgaaaacaaatcaatgagttatttcaactatattttatgaaagctcttatatatttatttatttatttatttttatatccatatatactgtttgttgtgcataatcccaggacaccaatttcgagaattaataaacaaaagaaatttgggacaattggggttataatttggacacaatggaatcacaagaaaggactactaactcacattaatagttaattaaaatatatgtaatcctttgattagtatatatttgtatattaatgtattacaattgtatcacaaaacaaaagaaacaaacatatacaacttttgaattcatctatataatataaatacgtatatcttcttcttcttcttctctttcttttttttttcagaaaacagagaaattagtgaagaaaaaaaaaatactacgtaccccattccttactaacctcttacataaatatttatatttatagatcttgaaaatcagtcttcaaggatgatgatgatgatgtggtttgatctgatactgatgacgaagaagatcagaagaatgaaaataatcttttgatggtgccatagtcaagcaatattgagacccagtaattttgggtttattagcagttgggagtgaaactcttcttattatagtttcattattattattattattagtacctttgaacttgtgaagagcacaaccacaatatctatggtaaggccttcgatcaatctccatatcatgtaatgatatgcttccagcttcaaatacacaacataataacatttcagccatcgacatatttattaatatatatgtatcaataaacaattttattgtctacatatatatatatatatatagctatatgatatcaaagagagaggattacgtggaggttgaatagaggagtttgttcaatagtaggcaactgaaaaatgagagagagggtttaacaatcaacaaaggagattgagagtaggttggtttggattggcttgactatatatattatgccactattttatacaataatataaattataatatatatatttgttttgtacacatggatgactatcatgtcatggtatataaaaatttacttaattgttattttattttgatatatagggtttgttcaggaatcaggaatagccaaaggaatttctttgaatccaaattacgtatatgtctaaaatataattaaggatgctcattttattgtttaatatctcttgttaacacctttttgtggggccctgtatgtgtgtgtggtgtatttatatacgtatgtactatacaatagtaatacaaggggaggagggacctacatatgtttgctacaacagaaaattacttttacgtgacacttttttagtcacaatataatttttttgtgattaaatatgacttttaatataaacaaaaaattacttataactaaaacataatatttaaatacaacatatataagttgtcactaatttattaattttagtcacaacacttattgtgactattgtgactacaaacacatatttagtcacaataaattataatttttgtggctaatatttttagttgcagatcttttagtaataatataagaatgataatttatacttaatcagagttttttcacttttaatcacaagttttattgttgtagtagcagctaaaaaattgaaaaagaaataaatatatacatttattagttagttacgactagagatggaaatttatactgcggagatggataattgtagggacccgctcctgatggggtaggaatttcccatatatcttgcccctggggtggggattgatctccgtcttggtggttaatggagcgatggtagggaataatttcacccgaagcggggatgtggtggggcgatgataatactattcacaccatattcgacctcaatataaatatatatagtttcctttttatttttaacgtatatatagtatatatgtagtataattttgattgtcattcatgatcataattatatatatgcttaaattataaaaatctaatgacaatagggaactggtgatcattgtggattacaagtgtaaatatattttcttctcgattctgcttaatttcatttttgtttactttttaatttgtgggagacttgagaagtatgagactataatactatacttggcttatgatttttttttgttttgtttttttttttaaactttgagacagatttattttttagttctattgggttatgctgtctttttctttaactttgagagaggtttgtcttttatcttctacagactataaatgcataataaatatttgtgagaatattggtttaatttaaattttaaagttttttcaattattttaaattatttaattttttctattttgccttaatagatacctgacaaaggggtactttcctaccctaatagaatatataagaggaatgagctactcctcccatagccaattggttttgggatggaacctcattcatcttattcctcaaattctaacatggtat

SEQ ID NO: 20210 - DNA, 5691 bp, Cannabis sativa
agagatatattttgatattttttttaattaagtagttatattaagcatagaaattcaaatttgttatttcattattcgttattagatcaaaattagatggtttcaaatttttaaaattaatatttttagttaaatttgtttagtaaccattcatggttaatacccattaagaagtgttctatatagtataattgtgattatatttttgttcttatactatatatatactttttgaactattgatctatatgacttttaaaagttaagaatgtgtaaaattcatttctttctaggttattaaaatttctttcatgaaaaaaaaaaaaaaaaatctgacacccaattaaaaaaattaacaaccaatcaaaattaattttactttttattcttttaaaaaactaatttttaatcttcatcttctcatataacctattttttccatttccccaatgcacgcagctgaacttcacacttcaactgacccgtcaaatttagaattgctttcgttttttttcaacctgtagttcatacagtgcaggggactgtcacttatcgacggaggttgttgcagcaaacggaatgcaatctactagagcacaccagctccattaaatgaaaatcttcccaaaaacggaaagtcaaaatctatttaaacagacaatcaatccgttcaaatagatacagaaaacctagacaatgttttagcaaaattttcataaataaataagacaactttgacaacattaaatctcatagctgtacacggtttcttggtcaagaaatcagatcaaaaagaataaaatatgaataagagtttctttaaaaagcaaagaataaaatcaaatatgatataaaaggaaaacacatatttatttcaccaaagtcaaataggaataagatctgattttgaaaagtcttttcacacaagaaaatgaaaccatatttttgaaaataatgaataaatacataagaacaattttgaaaataccacaaatattattttttgtctattttatcaagtatgataataaaaaattttacaatctccccctttggcaatttgatagacaaaaataaactaaaaacctgcaacacgcatgttagagataagaaaagagaaaactcccctacaagcatgcataacttataacaaccatgaaaataaaacttaactccccctcaaaataagaaggtccagagttgcacaaatcaaaatataacaggtttttgagtctactctcccctttgtgtctttcaaagtagccaaagtaccaaaagcataaacgaaacaaatatgccaaacctaagactaatgaaagtatcaatgttcttgggaatggagaacaaaaagttaaaaaggacaagaaaaactaagcttctggggccttagacaaggctttgagagcatccaaaagtgaacgttagagtccttcaagattcataactcgatcagttaaggcatcaagagaagctcaaacaccacagagttcttctctgacagaagctgaagtagttggacgaagagcttctgcaggaaggtcatccgaagcaaatactagagattgagtcttggatttcttggatgatgaggcttcaacagtatcaagaattggtgcagaagccttgttagatgcagcagtggaaggagccaccaaatcctcttgctctatcttgagatcacttttctgcatactcaaaattttgtaaataacttgaggaaaaggaatattcatatttttcttgttacctttccgaaaactaatgatttggttaaagatgacagtggccaaatcaatatcatgtccagttccaaccttgtacaagaaagaagccatatcaaaagagatggttgcagtgtgagaagtcggtttccaatttgttgtagcaaacttgtgaagcacgacatacatgaaagtgagattggtgaccgagataacagaattttgaggccacaccatcttttgacccacaatctcataaagaacctcatccttgtcaacaggttcactctcctcttcatctggaatagcaagagaaggaagatgcaatgcttttgctacatcctatggagagaaagaaaaccaatgacctctcacaaacactttgcaaaacattttagagttagaatcaacaatttcattattggcatagaactctttaacaatcctatccacataaccagaaaaattagccaaagaacctacccattttctctcttgaagaatgttaagaacaccatatagacgttgatcattcaaaatataatttctttcaacaagaaattttctttgtgcataaataaccatgtctcgggcattatcattatagcaaaataacagagaatgagttttaaagtgtgcacctttcatctttggagaagatataggtccagtgactggtttcttgcctttaccctttaaagacaatggtgaagtgactggtgcaggggcaaccattgcttctggaacaggggcagcaacatcttcagactctgtttcatcagattctgattcaggatcagcaggagcaggaaaagattcattagactcatcaattttacaaaattattaaagctcacaattattttcttacttgttacattggtacaaaattactttattatcaactcaattaatgataaattgacaatatcccatccttttacagcaaaaaatgaaataaaaaacagtaagaaatgacgaactagaaataaaattagaccaaaattatgttatattatttatatattaaataaataatataatattgtaattaaaaattgttataagatatatttattaaatgaataatatatacattgtgtacataattttgtaacataagagattttacatatcatatagtataataaatatatagttgtaatattaaaggaattacattgtgaaatagaatcgtaataaataaatcaaactttaataatatgtaaatagtataattacatttggaggcatacaaaggaagtttctagccattagaaatggtcaaaataactattcatttcacatgtgaatgttagattggggaacatctcagagaggagatttaaagttccaaattggagctgaaaatacgaaccaggcgacatgtcgtctcttatttcatggagacaatttcatcatgtttcaacgtattttgagagttcgtatattttgttttaggtgacatgttgtctggtacaaggcgacatgtcgcctggagctctttctgagaaaaatgatgtgaaactgaaagcagccaatcgaagaggctgcaacctgatttgctttgggaatgggctcttcagtatgtgcgaggactaaagggtgagtctgagcctggttctcaggagtctcgaggtcaatagtctgtgaggctcactttcttattggcagttgttttcctgggccttttgaggggctccacgttgacatctgaggaagtttctgaggtagtcaaccttttctttcccttcttgctcgaagaatgaaggaggtcctcgagatccatttctgcgagacagaacaatgtgttaacatttgtttaaaaacaagtaaaaggggaaattgggaaattatttcccacctaagggatttaccataatcataagaagacgaagagagaggactataatattaactaaaatttctacatcctgtgatcctaaatatgtcgtatgaattaattggttctaaatcccagcttaaatatatatgacctgacctatccagcatggtcacatatttctcggctatcccatagtaggagttagtacaactaatttgaacgtgaaattctgggtactaactatcaaacctatgtgcaatgcgatctatgaggaagggattctaggtgtataaattatactggctatctcaaaaagaaactaatatggtaagctcggccctaagcactgtgggtgaccatccacattgattacctcgggatgctccttcttcggcttcccaagggactgggttctgaaggtagtgcgcccaagctgcataatcctgagtttcctcatctgctgggaccagaacctgctgccacgatgcatacttgggatctttgtaatcactagtatactcgttctcagcgaggaggcccacggacctcaagttgacctcgttcaaaaggaactctactaattagagaccgtagggaagacccagcaagtgcctgcgtcgcttggccatctcgaggataggagttggtcttttcgagaccactgtcgaaataataagattacaagtcagtggagctaaaattgaaaacatggaataatttaaaactaagtttaaggcaaatagtcacttacatattatgcggaaggtggttgtattgattggggagaggtcagtcatccaaaagaggtcctctttgaaatgggttttgtttggcaaccccacaatgatcttacgatcgcctatgtgagtctcaagataataaaaacctcctgcagcattcttcctcgcaggaacagccttaacagagtggagatacactatttccagaggagtggggcactcccatcctaaaattttgtacaaaacctttaaacttgcaaggattctatatgaaataggaatcaactgcaatggggtaattctaagatggtataggaagtccttatagtaatctcatagggggataattgctctagccctgatgtgttcgaggctccaatatccatgttgtgccactcgcactcgcctcgccactggtcccctcaggtgctttgcgagtgagttgttctggtgggtagcaactaaactcgccaggggctacaaatctaacccgacattttcgcttttggtcaatgcaacaagtccataagatgccacctacataatctccgatggctcataccctcgactcgataagttcagccttgaaggtaacattagggtcctggagagtcttttatttacgaggcttggaagtcaagatttcaaaatcctgggcacctggtgaaaaagcaatcgtgactctgggtaaaaataaaggcctaaccaatggaatagatggtaaactatgggattcaggccaagcagcatctcgcaagaaacgacgtttgccttctgttatttcttgcaagaagcacttgtggcgactagtaatatcatcttggtgggtttttactaggtggtccctaatttttgcatcatttatctctaatttagactggggttttgaaattctgggtttaaacgggatggcaagttcactggggcactctctttctaaaatttctagacgataaacttttgaaccagattgggacattgttacaaaaagaaagaaatctcgattcctagatgaaatttatcaaaccaaaagcttgtaaatttgagaaacccaaaagtctacgctctgcctaaaccctaaaatttacccaaaaaaagctcaacctaaaatcgctaaaatcaaataagatgacaaaggtgcaaaagaagaggaatttaaccctaattaaacaactgttattcattgaataagcccaatactaattggacctaaataaaatctatcaaatgtgataattttattttagcaacctagtccattttaatcatcaaattaaatgggttccctatattcatctaggcccaaagcaacatataggcacagacacacattgatttggatggatcctatcatgttaccaggtttatacacagatgaaagaag

SEQ ID NO: 20211 - DNA, 3672 bp, Cannabis sativa
aagccccattactaaaaacatttcccaaattcaatggttcaatcaaattagatatcttttgctctatgattaagaagagattcactactcattatcgatcactacttatttattaaataaattaatatcttgattgatagtataatttttggagcaaataattttaggggaagaaaataggagaaaagtatgttatattataaaggcataaaaacaacgtggtaaatgaaatgtatttgtatataaatagatgcaataatagtgatactgtccattaagctaggcaccttcgtcccaaaagtaaaatattgattataaaacacttcatatagagtgaaccgaccactacccaagtccctctcttttatttattatttatttttagccacttatatatacatgacataatgtgagttgtaactttcttaaactagtacggattttggtagtcaaatgatacaattcgtcactcgtttttggttgtttatgagtttagaaataaatatgcaaaacgagtcacacgtttttggtcatattttataaaagtataatagtacttaaattagtgcaacatcattaacttatctcatatataatgtggaaaaaaaaaaaaaaaaagaaggaatagttataagtgccacacacaaattctgataattgtaagttacattattattaacaagacttgttttaaataaataaaaaaaattattatatatagggagtgaattttgtccggtaattaatctaatagttgttaatcatagggagcccaatatatatatcaattttgtgtataattattgtgcacttattattataacaatatcatgtgtcactattgatgactacgaacccatcttctttagtcattgcttcttttttggaattattggggttaagagtttgaaattgagatttgcctaactaacgtactatatgggactgtgataacttcttcagtcaatctttctcagattatttatggaatgacccaacttttggtatagggtagctagctttactgattagaaactgtatcatggtcctacttgtagtactagttcaactacatccatttcttgattgaaaacccacttcagatttgataggtttgaaaattttataagcttttctaatctcacaccggcctaatgatcttccgaccactttatgtggctgatttatatatatgcaagttcacattgtttaagtgttagctagagttgcattaatatataacatggattagcatatttgtattaattatggaccgtatttgtatggtgaaaggagttcatgtcactcgtgaccactcctcacatttgtaagaaagagattaaagattttgtggccatgaaaactttccaaatcaaatagagaagatagtacaaacaaaaatgtatagattttggaccctaaagtttagaactaaggccatctccaatgggattttaaaaacccaaatatgatgtaattttttcaataaaagtctccaacccaatactaataatagtgggcaccgtaaacaactgcattttacttttttttttttttttgtactttttaataattaaataatcctttttaaaaaataaataattatataataatctaatttattaattaaataatataatactttttagtgtaatttttagtgtaatttataatgtaatgacatattttagcatttttgtaaacaaaatacttctctgatagtgaattaaaaaacatttatgccaaattagcataagatagtattgtgtggcatagtaatgaacacacaatttgatttacaatattaacattcaatattaataagcgactaatatattttcaaattacaattttgacattattattttttaaataaccaaaacttagactgctagagattatcattttcatgtaatttactattgtattacatgaaaatatagttagattattaatgtatattaagtgaagtttacgacgtttgtcccaaattgatgtaaatataggtcaaattttttgacatgctatgaaagcgcaggagtctaaaaagcacgaacatgacataaggtgatatactcttttgcaaagtacacgatattgcatattggcatgatagacacaaaaatatgtgatttagcacgacacgataagcctaaaaaaataacacataatcacaaacaaactaatcgtgagtatgacacgttgaaaagtcttataatttgatgataataataataattattaatatttattcataaactatatataaattaatgataataaaaattaaaatataacactaactcttataattttataattaaaactattaaaatataaaattaaaactgcatattagtttattttaagagttgtgagttaaaaatttgagcatttatgagtaaatattcacattctaataattataattatttttataagattttgtgtaaaatatattgctcaaaaattatacaaaaataattaaacctatatatatattaaaaaaaatactcatacttcagtatagttagctcattattattattttttaaaataaaataaaaaagtagaacatgaatttgaacctgtataagaaaacatgttgaattttttgagaaaaataggtcagcccgaataaagtacaataattcaaatacaacacaacaatacaaggcctatagatcgtgtcagatcgatctatcctataaaaagttagcatgacacaatactacacaacccatatatatatatactagataatattatatatatataatgcacgtatacttagttatattcttaatttttattttaattaagtatattttttgttgtatttgtttagaaaagctatagaaagattttggtttttagtttttttttttttacaataagtaataaagtcaaatatcataaatattttctctattttattatttttttaaaaaatattagtaggataggaaaatatttttttgagatatgtacagtaagtttaaacaaaaattaataataaaaatatgtttttaaatatgttaaaaaaataataataggaagatatttataagtccagtaatattatttagaaattattacatggaaaagacaaattaacactttatttacaaaaatactttcataaggtgtggacaatatttatattttttatgtgctagcttttaattaccaaaatacatcttacactaccacttacacaatcagatgatggttgctgggcggttgtccgaaagttgcattagacgaaggtttcaatcagacaaaggttgctaggtggttattgagtggttggctgaaggttgcattagacgaaggtttcaattaggcgaaggtttcaatcagacgaagattgctaggtggttgttgggtggttggccgaaggttgcatcagatgaaggtttcaattaaacgaaagttgatgggtggttggccgaaggttgtatcaaacgaaggtttcaatcagacgaaataactgttagtaaaatgtttatgcaactataatgtaactgttatgaaacattaaaaattagaacggtgtttccacgtacgtaactccatttacatgtcttttcataatttaatatgaacaaattcatcattagaaatttagaaaacaacgaaaatacacaaggataaatattttactatagt

SEQ ID NO: 20212 - DNA, 9152 bp, Cannabis sativa
  modified_base (31)..(73): a, c, t, g, unknown or other
  modified_base (8773)..(8777): a, c, t, g, unknown or other
tatgtgtttctttcattgttttagaattcannnnnnnnnnnnnnnnnnnnnnnnnnnnnnnnnnnnnnnnnnnctggtaaaatatatccaacacttcaaactcacacctgttaagtttcttctctaaggacatcaaaagatcaaacattgaaccttctcccataatgtcacacttcttgtaccaaggaatgagtttccaaatctttttgactttgtcacaactccataatgcatgagtaagagtttcagcatggttttcacaaagatcacatcaggggcttacatccatacctctatgaatcaagtttgtctttgctggtagccaattgtgacaaactctccacccgaaaagcttcatctgaggaggcagctgcaggctccaaatcattttccgccatttattaacttcttccatgtttgaacatctagtggggtgaagatttatctcccttccaactctatagccacttttaacaatgtattcaccatttggagtgtagggccaagttaaagtatcttctatgtataagtctattggaattccttgtatccatgggatgtcttccttatgaaaatgctttgtgatctcctccatattccaatttccatcccaagttataaaattatgaagcttggtctgtggtggaaggccgggatgttgtgtgagcattgccccatgaggccgtggtagccatttttcctcccaaacccggatctctctaccatttccaaccctccatctagccccttccttcagaatcttcctaccccaacaaattcctttccacacacaagaagccccggtaggacagcccgcttccatgaaggaagttagaggatagtaactattcttcaggacccgagaaagaagagattgtggattagggatgagtctccactcttgtttggccaaaagagcttggttgaatttagttaagctccagaacccaaggcctccttcctccttaggcttgcacaacttgtcccaagtactccaatggagtttcttattgtctttggtatcccccgaccaaaaattagctgccaaggaatggagatttttgatgagcttcttggggagacagaaacaactcatggcatagctcggaatagctggtacaactgctttaatcagaatttcccgaccggcttgagagaacatcgaagttttccaccctttaagtttactccaaactttatccttaataacttcaaagacctcttttttccttcgccccacaaagcttcaaagccccaaatatttagcatggtgagaaacaaggcgcacccccaaactatttgctaactcctgaccctgaatggaagaaatgctcttgcccatactcacctctgatttatcaagattgatttgttgacacgaaagccttgagtatttttgcaatatgatcttcatggtgtcacattcttccttcttcgcatcaaggaatacaaagctgtcatctgcaaagaataaatgagagactttgatcctatcattcctgaattgcaccccattgatgcttccagccctctcggcttcatggataaggcaagagaggccttccgaacaaagtaagaaaagatatggagatagtgaatcaccttggtgaagaccccgggtaggttgaaagtttccaagtttctccccattaataaggaccgagaatgatacactttccacgcatctcatgattttctcaacccactgttcctcatacccaagtcccctcatcattgttcttaagaagttccattccactctatcataagccttggacatgtccaactttagagccattttcctcccatttcaaaacctttttgttttcatacagtgaaggctttcaaaaccaattatggcattgtcttgaatgagcctacctctgaaaaaagcactttgttcctccgagattgcttgctgcatactttgtttcatccggccggcaagacatttcaccacaattttatacaccacattgcagagacttattggtctaaaatctgacattcgagttggctttgggacctttggaataaggaaaatgagtgtatcattgatgtccttcacttgcatcccttcattgagaattccaagacaaacttttgacacctcagggcctataatggaccaatatttcctataaaatagaccaggcaaaccatcgctaccaggtgctttttgaggatgaatggctcgcattgctttgaaaacctcctccgttgtgaatggctccaaaaggtagtcattagtggttcgagatatgcggtttgggacaatccattgaaagtcttctaattcctcttgagtagcctgattagaagtgaataacttcataaagtaattgtaagccaccttaccaatgtttctattcccagtaacccaatgtagccgatcatcaaccaaccctttaatggtattctttgccttcctattacttgcctttctgtggaaaaattttgtattcttgtccccttctttcagccataaagctctacttcttttccaaaatttctcttctttatcaagccaaacattttgtttccgttccaactcctgcatttgttgccagtcagtctctttagtgctacgggaaagcagagaaattttatctgcacactcctttagatgccttgtcatttttttcctcttggatttattccattgttgaagagccaccccacaacttcccagcctattttttagctccagtgtatgcacaatcagcttatcctgttgcaaaaccgaatgcacaatttttgtacaatcttcatcatctgcccaagcgctctcaaagtggaatctagttcgccatctaatcgcattgttcatccttgaaaccggttcattttctgttaaaagtagagggcagtgatcggagttagtacgatccagatgactaacttttgctgcaggaaacatgtcgaaccattcagagttaccacatacccgatccaatctctcaaaaatgagattatttttccttccattacaccaagtataatcactaccctcaaatcccatgtcccgcaattgacaaaagtccaatgccttcctgaaattattaatgagataacccgatttggtggggcctcccattttctctttttggttcagaatttcattgcaatccccacccacagcccacaatcctacatacattctgcttattctttcaagagtttccaagagtgaattcgttggcttggatctggatccctatagaagccagtaaaacgccaccattgcccttcctccatcctattgaaagaatcaatatggaatggagaaaaagaaaggacatgggtttccacatccatacaccacatcaaaagaagacccccacttttcccacaagcttccaccgcaaagcacccaacaaaccccagcttgacccgcaaaccttccgcacgaactttattaactttggattctgaaatgaaaatcattctaggagtgtactgattcaccagggaagttaaagaacgcaccgtccaagggttccccaacccttgggcattccaaatcaagagattcatggttgtaggcgaccctgaatttcagggttcgcctcttccatgttcttagtaacttccaaatcccccatgtgagaaattccagctactttgccttccatctttcctttcttggccttggattctttcttcaccgctaccttcctcctattttcttttgctaggtctttcgagccacttcccaccgcaaaggttgtagatccctccaatacttgggcttcttgtgaataggaaattgggatattgaagagatcatgctcctgaaattctttggacaaaacagtggtcgatttttttagcttcccgtatcctgaatcaccatagtcctccactatccgacgttttcccctacttccatcatcactcctaatttgattctccccaatctctatgtcccctgactgcataccactcattcttggcaaagaaattgatcccccttctatgctttgcttcaagtgatcttgtttggctttactttcgtctcgcatattcgtaacccctattcttgtatctcccaaagaactaagagcagtagcagctgtaggagtcttctctaaaccaatagccggctgctttatagtgtcctcgagactactttgttgttccattccttgtttttttaccttttaccccttctcagaccccattatccaccttcaaccatatcccatatgcatcagtaacttcatttccatcctcagagatagtgataggatcttggtgacaatctttatggctatgcccaattcttccacacttaaaacacatgaatggcaactcatcatatttgaacgcaatccacttcttctttcccgaacatgggagagggaaacctagacacaccggcttgtcaatcgacatccagacccggaatcaaaagaacccatatgctgccatctttgcaacatctgaattgtgcactataataacctcccctgccttagctaccattcgaactatattgtttatggtcaagagatcgattggcactccatacgcccgaccccagattgggaagctagtcaaatcatgtttccaagattcattagagttttccattttctccccaaaattaacacctcatttggtaaataccatggcattttagataaaactctgctttgaattgactcagatgcaaatgtaaaagttaagaaaagacctgaatcgaacttctctttaatcttgagattccattctacatccttcaatcgccatattcctcccagcactttcttgagaaatccccggctgtgatccgagttcgtgcatagacggcccctcaagttggttttggcaaccgtaatagacaaactcttgtcaacttcccattcttcatcttcatcggtgacctgaagattatgggtcttctgcagtagttcatccatggtggaggtgagcaccccaaaccctacaaccgggaacccttcgaagacgagggaagaaacagagaccaaccctagcagagcaacccgcgaaaatattcttttttagtattcctttgaaagattattttttataaagatatttttcaaaaataaattatagtgttaacatataaatgatagtgttattgtgattttagcaaatgcataatggatataatatttagatttaacatggaattatattccctttcgttaacaaattttatttactttttcctctgtgtttgttataggtagttaattcgagatagttgtgaaagattaatacatgacagattttaaaagaatgtgtggatatttagtaagtgaattccatacatgctccctagtagttttgttaaaaaaaattgtgaggatgaaacacgcacattatttattgtatatggtaaataaaatatatatattttatagaaatacttgacgcactattaatttataaagttattaattttaatttttttctatcagattactaagagaaatgtcgtgcgctctaaccttatttcacaagaaagtttttcctcaacctttatgtaatttttgcggcaataatagtgaatctgtatcccatgctcttattgattgtaccagagctcgccatatatggaagcacacaaaattcaaaaatttctacaatgaccatcgacattatgatattaaggattattaacttcaagcactgcaactactttccatggaagatctttctcattttgttagcatactctggcatatttggaataccaggaattctactttatttagaaattctcctgaacctaacaatgtggaagattttatttgtaactactttatagggcggctcaaagcctgccttctcatgaagtttcccactcagcctctcatcagcatcttcgaccgtctagccacgaaatcatccaggaagacactcctgccttgtatgttgatgcagctcttgatccagaccgaggcgttacaggacttggccttgtttttaagattggctctcaatgcattattgatatagccaaaattcataaaccaggaccttcctctcccatctttgccaaggcccaagccctgttccatggtctctcttggtgtctttcatcccagctaatgccaaattgtatcttttcggattgcctaaacttagtctcaaaggtcaatagcaattggaaagataattcagccctttcaagccttgttgctcagatcaggatctccttctcaagcttccctggtgtttcctttcttcacttaccgcgccaaatcaacacaaccgctcactccctagcaaaggaggccatcagaatgagagaggatgataatgaggattcgttttagtctcctctgtttgttgcatttttagacttgttttgttctttttgtagcttgttcttctaaaaaaaaaactacattaaagcaaagaatagttatagtttaactatttgggttgattttcttttttccgattctaatatttagtagctagaagtcatattattgaagcaaatacacatatctatccagtctagtccaatctaatttataataagtacattatgtatatataaaagaaacaaatgttcaaaagtattttacagggaaagttcaaaatgaaggcaaatagaaaaaacatatagacttgatgaatatatctatttaacagacccatgaacaacaactataatcttgttattttcatggagtatcctgttaaaattgcatttctaaaagaataaaatactattttacatattaaaacaaaaatctatttgagaaaacaaagccaaaagagatttaatacaattagattttttacttttgagatttttttttttgaaaaatacttttgagattaaatccacttatgagaataaaaacaggactcattttaaactaacataattaaaatctaatgaatcactaaaatgaatcaaatgaatctaaaaattagtaaaatcaaatcaaaatgatatattgaaaagaataaaaccagaactattaacttggaaactagccctaagggtgcagacatcaatgttttacatgtggcaagaaagatgacatcttagagttgagtagtcctgagtcatagcatgttgacctgggaggggtccttagccttgtgccaagttgacttcgagaactccagaataaaagttcagacatcaagaacttgaatctgacccactatctttcagtattcaataccataaagacatggagcaacctattacaaggtctaggagctaaaattacatgaacctgcaatccagaagccaacctgggcacctagggtttcacctggagcccaagttgatatcctcaacaaggatttcagttttgcgaccatcttagtgaaaattagacaaaaaatgcattaagacatcaactagacataccacagacatgtttgaggcatcagaatcaaattcagagtaagttggtttttgagcacccagcgctcaggttgacaatttcttaatctaggccacaaaaaatggagttttcccagaattcattcaaacatcatatccatcttcaaaaaatattgagaattaactagttctgtggaccaaatggaactttgaaggggcagaagggtgacccgacacctaggttgacacttgggactggccctgcgctcaggttgacaatctggtctgcttccaaattagttcagcaaaaaatgctcttgatatcttcaccgtcataaaaaataacaaagattcaagtaaattcaagaagaaaagatcaaacccatgtccgtggaaacagggaagagcgcccaggttgacctggtgttgggcctagcacccaggttaacaatcaacctgggaagttgccgttaaatgcttgaatgaaaacattgatgcaactattaactccaacatggtccgaaatggggggagataccccgtcctcatgttcagaatccttgaaagtgtaacaccttactagtttaggcatgttaacatgatttttaaattaactgtgcagcttgttgctaatcaacgagtttattgaaaattgtgattaattaaaaatttactttattaattaccaacactaaaataatatacttatattaaaccaggatcccgttttacaaaatatttacaactatttcaaagtgcaagtcacaaaagtttgtcacctagcgactacacacaataagccatgttgtcccaaagattatatgctccaggccaaactgccccgacatgtacaatcttcatctgctcgctctcacggctactcaaccttatccttgcccttacctacgcatgcaaacaatatctgtgagtcaacagactcaataagaaaagcataaataataacgtaacattaacctggatcataatcaagcgcccatacacccaaccataaccctaactaagtcaggaacgttctcgacaaggtatgactaactgcgaatccaccctatactcagtactatcgtggtactgatgtggtaacagctagttcatactatctgatagcctagcatatatctgttggcatctcggtgaaactctatgtacacctcactgatgccctaatatgttaatctgatggctatagatttgcctattctgacggaaactaacatgtacgctaaacatgtatacatatatgcaaccattatactaatcttacctcgtttcagaattcaggtgtgtcggccaacatgagtggaacagctgctcgacgaattacaggcccctaaatcacattatttgtacaactggtgagtgacacactaaattactttccgaggacttaaacttgaaactaannnnntccctatcgataaataacatggaaataccctaaaatcaaggaatccaccaactaaggctctaaaacacacacgaatcgacaacaagaaaaactcaagaaaccagtttaagatctggttaactgattttacagggcctgtgaaaccggttaaccggtttgcaccaggtaacccaaattaattcgaaaccttgtccaattcgtatccaaaccataccaaacctgcttaatataccccaaagaaaaaatttcaagcaacaaaacaacctaacaagctcataatctaaaattgccattaaagacaaaagttagagttctaaaactcaaactttgtctaaccaccacaacaagccctaaaattgttgggttttgtgccct

SEQ ID NO: 20213 - DNA, 3301 bp, Cannabis sativa
ataatatgttgatgagtgttatcgtcaatcttttattttaacttttaagtcaatctttatacctgaaaacacaaatcattttttttttatttatctttttgatattcattatagttacaatattaataatcatgtaaacttttaaaaagattagaatagtttacagtagcgacaacaaagttactgatattttggtttaccatgtttattcaaaaatattcaaatatgttttcagtactgtaacttattcaaaaaatatttaaaaatttacagagttaatattgtaactataacgaactctgttaccaaaaaaatattcttatgtgttttcaaatatggatgttaacatagagattgtaataaaataaaaggttctaattgctaattactccccaattatgttagatgaattgttatgattttttcacaaaatattattgttatgaaaggtgtttgaaatgttattttaccaaacactctttaagcatattcattttaaagtttggagtggaaatatgaaaaggatagagtatttctacagtgcaccccctaaaagagatttactaatgcacttcttatctgttttagcatctaacataattttttagttatttaagatatcctgtaaaattttgagagactagaaaaaattttacacgtcgaaaataggattcaaacagtctgttacacgcaagactcttttattttatacgtgtgtgaaatagactctttgaaccatatttttggcgtgttaaatttttttaaatttcttataataattttgcatgatgtcctatattactacaacttaaacgactatgaaaaaattagactaaaaaattctttcaaatatcgaaatacataagaggtgcatgagtgaactttttttagatgtacattatagaatttttgaaaaggatattatttagttaacttattattaattattgattaattgtaaactacacaggttagcaaagtaattgaaaaagtagaaaccatgaaagacaaagcccaaggctcactctctggagttgtcaatgtggcccagaaagctaccgatgttgtcaaggaatttaccggagatgatgattaaatcacaaaagtgaaactaaaatttttatttttgaaaaataaaaatgttatacaactacttattttttttaattttaaaaacaaaaaataaaagtgtgttatgtaaatttaattttaatttgttgattgtatttaagtcgtgtccaatagtccaggtttaggtctgaggttggggttcgagttcgagatcggggttcgaggtttgggcctgggttcaagtctgaggtccagggtcggagtcgtggtctgaatctaggtccgtgttagggtttgggactaagatccaggtccaagttaaggtctggggtctagctaggtctcgggttcgggtttcgagttcgggtccgggtccagggccgagacctaggttcaggtctagggtccaaatcttggtcttgaggtcaaggttgaggtcagagtccaaataacatacccaaaatttttaaaaatgtgactctcaattaaaaaattgaaaaaataaaaataatttatagaacatgtttttttgataatattttcactttctttttttttttgaaagaaatattttcacttttttaattacaaaagtaaaaataattaattaaaaaagtgttaccaagcacacccaaaaattttaaaattttgattctcaattaaaaaattaaacagtgaaaataattttataaatgtttttgaaaaatatttatttattactttgaagagataaagttctagctagtctagttaattagcaattggagagtattatttgaactctaaaacttataaaaggacttattttaataatttttattgaatataaaatacatatctttattttatactaatttttttcttcccatattctttcttttttccaaataatttcttcaaaaatacttataatacatttcaaatattaagacaaaaaaaaaaaaaaaaaactacatgaaattttattggaaaaaaaaatatgtagattatttttaaaaaaaaaattataaaataattatttaagtcaacacaaaataatatgaaaataaaaatatattagtacttttattgaaaggtaaattagaaaattttacaagcttacatccactacaataaaaaatatcatgaggttacaaatttcctaaaattcttttaaaagctaaatttttaaacgagactccgaaatatggcccaaacaatagcgtcacaaataaaaactaaaagaaggagacaaaccaaaagaagataaatcaacaataggaactgcaaatagtgataacatcagttcatccaaaatatgtaatctttcctggcctgcggtcagtctcaatcagcttttaagactatagatcctgcacatgacaataagtagaaaaaaaaaatactgaataaccagaatcacacaatttaccaatagatatggtgtgatgcatatgacaagcacaaatgatgtaggactcaaaaaaacaaaggatgtagaatgcgaagagatatggtgtgatgcactagagttcaaaactcatgtagaaggtgacatacttgaactgttagcatcttagcctcttaagtctttttttttttttttttttgagaaaaggcgtagttatatatattaaaagatattagacctctcggtcattacataaaatgttctccgataaagagtcaatcggaatagatccgtatattagcctcttaagtcttaagctctagagcatatgcaaacatcaagttgattaagctgggccaaactggttttgatcatttctgtgagaaatgacattactattacttattttttatatttatatgctttgtatttataaacaatttattgttttcatatttttagtttgttttctaactatacatattagaacatttattttagagatttttacaccacatactaaaaattttaacttttttacttttttattgtgagacggattttattcaaaaatactgtgtgagttttatactgtgtactgtgttaagtttttacgattgttccacggttattttaattattctattttgttgttttgcggttgttttataaaaaatagtatttttataaaaaattccgtgtaatagtaaaattatacttttacctaaaatttagtatttttgtaaaacttctttgttttaacacttaacagtgccctaaatctgcattgggccggcccaatactgaagcccaactcaagcaaacacgtttccctttgat

SEQ ID NO: 20214 - DNA, 5176 bp, Cannabis sativa
tttttttaccgttaaaaattaacagttttacttcctaaaatttgagtcctatgttgtcgaaattagaatatataaaatttatgaactatttaactcattgccaattaatttttttttttttaagatgaaaatagccactctcatgctaaattctaacaagtcttatatattgttgctttaattattttggaagaatttactatatatatggagaattattttttttatatatttattactgtttgctaatatatatatatattgaaagataatatatatctatttctatttttatattactatagtgctagtgctactatatatggcatgaagatcctgaattggaatattgatatttacatatatatatctcccctttttggggcagtagagtatgtagtactaaaaaataatatgaagacatttgataaagttgtgtatgaatattgaaacttgaaatgcaatgacatttcccttttggcttcccatgatctaatgtctcttcttatatatccatattcctttaattcccacacacaaatatatactttcaaaattcaaaactactttatttattagtttttaacacattatattataaaaataatacataatgtttttaactttttattgggccccgtacgtatagaaataataatatctactattatatattatttaattaatctttttctgagtcgatttaattaatctttttacttactgcttaattaaacccctctcaaaaaagaaaaagtccataaaaaattaataataatattataataataagatatagacatgtgcagaaattacaagcatatatagttatagaaacctaaccataagatgctgtcttaattatgatacgttttaagttcaacaatatacacatatcaatctttttacaatatataaacacacccattatatatattaagtctctttcattatttttggttttatactaaaaataacataacaatactatatatatacatacatataatgtaatcatatcaacttaattaataattaatagtataataagatgcttaagcacatgggactatatatatgaaagcatatattcatgtggcgactaagtaaaaggtcagttttatcattgtgtacccttatttggtcaaacatataccatttttttaacattaacattaattaattaattaattaataatgttacgagtttgaaactgatcactatattagtttggaaagaagatgaagcatatagtatgattaatgcatataaatggaaatcgagagagactagatattttgattattaatattaattaattatatttgatattattaattaggtatatgttttatgcactaaaacagggagctgttataagaacaggtgactgaaataaatattaaagttcctttagatatattgttgtaaacatttcttgattgccatctataattaattgatcttaattatagccagtttaattatttgaggttcttcaacactttattaacgaataaagtttattttttaattatccataattcggtgatatatatatataaatatatatatagtgtctactttgatttatgttgtagaattttgacacatgatatcaaataattgtagttcatcataaacatatatattcaaattataaatactgaaattatatccgtatcaggtttcaattgtatatatttgattaattattattaattcatctcaaaataattaaaccaaaaattaagagtgtaagtttttgatcaatttttgtttatttgctttgtattacttaataaaattaaatttgtttttcattgatttagaacttcattactgttaaagaccccataaatatatcatcgtgataataattataaatttttatagaggcgtcacaatatttgtcttgtcgcctataataatgtacaattaaaaaaaatgttaataattgaaacaccaatgtagcgtttataaatattatattattattagtgtaattaaatatataacaaattgctcactattggcaaagcatgcaacatgtaaatattgtgcattactagtagtgtaccacctaattatatcaatactttaagtatcaaaattgaattattactaaggaacaaggaaatacacttcatgatttttgattcgtgttatttcaaatcacgaaatattttcaatgagtagtactatatattattttaaaatgttgatttttccacaaatagggtagtcccttaaaacacactttatgtatatatatttttataaatccattcccccaaaaataaaataaaaatgaagtgagagaccaaaagtcatgacaattaatttgggtcccttagttgagctctgaaaatgtatgtccaaactctttaaaaacagcattaccccaacttgcgcgttgtgtagcccccaaacacattacaaataatttaattaacctagcaacttggcctatattaatgtctacactttattttatttttaataattatatataactaaaattaaattaaaattctctataatccctattatgtatggataatgcaaaaggaatcatgcgagaggaaagtataaatattttacttattatttatttttcccaaattaattttttattatatgtgctactttttctttattttgttcgtactaaccaaaatattaaaacatggaggatcatgaggacaagaataattaagactacattaggaaaaacaataaatgtttatatcaatattttcaaacatgggaatgtacgtacattatgaaaaattcaattaattaggaaatatatcatggtgagatgggttgatttccagatttgtgaaatttatatggtttgatttatagtgacgttcgtactatatatctaattattaataattaatctcatctatcgttttcactatatgcaaaataatatgaaacacatttaaaatgacgtttgtacaaccacgagctctgtctcatacttccaaaaaaagatatgcatgcaagaataatagaagagataataatccatatatatagttgagcaattacttacgattctctagaaaaaattataacaaaaaatatatagttatatatatacgaattaattaatgtactatatatcaatagttaattaatcatgcatgtacgtatcatctttcatatatattgtttgtgacaaacctacatagctagctaatatttcctaaccattatataatatattatcattgtcaatataatataatcgtgattaattatgacatcatcgtatacttttccgttttttttttataattatttcgatatatatatagttaacaattaatagttactaattgatgatgaaaaaaaatattattatatgtacataatcttttattatcaagctggcttggcttaggtatttatagtcatctattttacgtggaatatatacatgtaactacgttataaatatataataaattaatatatatctggcccccaaaaacagaatacgatatcgatcgatgggtgcactgatcaaggttttagaatttatataagtacattttgttgattcgcaatgtatatgaaggggctttcgtggggtccattattattattattattgttagaattattattagaattaacgagtatttcactgaatccagaaaaaaaattaattttaactctagaatattaattagaagggtttattccctatacaattggtttcctatgatcagcaatgcatttcacaatataaattctataaatgagaaaatatatatgatttatataaataatgtataattatatataataattataacaagcaatcatgatcaagatataaaattatatatgggaaacagagagatccatcatatataatgcctccccacccacgtaccccacgataaatagtgaaagtacatatatagtgttacatatatatacatacatgtgtatatagttcattcatacacacaaattatatatatatatctatatatatatatatgcgcatcacatactagactaccgtgttggcaagggtacactaagataagccctggccagcaacgttattactatatatataatttgaatatatgtatgtatacatatataacatataaataaatgtatcccccacaataaggcaaaatcacatggcatgtaccattaatattagtcagttaatcggagggtgtagatgaaatctgacccaatcagaaatagaacacagccttaggatctgtccccatatccaacttatggtgccggcctttattagtgttttttattttatttttgatttttggggcaaatagtccctacatttgcctctcatgtgaccgaccactaaaccatatttgacctgtaattgctcacactttgtcctctctctctctctctattctccaatatatatgactctaactacaaaccctttttctcaatttcattcatattactattattattattactcatctctcaagttctcaacacacacaaaattgaaaaaaaggaacttaatataacaaaactatctatattatttgtgatcaacaatatgggagaagaagatcaaggtctagggcttgaaataactgagttgagactaggtctcccgggagcgatgagggcggggtcgaataagagggtgttttcggagatggtgggcgaaggaggaggaggatcagaagaggagaagaagataagagatggtgatgaggaaaagaacaagaagaagaagatgatgatgatgatgatgaaagtggaagaagatcatcaagtgagtggtggtgttgtggggtggcctccagtgtgttcttataggaagaagaataataataattgtgtagtgaacgtgaaagtgagcatggatggtgctccttttcttcgtaaattagatttgagtaccatgcataacaagggtggttattctcatcttgcccttgccttggaaaatctctttggctgttttggcataggtaattattactaatattaatctattaataattttctttaatatatatatcttaattaattgttattaagtagtcgatcatggatatatataaacattaattatgtgaacatatgttaactttcatacaagatgtatgtatatatataggactacaagatagtaaattt

SEQ ID NO: 20215 - DNA, 4519 bp, Cannabis sativa
  modified_base (160)..(161): a, c, t, g, unknown or other
ataaatatattacataaaacttattcaatgcataagtaaactttattgctaattatcatgtcagtgtaaattcagtgtactgacaaatcatgggatataaactttgaaacatataatcattattatattctactgtattgacaatactataatcatgaannactatatgttctagatttaatagaatttatacattaaacatataatcatgaaagcaatcatgtgaaccatgcaacataaaataatttttgatcttttattaattaataaatatgattatattgaaataggttttatttaaggcataaaatcccaacggttgtaactatggaacaatgctttatattctaagagctgatgaaccaattgtgtttaataacgaatttatcctacccaagctgttttttttccggggaggaattttcaggataacaatgtgtttattcaagaaatatcattcactccttcaacaagaagaaaggaaaagagggttgttttgccattaaaattgaccttatgaaagcttatgacaaattgagttggaaatttattgaccatgtgcttgatggtttgggggtgccgcaaaagtttaaagggtggatatctcagtgtatcactactacttccctcaatatttgcctaaatagaggtcaatttggtaagattacgccctcgtgtggccttcgtcaaggcggccccttatctccttacttatttatctgggctacggaaattttgtcaagacttttggtagacgcccaatgtaaggaaaatatcaagggtatcaaactcagtaggggaggccccataatcacattttctttgcggatgatttacttttggttggaaaagcgaacttggaagaagttaaaggctattggcagtgcattgagaagttttgcgattggtcgggccaacaagtcaacaaactcaaaacttcgatcttcttcagtaaaaacactcccaatggcatgaaggaggaatcaagtctcagctattgggtcctcagatggcaacattaaataccttgggttacctctctttcggtccagacaaaaggatgctgacttcaatttcattcttaaaaacctcacgtctaagcttcagggttggaaagctaagacactatctaaagccaaccgtgctaccctcattaaatatgtgggcttatccttgcctatgtatgttatgcaaacgaccaagttctcaagtcgacttgttgctaagattgatggaatggttcatgatttctggtgggagtccggaaggggtaactggtctacgtctaaaagcttgggataagctttgcctcccaaagtccttagggtgtcttggattctgtaaaactagagaaatgaatctcgccttcccggcaaaatgggaatggaatctattgactcgcaatcaatccctttgttgtcagatcttggaagcaaaatacctaaaagaaaagtcttttcttaattgtacttctaaaaattctgactcgtggttttagaaaatgtggttaagtccaaatctattttacaaaaaggttcttgtaagttggtggtggacgggaaggatactaatatttgggaagacccttggattcctcataggaaagatttcttacctcgtactgtcggctcttccaggatgcgggtgaacagagttgctgagcttctgttggataatggaggttggaatatccccaagctaaacagtcttttcgacaaggaaactgtcacagctatcttaaaagggggtcttccgtctggcctaggcagtgataaatggatttggactttggaaagtaatggtcggttctcgagaaaatcgatctatcttgcccaagcacttgaaagagtgcccaattgtgaggtttccccgtctctctggaaccgactatggaatagtaaaatctctgaaagattgaagactatttggtggtgcatcttgtccaaggctatccctgttcggtacgagatctgcaaaagatttcctattaaggatgtgatatgccctctgtgtgggatagaggatgaatctattgaacatctgctcttatcttgtaatgtggctttccatttgtggaggtcctcttcgtggggcatctttcctatttgtggtaatgatatccggatgtcggactgggtcaaattcatctgggactttaataacaaaggcatcaattctgatgaggtgtttctttatgcttctttaactgacgacaccatctggcgggccaggaatgaaaatgtacataataactgttcggttgatgtgattaagagtattgatagtatccgctcttcttttgttgttcatcatgcttcgttgctcccttgctcgattccgagtttggcgaaaacctagcgccctccccccaagactagataaaactgaactgtgatgttaaggtggggttggacattatgtgtactgttgttgttgcaagggatcatcttggcaaggtgatttgggttcatacttctaaattggattttgctaacgagttatgtggtgaagcggcagcttgctgcactgcgctggacgttgcgaagacttatggctttaagtttattattgttgaaagtgcttcgagagtagttatcaacgctcttaatcggactgagtccaggtgtgagcttgagaactatgtttcatattgtattagatcctctcccttttttttcacttgtattttctctaatattaatagaaattgtaattttgctgtccataatgtggttaagtgagtgtttaccgaccaaaggtttggatgtattcttattctctcaatccctgaacacctttttctaatgaccgcaaggtctaattattactttatctaatatatgaacgctttatttcaaaaaaaaaattgaaaaattacaaagttcattttaaccctagctagctccttcgtatggttgtgagatttatttttatttatttttaggtgtaatatgtttaaataaatgcatgaagtgagggtagaaagtggtcagtctagtctaggaatctatatagtgtttagagtagagtggtcccatttgctttgcttattatcctgcactgcaccatgttcagagtgtgaagaagatagactaaccttttttttctcttggtatgctaacattattgcattcaagacaaacccatcattgtatttagaatattgcttcttctatacataaaatatatttatgtctatttatttatttattttgttttattgacttggtagacaaagaaattcaattattctcgttacattaggattttccagtttctttctgtaactaaaaccaatggtgcagtgcagagggtggtgtggcatgtgctacagtaacaggcccagtccagtggtcatggtgacatttttctatatatatattctttctattcaacttttgagaaaaatgactaatcatctcaaaactgttgcaaagcaacctgcttgactaagtccttgacttgatccctttgtcacaactatatatatatttatatatatataccacatgatataaaacaaacaaaaattataagataaacccagcacactttatagatatattatatatatataaattggagtaaggagattccatatcaaactaagactatgaccacaaatgtagtacattttgagaagcatattttccttttttgaatttctaccttgctagaccacaatggcaaaatatcttgttcttgaaaccccacaatggcaaactgcttgaaaaagttttatgatcaattacatcaaaacctcaccagtttgttcatgaaaatggtgaattgtgggggtcacccccctttgtctatagctatttcatgctgacaattctctttttgtgtccaattagaactgagcatcggtcgatttggtcaattttttttatatataaaaattcagaatttgattttcggtccaaattggtgcaatccaaaaatcgactgaccaatccagaacctatcttaaaaccgaccgttttaaacttcgagtcagtcggtttaaactgcccaaatctaacttttttttctaaaatatgatctaatttattctataagcacattattctacattctacaactacaaacatataaattaattgtttaaaaactaattgtcttatcctttcaactttaatagtaataaaataataatatattattattacataatattattagtaactacaatacataacataaagcaaaaaaaaaaacttaataaattaatatataaatataacggtcggtttcggttttttcgatcagtttattacccaaaagaaactgaccgttcaatggcgattttaactgtttgcggtttttttcggttccgtcagtttcgatttcaacagtgttcgacaaatcggtttgaacgatttttttaattttttagattttatactcagtcgtatagctaatggtaggagtcaaccaaaattgaggaagaggctaagaaaaatgttatggaatacaaattcatcatattcaagtgaacaacttgaataggagctga

SEQ ID NO: 20216 - DNA, 3438 bp, Cannabis sativa
agtttcttgctgaaataggccaatagatgcccctcctgcattaaaattcctccaatacctatgttggaagcatccgtctccacgacaaacactttagaaaaatccggtaattgtaacaccggcgtatgagtcattgctgctttgagttgatcgaatgttgtggttgccgcaggtgtccacacaaaattatccttcttcaacatctccattaatggagctgcaatagtcgcataatgcgctacaaatagccgataatatcccgttaatcccaaaaatctccgcagctatttcaggttcttcagtatgggccattctgtcattgctacaatctttgatgggtctgccttaacactttgagctgaaactaagtgctccaaataattattggatgtttgaaacaattttcacttactccccttcgcgaaaaaacgacgatggttcacatgttcacatgagtgttaatcgcagatggttcacatgttcagccactgttttgccgtaaatcaaaatatcatcaaagaaaactattacaaaccgacgtaagtatggttggaagatctgattcattgcttcctggaaggtcgacggggcgttgctcaagccaaaaggcattacaaggaactcataatgaccctcgtgtgttcggaacacagtcttgtatacatctcttgcgtccatgcgtatctgatgatatccagctctcaaatctagcttagaaaaaactgtagcaactcatcaatggtggcgatagggaatctatccttgatggtcagctcatttaacgctccataatccacacaaaaatgccatgttctgtctttctttttaacctgcaaaactggcgaagaatacgggcttctgcttggtctacagaacccatacgctctcatttcttgcaccagtttttctatgatatccttctgaaaataagggtatcggtatggtctcacattgactggtgctaatcccagttgaagaaatatacagtgatcgacgttgcgttgcggtggtaattttgttggttcttcaaacacgatgttaaattcccgaataagtcccttccctgctggtggcattaacttctcaaggcactctattttgttagtggctgctgcaatatctttctccgtggaacacaaattgtacagctcatggacctctccttcatgtagtaacacatgaaattgattggcggataattgttgagctgcgagttctgaattgcctactaactttaccgcctgccctttccattggaattccattgtcaactccttatggtcatgaacgcaaggtcctaatgtccccagccattccattcccaagacaacatctaagccccaaattagtaaaacatagagatccactgtaaattgatgtccctgcaataacaactccaccccgtgacacactttcaaacaaactagagaattaccattacccatatacactttgaatacctttgtctcttcacatggtattcccaaatggatcgctaatgattcttgtatgaaattgttattgctgcctgtatcaatgaggacccccaacgattccgttctgtgtttggcttgcaaccgaaatatccgcaaatttgacgagttagatagcgaattcaggctaacctctttgaatgttggatctcccaattcaccttcgttgatctcgtctaattgactaccctcatcttcacaatccccttcctgaccacacaaaatgagtactctactcttacacttgtgccctacgctatacttctcgtcacaagtgaagcatagaccacgttctcgtttttctttaatcttagctgttgaaagacatttgacaggcaaggatgaattcgaagcgttcatagatttcgctgattgtgatgatacttgcatattcgacactttggagagcattagtggtgtcgatacaggcggtcgtcccggccaacatgaatgatgcgtcgccgtacgacccatttagtcatcatatcgatcttcaaacatcttagccttcgccattgcttccgctaaatccaatggtttcgacagtgtcaactccctgcgaatttcaagcttcaatccccaaatgaaaaaaattaaagaataggtgatctgccacctccgagattctagtcattagatcctcaaactcaacacaatattgctcaacagttcccctctgcatcagcttggaaatacgcctcagcgggtcctcataagctgaagtgccgaactttagttgcagtgcttacaagaaagcctcccaactaggaaatgaacctcccttttccatccattgaaaccatttggatgggactccctccaaatgaaatggtaccaccattaaccgtaatcgagcttcgacttgctgcaagtcaaaaacttgttaatcttgtaaatccaatcctctacattagttccgttgaagcgagccaccttcactcggagattcatcaaaagcagctgaagatcacgtccttcatcagaatccgtccttcatcagaatccgtccctcatcgaattgacgatcgcgcatcaccctgacccgaaccacctcctatctccattgatggatgaatcagaactaggatggacccaatagaaaattgagctagaaattccttcgtctcgaccttgtgctgctccagtaactcaaaaaatttccccaaattagcagcaaaaacggtatcgaagctgttcttcatgtcttaaaacagagccacgatctcttcgttcttcatggtgagtgcagtaccaatgaaagcaccagtgatacccaacaatgggtagcagtattattcgagtcaatacaaaactccaaattgctttttagcttctcattcaacataaatcccaaaataattacaaataggtatttatatgtccatccaaacaaacaacacaattcagcaacaataacaaattcggttatcctcttagcgtctctccatcctcacaaaatcggttagccatttgggtctcactcgattccttctcccacgcgcactcttctcttcgttgctttctttctgctggttttccttttcaaccaaggtgagttcttcttcacaagtcaggtcctcttcttggactgagctctctatcaagctcctaatgccctcctagattgcccctggtccagttctattggactcaagtcttggataacaataattctataatagtatttgttgtaattatatagatgatcatacaaatttttgcagaatttaaaatttattattgtatcaaaattagagttaaaataatctatcacacttttttttaatacatatgtgtaacgaccaaggtcggtcctgggcataggcgggctaggcccgtgcttagggcccactcattttagaggtccaaatgagaaaatgaccttttaaaaatactatttatttttatagtgaggatctaattttttttttgtctatagcctatc

SEQ ID NO: 20217 - DNA, 2531 bp, Cannabis sativa
aaaaacattgcaaaaggctgaagtggaactcttaatatgtgtgttatggtgcatctggagtgataggaataaagtcctacatggtggttcacaacgtgacccatcttccctcgtggcatatgctattagctacttggaaaaataccgttctgccaaggtcaacagctgcaataataatacacaccagcagcagagttcaatcgcacctgaattgtcccagaatcacagtgcaccccatccaggaatatcacaccagcagagacaacattttggtaatgttaattctcataacccctgtcggatggatggccaccgacatgcgcaaagtctggatactcaaacaagggctgcacatcatgtaaaccagaatgagaatcactcttcatggcaagctgcaaaccagcatccgcatccctccacatcaataaataaccaatatggcaattcttctacaactgttgctggtaacaattggagactaacggatgagatagtttggatgccacccgaaggtaatgtccttaaaatgaatatcgatgctgcaactaatgttcaggacaaaaaattaggaattggtgcagttgtgtgcaactacaaaggagaagtaattgttgcgttttctaaaccagctcaaggttgttttagaagcgatgaaatggaggctaaggcgctcttccacagtcttaattgggctacacaacatcaactgtcaattgctcatgtgaaaactgatgcccaaagagtctccaatgctttaaatccttctcataggaatttatcttgttttactgatcttattgatgatgtttgttgtattttatccttttttcttggagtaactgttactcatgctcgtaggcaagctaatcaggctgcccatggattagcaaagtacgctctagagttggatgaagatgtatcttgaatacttttttttttttgcaccccctaattctaaggtcaggggctggctccgccactgtttatatgtaatccttattacttttcttaacaataaataaaaaatataaatgaacataattgcttagacaaaaatcacttaaatatgcatctaatttatgtatacacatcactactcacaaaattgatttttttgctaaatgtatcaaatttatgtagataaactttttttatctatacactactcattctcaataccattctaaaaataaaccaaacattataatttatacatctagcagaaaatttggttttgtctaatttagaccctaattaattaacaaaaaaaattgcccacagtattatcttctttttttaaaaaaataaaaataaaaaaattacaaataaattcctgacttgagagagagaagcttctaatagcacatgcagcttttaagttttactccattgttgctgtgaagtgctttgataatacttggtagtactgtctttgctgtttctcaattcaaacattcaataaatattaaaaactaaaaacaaaaaagtaatttgcgacataaatacttatgtttaactcttattgcagataaatacttaagtttaatttttgacgataatacttaagttatatttctaaaacttcagtaagtaccagtcaatattcacgtgtcattttcttattagtatatttaaatatatttttaaataaaaaataaaaatttaacacttaacaggtacctacaaaagttctagaaatataacttcagtattattaccgtgaaaaattaaacttaatatttatttactatcgagaattaaatttaagtatttacgccacaaattacttaaaacaaaaataaaaactacttaaatattcttaactgaaataaaaagaaaagcacaaacctcaggtggcacagatgaagaaattttagcaagtgcttgctcaaaatgtgttgttttaatagtatcttcatcttcatcttcaagagcagccaaagcagcttcattaacctgcaataaattaaaatgttgctaattccggaacttgcaatgaaataatttgtttttctagtatagataacaaaccaatgcatgaagatcagccccgctaaagtgatcacagcccttcatccgtccaataacattgaaatcgacgctttcatcgataggcttatccctcgtcagggctttcaagatcaaaccacgttcatcgggagttggtaatgacacgtagagatgcttcccaaacctacccggacgcaaagaagctttgtccatcacatccggtctgtaacaacaataacagccagtaagaagtggatcatttttttactaaatgaagattgaatggtttgtttttcttttacctatttgtggcaccgattacaaagacaccctggcgcttatcaacaccgtctaactcgatgagcaactgagatcgatgacaggaaatggattcgtttacaattgatgacagaaagtaaaggaatggagttgagaaaaatcaagagtatctttgcacattgtctaacctggttcagtagccgctcagtcacccatgagccttcttttccacgctcttttgt

SEQ ID NO: 20218 - DNA, 2723 bp, Cannabis sativa
ctacctctgtggttccggaactaatctttccagaaggtttgatctcaatgttcttattcctgctcgcaagttagacaagaaattgatgttattatcaacacaaaccaaacaagatatgaaaagtatcaataaacaagcatcacataaaacataagttgttgaacagagctaaatttaatatctcaagctagtactgccttgatcctagaattaactcatcttaagtaaacatacaaacaacacaaacttgagaaaagatctctcaacattactctgagattgaaaccaaactaactctattatcacctttcaaaagtcatgaatagagccatcgatcattaaaagccaggaaatcgacatcaaaatagatattagatatagtttcaaggactttctaattcagtttaaattaccataaacaaaaaaaattattgtcagagtcagacatcatcaaatcatccaaatttaggtactatacccatctaacttgtgcactccacaaaaagctccataaaaaatgaagcaattgaaattcctaattccaaggtttcaagtttcgggttttaaaatatggggggtattgcagtagttgtacatcatcgcagcactcaaacaacacacgactcaacaaagatcaaagtatcataacaataaaaacataaagctaaaagagatgaacaccaaacaatttatactgattcagatcaaaagttgatcatacatccaatttcagtctgaaaaatagagaaattttttccatgcacgcgaaagtgtataccatgatgattgatgagcatcccccaacaagcagaagagcccatcaaacctcaatctttacttcaaattgagattaacactaactacaggagtaaacaaatcaaagactagcctcctcagatgcattgagaatttcccctttgaaacaatcacccttcatctcttccttttccaaagcccaactacaatccaaactctcaatcttcaacaactcacaacagtgaggagcttctctctctaaaaattaactatgaaaaattaacttctacaaaaaatttccactatacaatagaaaatgagttaaaaagttcttacacaattagtataggcttaataacaccatagaaagactcaataacacctgctgatcctccacgaaccttaaacacaataaaaattactataaatatcttatctagaattcaaactcttaaaccgatattttcttgcatgccgataaacaatcagagatagtttaaactcacctgtagattgacggatccattgacagtgatgcgaataccatagtgagaaatcgtagaagtagagttgacgatgatttttccttcaagaggttcctgcaactcaaaattgacatttacagtcattgttaagtatgataatcgttaggattgagattgagaatatgataaagagaagttactgaaggtcggtagattcgattggcatgggaaagtttgagctcaatcgccattgatttcagtctccagaagaagaagaagaaaactggaaattgtatttcttatttaaacttttgttttattattttttttttttaaattgaaaacaattttaataactttgttattatcactcatttttaaattgctaattagccaataatataagtatcaaaattttaagtaggtaagaagtataaatttaaatatttatttttaacgaaataactacttaatatttgtttgtcctcaccatattattttttactttttttaacatttatcatggagtgaattgaattgtctatattggagaatattcttgtcctatgaacaaaatagtactcccagccacgaacaaaagcaaatgacactacttagttcatcttcaaccgaactctaaaatactaaatataatatagtttcacactatatttactccaataaaacactaaagttatcctcataaatgactttgtctacagtgtcccactatttagctgtagaccacactattttttaaaaaaaacatttttaataattaaataatacttttaagaagaaaaagtaaataattatataaatttagtattaaaatattcttattatattaataaaataataaaataataaagaatatgaaatttggtgtaatttttagtattgtggttggaattgaaaaaaaaaaatagtgttgaaatagtaattttttagtgttgatttaacatcaaatttgggtttcctcattggagatgcccttatgataaggtgattcaagattggtaaaaatagtcactatcttgcgggagatattagataacattgttccacgtggattaaaggtaaaagtattgagtcatatataaaaacatggactgctccacttatcaccaattggttttgaaatggaactccatgattctcaacagtttacaagttgttcaataaatcataaaaaaaggaagacagttgtcgtgatattgataggttgctaatcaaattaaaattgttacataaaaatgtatgctttgattcacaaagtaagtgctctttagattgagattgtacctccttgtgctcgtcaagcctttatgctagacgtgtcgaatcctgcataacattgttgtttaataaaaaatttctctttaaaaaaaaaaaacacttatcatggaggactaaaaaaaaaatcttcattaacttaaagcaaactgttccacttccacatacataaagttttagataata

SEQ ID NO: 20219 - DNA, 6482 bp, Cannabis sativa
  modified_base (54)..(56): a, c, t, g, unknown or other
aatccttctctaattttcttacagttctcgaatcttataatattttattggttnnngaaaacctcggtcaacaactattaaaataagaaaagaaaaaaacaaaataaaaatgacccatactaaccaaagtccaccaactttggttagcaacaaaaaaaaattattataatttatgtacaaactcaacaaggagagaaacacaactcatactactctacttagcttcctttggtaagtaatagccctttgtgtgaagtatttaaatgtttaaaattccttaaaatacttagagaacactatagaccactatttggaaactataaacttgaaattaatctacaataccaacctcgtattggtttgcttaacgcaactgttactgtatgatttgctaacataataacggcctccacaccaattatcttagattcctataagacattgcatctaccaacaaggtggatccaatgattgtgaaaggatccattagacaaggagagtagttagaaaccccgtccttactcatagctaaacttttcttcactagttccttcgctaaatcaacagagtcatagaaatttgagatctaaccaattatttgcttaagatgtttttgatgttcaccgtgagtcatcttatttctctccgtccatattgtccttgaaataataatcagtctttcaaaggaattttttcccacaatctcagatgcatataatattacttgcttaaatctttcttcgcctcctgaaggaaagggtaatccaataaaatctaaatttctttgagtctaaaaacaccaaaaaactgcatgtgaatttgaatcacccccataaccacaaataaaacaattattatgaggaacaactttacgtcgaaacaagccacccctcaagggtaaaatctcatggaaacctcgccatgcaaaatgaagaattttcagcagaaattttaaaatccataatttcttctaccatattaagaacacctcactagaagaagaaggcaatctctcatctcggatcattgccagattataaccacttttttccgaataattatatgttccgtggaatgccaacaccaattattctcgctcaaagggaattaatgggatcgataatttgagttcggcatctaatcttgaaaattttatatagtacgtaccttaagaaattgtcactaataacttttcttttcttttttatactgggaaacgtttaaataaaacatgatatttaaaaatataaaaaaaacaacaagaatgtaataatatggatcatgattctcattcatcttatgtcattcttaagcctaaatacaaataaaagtgagacaggtggggagtggggacacatgaaaaagagaaatatatcacaagaaagaaagtgaaaagagacgaaaatactttgtcttgtcgtaaagtcaaagcaaaagtttggcccaattccaaaaagccgaacacacattacctataaataatagctctgtggaaccagaaccacaaccctaaacatagaaaaaaaaaaaagacaacacaacacaacacacacacactcacattatatatatatatatatagtcacatgattacattttaacaccaaaaaaaaaaaaaaatggaccaaccaacaacaatcataataaatttgtctaattttcaacttttcacaaaatcatctcttattattattataattcttattcattctatgaccaatgttacaacaactcaggctcagctcaacaactacaaagtcccggcaaacgacaccaatatcctaccgccgaccgtgtcgtttcccttccccaagttacacatttacgataaatatgtaagaatcttttttttctctttcacacttatttccctttccttatttgtttatttattttaaaagaaacagagtaattatagtgtttttttttggtgcaggtggagatggacaacggcatactccaagtaacgctgttaaaaccggcgggatcagtcaccggaataaaatataacggcgtcgataacttgcttgaagctcttaacggtgaatttaacagagggtatttttttttatatctatataaattatttcctctgtatttaatttttgttgaatgttattatttagcgtcgcctatattctttcctttgctacatattagttgtaacaaatatacatacatatatatataaatatatatataaacaaacatgtaggtactgggatcttgtgtggattgggaatggaagtaaaggaaaaaagggttcacttgacaggtatatagtatatttaatgttgcatttatatatatttaatattttggagtgaaaagttgatttataaaatgatacaagtatatatatacaggcttgaagcgacagattttagtgtaatattagaaaatgaagaacaaatagagatttcattcacaagaacttggaatttctcactccaaggcaaggtcgttcctttaaacatagacaaaaggtttaactaagtcaatattattattaagtactaagaatttcttttcttttctaaaaaagaaaagtgattatttattttaatttttggtagatatataatgcttcggggttcgtgtgggttctattcgtatgggatatacgaacacttagaaggatggcctgctttcaatctcaccaatacaagaatggcctttaagctgagaaaagacaagtagtaaataaattatatccactttgtttttattattaatttgtatttcttgtttaataaaaatgaaggttgtttttggatatatgtatgtataggtttgagtacatggctatggcagacaacaggcaaagatttatgcctcttcctgatgatagggagccagaaagaggtcaagttttggcttaccctgaagctgtcaaacttatcaaccctgtggagccacaattcacaggagaagtaagtttttcttcttatttttgttttaaagaaaataataataattattatttgctattttaactatattactcttttctttttcttcttttactttatcaagtgcctcacattttatataataagtcataataataattagaacatatatcctcattcattttttagataggatggaaaagatgtatatttaatgtaatggtaatagtaataataataaaataagaaatgattataatatgtttgatttgttattggaatgaatattggactaagtgataaattgataaaattgtagccattttattttttaagttttatataaagagagggtattagtaggagtcattttatttttactttatttagcttttgacatgtaatttgtttttcaatgtaatgggaattctttatataatgtaattattattaaattataattttattaaattatttgtaaaagcaaactaaacattattaccgttactattataacaatccaaatatgaccttagtattgtttcaaaaaaacaaatatgaccttagtattttgtggagaaataaagtctttttttttgggataaaaatcacctgtccctaaatttactgtgccattcctgtccctccaataaatagttgccatgtattttatcttttccacctcatttactaattttttgatccatttcactctgttatatttagttccgtttctttttaataccctcacatcattcattatttctctctcttttttttgttttttcttgaaaaaaccatattattaattatttcactctctctttatttacaaaataataatatatacatgtgcactatatcaaagtttctttttctcctaaaaattaaaaatcttttaaacaacctgaatatttttttttttaaataaatcaaactgaatactttatactcaaaaaattcagctaatgtattataacgtcaaattttatgtcaaattaagatatatgcaatatataaaattactatattatttctatagctacaaatatatattagtgtatgttttcctaaaaataaataattagtgcaatattggaataacttattatttcattttatttttcttttacgtttttttaattatttgtttcgttattgattaatcttctttatttttcgatagctcgctatcaattcactattagtatagttgggaataataagttatctgtgactgaagggttgttcgtagtgcaattacttactttgtataatagttgaatactcaagctatggggttaaatgaacttgttgcaataatttctactgttgtgttttttgagtgatagatgaaactgaatatagctattcttaaggtcagtggcggagggagaatatgtaaattgagggggagggggacaaatataaaacaattaatttttagggagcaaattgataaacttgtatatattttttttttacataattaatatatatttatatatatatatatatatgaaaatccataaaaaccaaacatttagtgagggctacagctccccaagtggctctgtcactgtgtgaggttaactgtgatggtacaatctttttattctagttttattatttttagttatttatcaaacgatctaagaattaggcggtagattatttgattcatttttttaattctaattaatcttggtcgggtctccaagtgatattttaattagattgtagactattattttaaattttaatcgattgctattaataaaattatgtaatttattaaaaataaaaaataaaacacaatttatatatatttttttaaaatatcaccattaatatttcaattttacacgtgtaaaataattgtttataatatattttttaaaaaaaaaactaatatatttttttctgctaaactaaaaaaaaaataaaaaaattgcgaaaatattaaaaataaacatagagacttaagagtgaaggatatgatttatttgtaattaatgatgtggtaatatatctgtttttcaaaaaaaaaatgatgtggcaatatttaaaaagaaacgaaagaaaattaacagagtgaaattcattaaagaattagtaaatgatgtggaaaaatcaaaatagatgggaactatttattggagggacagaaatggcacaacaaatttaggacagctgatttttttccttttttatggacttaataagtaaaaagtaaataatttttattggccactaccacgtggtaaaacgtgtctttatatcctgtttgtataatttatttgatctgattctatatttcatatgggatatattgattcgtttttaacatgtgtctaatttttttaaccttaattcaatccatgaaatttcttttaattgcattattttgcgcacaatagaagacaaaagtataaaaagagatgacaaagctatagttctatattctatattctatactacatatgcaataaacaaaattgtagcacgaatgattagtatatttttgtaaaaagaataaaatctttatattttttttttaatagaaacaaaaattatatgtgcatatttttttgggtgacgtgtaatgtactgtacaggtggacgacaagtatgaatattcatgtgagaacaaagacaaccgggtacatggatggatatccaatgatccacccattgggttttggcaaatcactcccaatgacgagttccgctccggtgggccccaaaaacagtgtctcacctctcatgtgggccccaccaatcttgctgtatgttttttatttttgacgaatattatttttttatggaagaaattatattttatggggttttatattgtttttttttaaaaaaaattattttatttttaaaatatttaagagtaaccagttacccttatttaatcaattacctgttttttttttttttttgaaaattagagtacagttattttataccattttttttttttttttaattttgtaagtttttttaacccaattccgtgtctgttgccaaatacatattaaaaatatactgaatataaatcaaatgcataccaaaaatcccctaaagttaaaacagtaaaaaaaaaatcataattaaaatataataaatcttgttaaattgttgagtttcatgtaaactttattgtgtgcccagctaaataagtagtaatcttgaatgtgcagatatttcacagcacccattattcaggagaggatttgataatgaaatttggagaaaaggagggttggaagaaagtgtacggccccatttttatttatcttaattccttatcagataacttagctaacccatttactcagctctgggaggacgctaaacaacaggttctactaatttctctctttttatataaatatagaatagggtggaaagaaaattttggtaaaaagagagggaaaaaaaataggaatttttacctatcgtacatttttattctatcttaatttcaaaaatgtcttaatgttttcaatgcctacactcttttttttttttttttttttttttcccttcttttttttt

SEQ ID NO: 20220 - DNA, 4429 bp, Cannabis sativa
tatgataattcccaagagcaaacaaaatatagttaatatattgcgtgtataatattttagataatggctatgatagtactatgcttttatgaattgatattgcagttgagataccatctcaatttctgttgattttattttttgtttttcataaaagaaacaaatattaattttatttctcacataatttaggttgtgttttactctcttaaactgcttaagaaaaaacattaaataaagaaaaggaccaagcttaaatttgtctaaaacttcagttggaagtcttgatatagtctctttggtaaattaattgctcacaagtcacaagtcatatattatttaaactgtgctttttgtatacattgaatcccagttccaatgcaggttgggtgcaatcatttcatgtaaaaagatagggaattgtatattgacattatatatatatgtacaataaataaaatgttacatatttttattcatacacatcacttgctgcaaatctaagcatttggcatttttagtaaaagcttttattttaaattaatttgtaaactttatggtaacctcactatgatctcatcttatgcattattttaaaagattattaatttgcaatctagtcactggttgagatttttgtgtgtatatatatatttatatgggctagctgggtgacaatacactatttaaatcacatgttcttcttcttttttcaggtgcaaattggccctttccctagaactttgttgaaaaagtcatcagtcctagtaatattttcccaccaacctgagtcttaattggtgaactttatgaaagtggcccctctctaacagaattaagttagcataaagatgatgattttacattacagtgtattataaatcctattctcatccacatccacatatacaacaaacataattagtttatcaaatatacctatcttatcaaattatttgcttttactcaaaataattcctattaaaagtgacatgtaaagaaaaataaaaagacttaataataataataatcctaaacagagaaataatgtatattttaagttccattttggctttaaattcaaatgaaaaagttagtgcaatagatttcaaacctgaaaaataattaaaaatcatatgatacatatacagcctttatgccaaagatggagtcaaatccattcaattctgcttatcttatagatgatggcctttgctgtttatagtttttttgtcattaagttaaaaaattctacaaacaaagataacaaaacagtactactactcctcccattatctcatcttaatgttaatggtcatcatacattatcattacacaaaactaattatactcaccttatattccaaaaccttaatcattactttatgtactactactcaaatatggctacctaaacatattattctactcaattctgaggtagacaagtttatttattgttatttttttttttctttcaattacatttataatttcatagatccacatttaacggtgaggctattacaaaagacaatgtccttacaaaaaaattgacttgtggaagactcattaggtgtgctttttgtttgcttagtggggctaattctcacaagcagaataatatttcttataaataataatagttttttttttttttttaaattaagtctattgtaaggtccagggtctacacatggcaagcatagaaatatgacctaccaatactgctttaaccagaaaagaaaacctaataataattgtaagacaccctccttgcctttaaacataaaggctgccccacaactctgttattttctaccttatatatacacatatatatatatgcctctgaattaaccacaccatacagtcttaaggcccttctatatatatatttatgtagccatgatattttttttgtattgttgtgtgaattttatttatttttttacttttttacgagtaacaactaacaaacagtgtagtgatgtactttaaaacttctccaaagggatgatgaccaaaaacaatgtactgaagaaacttttatttctcttttgtaatcgctatcactcgtgacacatagattgttgggtagtgcttttatttttttccaattgtttgactccatagatgtacatttgtgtatttggtagatacctacgttgaatttaaggacggttctgaactattatagtgaaaatacgaatactatattgtctttgtttttgtaagatgttgatagtgatatatgatcagaacaaaactgacgttctgatctgagattgactctctttattattataacacttgtttttataaggtttggtttggcattctacttacttggggattactcttatttttgaattataaaactgaggttcttttgggcctaaaaggcttcacctttatcaagcccgtagttggcaaacaagtccaatgggctgtgcaacacttttggagctcaaaccaaaataacctccaaaaacactcaactttattaagttttatgtctagtttttttgatgagacgtatatttaacattcttaatagtgtaccacacaatcatttaatttcctaatgttataggacaacctcaagcttcacacttcacttttactctttcttttttagttcttatggaggttgagggatttgtgaagctcgtgaaagacataaactcgatattaccacccttggtgttattgctatttgcatgatcttttccaaacactaaatacaagtcttcgtcatatatgaaaaatttataatgttgtaatggtgattacattgtaaaagtattaaaaaacgaaataaataatagaactttaggtcatgtatggtttaatataatagtgattgtagtggaacctgttctatttagttacaagtcacctattaccttttgtaactagtgacaattatgttagtcactaaagaagctcaactgagcaagaataaaagaagcagaagctttgagaagaaacagaggtttgtagagaagaagaagaagtgttttgtgagaataatcgattagcttaaattttttatttatactgattcaatattacaaggcaagctacgaaatagaaaataccaaactaataacaaaaaattaactacctaattaatagactttaactaactagtaggtagatggttatcattcacaaatggtaaaatagccataagaagtttggacttaaggtactaaaacctttcttttgacaatgccttagttaaaagatcagcaacttgatccacagatggcacaaatctgaccgagagttggtgagccagaatttgatcacgcacaaagtgaagatatatttcaatatgtttactccttgcatgaaatacagaatttgctgccaaagcagtggcactttgattatcgacccaaagaatagaaggttgagacaaaaaaaaataaaattgtaactctgtaagcaagaaagttaacaattgaatttcagctgcaacattagcaagagcacaaaattcactttctgtgctggatctggccacaacttgttgtttcttggtagaccaggtactaagttttcacccaaaaacacaacatatcctcctgtggatcgtcgatcatctatgcagctagcccaatcctcatcactataatcatgtaattttagagaatcggatggcttgagccataatccttcagatagagtccctttaagatatcgaagtaagcgtttacaggcttcccaatgagtggcagttggagcatggatgaattggctgagatttttgataataaaagccacatctggttgagtaaggggcaagtattgcaaagctccaaaaatacttctatacaaagttgcatcctcaaaaggttcaccatctttgagactcagtgtaacagtgatgcttgttgtttttggacagcttttagagccttccatgtgtagtttaacaaggacatatgtaatgtatttgctttaacttaaatacattccagtgttgtctctgaaaatctccactcccaaaaaaaatgaacagacccctagtcttttaagagaaattattattcaaatcttgaataagttttgaaataagctcactatttggaccagtgaccaatatatcatctacataaacaagtaaataaaccaaagatgaataaggaggtgtcagacttggaggcttaaaatccccatgcacagagagtttgttttagcttgtcattccaggcctgaggggcttgcttaagaacatacaaagctttgtgaagaaggcacacatgatcaggtttttcagtatctataaaaccttaaggttgtctcatttatactgtatcattgagtgtgccattaagaaaagtattactcacatcaagtttcttaacatcccaattggaggacgccgatatacctgaggaccattcaaacagttgct

SEQ ID NO: 20221 - DNA, 4574 bp, Cannabis sativa
catggtttcaatgactttagctttttaaaaattctaccctacaataaaaaaacaaattaaaaaagttaaaaaaatttcagtattaaattaattgtatttatttacttttactttcattccatctccaaaatccgaataatataaaccagcaacaaattggagtcattgatttgaattttcctttagctgcactaaaagtcatcaacaataattataaaataaaataaattatatataaaataaaaacgacgacttaacgtccaataaacaaaatagaaaaaaaatccaactaagacgaacgttaaaaaaaaaaaacaaaacaaaagacgcggtttcctttgacggcgcttatttgctgaccaaatccccatcgttttcaattcctacctcttcttcttcttcttcttcagtcttcttctttcttgttctaccacccagtttagctttcgattttgctgaaccaaatccaaccaatcttcttgattggccatgttttagtaaccccatatagtaaatattatgttctttagccttgacccaccttgaatgaagctactttgttcgtttcatcaaatcattttgtttaccttgttgggtttcaaatgagaattcatatgttttcatggcttttcttcatgcccttttgtttgatattacttagttttgatcaagatgtagtttctggtcaatgccttaccgatcagcaatcttggttgcttcaactgaagaacaaccttaaattcaaagccaatatgtcgacaaagttggtcacatggagtcaaaattcagattgtagagcttggaaaggtgtaacttttgatggggagggacgtgtcactggtcttagcttgagcaatgagtggatctctgatggaattcacaattcaagcctcttcaatctgcaacatctcaagagtctggatttatcatttaacaatttcaactctacgatcccagatgagattggtaacctctcaactctaagttatctaaatttgtcaaatgctggctttgttgggcaaatcccaattaccatatcacacttgacaaacttggtcaatcttgatatctcgactctatcatttttaagcgtttcttctctgaaacttgagaacccagacttggggatgctggttcagaacctttccaacattgaagaactataccttgatggtgtgaatatatcagcacctgggagtgagtggtgcaaggccttgtcatcttctgtgcctaaattacgagtcttgagtttgacaaactgttatctttctggccctctagatgaatttgggaagcttcactctttatctgtgattcgccttggtaataataatttgtcatctatggttccagcatcctttgcaaatttctcaaatttgacttccttggatctcacctctagcggattgtacggaaattttcctaaagagatatttcaggtgccaacactacagagtatagatgtatcatacaatccgttgcttcatggttctttgccagaatttcaccaaaataattctcttcagagactggtactcagttcaagtaatttttcaggaggattgccatcatcgattggtcatctttggaacttgagcaggttagacttttccaattgcaatttcagtggaggacttccaaactcaatgggaaaattaagccaactcgtgtacttggatttgtcatttaacaaattcaccggtcaaatcccatctttcaatatggctaaaaatctgacgcaaataaacctatctcataatatggtaactggaaaaattccatccaatcattgggaaggccttctgaagctggttaatgtggacttgagccataatgctcttggcgggactattcctgttgcgttgtttgcagctccatcagtgcagaagattcagctctccttcaacaattttacaggtcaagttcctgagtttccaactcctaacttgtcaattttggatactcttgacttgagcagtaataatctagtagggcctcttgctaagtccatctttgaactcagaaaacttaaaattctatcattggcctttaacaaattcagcggcaccatgcaatttgatgcaattcagagactgagaaatcttacttcacttgacctttcttacaacaacttgttggttaatgcaagcagtagaatttctgcattcccttcctttccgcaagtgagtacagtaaaacttgcttcttgtagactgaccacatttcctgatctgaagaatcaatcaaaattactccatttggacctttcagacaacaaacttcctggtgagatacctgattggatttgggcacttggcaatgggaatcttctccatctgaatctatcgcacaatcaactgacgagcctgaaagaaccctatgctccttctactagtctctctattcttgacctacattttaaccagcttcgtggaaagattccccgtctaccaccagcttctacctatgtagatttctctagcaataactttacttcctcgattcccacacagattggtaaggatcttaaagttactatattcttttctgtttcaaagaacaagcttacgggtactatgccagaatccatatgtaatgcaacctaccttcaagtacttgacttgtcttacaataatttagacagagagatacctgaatgtctgtttaagagtcaaactcttggggtgctgaatatacgagggaacaacttcagaggctcaattcctaaagcctttccagttgattgtgctttagagactttggatctcaacgggaattcaatagaaggagaaattccaagctctctatcctattgcaccagattagaggtcttggaccttgggaacaattatatcagtggtgattttccttgcatgttgaagcacatatccacattaagagtacttgtgctacgatccaacaggtttaaggggcgcattggatgccatgataccagtggaaattggactaatcttcaaattgtcgacttagctcacaacaactttagtggtgatctatccagacactgcttaaaaagatggaaaggaatgttggttgatgatgctatgctcaaacacttacagtttgaatttctagaattcagttcatcgcgatattatcaagatgctgttacagttaccttcaaaggtctagagctgaagctgcagaagatccttactgtcttcacttccattgacctttcttgcaaccatcttgttggatcaataccagtggaaataggcgaactacaagcactctatgttctcaacttgtccagtaatgctttcacaggagaaatcccttcatctattgggaacttgaaccagttggaatccttagacctctcaagcaacaacctcaacggatcaatcccatcaacacttgcaaaccttaacttcctctcattcttgaatctctcatataatggtctgaccggaccaattccatctggcactcaaattcaaacattttcaccagaatgctttgctggaaataaagctctatgtggaccacctttgattcatgtatgcaagtcccacaacgcagaagatactgttctatcaggggtcccaagaaccgagttagagtggcaatcaatttacacaggaatcgggtttggagtaggaggaggagcagtttttgtgctgctaatgctctggaacgaaggtaaaacctggttggaggatagcgttgataagattcttctagtgattcttcctatgattggatacacttacaaacctcgccatgaatgggatgatgaagatgaggaagatacagaatactggggctcagattctgcagaagacagtgaagattatgaaatggaattgaatgagccacagggtccatactgtgtattctgttcaaaactagatatcagtagaaagaaggtaatgcatgaccccagttgtacatgtcattcaccatccaattcttcttcctcctcaaattcttcctcttcatcctcaggtttcacataaaaagtacaaatattttcttcttatttttgacattctttctttcctttaggtttcttgttttgtagtttgtatatatattcatagaggtaagtacataattgtaaaactctgataaaaacaagaacagagcagggttgaggactgtaccttaataagcaaatttcccaattgtctgaggttttgggcattcttttctcttctcctctctaatcaaaggaaatgattggctatcttgtttatgttaactacaaatgaaaattaaaaattacatgctaaatcatgttgaagatctttcacacaatttatcaaacagttggaatgctaactacactactcacttaaattaatgtttgtatgaatcaaaattagaaactttgtagttctatgtacctgattatacgaaggtcctttgctttttcaaattcttattcatggctgatctctaactctataacattcgttaaatcgaaagagaaaaaaaacgttaaaacatttcttgaaaagaaaagatttggcaataattctacaaacaattagatttttttctctttttcctttaagatatatagcatatatagtttaggccataat

SEQ ID NO: 20222 - DNA, 3151 bp, Cannabis sativa
tctcctccttttctttttttgtctaatttttttctttttataaactctaatttttttacattatgtgaaaagtgataagagtgggaagtgggaagttagagagaaaagtagatctatattatttattaataataataatatatattttctctttttttttctgaccaattctttctattttttttttattctctttactagttttattaataaaggaataaaatagatttttttaaaaaaacgattcaacagacggcaatgtttaaaattgcggatttaagcctcaaggtgttttttttttttttttgtgaggtaaggtgtaagcctcaaggcgcattgaggcgtgaattgaggcataaggctcgttaattaaaataatatttttaaagtaactaaaaatactaagaataaataatgtcttataaataccaacaataccacaaaatgtctcctaaaataaaaacctagcatctatttttgaaattgtgtgtgttcagtttagttgggcttttttcttttaagttatttatttgaattttattaggtttattgtattttattgggcttttttttaagctaacatgttattggacttttttttttttaattgctgaatgaaaatgggctaagaaaagccgcaaaatctggttttctaattgaggcgtacgcctcacaaaatttcaaaccgcctcagccatctgaggcgtccacctctctccttcattctgaggcgcacgcaacagagcgtttttcttccgcctcaatctattgcgggcaatgaggcgcgcctcaaaaacgcaattttaaacattgattgacggtgatgaagggaattttagatactgggcctacccaatagggtaatttgatgagatcaatacatattatctatgtaagtattgtgatcatgctttttaatggccttgtaaactatttaaactctagattataacatatatcaaacatataagtttttatacacatatacatacttatgaaatcataatgtcttaaaataatgtatatatatttatattgactctgttttttttgtactgtcctttaattggatcatgtatatttttgctaatgttatatttcatttttgttaatcatttgtatatttaataaaatctagttaagatttttataagtactcctacattagtgacaatgatactaatcttccatttttataatttaattagtatgtacacttttactctagtgcttagaaagtagacaatgattaaggctttacacaaaaactaattataatgaattttgagagaattaaaaaatagcttacttgacattaaattaagaaaaaaagattataagatcacatattttgtcgtttatgttatatgtttttatgatatatatatgattactaagagattcaacaacaacatgcaaactctttttgtggcaagctcttatcattataatattgttccttttttttcattttaatcttgctttggtgtctttttttgtgatttttttaaaagaactaatctatgatagtttataaatggataaatttaaatataaaagctcaatgcttcccatgtatttgttgcattgttttatagggccaaggcaatgcttttatttactttaaagcttttaggatagtttgatgatactacagatttaagataaaaatcaaataaattgagatattttaataagcatgaattaagggatctattagtatattatttggtctttttcttgtgtgagttgagataggaattctttagtataagttaactgatttaaagtgttgttgatttaagttcttttactatgttcgttcaatgcatttgttagtgttgtttcctttgataagattaaaaaaattgcagctcatgagcctctttttgcagtcactaggtgatatgccttggccatgcattgctttattacattaaactcaagttaattcatcgatatacacaaagcattcatgcaactaactattcttccttgaagcaaattctttctatttttgttttatggaaataatatgaattttggatagattgatatccttgaagctgacatgatgatgcttcaactaacaagaaagtggatgctcataaactctactgcttgctaccacaattaatttttaaactcaacagtaagactatgcacgtgagtgtaattgttttaagtaaggctctcttcggtaacaattttaaaagtagatttttattttttatatcaaaattataaaatattgtttgaaagtaacgttcggtaattgatttcattttttgattttttaatttaaaatcaaatttaaacaaattttaaaaattcaatttcatttttctaccactaacttacatactaacaagacatgatatttacttcaataagcataaatatatggtacctgagcactagcattgtgagtgtcatgttcatgaagtttaaacaagtccttagttggtaagccacatggaagggttcgtgagaaagactgacctagacttcaagtacacactgaggggaactgaaattgcattgtggtatcattattgctgggccttgctctattttgtataggaaatgatttggcttaagatttcttatgtgctttgtctaacatgatgtgtgtactatatttatgatatgtctatatgtgtgttgaggtggatatccacacgctaatacagatgagtttccaatacagactatgcatttttatggtaaaatttaaagcatctttaagctgtattttctttctttctaatgtttaccatgatttcgtggtactagaagtctattgcttgttgtggaattcataattttataaggacaaatgcagaaaaagacgtatattttgatggagatgaagacattcctgaagtacaagatgctactatacaaagcacccacgaaactttaaatgatagtgttgagtttagcatttcaagagatcaacttcgtgaaatgtctaatgtccgtgatgaaattactgatcatatatggaaagcaaatcgacgatgaagatacagagtgaagattattaacaattagaatttttttaatagttttcttcaagattagacaattattagttcatattttattatgactttgtcggttttgtgttatagataatgagtttcgt

SEQ ID NO: 20223 - DNA, 5327 bp, Cannabis sativa
aagaaaatataaaagtatcccatcctctctcaacggctgccgtcataacctccttgttttcagtccatatccacaccctcttggattgcccgtacgacccagaaaacgacgtcgtatgaggacccattacagcgccagagtctttacccaaaagggttgtcttaacactacaactagtgagaaatgaacgagtttgaggagaaatcaatctgcaaatgttccatttatctgcgaatattaatcaatgtaaacaaataggaatacgaagctttgatgttttaataaaataaataaattcattcttaagaatttataaggcgaaagggaaaacctttaggggtggtgaagaaggtggggagtttagtggggatgcccaacaaagaagctgaattcagcagagccatttctctgtttttgtctgtttttacctcttgaaatctgttaatagtgcgtgacaattgcaaacgacattattttaagtgaaaaacttcacgtcgttttgaagtaaacgataattaactaacgacatttatcatgtcgtttatttgcctactgttttccggtgagtctgagtctacagtttttgtaggcaatcagaatttaatagctggcttttaataacaattcagacgctgtggttttcaaagtgacacaaaatgaaaatagacctagaattaaatgtttttcttgatataactaatctaaaattattttttagtacagaaatataattattcttgtataacacttttgattatatcaaattttaatttgacaaatgttaaattcatgatttattttgtactattttaaagaataaagagtcaaaattatcatttaacaaagcaaataatctaatcaataattttacaaaacagtcaaaaaaagtatctactttttattatttttcaaaagcattcttagtctattctttcttaaattatataaaacactaataaccgtataatagtgaagagaatattaaacactagtggtatcttttagcatttttctaatgagaagaaaaggattgattgctcatatttaacatgcatgtgtgcaactgtgcatattagtagcattgctatagagcactaaaatatcataggtgtcctttagcatttctctatgcattagtattagtaataaaacaaacactacatgagtattaaagttactcataatcaggaacaatcattataatgtaaagttctccatttcacattatttattcattcctttgatcctagattttacacaatctcttgattacaaaatgcaaatcgttattgtaattcaagggggttcataaaaagatatgataattctaaatcaaacacttgaaaagttaggacgatctttggttgaaaacttaaagagcataacatgtttgtaaggctcttcgggactgataatagttgaaggaaaattggggtgattcacagaatcaggaaatgcttgagtctccaaacaaagagcagcatgactttgatacacaaatccacctttacccttaatatctttgatgttgttacctgtgtagaactgaacaccaggcttatttgttgaaagatccatagaccttcccgactttttgtcatacacaacagccactcttttcaattcttttccctcggggacaccgtcgaggacatagttgatgtcatagcccttaggtagctccttgattttggttccaacaggatgcggtttcaagaaatcgaatggtgttcctttcacagattgaattttcccagttggaatgagctcatcgtccacaggagtgatttgggaaccgaagatttggatgtcattggaaaggatgtcgccactggtgtgaccaccaaggttccaataggtatgctgagcgagattcaccggtgtaggcttgttaagagcctttgctgtcatgatcacagccaattttccatgcccaaatagagtgtaggtagcagtgaccagtacatcaccaggaaagcctgtaaaaataaataattacattacttttatcaatctcaatctttagtgtcaaagtataggtagttagattagcacaactagtgaaaagaaaaggcggttttaccttgttcgccatcacgactgtgataggtgaacacaatgtgaggagcaagacctttgttttggtaacttttcactttccaagcaacatcactgaatcctactttcccacctgaaaatgaagttttaacatcttcaacaagctaaaatctggtactaaacagattcgtctcaagaaatcgatgtaagaaacttaccgtggagtatgtttttcttttcattagcaactagtttgtacgtatgcccatttagtgtaaatttggcacctccaattcggttagcaactcgtccaacaagagcaccaaaataatttgtatcgttctgtaaacattgcaatatattttattaagggctttgaggcactaacaccattatgagttgacgccctataaatggttagcagttttcaatatttttattgaagtaaaataagtgaaacccgatacactaacagtgacataacacctcagaattatgctaatgttcaaaatttagataacacaaacaaatggcaatattattgtttggatttatctaagcctgcaattttcagaataattgaacaagatgctatgttcctattgataccttctttttcacggactatgctttgttacatttacaaaaacaaatagaaaatttaaaactatatgagagtgaagtgaggacacaagttcaattatcaagagaccaacttgtgataagatccaaattcaaacagtggaatggaatcaagtatgtgtcaaaagaatagttttttaataaacataattgactggatgagtcaataaggacgaattttgtcccatgttctaaaaattataaaattgttttattttattaagctcattctccaaccactttcataattcatctttgaaaaaagctttaaattttttttttttactagatttgtgtaggtttgaaaaaatttactcttttttttccaaaagggtattattcaatcaggcttatctttaacattttacattgctaaaacagagtaagttcatgaaaattaaggttgttcctttgaaaagaacaatgttaatttctaaccttgtaagtatcaattgaatcatatcccagaactacatcatccaattttcctaaaaaaaaaaaaaaaattaaaaactcagaagcataaacaccatcaaaagaaattataagaacttgacaaagaatcaaaagttaaagatacccataagacaaaaaccataaaaattaaaataacattgacaaaccatgtctatcagggagatgaagagagacaattgtggcaccccagttcgtgagattgacagagatatgaccctttttcaactcataaaaaccaactttgtggtgctttgatacagagggaagagcagaagaagaagccaagagagtgatgaaacaaaggagaaaagtggttttggtcattttgttgccaatgaagctctgaaaataaaagaaagatatgatttttaatggttgaaataagcaatcaaaattgggttttatataaatgtgggatttagttacagaaaaagctaatattggaactaatatatagtaaaagatgttatccaaaaaccctttttgtgtttgtttgtttttttatttattttattttaattttcatttttttggctcatgctatgagttgtaagccggttatttgactgagtaaaggtaacaaaatatgcccattagataaaaaatatatgctttttcccttaataatagccttgttatgttaattttatagaataatcttatcatgaagaataaagcaattaaattcaataacccaaatcttaacaaccaaaacaattcgattaaatgcaataaatttaaaaaaagaatcttatttcagataaaaatccataaccaattagctaattctgctgattaggatatgagttagctgttccaactcgaattggaattctaatttttgttgttagaattagaatgttcataatttatccaaatttatatgtcattttcttgaacaaatttcaaggcaaaactaatactagtcagtagtcaattatttatattgagagtgtgacttttttatctgggccctattttttaattaatgtgaaaactccattaaagtggaaacgaaaatagcaagaactattggctggcaagcacaaacgagcaattttaaaaagtcagattgatcattgaaaaattaaacgaaaaatcagcaatatacgttgtttgaatcttttacaaagtgaatgaattttttataaaataaaatagtaaatgtgtaataagtagagtcctatatgggacattataagagtatataaggtataattatggcatgggataaaacctaagttttatataaaattatttacattatatattgaaatttttaatttttttaatttttttattgtggaatatttttaaaaatacggtgtaagttttatattgtatactgtgttaaattttcattgttgttctacggttgttttttagttgtttttagttgttaggttttgtattttactgtcgttttataaaaacacagtatttttgaaaaaagtttcagtgtgcctgtatttttgtaaaaattaaacttaattttaatatttttgtaaattttccttacataaatggttttataccgagaaagacaaaaaataattttctctaaaaattctgtcttcgatatcatatttgatagtgtattcgacaatttgctacaatacagtagtgtttcaatatagtgtatgaagactgagttgttttatattctggacgatcgataaatttcaactgcttgcatattcttaggcagttttgccaatgttataaaaagagcaattaactccgcgattcaacctaaaattttaattgaataatattgtttctttttttttatagtgtttgcaaaatatctatttcaaaataaataaccaaaaaaaaaaatatacctagtgaatattaaaataaaagttggagggtgtataaatttcaaaatttacataaacagtattatcatatatatttgcttgaagtactaaattataaattataaaagagcataaatgccaaaatatgcataaaaaagaactaaagtgaaaatatatattaattttattcttttattcagaaattagaaatagatttaatttaattcaattaaaccgatgaaatttaattttaatggatatccaattgcaattaaataaaattggtttgttggggaaggatcgtccttacattgtaccatattatga

SEQ ID NO: 20224 - DNA, 5996 bp, Cannabis sativa
ggtttgaagctaacaaagcaccgaagataggtttccaagcaccgatcgaccacctccatttgcccatcggtttgagggtgataagttgtgctatgcttcaaggtagtaccttgcaaacggaaaaattccttccaaaacaaactcaaaaaaatcttgtcccggtccgacacaatggagcaagggaacccgtgaagcttcaccacttctttcacaaatgctactgccacagtaatagccaagaaaggatggcagagaggaataaagtgaccatattaggtgagacagtccacaaccacaaaaattgaatcaaacccattgaagagaggcaagcattctatgaaatccatagaaatgtcattcccatacttgctccaaaatggggagaggttgtagcagccctgccagaaattgagccaagtatttggtttgctgagagactgaaccttcggcaacaaatttctggacattcttgtgcattccgagccaacaaaactcagttgctaacctttggaaagttttaaagacatttgaatggccccccactttgctgctgtgatattcatttaataacatggaaatggagggtaaacaggctggtagcaccaaacaacctcagaatctgaggcagccatgagtcagagagaaatctccaccatcttgacctctagagggctccgtgataatcttagccaaggcagggtcagcggcaacttgagcttgtaaatcgggaatggacagcacattaggaacagaaatagcaaccatggagacttaagctgaaacctacgagagagcgtcggcaaatctattttcggaccctggtttgtactaaatatcgaaatcataacccaaaagcttagtgagccactccgggtgttccatagagaccatctatttgctccaccaaatacttccaactacgttgatcggttcgaactaaaaactttctgccaagtagatatgggcgccatttttcgattgcaaggacaatggccatcaactccctctcatacactgatttcgatcgagcccgaggagacaaggtgcggctaaaataggcaaggggtctttcatgtcgcataagaaccgcacccaatcccatgccaaaagcatccgcttctaggacaaagagagctaagaagtctggcaaggctaagacaggaactgtgcacattgcttgcttcaactagtcaaagccactttgagcttctagggaccatacgaaggcatcttttttgagctagtcagtcagaggacaagctatgcttccatacccttgaaaaaactttcgatagtagtcgacccaaaaaatcccctcaattctttgatggtggatggaactggccactgaagcattgcttatattttacgtgggtcaactggcaccccattagtcgagatcacatggcccaaatattcaacttggggctgagcgaaaatacacttcttccggttagcatacaattgatgttgttggagtcattcgagtaccattctgaggtgagtaatatgggttgttaagatcgggctctacacaagaatatcgtcaaaaaaggctaatacacaagaattacgaaaatcacgaaatacctcattcatgagagctaggaaagtggttggggcgttgaggccaaacggcataatcaaaaattcataatgcccatgtgtttggaaaatcatattttcgatatcatttagagccattcaaatctagtgataactcgacttcaaatctcgctttgagaaaatagtggcaccatgtagctcattgagcaactcatcaatgactagaatgagaaatttatcgactacagtggctcaattgagagcccgataatcaacacaaaatctccaacttccatctttattttttaccaataaaatggggttagggaaaaagcatgcactcagttgtgctatccccactcgaagcattccgcagaccatcttttcaatctcagctttctaaatttgagcatatcaataagggcggactgagatgggttcggtacttggtttcaatgagatggtgtggccacgggaccgctgcggaggaagtcatagcggcaactcaaacacatcttggtatcggtctaaaagttgattgataggggcgagaattggtggttgttcacagccctctttgaaggtcaacgagccaaactaaacccaataagccttagcccccttctccatcattagcatcatagccttcaaggatatcagagacatacacaagctggggtctccttataaagttacccacaaacccgccacctcaaattccataaacatcgttttccaaatgacgtgcatattgcccaacatctcaagccatttaatacccaatataacatctgctccgcccagttcaagtggaaagaaatcagttattacccgaatggcacctaatcaagcatcacgttagcacaaattccttccgttcggacctctccacctgttccgagaaatatgccatagaaagtggttgccggtatcggaatgcccacagtcgtgatgacctccattgaaacaaagttatgggtggctccactatctatcagcatcgttattggttgattctcaatatgtcctgctaatttcatcgttttcgtcgttgagattctgatgagagagtttagtgatagcgtagcaagcgtcactttcgtggccactatttcataggactcaggtgatgtgagtgagtcttcttctagtgaattggactcttcttcgtcagtagtgagttttttggagtaatttctgcttacattccctgcttggatgaaattttttgtcacacttgaagcaaaggcctcgagacctcttttcgtgatactcagcctctaagagtcgtttgtaaggggccattgtcatcgtacaactactaccagtcttggaagttgtagagaccatggatcctgatgaagaagtgaaggatcgttgttgttggcctatttgggtgtttctcgaaatgaagaagtttgagtagaactcggttggagataatggaccgaaattgggtttagggttgtgttgtttcaccattggcctgtgtgcgtcatgtgatggccctcttccactcgttgggtcgtttccatcagttgggccaaacccttaggctgaagaatatgcagggcaattttaatgtcatcctggagccccttaacaaagttcccttcaaggatatggttgggtacatcaggtacccgcgatgctagcatttcccaattaacctaatactcccgaattgaatcagcttgaaacactgacaaaatctcttcttatagagaccctgccgacagtgctcgacattggaggatcatttgcctaagcatcgcccaggaatcggacgacgttgattctcccaatggaatcacgacaaggcatcaccgtcaagtccaatgatagttgtgtccaacatcattgatttcgtcattttcgagagaaggaaataccactcgacacgataaatcaactcgtctggactttcgccattgaacaacagaatctccattcgaggtggccgaaagtcgtggccattctaaaaggagtcgagctgaatcggaggcgcggtcaaaatctagagtggcggtatcgccatgtttgttgggaacttgggagtttgttgagctccaacgccgctgggttcgccaatcaaagacccgcttccctcgacggaatgtcgttgttgatctgcattagccgcggttgcatcaagtgtgggattccccggtggtagaatgagttgtgagatctgattcaccaccgattccatctgcttggcaacaatttgctcaatgttgctctgaatctcgccttgaagcttctccaacccctggttcactttttggacatcatggcaaaactctgaaacttccgcttctaccctctctttaataatttcagccatagcatctttctttggttccatggagacgatgctctgataccaattgattggtttcaacctatcgattcaagcagtaacagagaataaaagaagaaagaagaagatgaagaaaaaaaatgctagtatcagacaatttcccaagtatttgagagcctaggctctccttacaattcaacaaaaccttgtctaaaccccccacaaacactttcacacagtattcatattccttacccctagggtaataccgtgaggctaagtcacacccatacacaactcacataaaaacttacacaaccaactaattttgtgtggcagccccttccttaagtttcccacacctttttctagcataaacataaatttttggtggcttatcaaagtttttggggtttttttgcagttttttaaaatctaaaacattgaaattcaatagaattcaatgtttagctcaactgattcttaaaaattatgattttcattaacgaaaagaaaataatttgtctcgatgaaactcgataggaattcattgggactcctcttgcagcattttccatgtttcttttgtcattattgtgcccataatttgtgaaaaaaaaaattgtctaccatagcttgctgcaagttatacaatgcgcgagaatttttttgttgattatcctctaaggccttcttttgattttctaagagagacaaagtgtcttctagaatagtgactccctcttcaacaattttccattctacagattttgtgatctaaaataggttcttattttagtggaccaaaaattatagatttttccatgaaaaatttgaagaggtaaagaagtgcggttggattcaaaacttatggtgattgatagcaaagattacgtccaatgatgatcgaattgagttctgatacctctaatgatttatgaattggaatagagtaaaatagttataaattgtatttagtttatggtgtgagttagtatatagtgtatggggtgtaattgttatagtgtagttatgtggatgatgagttgatagtatagtagatgatgggtagtagaataggtatggtgtggtgtgtgtatatatttatagataaaatgatgttgatgtgttagataatataggggtgtgtttgatgggacacaaagtagaggtttaatttgaagttataatacgagagaggagtagaagataataagaatttcttttttattgatttattttggctagttttttggttacaaattggtatatataggagttaaggccggtggaatataaccgactataactctttgacatatatataagttgtctctacattgttctagcttatttacaaatctctagaaatgttagtaagctcttaaatgtttctagatttatctagtctactttcttaagtaaattatatagctagaaaaatttagaaagttctagaaatgtgtatcaattctaataggttggaatgaaggagactacaaaatcatattggtgttggtggaacactaaacttagtgtataaaagcacaatcaggaaagctactagcttgtgaagagatacaataaccgagaaaataaccaaataatgttttaatcatactaaccgacattcctctctgcatcaattgttgtttcttgctattcatcttgaaaaatctacaccagagaaaatttaatcttactaaatgcacagttgagtaaaaagaagataaaagtattcttccaacctggatcttaagcctttgagtaaatcttcagctttagaatgctcgttcgaataaggcagtgcccatagtatcaacacatcaaagtgccactccataaaccagtttcgctgaacattgagccacacatacaaatagcttaagaaaataaaaactaattaataaagtaactaatgtggacaaacattcagcaactcacctgatctgtaaggcaacttgctaaaatctttaaatggtccttaaagccatcaatttcaccacgaacatacactcgcaataaaaaacccactgcgttcaagtaaacctaccacagaagagattaaaaaacactacctgttgtttcatatctttatatattaaaa

SEQ ID NO: 20225 - DNA, 3224 bp, Cannabis sativa
tgttggatttaaagacttttgtccaatttcgttcaattttacttattcagtgattgtccatgtactaatatatgcttcccagactttgatatgcaaatcatatccctcaaactttgacatgttcaaaattatgcccttaaagtttgattcatgttagacttttcttacttaaattaaataaaagtccttaaatccaacgatcccaataatttcggggaaatttacaacgaccttaagagttcaggggacatgatttggtacatgtcaaagtttgggggcaaaaatcataattagccttttgaaaacaaaaaaaaaatatttactttcaaatttttttaaataatttttttaatcaatattttggacttcgaccccaacctagaccttggaaactggaccccggaccccaacctagaccttagaacccaaacccgacctagaccctagactctaacccggacccagacccaaaccttataccgtgactcagaccccaacccacaccccggacccataacctagactcggacctcggacctcgaacactaaatcttaaacccaagccccaacctcggccttagacccagactcgggcccagaccctgaccccagccttggacccggactccagccccagaccacggacctagaccccaaactagaccctaaacttggcctcagacccagatcccaaccttggctctggacacagacccagcctcgaccctttgaacacagaccccgaacgcgtgttttttgttttttcatagaacacaattttattttttatttttcaaaaacaatttatattttcaaaacaaaaattttacttttgtttgtgtgattaaaaattttaaaaacaaaagtgttaccaaatagcgctaaaactttaaacaagcatataacaaaatataactatatggagtgtacaaaattatgagttagaatatgaaaatacaactagcgatgaaaaacggtgttgtcgtgttgtattcgtgccatattttatatgatttatttttatattttgtgctagaagtattggcccttttttggcctacgtgtaatttttgcaaccgtaatctaatctataaaaattgtgttatgtttgtgttgacccactttaacttgtttagccactactaaagttggagttgtacaaaaagaggtagatttagaattctatgaaaaaaaatcgtatatatatgtgcagtgacagagccacttacgaccacaggtagttgtcaccctcaaaaaaaaattacacaaattttgtataaagtatgttaaagaagtatacatttaactataaatttttctttattattttttccaaaaaattatattcttacattttggccccaacatttcctttctttctctgctgatgtatatatatatatatagtttttgttttaattattgataaaaattagaatttttaaaatattttcattttctttatttaaaaagaaaaattaaatttagaatatttaactcaaaaattactaaatataaattttacatccctaccaaacatacatatttttacataattatattattattagtaatttattatttcattttatttaaaaaaaaaaaaaaaaggtatcaagttcgggttaaaggggttgtgtcatgtttgatcttttttttattattattttgtgtgagtcatgtctaacatttgacctgcacctaatttttctaaccataggccataaaattcatgtcgtattcgtgtgattgtgattatgttgaaacccgtttaccatataaaatgaaatacatggacaaaataatagtttggaaaaattcttgcaatcttaaaataagatttatggttgcataatttttcttttgacacatagaaaaacggtaattctaaatttttattatgtgttattatttatgaaattgcagaaggtttatgaaattttaaataatttaagagaaattcataaatttatatacttcatattaattaattatattatatgttcataaaaatttatttaaaatttattatatattttattaactatgaaaacataatcttaattttatatagaaattatatatggtaaaaataaataataaatatatatttgttattggtattctcggcagggtaacacgtgtacttcaattccaagatttattctattttaaggaggtccattctcaggcctaaatgagttggttagcccactaaaagagtcaatatgtgactctgtatttagtatcctattaaactcatccactgtaaggttagatcgcacagattcaagaagggttcttggccaagagaaggaggcgcaatatggcataactggacaccctcatggagtattcttggaagaaccgtctaagagatatccagaagcaaaggcttacatgtggatacctttaatatgagatcccactaaaccatggattcaccttgcaccatatccttcgacatttattgtattagcacacaataattgtcaatattaaatggaccccacaattgtggatgattgttatcttgtaaattaggacttttctaatttatacaaacttaatattaaatgtatttaccccatcagtgggtctagcttcataagagaaaccctagtagtctaaaccctagcttttaattaggatatggtatcttcatgcaaagggttggaaaataattattcaaacactaatacaaaaattaggattcttaagctcgagcaagaacattatccttgtgtaatacatcaaaactttttagctaataatatttgtggactaagactcgttaacgcccccatgtaaaaatcttggtcttcttcttttttatattatttacttctcaagctctatttgtttcataatcagtttccaaaaaatttgataaatattttggtgcaatcattggagcttgaaggaatatttttttaccaaatctgtcatttacaacaatggtggctaccagaaaaaccactacaaaaactactactcgggagggtgaagaagatacagctatggatgatgttaatgggccttctccaatacacactcatgcgggtactataggagaaggagaaacgtcaaaggtcagaggctaacacgctcataaagatccacaaaatggaaaacatatgtagggatctgctggaaccgagtataggtggtgcccatgccttccaccatgtaatactcgtcaacaaaattcccaattttgctca

SEQ ID NO: 20226 - DNA, 5744 bp, Cannabis sativa
ttattcaacaagcaatgaaaatcggatgttagctctcttgaagagattaaaccttgaactactaaaagagaatcggtctcaatgaaatgcacaggtagttgaagatctcttagccattggagactatacatgagagctaacgcttccatcacatgtggagagaagcagccgcggtaagaagtggccatagcagccacaattgtaccattactatccctaagaacagctccaaaaccggaggtctgcgaaagagcattcacggctgcatcagtattcaacttcaggcggccagaagggggattcagccatggggcatctctgttgaaggcagtagcagtagctgatgctgatgcagtagctgagataacagtggttgaaggagcttgagcagattgatactcctccaaataggacagtgcaaaataaaggagtacctcatgtgattttggttttgtgccatgtctctccttatttctttctgtccaaatactccaaaggatagtagcaaattgctcaagtcttgatgctgaccacaaagaggacacatgaagaaaaaattcctttaagttcatgttatcgtatagcagttcatgaagagtaaagtcagccaatttccacacttgcttggctcttttgcaaaagaataaagcatgagttactgtctctgcaccacgactacaaagagagcagtttgccgtttcagcaatatgtcgataatggaggatgttagcaactggtaggcaatcatggatagcacgccacaagaaaattcggactttagatgggagctttaacgcccaaaactttttccaccacagctgggattgcagatcactagcagtaggttgctgttcttcaagtgatgtggccaaattgtaaccggatttgacagagtatagaccattggattcatggtgccaaatcaaagtatcttgctgttcaaaaagagttaatggcaaactttgaatcttgataacatccgagtctaagaaaagagactgtagtaactcataattccattgcctattatcttgaattagatgtgccactgtcatggatcggtcatctcctctaaaaaccagaggtttaaaataagttgaacctggcagccaggggtccgaagcacactgaatatcgagaccatttccaaccttccatcgcagccccttcaacaacaaatccttgccccaaactatccctctccaagttagagaagggtaggatcccaaattagcatccaagaatgacgaattcttaaaatatctcggctttaagattcggctaagaagggaatttggattgttaaaaaccatccaagcctgctttgcaaggagagattgattaaaatgaacaaagctcttaaatcccattcctccttcaactttagattgagtgagagctttccaagttttccagtttatgcccgaagaagaagaattagaaccccaccaaaacttattacacattgtctctatttggttgatcagcgatttagatagtttaaaacaactcatagcatatgtcggaatcgcttgagcaacagctttgagtaaaatttcttttccaccaatagagaataaagattcctgccaagctgagagcaaattccataatttctccttaatctcaccaaacaaagctttcttgtctctaccagaataggaaggtaaacccaagtatctctcatgacaaggtttgattgccaaatttaaaatcctctgaaagttgagttgggtagtcgtctgagtattgagggaaaatgaaagcacagacttgtcttcattaaggcattgcccagatgcacgacaataacagtcaagtgaacttttaattgccattgcagatctcttattagcccgacaaataacaaggctgtcgtcagcaaaaaagaggtgggaaacggctggtgcaccacgagcaatacgtatgccttgaagatttccaagttgttcttcatgttgaaaaagcctagaaagaccttccgcacatatgatgaagagataaggagataagggatctccttgccgaataccacgtgagggagtgatatgaccatgagttgaaccattcacagtgaaagagtaagagacactgctaatacatctgattataagctccactattgcatgatcaaatcccatagcaatcatcatttgttcaacaaaatgccattcaactctatcaaaagccttactcatatcaagtttaatggctgcataaccttcttttccccttttcaaatgttttagagaatgaagaagttcgaaggctaccaaaacattatctgtgataaggcgagattgaagaaaagcgctttgtgattctgagataaccattgacaaatacggcttcaaacgtaatacgatagcctttgaaaccaatttatacaatacattgcagaggctaatcggtctcagctgggacatggaagttggtttcttcactttaggaatcagtgtgatcaatgtttggttgaagattgaaggatcagcaccatcattaagaacttccagaacagttttggaaactagaggaccaacaatgtgccaataattagagtaaaacatgaccgacataccatccaatcctggactgctatcatctttcatagaggaaagtgcattggaaacatcatcagcagtatatggttgagtgagatcaagatttattgcagccgtaattgtgcaaggaacagtagccagaacctgattaagagcatcataattaaccccatccgaagtgaaaatggactggaaataactttccactatgttgcagatatcagcatgagaagttttagtgaccccattatcatcaataagagaagttatcttattgccattacgtctggtattagctttttgatgaaagaatttggtgtttgaatcacctgacttcaaccaagaacttcgagatcgctgctgccagtatttttcttcttgagccaacaaatcatcaagaatgttttcagatgatttaagttcttcaaagtgcaatctgctaacatcagaagaattattaagagctgttactttgtcttgggagatttttattttttttggcagatcactatacttatttctgtgccaatgctggagttgctgggaacatgctgcaaaattttgcagcagttgattgatcgcgcttcctggagacatgttccaattcttggcaataatatccatacaagcttcatcttctagccatagtctttcaaatctgaaccgagatttgaattgaggggcaggttcatgttggaggaacgagattgtggctttaattgctctatggtcagattggaagaaatctaggtgagtaaccattggaacctttagcagagacatccaatttgagttaataaaaccataatccaatctctcctttacattaatcccattgacagaattattatgccaggtaaaccgatctccatcaaaaattaattcttgcaaaccacaaaaatcaatagtgtttctgaagtcatcaatctgagattcattctttaaaggacctcctaacttgtctgaatgtgaaatgatttcattaaagtctcccataacaagccaaggcattagtggtgcagaatctctcaattttctaagaagttcccaagtgaattgccgttgagaaacaactggagagccataaaagcccgaaaaatgccaagaagggccatcattgagagcaatgtaacagtcaataaaattctttccataattcaagattgatacatttacatgagacttccaaagaaacattaaacccccacttaaacctatgcgaggaacttcaataccattaggaaaattaaaagcagaacggaatttagaaagagaacctacactaagcttagtttccatgagaaatattacatccggtttattattagaaatgagcagtctaagttgacggaatgctctcggattgctcaaaccccgagcattccatgatacaacattcatggtgactggcgaggctgagcatcagcctgcgccaaagaagcaccattaccatcaccttttaatgaaagagaagacatttcagaagaagggtctggttgtggatgcgtgaatgtgttggttgtatcagcaaggggattcaatcttgtacgacatctcttaagaacactacgcacattaccacctgaagtagtcaactgtcgcttagaaaataaagatgacattctggtatgactagccgttgaagagcctggagagaattcagcagtaagagcagatggaaccacattgtccagtgggtgagatgagacaacagttgaatgtgtaggaataaccttgtcttgctggtgagacatagtattagcagaaggtgggtgaacatgagcataggctgctggtgtggctaaagacaacctaacagaagaattaggcacttctgagatgtgagaattatccttaataattccttgagatgaagtcgaaaaagtagcaggcattgattgtatgactttctctggattaatgttaggattagactgcagaaagaaatccttgctagaatctttgagatttggaacaaccacatttgatgaagaggcaatagaacttggatgaatattcacacaaggaatattatttggtggtttttcaacaatctgatttgtatcaactgctatagattttcctttctcacgttcagtaattaaattcggcaaagcaggaaatgttttcgggtgcgaaataataggcgcaattgtgttgcgagcaagacgagtgataaagggccacgggccagacttagaaaagtcttgtctgtaacggtcataactcgaccttggcagagaagatccttgaagccatggtccataaggtagatctggatccctcccttcatctaatttttccaagtatgaggggcatttgtcaaagacatgaccaattatcccacactcataacagaaatcgggaagcctttcatagcgataatcaatccataaatcatcttccatccaaggaaaagtaaccatctgtccacgaagcaggggtttggaaacatcaattccaactcgaattcgtaagaagggtccccaaccttcattaagagaatcatcatgaacttcaatgaaggacccaattagattgccaataatcttagcaagagattcagatttgctaagaaaaggtagcctatagacttgaacccaaaaaggagttgtagtgtatgaactaaaggccaaattttgaagagaaccaggagaacataagatcaggtgcagattgtggaagtgccatggttcctttgatagtactcgtaacagatctccctcacaaccaaaagtaaccatataggattcttcttcatagacagaaacagagacatcaaatctgcctttccaatgagtgatgaaaaaattcaccagctgtttaggattgaaacctctctgtgagaaaatcctacaaagaagacgatggaataccgggcgttgaacaggaatggatactcctgagagagaaacaacctccctttcacgagcagaaagagctttagatatatctggtagaaaagactccatggtaaatagaaaaaactaaggaaaaaagggaagaacaaaagaaatctgggtaggaaaaaaagaaaaggaaacaaatcagatgaagaacatagcaggcgggaacggttgaattcaaacaaagagaggttactggtatgataaaacagttaaaaagaaaaacagggaacaaactgccacagagcaaataagagggcagacaaagctctctttt

SEQ ID NO: 20227 - DNA, 1465 bp, Cannabis sativa
aaagatgtttttgagtggctctccaaagatcgaaagattattagagcatctgttactatttgtaggctcatggatgacatagctgaacacaaggtaattaattgaaagaactaatcatatacaaatcaaacttaatttatgtattaaatatatataaaggacttgtgttttctattttatattgctcatgtgtgagttatttgtagcagctaccaaatcttaactttgatagaattaattcgcaaatgaataaatgttgtgtttgatgttgttagcgatacgttagttataaggtaattattttctattatagttagttgtcttaactaacttctcgtgagttgtaatttcttgattcttgtaacaaactcatcccttactttgatcaatatataagtggctaagctcatctcttttgagtgagtcttttcatcatcattttcacaacttcatctctttctctattcgttcatggtatcagagcacttgctcttgcaacttctgaacttacatggattcaatctcttcttactgaaatcttagtcaaacaacctcattgccctatactttggtgtggcaatttagatgatggctctcttgcttctaatcttgtgtatcatgccctcagtaaacatatcgaaatcaatctacattttgttagagacaaggtcttggaaaacaactagatgttcgatatgtggacacaaattttcaaatagcagatgttctcaataaacctctgccagtcagccacttcatccacttaagggacaagttaacactaagctgcccaagtgtaacttgagggggatattagggataagttagttataaggtagttattttctttgttatatttagttgtcttaactaacttctcgtgagttgtaatctcttaattcttgtaacaaactcatcccttactttgatcaatatataagtggctaagcttatcttttttgagtgagccttttcatcattttcacatcttcatttctttctctctgtattcgttcaaatgtaattaaatttatcaaaaaagattaaacttgtgtgtgtgtgtgcatgtgtattttgtcccacattgttcatgtattagtaattggttgatttatattacatttagcagttaccgatcgaacttgaaccctaataagatagatttttcggtaatattgattaggtaaatattgtttttagctagtgtgattgaatctatcaaaaacattacctttgatggaaatttatatatatgatgtgatggtctaattaatttgtttacataatgtacagtttgaggaagatgattatgaggaacattcagcagttgaatgctatatgattgaacatggtgtttgtgaagaagaagcctatgatgaactgaataagctaataattaatgcatggaaagaaataaatgaagagtttgtgaagccaactcaagtagcttcacctatattacttc

SEQ ID NO: 20228 - DNA, 1892 bp, Cannabis sativa
atgcaaaattggaaatttttgtttattgagataggacataataaggcagctagctttgcctggattgttgagttttatcacaacccaaaaagtttcacaccaaaattaatattgcaaaataataattgaaagctcctcacttattagagcctttctcatagttataattaaggctaagagtttgactaaattaactcaaagagcttagtttagtcaacaaaagggtaccaccaagttgtgaagagtattagctttgccattagaacaatttgcattaaagttcataccattaccattgccatggaaatcatccaagttccataacccatcccacagaatgtcctcattaatggcttgtgcttcaggaacagctgagacattgttgttaacattcagcatagtgtaaaggaagttttgctcatcaactgtttgaggaaatgccacactgctcatttcttgcctattttgaggtaacccttgttgagacttgttatgttcgttttcttcgagtaaacccatgattcttttcaactccatttgattaagttgctgttgttgttgttgctgctgctgctgttgttgctgttgctgttgatgaagctgttgctgatgaaattgttgcctctttaagaggcgagctttcgccttttcggaagcatcagaagtaactttggcttgctttttcttgaaatgggttctccaatagttcttgatctcattgtcagttcttccaggtaagcttcttgctattgttgaccacctgaaaaccaataatttttagttaataacagtgtgaataaaagtctacttttttgtaacttattgattataactctcttgtttaattacctgtttccccatctagcatgaagctcaagaattatgctctcttcatgtggagttatttgaccccttttaaggtctggccttaaataattcacccacctcaatctacaactctttccattccttttcagccctgcatatatatcaaaaccaataatgaaatcagaaccaatattgattggtcttctcatcttttgttagtatatcaataatcaaattataagcatatgcattctattctgtagttctataaccattgaatcaagattaaattgatctaacagttaagtacatcaaaccgagcccagagtacattatacatacaacaaaacttatagtacttatagtatatatagtatatatatatagatatagatatagatagatgattgattatattacctgcaagcctagcaacagagttccacctaccctcaccatggagtctaacatactcaataagcaatctatcttcctcagaagtccaaggacctttcctccaaccttcttcttctattataccccaacccatatgaccagccatggcaccccaatacatgtatagagataattagagaaaaaagaactaaaacacaaagcttcttcttctttgtttggttttttggattatggtagtattgttgtgtttggtttagtaaaaggttttgttgtgttccaaattctatggcaatatgagtaagtgtttgctacatatttatattggcagcaaaggcattacttttttcccatcagtcattttcaaatcatccctatcctttctactgtttaaggtaaggtatatatatatatatttatattatatgtgtgatgatctataaaaattctcatatcactacttgatgaaatgaccaaaatatactctgcacattctctctttttgttaatatataacatgttttgttaaatcttgaccattgaactaatgatcatgatgatgatgatgatcttttctttcattatattcttgaatcaaatggcttataaaataggatgatatatatgattgtgttgtacaagaccatatt

SEQ ID NO: 20229 - DNA, 5259 bp, Cannabis sativa
  modified_base (2318)..(2328): a, c, t, g, unknown or other
gagtactcaccattttaggttgaatactcgcacttgtcatttcccaaaaaattctcttttacatcaattaaataatactttttggtgttgcgaaattcactcgacaacagttatactttgtgagtgtaaaccattattttaggttttatgacttaacttagtgtgtcgccttaagggtcaatgtcacaataaaatatatcactttctcttatcttagtcaagagatcaactttaagcaacaatataggcacataccttccttagggataggggtatttgcggtgcgggtggtgcggtttttgactattttttttaaaccaacccgcacatgcagtttttttaatttccaaaaccacacccgcaccgcgaaactaaaaaactgtaaaaactgcactgcaaaaaatagtgcggtgccgtgcagtttttgcagtttctacggtttggactatcactaaataattaaactattacaaatgcgacaaagcttgagcaacacttgtcaaaaataccatacgacttgaaaataaatatgataaagataagtttcaacgatataataattagtggggtttgggttggacattcacatatatgggacctaaataaatataaaaattaatatttttataatttgcggtgcggtttgaaccgcatattaacaattcaaaacctcaaactgaacccccattgattgtgtccactggattcgctctattgtttgggagtgaaatattcattgttccaacgttgaaagaacttgtgttgttgtttccattcatctaattttcagccattttgatttttctctgaaatcaacaataataattattaccacagatggcaccaaatgttgttggaggcattttgacaacaccaaataaacaataaaaatatatttattcaataaaaagcgcgagtactcaacctagaacgacaagtattcaaagggggccacatagacaaacttgaaaactcataaacacaatgaacacaagagaagtatagtggttcagtcagatcacggtctgcttagtccactgttgcaaggattttctgtcttgtcttatacatgttggatcactcctttatatacaaagcaagtgtcctttggattacatagaacttaattgattataaaatcgttttacattgaatattagcatcaagttaacaaaaacgtaaatcgaataaatgaagaacaatttaaatctgttttactaaatacaacaacgtatgcgactttcatagtgcaagttatctgttcatctgctcgcacaagctcgcaggcttagggtgcattcttgttaaggcgagactaacaagtttcgtagttaggtatctgtatcctacccgagtcatgcgtgcggataccttgccagtgttgaggatttgggacgtgcgagtcccttatcgaatcatcaagcatattaagtattttggactaactcgctatgtaaacaaacgatctttactaactcccaggagaagtcttcataatcatcgcgtatatcttgacatatgcgagacttgaacaattccttcttagtccaacgtcatgtgaggcgtaataatgaccttgactctgtcaagatcacatcatttcgctgactttggttcaggcgaggtttatcctcgagtggtctccttttgacagtttaacaattcttgaggagaataagtccacgtatcatctttataggagcctggtctcgagtttctaggtgaaaattttacactataacaaatattatatatcaaacatttatttaatgataacgagttgttcaatctgcatttaatgatataacattattatatcattagagtaattcatattctctctgttagacacgtgtcaattgttggagtatagccgaattttagatataacaattacatctccaatccaacaagtgaggtaaatagtaagctaaaatagatcataattattactttagctacatgtagcttaataaatagtagtggactaagaatattatatattattttctctttcactctaattcttttaattattttttattacttcattactctttttgtcttttttttaattaaattaataaaatatatgtacaaaaaataatttttaaataatggaaaaaatataaaaaacctatatgatataatatatatgtaaatatgtgagataaaatagaaaaaatgaaattttggtgaggtgttttaaaagatagaataggagtgcttgtagcactctttttttttttttggaattatttaaaaaatacaaaaataataaaattataaaaatacggttgtatgaaattttaaatatnnnnnnnnnnnttatgattttatttacagaaaatacggatttttaatgttttttatattatactcttgttaatttattgttattggtttgctatttttttttttttgttgttgtttaaatattattttcttgttatttttatttaatttttttattattttagtgctatttttatataatatgttaaaaatgtaaaaaaaaagttgaacatacaaaatataaaatttttacaaaaaaataatattttatgtatttttttttttttttgaagttatgaaccacgattcctatactacccctccacaggtcacgtacaagtggcagagaccaaatagaaaaccctaggggcaaatgcggaaatgtgatgcaaaagctgaagccatataaaaggacctcaaaagctccgccattgatacagagagaagttgatcaaagtcctgagaatgaggttttgctctcagagagagagaaagatcatcggcgggtcgggtttatccaaaatggttgcccaatctacttgatcctctctctctgaacgtttgtagaacctatgatttcctaaatcatcttctctcttgccaataatcataataataataataataatgggaaattttctttctctttctctttctttctaccaaacacagcgttaattcgaagccctattaagaggcggtgatgatatgttggatatttcaggctgtaaaaatcaggtaaaaggaagatggatccggttgcctggtgggtcgacccggattctccgctgtgggaaatgacgattctgtccattttccacgcggtgacctggccgtcggctccgccgtggttagcctcgtgtcctttttcttcgcctgataataacaactctgagcctctccttttatttatttatttctcttcatattaattttttagtttcttttaatatttattttgggtgaattaataattagttaaataataaatttgtgtttattgctgacaatttatttaaaaacgacaagtttaaggaacaacgataaccaatttttgacaaggaacggaaaacgacaatattgagaaaacagacaaacaaaagcaaagaatataaaacgataggtaatagaaaagtgtaggtgatgatattattgactgttatctgttaataataatattagatgtctcctcctatcctcaatcaagtaaaaagcaatttcattaaaaaaatcaattaaaatactaactcaattaaatgatactttatatatttaaaatataattaataatatctctaatagactaatacatatgcaacttatccaccttttgttatggcaaaaaacaaatgtgctctgagtatggctttttaccaaggcttctgcctctctatcggttattgtctctactttatgtagaaagaagggaaggaaaattgtcctcctaatggcaacccaatgagacaaccagatggttttcttgacaatgcagcggaggctgaagctcaaccctatgatcaatcatgaaaattgttagtttttttttttttttttgagataatgaaaattgttagttggaatgtgtgttacttggggaatccaagggcattttgtcatttctgtttgcttgttaaagagtaatctccacgtgtacttttttttttagtagaaactaagttaggtcttaatgtaatttctctcttttgtcaaattttaaatttcaataatggacttgaagtccttagaataagtttaggagggggttgatgttgctgtggaaaaatgtagatgtatgtcttttaaattttaatgcaaatattttttattattatattgcctttgcaaataacacaagatagcactttaatgtattttatggagccccttctatctagcaaagaattcatacttggactcttttgaaaagacttaaggatattgcacctctatctccttcactagttataggagacttcaataaaatcctatcaaatcaaaataaattgggagatgctttgcgcaacgaaatacaaatggagcattttagaaatactcttgataactgtcatttaaacgaacaattgtttgagggagaccccttcacttgggttaaaggaagacactcggtggacaccattaaagagagattagattggtactttattaatgaccattggagttcaaagtttgatcctatcaccactcaacatttagactactacaactccaaccatagagctttattggtcaatgtaaacccgaaagatgcagacattcatcaacaaagaagtcgaactaggttcaaatttgagcaaatttggttacaacatgaagaaactgccaacattatttagcaacaatggctgtttgctggttcggggtctgtgatggagagttttttgaaaaaattaaaggcttgtgcttcatctctataacgatggaatatctcaaaatttagtaatttcaaaaaagagatcttaaatatacagcaataagtcaaagggttgaaaaaggctactgctagaactactccaatcatggatgagttgaaaaaaatcagagagtattcttgatgtctcttgacataagaggagatgtattggtagcagagatctcgtgtgaattggcttcaaagtggtgatcaaaacatcaagttctttcacgctcatgcttcatcacgcaaggcagggaacaaaatttcttttgtcacggataacaatggtaccaaagttacttcgaagaatggtatgaccactattatttctgagtattttgttgatcttttctctacttctacagtggatttggaggctttggagttagtcacaacaataattccaagtaatattacaacagatattaatgagttcctcaccctacctttttctgtagccgaggttcttactgttgggttttgtgctgtaaataaaacccatttcaatataatcacatttacttattaat

SEQ ID NO: 20230 - DNA, 5363 bp, Cannabis sativa
tttgttaaaaattaaaaaatgctttacaacatgatatatctgaggtttgacaactaaatctcaaccattacatggtttcaaccaaaattaaaaaattacatcttgttcaacaccacaactcagttctcatactcaatatctaacaacatcaccctgatactaacttgacaaatacaaacatggagttaagcaaaatgagaggaaatcttaagtactgagttgcataaatgagacctataaactgtcccttcaatgactttgtcttccctactgaaaactcagagaagctcagtcccttcggtgcaagaaaacggtcttcgtttaatatagccaatgcatttgcaattagcagaaacccctcaagtattgtccacaaacccatttacctgaaatgtacagaaaattaatacaaaagttaaagattaaccaaattcaaaagcttcatctcagatcgatctggctatggcccagctaagatcctcaaaacaatagcagagaaattatgagtggaaataataagcatggaaattaggcagatttgggaaatgttattaaatgaacaataaggtattcaaataagctcaactctccctatttcaaagctattaaaaaaacattaaatatccaccctttattttctcttatcctatacatatgttaggccttgatattagtctcttaaatataattgattaggattatagaggctgagttgttaaattcttagttgttgagaagatgaaatgtttctaagtgagctttcttgatagtcctaaaggattgattaggaattgatttgtacagttaagagtgaaatttactcagggagatatccaagtgtctcggaaatcttagaaaaactgtaattctttctttgatatgaacaagattcctattttctaattctttcaatattggaatggaacaatagtgtatcaatatatattgctctctgcaactcatccattagcttataaattctcccacttaacccctctccattggtgcctatcaccgcagcttcttctaccaaaatcggtagaatccaaccgcaagtagtgatggtggcgatatgatgatgggaaggagagggcctattatggctctcctataggaattgattcttactaaccattgtgagacttgaaaaattgcatgtatttctattaagttagaacatgttcattaagataggtgagatctctcatcaaaacactctgtagtattaacagattcttgaaatgacactgaattgttgcagtggaagatctattgatattcttgtcatattatgatttggggacaaaaatacatacactaaatctaacagtatgaggctaatgagaagtcaacttatataaacaatcaaactaacaacaaatcaacttaacaatgtccaatctttcaataaaaggacagcatttttaatcacacaagtataggaaagaaaaaatacaaaatattttgctaattttccatgccattaatcataattattcattcaaacactacagagctaagaattagattcagagttttcttccatctcatgaaacaaatcaaaatatttccaatcactctaaacccataatgagaaattagagcttgaatctaaaatccaagataccaaatccagcatataaaccagaagagaaccctaatcaaactttacaagaaccataataataaaaaaagcttctttttccaaaaatggaaaaacaattattacaagatatagtttttatcttaaaagttaaaataatgaaagttaagggctttaagaacaggagaaggagtacctgatagcgatgacccctgcgagagatgaagatttgatttgatttcagaattttgaagaatgagatttgagaagaaagaagagaacaatatgacgatataagctttttgctaatattatgtaactttcaatttttaaccaaaactatagagaaattatattttagcccatatctttaaatattcttattttgacccaaatttgtagaattgttcaaattcacccctacaaaatagaataaggatttcattttagagtttatattattttgctcagtggactctgtgttgtgttttgtgaaaaaggttaaaaataggcatttggattagattttcgttcgactagctgggtcaggactaagttagactagaatttcttttgaaaatgatccaataattttgctgctaactaaggttcaataagtctcaagatcggcctaattggaactactcgacttttctttagtcgttgggtttcttagatgtagtcatatttcaaaaatattttgacctaaatcgagtctaagaatcgatttataacatttttaaaaaatacaaaatctaaaactcaaatttttaaaacacttggtccaaacaaataataatgcgaactaattttttgatgcaagagttcaaatccaaactttttttacattggaaaaaaaaaagagattcgaacttaatatctcctcttaataaacacaagtataatactactacattgtattaaaccgagggtgagatatcatttatttttaataatgaaattttaaacacacaataaacatttgactatttccatctctagacacattacaaagtaaaatgcacaaacataatttaataaccttcaaaccatagtgaattgattactaagtaatgtaaacaaattccctcttaattttgagttcatatattattttgttgtatacatacgagtagtcaatggaatcccaagattaaataaacctttgaacaatttctaagaagaatataattataacaatcaaaacaagagaagcaaaatggttttacataatctgtcaaaactccatagaacacactttacacagttttaatgaaaggcaaaccacccaagatttgatttttattattattatgccataaaaagaagaaacatagccaaagattgtctaacatgactggctttgatggatagaaattaaaggaaagttcttatttggtccaccagtggaggaaatccttgcgtcggccaatcttcttctgtaattgaagaagtccgtacagtagagcttcggctgtgggaggacaacctggaacatagatgtcaacagggacaatcctgtcacaaccccgaacaacagcgtacgagtagtggtagtatccaccaccgtttgcgcagcttcccattgagataacccacctaggttcgggcatttgatcgtaaaccctgcaaccgaatgtttagattagaaaactcagattaaagtggctgttttcgaaagcctgtctgttagtctaaacctgcttaaacattcagaattactaacatggtagcaaatagagaaatgctaaaaggcaccagtgataattagcaccatccaatgtatcatatcgctattgatgcaattaactatcgggtcttaacatgatttaattttataactattacatgatttaattttataactattatggaatatcgttaaactatttgcaatgagcgacctcgaggtggtggtactatgtaccactagtgtttaatagcaatgctcgtagtgtcattgattctcttcctatgtcctattgtacacaaagtgtaactcagaggtttcctatcatagaaatcagtagactttactccctcttgcccttctataaattagttgtattgtaactctgtcaacactgtcctatacaagatatcaaaaggaaaaatctctctccaaacctgtggaatcttctacctgcttcggccatttcattttctgtacaatagccaaaatatagagtaatagagatagaacagtagcaattatgcagaagaacttagccatttcattttgttttcctttgtaactctgtcaacactatcctatacaagtaagcttatgtctttacaaaacaaaaattatttgactatatgcttattgaatttatgaaacaatttaagggagcttacttgcgaagagcaggagccatcttgttggtaagggtaccggcaacaatcatgcagtcggactgtctagggctaggcctgaagatgataccaaatcgatccaaatcataacgagcagcaccagtatgcatcatctcgactgcacaacaagctaacccaaatgtcatgggccaaatagagccacgccgagcccaattcatcaaatcatccaccttggagatcacaaactctgctgtctttgagatccctcctggcgatgtgatagagggcggtggggcccgagcatacgaggtaggagcactactgctgctggtagaggagagtgaagggactgtagtgtggagggccaaggctcgttgagctgatgcaagctggaggggaatccggtgagctgaggatcgagtcaggaaagccatggcgcctgccgccaaaggaaaatgtaggaaccaggatagacaccaatggaaggtgttgacaaattctggtgtacactgaaaagatttaaataaaacaaattaaacaagtacactagctgaattgaaagtattatcatctcttcaaacaatttcttttaaaagaaactagaatgtttcagaaccaaaaaactatgtgaatcgccaagtaggtaggacgagctcaaatctcagaccttgtgagcacatgctgatagacttttctaagattagaaatattgaaatcccaaccgaatgcttctacgaatcgccaaagaattacacgaaatagctcttcgagaggctttctctcctatcctaacatttcaagaggtctagatatctctcccaagaggtttctctcaattctaaactctttcaacatgactgaaaccgagttttaattcgctatatatagagaataaagcttgctacatcagcaacaactactaaccaaaacaaagactaaaaactgaataatttgttgtaataaaacttagagaattgctaaaaggcatcattagtgtctagtacccttcgaggtgtcataccgctattgatataattaagtatcgggtctcatctaacttaagaaaatcgcttttagagaatatcgctaaccaatcgtggagagccacctatagaaagtgttgggcaccactgattcccaacaacaatctctaaaacttaagcttgacctttatggccctccttttggtagacacatcagaccaggggcttatcacatacctaaccatttgaggcttacagctaccttcttgagtcctcttaaataaaatttctacagcatcattctaatactaaacaaagaagatcataattttctcaacttccaaaccattgatagaacatagaaatgagattaaaaaacaccccttttttttccatatccttctttagagaaaccgttaaagcaataaaaaggtcagaca

SEQ ID NO: 20231 - DNA, 949 bp, Cannabis sativa
ctctctctctctctttctgctttattattaagagaaaagttgtacagaaagagagagattccaccatggcttacacaagcatacattaactaattaatttattatttaagcactaattagttaattaacacaactactttttgaccatgttagtgctacaacttttatttccattgttaattaatcaataaatatatattataacatattctctctctctctcttaaataattagatcattgcaaattattattaattatttaattaatgataaacaaataaatgaaaggctacgtaatccatgcaaacatgtcatgcaactatagaactacaggtcgtttttattaattgatactttacaatgttacataacagtgactgtgacactaaccatatggccaatttgcatgcatcgagcccccgaaaatatcccatatatttatatatttaatatagcttaggtctttacaaaactttattatgtaataatactatacgtgtatatatataatatgtggatgtggtgatttatcactgctttaaaactgatgcttttgtgagcagaaaccatcgtgatgagtttctgtatttggccctggaatgaaaattaattaaattgagatcttttttagtaatatttttctttttattttttcttttatgaggttgaagttaaaataatatgtgatttgtacagccgaggaataataatatcgacaatgttacacattttcatcatacaaaaaaagttagcagacatatatggaatacttttcttttttagttatatatttatatatataatatagtagtagtactatatccatttatatatataggtagggaatagagatcgagagtccacaaatcagcataatattagtactatttaggaacatgtgttgaacaagatcttgctataattaactactttctgctagtgtcacat

SEQ ID NO: 20232 - DNA, 2665 bp, Cannabis sativa
gacctagtggaggcagaacatatgcttgaccatttaagctagctataccccatttgagataggattgatcctatgaaaacatctacaggaataatatgcataacttttaaacaaggcacacccaccattaccatttcttcttaatattgccaatagattatataccactagaaaaacaggctcgcaacattaccacagcatactgatcctaccaaggttaacttaaacctagactcatcaagaaactaaataaactggcttcacagacagaatcacaaggacacttaccaaaattagcatagaatgagttaatgacatatcacaccaatggtttggaagtaaaagacgagaaaaaatgagagcaaatttaaaaagctaaagtgcagtaagatgaaggcaacgaacaaagtcgggaatacagtattacaaaaacgaaccaacacacttaaccaaggaattcaccgaaatagtatttacatatataaactagaaaccaacaaaaatgcatgagtagatcatcaattgtaaatataaatataaatgaaactgagtgcaaagcaggatttttcactaaccagtacttgatcaatccatcccagccacatgttgctactttactttgctccaacggatgccactcagctccaatgcatacaccctcatgacacttgagagttctgaacactttgcaagtcttccaatcccagaaccagcacttcccctcaccatctcccgacattacaaagcgcccatcaggtgagaaattgacttggcaagcataaccagcaacaacgtgcccggcgaacctctttttcttattaagctgaaacttctctctggtgctgtaaataagaatctgattgtccatactctgcgcagcaagccaatttgagttcgggtgaagtgatattgagggcattgagtgcatatgcggttcgctaatatatttgataacaacaggaatgccaaactcccaaacacgaagcgatttgtcatcgctggaagtgacaaatctccgattattatcaacaaatgtaatggtattcacagctcctaaatgctgatcatactcttgagtaatctgtccagtattcatatcccactgaacaatcttcttatcactcatcccagctaataaaatattctgcttatcttcatcaggattaagcctaacaacataaggaaccttccctgttgagaatgttgatatgacttgcccagtttccgtgtcccagtacttgatattcttatcataaccggcactcaaaaacttagtcccatcatttgaaaaacaaatatcacgaacggctttggcatggcccatataagttctcatacacttaccagtattaaaaacatcccaaatctttatctttgtatccatcccagcagacagaatcaaatggccatatttggggaagaatcgtatagcagaaacacccttggtatgtccactccatgtatgaactaacctctttggtatataacaatgatcgtttgtggccttcgcatccttcggaggcgcgatccaagaccgaccctgataatccttttcttcctttccatggaaagtggtcttatcagcaacaacctctcctttatcagcaccagatttctcctcccctttcttcttcgcatattcttcggcgtatttcttctgctcttccgttaactcagtaggcagaccctccttcttaccagcccaaggactcttcctgttcttcatcaaccaagcatcagtcgaagggttttcaacttcactcacgtcaacaccagcctcctcttcatcctcattctcagtagattccttcttcttctccagctttctcttcttctgctcgtgttgcggaatgttgtatacagaaatggcgtcgttcttctgaagggcatcaaaatctccaacgtaattgtacccagcagcagcagatgggtcggcggcgtagccatacttgtggaaagtattgtattgttcgtcgaacacaaagggctcaatagaagcgtcctcgacaaagccaagcttgtgatttctcataccttgagcgataccgtccttggcgtaagggtgagatgggccataaatgggagcccagagctgatcgtaagtgggattgaaggcgacagcgtgctgagtgggatcgataggtttggagagagccttgtggccattggtgccactgacagtgagagcaagcatggtgtcgtcgaccttgggggcggcggacttggaggtgaggaggcgaggtggggaagcgtcaggggacgatggattggaggtagtagggtttgggtttgggggctccggattgtccatttcgtcgtcgttttggtcctggtagtttcgaaggagatccatggtgaagatgaatctgggatgaatgagaagggagagaagtaattaactaattatataagttagggtttctgggttcaaatttcaggcaactgatatttacacccaacaaatatacatctcttttttttcttttctaaaaaatcacttatactaaactagaaagatttgtattttattttgtgaaataaaaattaaaaaaaatatatattaaaaatataatgaaaataatgtttcttttgtttttttagctaaatagaaggtaaaacaaaatctatttcctttttttttctttcttttttttttttttttgta

SEQ ID NO: 20233 - DNA, 1860 bp, Cannabis sativa
caaatatcacgttcggtcttgtggccttttaaaggtcgttcgttatacccacactttctaagcccaaacgtgaggagggtgtattagagttagttccacattattaatgtgcggaaataaattaccatatataagacaaataaactactcattctattaccaattaattttgagatgaaaccgcattcatcttattttaaattctaatacaaactaattgtgctctgatcatcagagtacgctctatctcatcacaagtcatttgtttttggtgaatgatgctttgatacaaaaatataaaaggtgatcgtccatttgtgctaatttaacttctggttgacaagttaataaattgttgatggttggtaattttttttccttcatattcaaatattttataatttgaatataagatttcaactgtgtattatttattaccacttataccttctatttatttattttattaatagtgaattaagtgtcaaacttttctaaaatagaaagttttacacaattggtaaattttaatgaaaaaaaaatatatttatctttctactatatttcttattgtattctaattctaaattaattttctaaatgacttgaaaaaaatcgaaatcagattttcattttatatgaaaggaaagttacattttctactcacaattttgtaagtacaataggagaaattcttgggttgaatgaagatttttttcaagaaagttttttgtgagttgttgtcttgttcagattgtgtatgatttgtctaaaatgcgtatatttattataaatacacgttttagtagctacgtttactatatcttttatctctttaaatttaattcttttttgtgagaaaaagtgactttattgtgtagaggagagtgagttcgactctacctctgtgtatacgtctttattattattaagctttcaggagaaagttcttcaagcttgcgggagaaagtgtttcaagtcttacctcgaaaaggaagaaagcactcttcaagtaaatcgaagggagttcgaacacttgaagtttcagcaagattcttttaagaatgtagaatacatcaagcttgcaacatataataaaagggagtctatttatgcataagtcaattactttttatttttaagatctatctaatgaatcttatctctcggcatgatcccgtaaagtaaactagtaacaatctacaaagattactgataccatgtataaaattgtttgcttttagttttctttacttttattctttgttggtttctattttgcagttacacactactatacgaaaaggggctttaatcccgatttttatgggcattttataccgatttttgctaaaataaaaattaggatatatgtcagtgggataaaaactcatacaaaaagtgggataaaaaagtatttttaatttcgattattataggaaaacgggataaaagattttttttatcccagtattaattgaagactcagatcaaaagttccctttaattccaatttttccataaaaattggaattaatactatatatatatatcaattcatcattcttcaaagaaatagccaagatactatgttcttcgttacaaaaatttatctatagtttcgtcagataaataaaaatatgttcatagaaaagattaaacatgagatcagatctcaaattacaatatcaccattaattaatgaaatcatatcaaagtcccaaaaataacacaaaatagagacaaaccataaatattaacattacaatatcaatggaagaaaaaagttaaaatttattacagtatcagcgcgttataaccatgaaccatgaagctatgtcgatggcgacgaagatgaga

SEQ ID NO: 20234 - DNA, 2175 bp, Cannabis sativa
  modified_base (495)..(495): a, c, t, g, unknown or other
taattataattattaaataaatagttttgacattcattaaattgaaattagaaaatatagtattattgaaagaatgacaagtggttgaaataaagttgtaaaattgtaactagtgaggcccacataatggccgcccacttagtcaatttttgtccattattttattccttttttaatccatataattatgtcctaaaccctagttgaaatactataaaaggaacatggtgctctcattctcatccaactcatttcaaccaaactaaacctagtttttattctctgacaactagtatatgagagactcctttcatagcgattttgcaccttattcattgttcttcatcaattcaagccatattgatagagtaccacgaccacatatagcaagtcaagtactcaatcatagtgcagaagacagtggtaaccaacccgaaggatatccgggctcagatcttgttattactctatgatagaaaggaacaagggttaganatctgagcggaaggagtcatattattccgctgccatcaatgtaaggttttttaaactcttatgtgtttaatttcattgtattagagaattcatatttagggtgttaatgaaacatacatgttagtaaatcttgatcttggtaaaataaattctaatagctcctaacgaccccaggtgataacatctgaaatcaacaatagggggtaaggagaatcctggtcgataatagtagcaacatgaacctattatacaagacaaccttagagaaaatggggttcattttccaagatctacaaccatgcaccacaaattttgttggcttcattggagatagcatagctagcactagaagaatcactctcccattgacactaagggaagccctaaagataaccacctaaatgactaagtttgtggtagtagatttatcgtcttcatacaatgccatttttgggagaatatcattgtattcactaggggaagttacatttatcaagcatctagccttaaagttcctaactaatgccgagaatgaaatagtcaaaggagataaactagctgcacgtgagtgttataatgtggccatgagtgggagaccccaactaggggcccagatgttggttgtaaacaaagttaatgaagtggaaaacatggaagcaagagaagttcctgaagttgaagagatagaccctcatgtgggcgatgaccggggagacctacgttccattgagaaacttgaagaagtttctctcaatccaaatgaaccaacaaaaattgtgaaggttgggaatcccctaaataaggagattaagaaggctattgttcaattcctccatgaaaaccaagaattatcgcatgggcacattttgatattgtgggtataagtccaaatgtaatgactcgcgtactaaactcaaacaaggatgttcccattgagcaacaaaagaggaggttacatgatgaagccagatctatagccttgaaagaagaagtcagtaagcttttggccaacaacttcatttgtatagttcaaatcaagtagtattggtcaatttattttatttttttattccaaatatccttagagactattaatattttttgttatttttaaagtttgaataatagtttttatttattaaaaaattgttacatttatattgccaacctgaaaaacaagtaaccaaggataataattaaagcttagttactttggggcataaggatatagttataactacactcgttttaatcctacaatttctattaagaaacgatttttagaaaagtggtgaattttttaaaattcacaaacattaaactaaaaattataatggataaagagtggatttaattataatgattttgtactcatgaggagaccgtttggtgcaacacacgtgttgcacaaagatcatgctcgacagataaatgttttaggggagccatcagacaaaaaaggtgtatgcaatggtggtgtgcacactaccatgatctgacatggggacaatatctaatcctgtgtcagaaaaagctgacaagtgggcgaagatcgtagcacttgaaatggaggaggacttgttagtgtagtttgagaaatctcggtatttgaacattgacattgttgggttctgtgccctaaatagaactcattttaatataatcagatttactaatcaa

SEQ ID NO: 20235 - DNA, 3531 bp, Cannabis sativa
  modified_base (1522)..(1524): a, c, t, g, unknown or other
  modified_base (3479)..(3502): a, c, t, g, unknown or other
gtcgttagataagtgagttatttgatctgagggctggatttgatctaagggaaattagggttaaaaaatagtaacgtaccctgagactcatctagtataccacgatatacattccgtaaaagtacatcatgggacaaaatcgtattccctactaatataatatctttccttcaaaaaataataataatatactatctaataatcttgttaaagcaatacaaatacattttaagtaattttttatcctaatttttttttttttttgtaatatcccataataattttaataagttgaaaaatcataaacaatatatttttgtaattattaactatatattttgtcaaatattataatagaaattgatatctagctaattagcattttatatatttaaatatattttcgaatagtattattatatctaaggatatggtataattattagactatattttaagatatagttacttagattatataattatataatattattttaataattacacaatttaataattttacaatgagttttaaaatactataaataattttttttttttgtattgtatataaaatgtcaaagcaacatatccaagttactttgacaaaaccattttattatgaaaatagttgaaatatgattgacttgccttgaagttaataagaaactaataagaagtgaaattgtagctttgatagacttatacaacacttttatcttatattaattaattagtttttattgtttatttgtataatttaagttgacttgcaatcaagtttaaattaatttgtttttcagccatatatatgtggtatttgaagatcataatttagtgaacacatttttgaaaaaaaaatacgaagaaaaaagttattaattaattttagttaaataaaacaaaaattaattgtggaagagaaaaataatgtacattaaatagcacaacttgttagtgaatattattttggactattatttttgttaaatgataaattagattttatattttctaaaatactataaaatagtaatttgaattaatttttttgtctaaataaaagttaataataatctgatctaaaagtattatgaaaaaattaagtgcattttttgcatctgtatgtgctaaaaatcttctgcaaattagttatattaaaaaagtcattaaaattgaatttagagtactattttgtattattttagaaagcacatgttcgttatttaacaaaatagagatctaatcaatcggtaattaatttttacaaaaaaatcacaaatttatttgtcaactatatacgtacatacatataccaaattaatagtaactaaaataacacctacaaagcaaccaaaacaataattattcttctaaggatgattttgatgatgatttttctttttctaaagtagttacgagaaagtaaccaaaataaaaaagttattaaaaaaactaaaataatttaatcgatattttatatttattttataaaatagccataataataataataatnnnaataataataataataatatgtactcgagctataattttgtaattattgtaatttgtttgaatcttaattagttaattttcatctcatcattatttcaatatcgtacgttgctcctaattttttgaaataattactttacttggaagttaatttattattggattaattatttagtcacctaaaaaataattgtgatatatatatattctattgaaggaattgggggctggcgatattgttttatgaaaaattaattattgttgagcagacaatattaattgtaactattttgactcatcaattaacaaattatgaaatacaaatatttttccatatcaaaagtttgttagttttacaattgttatatgtatgcactaaaaaatcagtaattattttattgcaaaactcccaacaaaaggtaccataattcctacaaaaattttattttcaattttgacgataatgtggagttatatttaatacttaataataaaagtaacttttatcagcgcattttgcaaactgcactggcaaagaggtcaaagttttaccagcatacatttgcagtggttaaaatctaacttttaccagcgcatttacgcgctgtgaaaaattatttttgccaacgcttttcattttatgttggtaaaagttctaataccaacattaatttgccaaccccttttgccaacacatcacaagtaaattctattttaccagcgcaataccaacttttaccaacacaaaaatgttggcaaaagtaacatttattgtagtgattatagctttttattacggttgactgtagatttagccaatcgatacagaatcaattgaatctttgtttatgaaagttacttgagaatgataataaatgtaattataccaaaatttatagatatttggtccttataacgagaatgtattttgtaagtaagaagtatgaaaaaagagagagaacttattgttagtcttgagatgttctaagtgtgatttcttaccttttatataataatagagcttaaaaagtatatttgaaatacaaaataaataattcctaaagaacaaggttgttatttggatggagagtccctatctttatgggcagtttgaactgctctgaaatcatgagaatgctgaaggcgagttggaaggcttgtgagaaaaatacaagtgttggtgtgtttctgcacacttggccggttagtcttgctgaaggctatccattgcttgatacttgtcactcttagccaaaccagctataggtctggccaagatcttgttagcaggtttgtacatctgtctttgcttgtgtccaccgtgcagctatggattctctaaggttgggaagttgcacgacattaatcctggcaggttagtgctgatctatcttcaacgtattttttactttttaccacgtgaaggccgggccatgtcacaaaatctgagacaataattatcatattaatttaaaacatattggtcaaataataaaaattaaaaaaaaaaaattgttaattgaatatgtggcggctatgctacatgttagtggtacatgattagaattagaagtaattaattaataaaataatgcgtaatgcagcatgtgatgatttgattttacttataatataatattataacaatatatcaaataattatataaagttattaagaggctctattataagacttgcatgcatgttatagttagtcacacttctaataatattaataattatattagatgtcaatattgtgggtttgtttttataattacaatattttatagtacaataaatcggactttcgtataaaaaaagaataattacataaagtattatttttttgtaaaatatttacatttttacgtttaaaaaatgtttttttacattttcacgatttttcaagaaataacacgaaaacaacgtaaaagtaacatcaaaataacaannnnnnnnnnnnnnnnnnnnnnnnaaaatcaacaacaaattaataagattaca

SEQ ID NO: 20236 - DNA, 3699 bp, Cannabis sativa
tatgatgtctcaattagattttttaggttaatgtaaattacatgagtgagggtatagattaatagaaaaaaaaatatttatatatttttcaacttatcccacaaaagaaagtaggtgagaaggtccaagtcctactttgaaagcccaaataataatgatcaatggatcaaggctcaatgtaaaagcccaaatatgaaaattgcaaaattacactttaagaagaaaccatgcacaaatacttaaaattcattttttttcttttgtatggttcacaaaagttatctaatggaaaaaattcaaagagagagagaaacagttaagtatcccacctagctccctgtactatttatttcttaacattttttcctataaaaaatatttatcttttaaaaaagccacatttttgtgattttgtgccttatatcaatcatgaatcatccacacaaaccatttataaatctatttattgtatagtgatacacaacacaactgatttatattatagggtaatatatggtttagaagttaaagatatttaatttgattgataaattatcgtgtgtgtatagatttatataatttataaattaatgtatatataaaaaaaaaaaaaaaaattggagtttaatatagtcctataattcaattattattaaaaaaaacattaatacctaatttattttcttttttatatatttgcttctattgtattgtgtcttagttaatccttctctaatggctgtgaccctaaaatccaatggcttcatcttcttcacaaaaaaccacactcacttaccattttcctcaatcaaaaggtctgtttcaatagctgctgaaactaaggttgcaagaacagcacagcaaggtattatgctttctccttcccttttctctttatctctcaatctatcaacttgcacgcaaactggtcgatgaaattcctagcagagagtcatttgatatccattattgttagttgcatacattttcttaaccatagctatagaacacgataaacaaaacaaaaaagataattgggatatcctgatgagtatgaagatgttgaagactgttcgaaaaaactgttgacacttgacagagcccaaaggtgatattataaggttagatattaggtctacactgtaaggtttggattacttttgtgtttgagtatgtctacactgtaaacccaatagaacaatagcataattatagaataggagctatagaatagtagcagaagtattgaaattattagttgtagaagaagagaagctgaaatattattggatggtagaaaatgtcaagagtcacaactcacaagttccacaggaatttgagagcttgggactccccaatctccatgatgctgtgttaatttcacagttttcactaatctcagcatactatctcattactcactcaataacaatgacccagatacacccttttctctttcctaaggtctaacagctttctgagagaggttatttcagttgaaatatattcagattcattggtttaatctatgcatgactgcataagttgtaactatataaatatatttgtgattgtatagggttttatctttttaaaatgagaaagaacaccattgtcttctagatttttacttagtgaggtagtcatcatagactccatattcatttcttctgagatcataaatgattctttgaatgaaagcatgtcttacaaatcttatgatatgttaggtcctaattgggaaaagctgtgtctgtcaaatgtcaagccctatgaaagtaaccgagtgacttgcagtgccgttaacagatcagaagaagctttcattactgtggaggaacagaaaaagaataggcctttggtgaagatgtgtggtataacatcagctagagatgctgctatggcagctgaagcaggtgctgatttgattgggatgattgtttggcccaactcaaagcgttctgtttcgatttcagtagcgaaagagatctcaaaagttgccagagaattcggtgcattgcctgttggggtatttgtggatgatgatatagatacaatattaagagtttcagatgcatctaacctcgaacttgttcaggtctatatgtctgtcaagatttttacacttcattttacttttacaaagcaaaaacttataatcaattgctctatattctgcagcttcatggagacaactctagagcagcttttccaattttagctcaagaacaccgcatcatttatgtccttcacgcggacgaaaatggaagtctcctaaacagtataacagctcaagaatctactcttgttgattgggttcttgtggacagtgcaaagggtggcaggttagaggcatattctttctttgtgaactttcattataaaatgttggaatatttaccgcataaatacttaaattctcgagtttgtaaacaacatagattcaataattttttagccgcataagtacctaatgttagtaaaactgtaattctcgtcaagaactttgttagtgtctaaaatttgagatttagtttttgaatttggtgaaataagagttagaagtaactgatactgtagaactaaatgaaaattatagttttactaatactacttatgccgattacaaattcaaaacattgagaacttatgcggtaaatgtcactaaaatcttttgtgttgaaagtatgaatctcattcgaacttgtttcgattattcatgctcagcggtcgaggatttaactggagagagtttaaattaccaaacattagaagcaaacatggttggttgttggctggaggaatgaagagtgagaatgtttgtgaagctctttcaattctcaaacctgatggagttgatgttagtagtggcatttgtggctctgatggcattcacaaggatccattacaaatttcttcctttattaatgctatagatctatgttgttataaataatatatttatgaatattcccattcacattatttaaaaataaataaataaattaaacatatatgttggattttttttttgtatgaattttaccattcctttaatttaaaaatagatgaataaataaattatgtatatttattatttatgttagtgagattttcaagagtatttctaatttgtgttgattatgattaattgtgtatgctctttagttgaatgaacaacttgtttggctagatgaatatttatatttttttgtaggatatatagtattacacatatatatatatactaatacacatacacaacatcatattatataaaatattgccccgatctttaatacttataattttgtccttgaattagtttctaataaaagtggcctttaaactttaggaataatttcaaattcacccctttggttgcatttggcttattttttgagacaatttattgatgtagttataaaccagtcatataattacattataagtatctattatactaacttaaactagttagaactaagtacaatgacattaaacattcaaacattaattctaaaattatagatatatagctctaaattttatcattaaagtattatttatacaattattttttttgcatggattctcaaatgagatttttacacctcatgtcaaaattgacatcttttttacatttttatcaatacacggttttttaaacttttttaacttttacatttttcaatttta

SEQ ID NO: 20237 - DNA, 9657 bp, Cannabis sativa
  modified_base (1456)..(1463): a, c, t, g, unknown or other
tgaggtggtggatacccaagtggaggccgaggaagaagacgatgcagggttggatgacatcatcaccatgcctctcttgttcatacctcagtttcaattgatgattatcttcgtaacgatatataaaaaagagataattactattattatttttttacagttttttataaaaataataattgtttataaaaaattttagaaacagaatttaaataatataaattgaagaataaataattaaagagaaaatataaaaaagataaatatttttttacttggaaagttaactagccttagtttatcgagtgtatattcttaaatttatctgagtaaagtctgcaagagagttcaactcctaatttataagattcgtggggtatttatagtaaataatactcttaagcgttctcatgaagtccagtccataaataaggcaatctgctgactagacggatcgaatttagattgatctggtcaacactgagcacactgattgtggacaatatttaatctgaattaattgcataatatttattataggaagtttttcctttaattatgatacgatactttattgtgatctgacaactggaccttccttagttgtgtacaggaataagaagggaaatcgaaagggtcttcgaggaactcactatttcatctctccggtgttgtggtatcagacatgtcttccgagtacgacttgctgaaggtggaaagctttgtgagtgaagaactaagatacgttcctggaaagacatatctaggtgggcttggcccacttcacctttgttaattaggatttttgttccttggcatgtactaaatcatacccccgttaaaaatttctcataaattattgaaattattaaatgtaaagacttttatttaatttcaatcaatttcgctaatgtgacgattgtccatgtactaaatcatgtccaccgaactttaatatttattaaatcatacccccctgaattttaatatgtaccaaattctgctccttaaatttgcatctacgttagactttctttagtaatgtattgaacaaaagttctcaaatccaacaatctcaatagttcgagaagaatttttaacgacctaaaaaattcaagggacattatttggtaaatgtcgaagttcaagggacaaaaattcaaattaaccttaacaaaagtacataaaaatatattaaaataccgtattttttgtacataaaattataaaaatcgtaaaatattttaaaatccgtacaaccgtattttgtaattgtttttattatttttatgtatttgtgaaataacattggatatccacttgtgatcggatcagattggatgctatttttaaatatccaattggatcggatcagatggtggatagggtgtctacaaatccaatacatccaacattcaatcaaactaattagtattttcatttagtttggatgagnnnnnnnnttttatattgttatacgtaaaatttatatgtatatatatgaaaattagcatttaaattttattctttttttcttagattggatggatccagtccaatccaatacatactggacttaaaatattaaatggatccaatccgatctaaaaaatattaggtctaaaacttaagataaatccaaatgaaacgaataaatatatatgaaatacatccaatagatatatgttggatcgattggatgactgaaattaattgaatcagatcagatggtaaaatctaacattcaatatataattggatcggatctggatagacctaaaagcattgaatgtggtataatgaacaaccctataaacttcaacaacataatttgttgacaaactcacaaacgttctaactacgtaaaaatcttaattttaatatttatttaaactctttgaaatctccataaaaattattgatataattgccaaaaaaattggatcaacacttatatttattttttttaactaatgaaaatattagttttaagattgcaaattcacattctcattaatttttattagactattatttatgtaaaagctcgtttggtacgtcatattatattaattgcattgtattatattactattatttaatataatattatgtttggtattaggttgtgtaaagttataatatatttttaataaactcaaccccaaaacaccgaatctagatcgggttcgatgtccagattcgagtctggggtccaagacaagtcccgatatggggtttgggtccgagttttggggttcaggatgtaaggtcccgagtcctgagtgtcccgagtctgggttcggatctcaagtcccaagtctgggtcccagtcccaagtttgggtttgggtcccgagtctgggtcaaggtcccgggtcgggtccgtgcctaggatacggtcttgggtcttagtcccatatgttcgagtttgggtctaggtttgaattcgggtcgggttaggttcggatctcaagtttgtatccaggtgcggggtttgaggtccaagtctgggttgacaccaaatcttttataaatattataatacaagttaatacagatcatttattatgtattaaataatataacttacattttattaaaaagttttgtcatcataattaatacaataattattttatctaaatataatattatttattatttaatataataaaactatattaagactttttttttttgtatagaatattgcactgcttaattatacaggtgatacatcaatatattattttaattaaataaataacatgtaattaaatcggtatatttgaaatgatgtttataaatatctttaaatcttatgatcacacccattttttacaaaaataaataaataaaataaaataaaaaatatcttacgagcacacacaaaaagataaataatatcttgtaaatatttgtttgaaaactttttgtatttttagaagataatcagaaatatagattaaaaaatcatgaaaaacggatctaacagaaaatattttttttttaagaaaaaattctttaaaaaatttggccatataaacctttttattttttaaattttgtttaaaaaaatcaaaatatctaatgtaagttttgtcactaaaaattaaaacaaaattcattaatatctttcttactagccgttcatatatcttttttaaaaacagccaatcacatctttttataattattattaatatattttttttagatttataataaattgattgttcttccgatttttaatttaaactttttttctaattattaaaatttaaaagacattacacgtggcccattatttcattaatccatggctatatatatgatataagatagctcactttaattactaagcatataatcgaacaagccttataataactagctaataagagagctagggtttcaattaattaagctatataatcaaagaagaaaaagaagggaaaagaaagaacaatactatatgatggaagtacgtagtttcaaatattgcccatattgtgggaaactactaaaatgtgctctaggtcttcggattcacatcgaaaaacataattatagcaacaactacgttgatttagaaccattatcatcgtcatcgtcatcaccatcgtacaactctaaattttgtggaagaagtttcttcaaatcacaagctcttaatggacaattaaggatttgcaatgacaaagttattaaaactaagatcagagtcagaaccagaactagaaacaagattcatcgtaaacatgtcttataaaataaaagcattactagctaatactacaagaagaatatcaagtttgatgttatatgtaataattaattttgttagtgttgtttgttaattagtctcattttattactcaaatgggttggattggtattagttgagatttatttagtctttagttattaattgttagctttaactgttttcttttgttttctgttaatatcattctttatattctgttaaatgttagtaattaaattgtgttatctttataaatttataaatagaaggttctttcttagtttttgtaatcaaaatgaattaaatattcttattgataattgattttttttaaaatgatacttaataagttgttggcccatggtctgacaccgaagctaagttgattcatatttagaccatctttaatggataatataaattttatagcaaatttagcttgaaaacttattcattatcatatttggtacaaattttatagttgtaaggtacaatttaacttccgaagtcgaaataatcattaaattttgattgaaactatgtatataaacttcttaaatgaaaatgaaaatgttagaaagcttttagctaataaaaattattaattggtaacaaatcggtaaataaattcggtgacatttattgtgtggtaaaaatttgaagcatgttgtattttatgttaaatttagcctatactaaatttcttatagccctattgaaagttatttttataaaaatatgctaaaaatataacaatacactacttttatagtgtttattaacaacataattattttctacctctccatatttttctattctttattctcattaacccttgctttatatatggaacaattatcttaatctacaagcagagcacaaagtcaattgtttaattaattagatgaatagtcttttattataacttaaattctaaagtaaatacatgaagtttggtggttggaattggaaacttgtgacttgtgaatcatttatttagtttttatgctcttattttaaatattggacttggtagtaattaattttaaaaaatttatatagaccaaaaatttaaaaaaaaatacaaaaatacattaacacggaaaaaaattatttttattctttgaacttttttatttacaaaaaatacattttcagtaaaaataataaatcttctttttttttttttttgatcttttcaaaaaaaaacataataaatctttttttgattatttttataatttatttataattgtttttttaattgttttatagttgatttgtagttgccgtaaagttgatctctcgtttttttagctgaacaaaatgtattcatataattttaaaactttacaaacatatttttatatattaaaaattttagaacataaaattataaataaaatttaaaaaaaaataatatttttgaaaattctcctttcatttttatgtaatattattggaaaaaaaatcttgtgaaaagcatttgttttttgtctagtattttaacagcactagataccattgaatagaaatttcattattaaaaaacaaaaaaacaaaaatcattttctattttatattatatttcatttattctatatgttggaatgtaggaaatatatatcaataagtcaaaaacattcactactggactccccaaaaattaagtttatttatgaaaatatttctttaaaaatacccttttatagtgactcaatatcagattttctaaccacatccatgattgcctttcacaaaggtaattaattttgtaaagacatgagattattgaacatttacgtttcttttaaaaatagaaataggtttctaaattaatacaatctaacaaaataattattggttgtttatttactaatccatcattatatacaaagctaaactaccaacatgtctcatttcaatttaaagatcattactattagataatattaagttcctaatatgaccacaagtgtccttttacaagtagttagattagatgtttcttttcttatcttacttaaaacccgataatatgatcggtcttgaattttagtgggttataagaaaaaaaaatatttatagtactttaaaaatcagtaaaaaatgtctattttttaaaaagagaaattttttgagaacttctggagtaggtgagccctaagtacgggcctattttgcttatgccaagggtcaggttgcctgataatgaattatggtgttaggcactttaacatttttcgaatgtaaaaatattactattaagcacgattggagcataacgaatactatctcgaaatgtgagtgtgtcaccttattcttataaataaataattaactattttttataataattattaaattgtgttgtaagaatctgatacttaattacactaatagtatatagttcctaacagcatgtattttagcatttcttgtaaagcattggataccattggttctttcattcactcttaagtcaacttagtttgacttaagtccatttttattaataatcaaatcttacttaatgaccctttaatatgatcatataagattatgtgtcgtccgacattaaaccaaactcttgtccttactatattttttactgattaaattacagtgactttccagctcaatgcctttcaacatatcactatatatatatacacaattatatagtagcaaaccattgttgagtgttgctcttataacttgtgtcataataacaagtaaagaaaaatgagtttttcacataccataactggtttctcacttgttatgatattgttgtttaagtttcaaagtgttcattcccaacttcaagttgggtattatagcaatacatgtaatttggctgagattgtagttaaagatgaggttatgaaagctttctatgctgatacaggagtggctgctggtcttttgagaatgcattttcatgattgctttgttagagtaagtaaccttttctccttttacttccttcattaggtttcgggtttcgattacactaactatgaactaatacaattacagggctgtgatgcttcgattttgatcgattcgaatgcaacaaacacagctgagaaggattcccctccaaataatccaagtttgagaggatttgaagtaataaacaatgcaaaagcaagactagaagctttatgtaaaggtgttgtttcatgtgctgatatagtagcttttgcagcaagggatagcatacagtttgtaagtttggtttggatttaaatttcatctgttgaatgaaagtagtttaattgcaatataaccccttaattaatctgtatttgcagagtggagggcttggttatgatgttcctgcaggaagaagagatggcaaagtttcattagcttcagaagctgtcataaacttacctggcccatcatccaatttgaatcaactcactcaaatctttgcctcaaaaggtttcacacaacaagaaatggttacactctcaggtaagactaatagtttgttcttccttttgcgattcgatgatctcttacccgagtttgatgtgcaggagctcatacaataggccgctctcactgcacttccttcagttctagattatacaacttcaatggaataaccggtcaagacccgagtttagactcgatgtatgcagctcggttgaagcaacaatgtcctcaaggcaacagaaatccaagcttggttgttcccatgaacccttttagccctaccgttgctgataacagctactattcagacgttctagcacgtcgtggcttgttttcttccgaccaagctctcttgtccgatgcaacaacagctagcttagtgaatcaatttgccaaggctccctctctctggacaagaatgtttgctgatgcaatggttaaaatggggcaaattgaggtccttacaggcaacagtggcgaaattcgggcaaattgcagtgttattaacacctaaatagaagagttatggagtgtttgtatttagtgataagattttggattagcaaaacctcaaaaggggcaagtgtaattgtatcaataaagaccctgagagactacttgagtgagttgaaataaatgtaagtaacaatttcaaatgaataagcttttatgagactttaataaatcaaaaatgagaacagcataataataataataaggaaatggaactaatgatctctgtccacaaagggaatatgcaaaatctaagcctccatatagatgggaaaccaatttaagtacaatacttaatgataaactcagaataataattaaactgcactaaaaatgtaagaatgctaagttaagtggtgagctccattatagcactaacaatgtccccatcatgagccttcagagccttaacagccttgatctttgaaacaccagcctgtgtcatcaccaaatcaatgtccctagcctcaacaccagtttcgtcaacctcttcctcttcttcttcggctgggacaccagcagctggtgcagcactgtcagctttggctgtcacggcgctcatgtctggcatcctgaattgttgggcagcttgtgactgcaactgagagcttaaatcctctatctttgcttccccgaatatgatatatgtttcggaatgagggctcttgaaaacatcaggtttcgagatgaaaaataagatctgaaaatgaaacaccacacaacatgagtttaggtgaaaaattgagtccatactatgtgtgttcattcatttcaccaatgacatggaaaataatttcttactaacatttttggttcttttgatggtgaccctgctaacacctgtaactggcttcataccgagcttcaacattgccttgcgacttttcttctcgcttctactctgcttgggattcccatctgcacctgtaaaaattatcatccaatatttaccacaaacaaaaattaaaccaaaggaatcattacaaaaaactataattgccataaacccctgtttacaaatcaagcacaagactcctgaaacttgctcagcaaatttgtaaagtccttctggtggtatttggataaaaaaataagtcttttgggagagtttcgtccaaaaggactttcaagaagttatttttaaaattataataatttacaaattcctcaattttcaaacattttcaaaagtaattttcataacaaatgaggcacaaaatgacatttcactccaaacacaaaccagatgaagaacaatggaaatggctaaatcaaacattttactgaaaacacaagaaaccaattccataatcaaatgctaattaaagccatgcagagataagattccaccaaaatgagcaagaaatccacgtaaacaaaaatcaaaattcaaaccagaaacaaaccctaatcataacaacaaacataatgaaatgaaatcccttacataaaacatattaataacaatcaaagcagagaaaatgagaataattaccaggaagacccgcttcatcatcgtcctcctcgtcatcgtcctcatcatcgtcatcctcatccttatcgtccttaacatcctcaactataacttcatcttcctcgctctatcaaaaaccaaaaattcaaacttgaattgatgaaaattctgtaaaccagtccaaaacacgtatatgaaaatggagttgtaattttatatataattaaattgtatatatatagatatatttatataagaccttaggagtggtcttgaggggtttctcggtggagaggacttcctcggtcaaggagtcggtggcggcgactggctcgacgactggggccggtgacatttcggcgaggagtggatagtgagagagaatggattgggtttaggagagagagagagagagagagtgagtgaggagatagctcttcggattg

SEQ ID NO: 20238 - DNA, 3073 bp, Cannabis sativa
acaaacataatataaacccgtctgtaaaacccctaaaaatcgtaaagctcaggaggacagagggaatgatgcaaatatcatttcaactggttgcttatgtgattaacacctatgaccatctccaactccaatttaaatggtgcaactttaagtaacatcatttcactatttcatctcctacatattacaccagataataaaccaaacaaatattccaaataatatatacatctataaactaattacttcaattggggcttgtattgtaggaatttctcccctttattttttaaaatccaagttataatctttaattgagtaatttaaggcacattatacactataatgttattttaaatcaaatgcatgccacatcatattgtgcattttgagtgagtagaatgagtgtgtgtctagcattactctagacatttatttcaatactttcaaaatatttaatacagaactaaaagcttttttaattttggaagtgcaacactattttgcactttttgtttatgacaatacgacaggtggattgatattcacttttaatatatcaaaagaattcaaaatttgttgtccaagataagttccgtaattagtatctaacctattagattagattaagacatgtgttatcctaatttacttggttagacaccaattaagatacctaatttagacaacaaatttgaatccttattaaaatacaaaatactcaataaattacacatgtcaacaagagtcaaataagagtgtaaaaggagtaaaatagaatatttctaacactcctaataaaagattagtaaaataaatgttaaaacttatagcgataaaagatctttgtggtgtaaaatttgacgtaaatgattggagatgaattagtgatttaatgtaaaaggtacaccaaaatgatgttcaagttgctttatattaggttgtagggtggctggccttagtataaacatcctaattctaactattggctttaatgaatcacattgcacatgagaagttgaagctagtgatatgaaatcaaaggaaatgttcgaccccatccaaaatgcaaacaaggaacatgaaattattccagactcatttgaagataggatggaatcacataatatcgtcatcctcagacacaaaataggtattttacataacctactcgctgtaaagatgacttaagttaggtcgttgtaaaaaatgataacaataactaaccactacttctaactattggctctattggatcaccttgctcgtgagaagttgaagctaaagatagacaatcaaaggaaatgttcgactccatcaagaaagcaagcaaggaacatgacattattcccaaactcatttaaagacaagatgtaatcacataatatcgtcatcctcagacacgaaataggcattttacataacctactcgctgtaaagatgactaaagttgagtcatttgtgaaaaatgattacgataattagccactatttcaaacaattggctctattgaatcaccttgctcgtgaaaagttgaagctaaagatacagaattaaaggaaatgttcaaccccatcaaaaagcaaggaacatggcattattcccagaatcatttgaagacaagatggaatcacataatatcgtcatcctcagacacgaaataggcattttacataacctactcgctgtaaagatgacttaggttggctcattagtaaaacatgatttcgataactaacccctaatagtagacaaatatttgtataatcgtgtaagtgaacttgaaatgatgagtttttccatatgaaaaaacttaaaagcccaacgccatatgaagatgaattcagtgattggtgtaattcaacatcccatccagtgaagttgggcaccatagcaatattctaaaattataaaaattcaatctttcacactgttatattatcaaattacccaaaacaaagatcaaacatatatcattacagattcaaataaagaaataaaagggtatctatacctgcgaacagcaaggccaccaaggagcttgtatctcagagactcagcttgagcaatagcacaaagacccctattgttaactttctcagcataaagctccacactgttctcaggaaacttaaaacgtttctgtacaaccgaagtcaattccctaattcttcttcccttttcccctaatcacattcaaaatttccaccatttttacgctctcaagtcagattccaaaccaaaaactataaaccaacatcgttcaattcaatatcaacagcttaaaataacaataataataacaataatcaaaagaaatcaaaaagaggaaaagcaccgagaacattttgagtacgagtagctctgatgataatctcagtgcgcattggagttactctaacctcaacgccagaatatccatcctccgcaagttctctggtcaaaacctcattcaactcagcgaagaaaacaccatcggctacaaactgttcacaaaatcaaaattcagtaaatagattctttctttccccataattagaagattgaagattgaagattgaaaatgtacctttcgcttcttgctcatctgagtcgccattttgggttgagaaagcagagattagggctgccgtcagcaatggaatttgaggtttttggctatggcgagagtgagtgaatgaaaccctaataaaaggttttaagaaagagataatcgaaggtttatatagtagtgacgtgaaccaggattcgacataaacgacgtcgttcccgctcttatttttattttaattataaaatttgattaatagtttttttttaaagatttaataacacaaatttaattgtagttataatatttttttttacagaaaaaaaaataattttgataaggcacaaagtcaaagagatttagagatcaatagaaaaataatttcattaaataactaaagtaaattcggcggaaaattaaactaccaaactctagaatcatttagagagatagctaacttagctaaagaaatgagcaaaagccaactagagcaatttttttaaagggacgatttttttttt

SEQ ID NO: 20239 - DNA, 1453 bp, Cannabis sativa
ttttttttttttggaataaaattccaaatcatacatacaaaaaacaggtacgaaaaaacgtttagattatacctggcttcacaaattagatagaaccataacttatagatcactttagacaaattatatttttcaaaatgcttggtaccatggtaatctagctataaatattttctcctactcttctgtcagctttccatatatctagtcagtgcaagattgactattttgatgtagtactctttagataaagccattttatcttatcagtgtcaaacacgctaaagacggccttaaataaatgtgacatcatacacgatcaagacagaacacaaggttatgactttacctataggcttcagcaagtactttctctatgtgagttacattccttatcccaaatgcaatagtgtaaccatccattgaagcattttcaaagctcaaggcctctgcatttccctccacccatataagtgattggtgttctccaagacctatatttacgcacacaatttcatttataaacaaaataaatttctgtttacagacatattggaatttactcattcaaattctttagcttacctttctccaaggctcgttttttaccaacatcaagcatgttagggttgatatcacaaacataaatttgcgtttcttctcctaaaccatcttcgtgaacatcttgcaaagctctacgtctagtgctgtttattgtttctagaattctgaaagcaacatcccctggaaatgaaaacaaaaagcgcaaaactataagaaaatagggttcagtccaaccaataaattttaaaataaagatgatcgttaaaaccaaagcaaataatttcaacttctccatcaggatgagcagctatgttcaacttctccaaattcaaaatgaacaattttaagataataactattatggcttaagattaagagcattgcagcgtaccaaacagatgaggttctcatttctctttgtatttttcttatttccatttatcaatgacagttctcatttcttataattaaaaacaatattgttaaaacagcaagttctttctgttaacatcaaaattgaacacttatttatttagcagttgatcagttgattccactatctacaataacctattcgtttgcttcaagtaatcttaataaattgaccattttacgcatctaagtcttttccctaaaaaattaaagaccacaaagatcatcatcagatttgtcttcaaagattctcttaaacctccggttgtttctactctttacatatcaaacggacaatgcatatagttacattatatgctgacctgttccaccagcaacgtcaagatgtttcataccaggaaatgggttcaattcagaaaccaatctgaaaatcaggcacatcataggcaacaatctaaatgagacataagattcaacgtaatctaaagaatatata

SEQ ID NO: 20240 - DNA, 5836 bp, Cannabis sativa
actcgcgtgtgagtctcactcgcccacatagccacatgtgtgtaacacttctccttgcgcatctgggggagtttttctaccgtatttttgtaaataagagactttaaaaatagtatatttcaaattaataaacaatataaatatttattttttcttgtagtagtataaatatttttttaaagtaatattaacccaaaatagaaaaaatccctaattcactccccatgtcgtgatggtaatggagctacgtctattttgagtttttatttctcacgagacggtaattacagaaaaaggctaagtgtttaagctctaatttctagagagaaaaactagagtgagatgctctgaccttgtgcgtaatttttttaatatgaaaaataagctagagaagctccctttttataggttaaggagatccttaaaaataggaaaaaaataattcaaaatatgaaaaaatataaatttgctaaatttaactgtagatgctgatctaacaatcaaaattaatttctagggttgatagtcaatttttttgagccaagatcgcggcggcgagacccactccaggtaagtcggagcttattttcataactctgagggtcaaatttaaggtcgagaacttcagaactacgattaaagtgtgagacaagacttgataggtcattgaaatagcttcaaaacacaattttaatcgcatcaatcaaactaatcgtgagttatttatgatcgtttcactaaaagtagttcataacccagcacccaggttaacatctagtgcttaggttgacatcccaatgcccaagttgacatatttcaacaacctggatgctgggtaagtgagaaaacctcccagtgatgtactttttgatgtctaagtgatattttgacatcactctatctatttttgcgttttggcaaagttggtcaccagttcttggagatgttgctattctacagaaatgagagactcgaaactcttcatttccgactggttttcccatgttggaaatgagaaatttgaagttataaatttgacttctctaacttcatggatcttagttgttgtgaaaaattagacgaacaataaaaacaggataagaattggataagcagaacccagttcatttctaggctcccacgttgtcattttgatacttccaaggttcttgaacttgataaagaggtctcttaccccatttttttgcattcttaagagagtgctcaaatcatatttggcatttgaatgattgaaaccaaaacaccaagttgattgtcaacttgggccctgagcactgtttctaggccctcgagtttgtggttttctccccgagtttgcttgaatcttaattatttcaaatgaggaaaagaatttctgaaacacttctttgaaaatctgattggaaaaggcctaggttgataatatgtcaacctgggcgtgaggcctagtatcaagtgtcaacttaggcgatgggtcctagtttgtgccctttagaagctctgttaggtccatagaaatagttgaatcttaatcttttctgaaaattaagaatatgtgcggaagagttctcgaaaaacattatcagaatcggtgcaggttgacaaaatgttaacctgggtgttgggccttgcttctggcactcatgaagttcattccctaaaagtacatattttaatgttttttatgaagatgaagataatgaaaaagtcagatctttgatctaatacttgaaacttgcccagattgataaattgtcaacttgggcactaggtgctcaagcactggctgctctgggtgcttaaaaattaactttctcttaatttaattttgatgcctcaaatatgtttgtggtatgtctagttgatgtcccaatgaaaattttgacctattttcactaagatgataccaaaaactgaaaccctagttatgaatgcaaacttgggcactaggtgaaaccctaggtgcccaggatggcttttagggtgcaagattgtgtaatttgagctccccgggtttggattttgattgctccatgtcttcatggtaaaagatactaaaacataaggagttgggaacaagttatcgaagtttgaacttctattatggaattcctaaaccctagttagcaatgtcagcctagccgttaggtgaaaccctaggtgcccatgttggcttttggggtgtaggatcgtgtaatttcaactcctcaggtctagattttgattgctccatgttttcatcgtaaagaatacaaaaagataaggattcaggagcaagttatcgaagtttgaacttccattatggaattcccaaaatcaacctaggtgtagggctagggacctgtcccaagtcgacttgctatgacataggactactcaactccatgtcgtctttcatgcaacatgtcaaacattgttgtccatgtcattagggctaatttttgtgtaaacatcacggactatgaatacactagcttccaggcggataaaggtatgtactgttatggtcatgccatttggaccaaagaatgcctgagccacttatcaaaggctggtcaataaaatgttcaaagatatgcctgcgaggaacatggaagtatacgtggatgacatgcttgtgaagtctagaacttctagagagcataacaatgatctggaagaagcctttgctgtcatccgaaagtatggcatgaaactcaacccaaagaagtgcacattcagagtatcttttggggaattcttgggtttcatattagttactgggatgctaatctagaaaagatcaaagcattcatggagtttccatctctgccaagtgttacagaaactggagtcatccaaaaggtttttgatgtgggccatggaacttattcaatttgacatccagtattagccccaaatctagattaagggacaggccctagttgacttcatggtagactgctctggaatgaacgattatccagccgagctagttccagaattgccaccctaaaagatctacgttgatggaacgtcaaatgaaaaaggatctagagcaggaatcatcttagtttctctgcaagtatagcagatccaaagttccctttgttttgagtttcccgtctcaaataacgaggcaaagcatgaagctatgatagctagcttgcaattatcaagagaagtaagagcacaaaacattgaagtgtacaataattcccaactggtggtaaaccatatatctagggagtatcaaaccaagggagaaaaaatggcttcctatgtgtcacgatcaagggaaccgttgcaaaatttcaaaaactacaacatatgacaagtctcgtgcgagtagaattcatttgctatatgttggcgaagctttcaatagacctagagattgtgtaatatggcatggtgcccgttgaccacttgaaagccccaagtattgaaaaatttaaggtaaaatccataattgaccactcaaaatcatggataggtcagatcttccactacttgaattctagagagtcttcaactgacagagctgctgctcagaaggttcaataccaggctcccagatatgtcattcgaaatttaaaagctttattgtaagggattatctgcaccatatcataggtgtgtagccaaaaccaaaataagcgccattattcatgaggttcacaaaggtttctatatgcagtccatacttctagaccgatcccctctttcaaagaagattcttcgtcaagggtaattttggccaacaatgaagaaagattacattgagtacatttggaagtgtgagaaatacaaatcctatgaaaacgttttgtgaaccccaccaacagaaataactttgatgaacagtccttggcctttcgtagtatgggaaatcgacctagtgggatctctaccaactggaaaaggaggagtcaagtatgccatagttattgcagaatacttcaccaagtgtgtagaagcaaaacccatgaatatagtcacctcaaataaggctttggacttcgtcatcaaaaatatagtgtgccattttggccttcagcataagatcgtatcagataacaggaagcaatttgacattgtgtagttcacaaacttttgtgtccaccatagaattatcaaaagtttcttggttgtggcaagaccactagcgaacggacaagtggaggtcgtaaacaagatcttaaagatcacattgaaaaaaaattgtaggcattcaaagctcattggcaggaagcacttccaagagttctttgggaatatcaaaccacaaaaggaacttcaacatggcacaggccttacttaatggcttatggatgcaagtacccatcctagttgaaaacaccattccttcacatatatgagaaatctattaaccatgctctgcttcaagaatctttggacttaatcgaggagctccaagaacagtctcaactccaactaaaaatttattaaagcgagattgtcaagcatttcagttccaaagttaaaagttgatcatttgaagttggaaatctcgtcttaagaaaagtattcccatcttctcaagaactgggagtgggggtcttagcaccaaacttggaaagaccttatgagatcctacattaagtgggtaatagaatgtaccaattgaaaagactggatgaattggagattccacaagcttggaatgtagatcacatgcactgctagtaccggtaaactggtgttgtttggatcaaaatatcttcttctattggttgtaattttttaatttttcttctttatttacgcctctgggcacaatgaaattggaaaaattaatgaattttatttttgttttcaagctgcattttaaataactgatcaagaatttagagactttggaattctcaactcacttggggagtaggatatatagctatgtacccctaaaaatgtgaaatgccattttattgttatgttcaagttctactcactatttttattatcaaaaattgtggaatgttgaagtagaaaaatttacctgaatcattaacatttttagctattttcttgccatattcaaaattgatggaatatggaagtagaaaactttgactgaatctttaacatttttagctattttcttgccatattcaaaataaatgtttatacctttatgtcttaaaattgagaatagaaaaccacgcctaaaatttgtttttcaactgttttcttaacattttttgagaagggtgaattcttcgcgcatcattttactttgttaattaatgaacaaatcatggaatatatacaatacttttcttaccattttttaaattaacaattcctagtgcagtcgtgaatcaatatttaactagttacggaagtatagagttctagctaaaactagagacttttagagccgagagcaagccactatctcactgtacttaagaataatactcactaagtcaagttggtccaggaacaaaaacacaaaatgaagtccatgagtgtgtatcctctaaaattagttgcctagggaaccgagagtaagcatagcctttttcatcacctggagccaacagactaaggtttttgtttcgtggaaagttcctaagttgaaagatatgtacttgtgtggaacaaaaagctagaatccaaaaatcgtaggtgtcctatgtattaattcttagtattaagcactaagaaacttaaatggaggattttcttctcaaatacgagggacacataacatgaaacttagaatggtcctaactaaagcttaagccttggagttcaatccattagaatcaagaactcatgacatccaaagtcgcttgaaagcacttatgcaaacataaataccaaaggg

SEQ ID NO: 20241 - DNA, 1689 bp, Cannabis sativa
tttgtatataaatatgtaccattctatgaaatagacacataattcgaatcactattttctacagtcacattactttccatgcttgttttacgtgtagtttgtcacttctctttcatgtcttgctgactattttcctgaatctgttgaccaactttcacattttaactggcaattgtatgatctgcctagggtattctgcttattccagtttctctcaatttctgtcttcttttcgccccttggattgtaatacaaaaacacaagcttgctgatttgttcttggttgatgctatttggattcccttacattgcattaagataccacaaccattattctgttaatgatttcagctgttgctttattgtgttggggctaatttgtccagattttttgaaaaatcaaatcttcttggctgttaatttgtcagatggttttactgtctgtagaagttccggttgattgatactgctggaattagaagaagagcagctgtagcttcactaggtagtacaacagaggccttatcagtgaatcgagcatttcgagccgttcgtcgttctgatgttgtagctcttgttattgaggcattggcttgcattacagaacaggtagtcaatcctttagctttctgcagggccatattccaatgatatcagtgcatgtgcctttcattgatagtaagcttttgctattcctttttaaacttctgaatttgagttttctgtcttaatgtcctaggatttcaagattgctgagaggatagaaaaagaagggaagggttgccttatagttgtaaataagtgggatactataccaaataaaaaccagcagactgcatcttattacgaacaagatgttagagagaagcttcgcatactggattgggctccaatcgtgtattcaactgcaatagctggtcagcagagtgttgaaaagtatgttctgacaaaactcgagaactatagtgttagatgctcaataattgtgaattatcataaaatcctgtattttagctaaggtatgctgtgtgccatgcttcgacttttgcaagatcttcatctcctcgtgaacattaatttcctaacctggaatagcagatgaaaacatgtctttcttcgcggtttaatattggatagctgttgttctttgctaaaattaaatattatttgttacttttttgtttgattcagggtaattgttgctgctagcgcagttgaaaaggaaagatcaagaaggctgagtactgccattttgaatcaagttgtacaagaagcacttgcttttaaatcacctccaagaaccaggggtggcagacgtggacgtgtttattactgtactcaggtagattttcctttggttgtactcgtaagttgtattccttttacaattctgtcaggcaagatctgaggtttgactccctcctaagtactcacatagtaattgttataattatagttttctaatctaaaaaaaaaaatcattttagtggtaaaattcatatatttagagcatgtttggtattgttttttattttttgttttcaaaaaattatttttaaaaatgagaacaaaaaatagtttttgaagttcttaaaacacaaaaaaacgtttggttagtgttctttaaaacaatattgaccaaaagtgaattggtttttaaaacagaaaacaacattttgttgttttcaa

SEQ ID NO: 20242 - DNA, 3249 bp, Cannabis sativa
  modified_base (2750)..(2761): a, c, t, g, unknown or other
  modified_base (2793)..(2795): a, c, t, g, unknown or other
gcgggacaactcgggtctgagcgacggttggacttacaacgtcgatttgacgggcggttactacgatgccggtgacaacatcaagtttggattcccaatgtctttcacaacaacaatgttggcttggagtgtgattgagtttggggactcaatgccgccagctgagttgaggaattctatggtggctattcgatgggcttcggattacttgctcaaaaccgtttcacagctccctaaccgaatttttgtgcaggtaaatattaataataataatgacaaaattaaataaaaaataaatatttttactttaattttgttgaggtgaaaaataatttatttatttatttttatttttgtaataaacccgtgagtgggttttgggagtgtagtctatttgggttgtttgttgtttgataattgacctcttttggaccccacttcttaagattattgaacatgatcatcattaatgtattcatttttcaactgttttttttttcttttttggtaagtagtgaataagtaactgataattgatttaagtaattattttgtaggaaatataatttattataattcatgcattttatttagagctaataattataattggtaaaaagtgatttgagaaaaggggaaaaaaatctacacatttttctgtgaaactccctttgttagaatcccaatataagtttgtgtcgttttatacataacaaagttccaaagcaatatgctatttcgataatctcttctttattaatatgacactttgatacccattgtttcatggtataaatatgtgtggtattgagtatcataaatggtcaacattttttatcggtagcatccatatttcttaaaaattattttttaaaatttatgagatttaataccaataataatataatattgagaaaagtgttaaacactaataacatattttagtaagaatgtaactaacatgcatgtcactagacctatatatacatatagttaattaggtcaggtttgtaaaattttgagccatattaagaagtggtagtagtagatgattagggtcagccgtcctatatatatactttcacaaaaaacaagtaaattttgattattattgctgccttttatggttttcaactccacctgtgttacagtattattagacattagtattatcttaaaattattagttagtgatatttttaaatattattatattaaattatatgtgattcgataattaatgacactaataataatattaataggtaacaaaaataataagtattactggtaccttttaacatttctccattattatatctaagtaacaattcacttataaaatatagttttttaatgagtgagtacttaatattattgtctcctttttgtgtacaagtttaattaatcatgtgtatgtggtggaccatatatatatcttcccatgtctaaaatccgtgatcaatttgcatggaccatatcatttgtgtatataaaatgtcaagtgatgagataactatatattacacataccatacatataaaaagaccttaatctccttatatagtgacataaattatagtaacaaactcccaagggtattaatggtatataataaaatttaacacatgacattttattatgtgacaaataacaatatatgtaggttggtgaccccataaatgaccacaattgctgggagagaccagaagatatggacacagcccgaacggtctacgccgtggacgccccgaaacccgcatcagacgttgctggcgagaccgcagcagctctagcagcgtgttcgatggcgtttagggcttatgatccgagttactcggaaacactcataagaaatgctgtgaaggcctttgagtatgctgatacttatagaggagcttatagtgataattctgatattagggatggtgtatgccctttctattgtgactttagtggttatcaggcaagttaataagttattaatttgagtaacaataattaatgaaataatatggttacaaaatttataggttaatttttccaacacaattaataaattctaaccggttagaaataaattaattaatggtatttagtagtcaccacttttaattttaacattttggttatgttataataaatagtgttggctgttttggttcatatgtagtagtagtgataactaccaataggtttttatagaattgaattaaatgtatagatataaattgttggaaactatatattatatatatttataataataataattattattatttttatcaggatgaattattgtggggagcagcatggctgaggagggcgactgaggagggttcgttcttagattacatacaaaacaatggaaaaacacttggtgctgaagataatatcaatgagtttggatgggacaataaacatgctggtctaaatgttctagtctcaaaggtataccagccacttattatttttgtattattattttatattatatttcatatatataattattcaaatgaaaatatgaaaaatatttttattaaaaaaaaattgaaagttgaactattataataattcattataacaaattttattttcagttataataaaatttgtgactaaaagtgaaaaattgtgactaattataaattatcacttttatgttgtgattaaaaagtttgttattaaaagtcacaaaaatctttattatttgttgtgattttagtcacaatatttgttgtgnnnnnnnnnnnnttagtgataacttatatttaaatactatgttnnngtcacaagtaattttttgttttgaataaaagttacaattacaaaaataatttttttatagtgattttagaaaattgcgtcctttttatttctctttgttattttgtaaccaattttcaaacaaaacctataaatttttccaaataatatactaattgtaacacacttgtattttcttactaacaataatatttagttaatgtcaccataaatttaagaaaaagtgacatatatgagtcaccactcattgtgtgtaaaattatttaatgtgaatgtgtgtctaatataattttgggataattagatgagaaagattttttttttccatatttacgattttttataaaaaacaataccacaaataacaagaaaactacacgaaaataacatcaaaataataacaaaaaatcaacaagaatacaacataaaaagtccgtattttctgtaaataaaat

SEQ ID NO: 20243 - DNA, 2643 bp, Cannabis sativa
ttagatatatattcatcatttcacccttaaaatcatgacccaccaaagtattttttcttaatcaaacaattttagtgacaaacctttgtacaaaactttttaaaagttcatataaatgaaattaagaaggtttggagacctcagtggtttcaacaattgaatcataaagattgcttgaattttcagtataagaagatgaagtttcctctgaaatcattctagtctcatctgaattcaacaagctagcatttaaaaatggaggttgttttggtgatggaattccatactcttcatcagtcaacattttaacaacatcagacatagatggccttagtgcaaccgaagcttgtgtgcacaatagcccaatttgaagtacatttgaagcttcttcaatagggaaatcactttttaatcctggatcaatagattctgatattttcttttctttgtaacacttccaaacctaataatcacacaagaaagaaaaataatatcaataaaaacatgatgtatttcacttgtaatgttgttaaatatgaagaggagaaaaaaaagatgttgaaataagactcatactgaatgtaaaattgagcctgatcccaatgtgaaagcactattcttcctaccacatgcaatttcaagaaccaacactccaaaagcataaacatcagccttttctgtgagttgccctctaacaagatattcaggtgccatatatcccctatataaaagttttaacaagaaaattttagttgagctacaattagttacatgtggtgtctaacatcacaaataagaatttaagacctatttgtattagtgtttgatgttgaataccacaagtaacatctatttttcatgagaagcaaaatttgtgcttacaatgttcctgcaattcctgtgcttagatgagttctatcggccgaaacggatcgagcaagcccgaaatctgctatctttggaacaaaatcatcaccaagcaaaatattactagatttgatatctctatggataatcttcaaaccacaaccaccatggagatatgcaagcccttcagctattccagatatgatatcaaatctttgttgccaacttagtatatatgtgttcttcttatctatgtaaaacaaaaagcttttgagtattgtaaatttttacacaaagggtataaattttaagaggaaagagaacaagaaataaacttaccataaagtatttgatcaaggcttttattgggtacaaattcataaactaaaaggctttctggtccttcaatactacaccccaaaagcttcacaaggttcctatgttcaatcccactaatcaaattcacttcattgaagaactcatctacccattgccttgtattgaagaatagtctcttaacagcaacaactttcccatctgggagaatccctttaaacacagaaccagccccaccttgtcctaattttcttgtcatgtcaaaatattcagttgccttttccagtatttcatacttgaaattcaagtttgatttttttatagttattgaaacatcctcatgaatcactaagaaataaagaaagaaagagttagatcaaattacaattcagatgaagtaataaagaataatgttaaaatgttataataggtacctttgtttttcttggacttatatccacaataaacaccaacataaactccaaagagggcaagaagacccaacacaattgcagagaaaatgccagctatgatgatccaaactcggtttgatgctagcaaatcatgtagaggagaacctatagacaaaaaattagttaaagctatcaacattttcatgaataaaaacaaaataaatgagcaaatccactatagtatttaggacataaaatcaatagaaacaacatcattccaaattgtgtgacattaaaaattctctctttttttttaccaaattcaatcaaccattcataattcatacatacattgtgggtgaatctaattcataaaataaaatacttaagcatcacacattattactacacaaatacctcttattaatgtgtgatattatcaaccaaatttataatatgctatttgttatctgtattatattgtaatatggttcataattaaaataaaaatagctaattaggatttttgctcctgaactttgacatgtaccaagttatgtcctctaaactttgaagactgttaaaaattccccttcactattgagattgttggattcaagggcttttatctaattttagtaaaaaaaaagtctaatatggatgaaacttcaagagatatgatttgacacatgtcaaaattcgataggcataatttggtaaatatcaaagtccggtgaatatgatttagtacatagacaatcaccgaattagtaaaattgactaaaattggacaaaagtccttaaatccaacaatctcaggatgaatttttaatggcgagcataatttggtacatatcaaagtttaaggacaaaaattctaattaaccaataaaaatatctcaaaattaaacaaatttttgggaaaaaaacactaattatatacatttttccaaataaaactaataaaaataattcacaattaatgtgatgaattacatttaagaaagaataataaaaaaaaaaaaaa

SEQ ID NO: 20244 - DNA, 3439 bp, Cannabis sativa
attgtctatcctaagggcatgcttagccaatctatgagcctcaacattaaagttgcggctaacatgagagagagatgccctaggaaaattagacaataagactctaatatcagaaaagataaccccaattcattgaaatacactgtctgacccaccaaagttgagaccaaagaaagtgaatcagaaaaaactttctccacgggaagtctcacatcttgagcccaacgcaaacctactagtaaagctttatatacacggtttgtgtctagattaatacatcagaaaatcctctttgataaaacgtaagaacttctttcctgaattagatatatcacagctttacttgaaatatccctgatgtaaataacagttttcatacacaaacaatgaataatgcattatagagatgtctaggaaagataatccctcaaatccttttgctttgaagacctatgtcgcaacccaaaatttagtcttcacccacagtccttccgctacatcctctttatcttcaaagattctttctagcagtagccagaccgaccagaagataacaagaatggttgctgtccacaatgtagagatcctcctgcccccttttaatttacacggacaattgggtgcctgaacaagacatacaccattgtatgccaaattatctgttcatctcatgccatagaaattgagagaagggacactccaaaaaaataaatgggaattagtctccccacttttcttgcagcaaacacaccaccctggaaacagtacctgataaggcctcctctattgtaacttcgcatgaacattcagcttctctattgctgatagccatccaaacactttgattttagatggtacacaacttttccaaactgttttggtccatttttcctcaagaaacaaatgatgcgagttaagtcatgaaaaactgatttacatgagaagactcaactatatgatgtgcttaataaataagcccatatctgttatggaaaaaaaaaaaattctaaaacatttatgttatagtcaaattttacttgggaaaatttagttcattgctagttcacattgtctggttgtttggcagagttgggaatggttcaatcacttccaagaaattactgtgattgcatggatggaaaaattgttcggggtaataataaaaagaacaagcttttatggaattggagtgcttattggttcttgtgtgttctaaagagagttttgtatagtctttcccagaaaagatcaacttttgaatttctgtgtagattatgaacgagaaataatttaaccatttttctttctctgaattgttcggagaatgagaagtttattttaattgattgggtttaggatgataacttattcattttcgttgtatttttttttgtttccttgttgtaactttacttatattttgtggtttctgtggtgagacagatttacttatattttgtgtgcaactttcttcttgataaatatactaattttgttttttattgggaaaatagtacgattactattgaactaaaataaagttacattgcaatataaatcaataataataatttatggataatacttgtagttgttggtttgttctttcactggcataatgtaattcagattaattatttgtctattataaataacataacagacacctttttcttttcttttctgtttcgctgcacgtatcaaatttactgattttgccaattttctatcatttgaaacattaaaaaataacgggtggtgttatgatattttttgcgcagtcctgcataaatgttgcactcaaatttgtctcgccagaaaatgtcggtgagtgcattcgactagcagaagaattccgagtccttccctcaaatcatattgccaaggaagacaaattgcaggtaggtgatatttccaggtttcagggttaaatattgtattaggaaggccatggttctagtaggatggtgctacatggttaatgtctattcttgctgttctttgtttatattctgaccactttattttacacatgtattccgcattagagggatttcatgcaggggttttgtgtcatttgtagagcattggttgctgacagtgtatttatggacacatttataacttaaactcttttaccttgcattatcgagtaggtgaagaaaatgatccttcatgcaatgaattcagctttggaaactttggtaccagaactaaggtagtttgtcataactttctgtatgtatgtttattgcaaaaaaagctaaggcttgccttaagcttatagttttcttaatgggtttacttgtgtaaatatattagtttttttgaggtatagtttgtttacacaagtttttcgtcaacaaattaattaatcaaataacacttgcaatgctaaataaaattgcatttattgctactgcactgttcattttagttcctactgcttttttacttgtgattcagaatgtaaattagaagaaatttagtaatctcaacactttgtaaagaaggttcttataatatgctcacgatatttgcaaaattgaaagtatgtctctcattattattttttggataggtagttgggtatgactattatttgtggcagctcttatttttcatgcgtgaccgtattaccatctgaacagtactgttatttgtcagatgccatttttgtgcatatttgctttatcatttctagtctggtcgattttggttgtgtcaactctagtcgagatttttgaaaatgttgagtgtgtcgatcaatataattttagttgccaatatgttgattgtgctattgtagttttttaaacaaatttgaaatgccagcttacttccaaatctttttcatgggacgtcctcggcgaaccccttgaacaagaagaacaaatataagcctgtgatctcttcttctgtccgagcctctagagaaaagagaagcactgtcgtcgttgattctactcctgcaaagagcaaaactgccggatcgattaattttggggttgtgattcaagaagttgctttaacttctcctgccccttcgataacacctggcccttcaacttccccaactgcttcaccaattcctattactctaccagttcctgctactctagagcctccaaaattttctcatgagacgccctcaactacctctgcgccagcactttctgtacccgatcactcggccaacctcttggatgagaatgaaaggtataagctaatgatctcttcttctgtccaagcctctagagaaaagagaagcactgtagtctctgattctactcacacaaagagccaaaccaccgagagtaatctcggtgttgtgattcgagaagttgatttaacttctgctgccccttcgacaacacctgcaccttcaacctccccaactgctttgccaatccctattactctaccagttcctgctact

SEQ ID NO: 20245 - DNA, 3142 bp, Cannabis sativa
tattcaacaacgtatgaataattttttgattagtgatcgttaaagttttttcttagaataaattaaataaaatagattggtgcaatcgacctattgataaagatcaatctgactgcaaataacataaataatgttaaaaagaaaaaactctaattgaacgacatgttttgattatatggtacagtaaaagacatatatatttatcacattctctttttactattattatataaatattttataaacatatatattattatattattttatatattattatattatttatgtttataagtgatagaaatgagtttttgtttttcagaaaagttgtaaatcacaaataattaattttttttttgcaacatgaaacatcttatgtgctgcatatgctactcgtaaggttaaatggggaattactctcctagaaactgattttctctctagcttcttgctcttgcagctcttgagctggtgctatggaaaagacgagatccaaggtgcaagggagacaacaaactgctatgaaaccaaagaaagctcggaagaatggcccttcataaatagcagatgttaagaagacgaagtccatggagtcgattctgcgtattgaaccaatcaacttcaaggatgaagaagatagtgatggtgatggatagtgtagcggtgcgaagaatctggatgaggatatcttccaagctccactctctcctaattcatccgtgagggcgatacaacagcaagaagatgttcgagctgacttctcagcatttatcgaagcaaatatccaatgtaacagtgccatttcacaaggtaagactcatctgcctcctatactgagatttgggaatatacaacgtaatctagatagctcctttatgcaatctgagaaacaaaagtcagaatcaccatggaggatattgaggaggaggtgaactactagaactcatcaattgtgtgctatgtctttggagcaaaccctcctttatctatcatcgatggttctgccagacgagtttggaaggagaaggtggacaaggtggggatgatttcttatactatttttctcatcaggttcatgataaaggaggacagggatgaggtgcttaatggagggtatattttcttcaataaacgcccagttataataaaaccctgggacccgaatgctaactttaggaaggaggatctcaatgccattcctatcttgattcaattagagaatcttgaactaaaatactggggggagaaatcacttttcaaaatcattaggcaattggggaagccaattatggtggactcaattaccaaataaagagacaagttgatgtatcctagaatcctaatagaagtgactttgaaacaggagcttcctgagttaatctcattcgaagatgaacatggtaataacactacagtggatgtacacaatgaatggaaacccattgtttgtggacactgtcaaggcatgggtcattcgaattcgaattgtaggaagaaggcatgcaagaaacaagaatgggtgttaaaggagaaaaaactagaggatgttgcagaaaagaaaaaataataggtggttgactctgcaggtttcaaaactgtccaaaaaggatggaagcctgaggagatcaaacagaccataccaatacaaactggcaatgttttccaagtactagcaacaacagatgcaggggagccatcaaacaagggttctgctaatccaaaggaagtgactgaagagagaatcaaaggaggagagggagtacctccccttcaaaatggatagaatacttagttggagcgtccggggaatcaacaatccataaaaacagagcatagtgagacagttcttgcagttacaaagagttaggattgttggtctcctcgagacgagagttaaggccccaagattgggggtcttgtatgctaatatcttttctggatggtattttacaacaaatatagcttggcacaaagggggtcgaatagtggtagcttggaacccctatagtttcaatgttaacataataaaatgctccagttagtatattcaattgatggttgctactgtggatgggaagaacaacttctatcttacctttgtctatgcttttaatgatagagaaggtagaaaggagttatggaaagatttagaagagattaatgttcaagaagcacggatagtaatgggggattttaacgacattctgaataaggaagagagatgtggcactaaagtcaaatatcatcctgctgatgatttcttagaatgtattacaagatgttgtttagaagatgtgaaatattgtggtagttttttcaccaggagcgataaacagaaaggagaggaaagattatactcaaagattgacagggtcagggcaaactctccatggttagatacatacatgaatgcagaggttaattttttaacagaaggcttgtttgatcattcaccagttgtattatcaattcacccagaaatctcaagtggaaagaaacctttcagatatttcaggatgtggtccacacacccggagtatcatgatcgaatcaaaacaacatgccaaggagatgtacaaggtactagtatgtacaaagtggtgactaagattaagaagataaaaggggttttaaaggagctgaacaggcaaggattctcagacatacaagctgctgcttgtttagcaaaagcaaaacttgaggaatgtcaaaagaagctacaagaggagcaactaaaccagaagttacaagaagaagaaagttatgccagatcaaaatatgaagaagttagcaagaattatctttcttttctgcaataaaaggccaatttgaacaggaataaagagtggggatgctaactcagcattattccatcagagtattaaagcaagaagaaggtagaacaggatcttatccatattaaatcaagacaataccagaattgaagatccctaacatatacctgattcttttgtttcctattacaaggccttactgagtagcaagatggcaaacaggaaacctgtgtcggcaaagatctgataactcttgagtaaagagttatttgatatcactttaagcatgtttttttatgtaattgtgtgtcatttaaattatgtttgtctcttaatttgtgaaa

SEQ ID NO: 20246 - DNA, 4674 bp, Cannabis sativa
  modified_base (28)..(28): a, c, t, g, unknown or other
tttcaacaaaggaaagttcagctgaaantgcaactttccaaacaaggaaaagagcaactaaggaccgaatttaaaaggtaaaaggtaaggatccgaaaataaaaaataaaagctcaaagctcaacaatcttaccataaatggaaaaattattttgacacctaacttgccaaaaaaagactttacactatcattttttttgtacgggcttaaatttaaaaattagaatatgatctctaaaatatttaggacggccttgctcgtgatgtagctgaaacaactttactctaagaaatcctagtctttcatgacttcaccaacatcaagtatatgtaccgcatatgatgggaaaccatataggtaaaccaggcaaggaagaaaaacaaatttgtacgttccttatttctaggctttatttttgttatcaattgacatgtattttgttatcaataacagggaaagttattcattttcatgaagtgttcttaaacttgtttatcagcaacaaacaagtaagaccaaatcattgtatgtgtgtcctactccgttattctttgcacttcaaatgtactttctttccttatagaaacacagatttaggtttgacttaattataatagtaagatgtatcaccacgtagaaagattacagtagagacaaaataaccacttgcaaaacatttaagaataaaaaggattgaagttttgactttgtatatgagtttctcaaatctcaagtgactagttttattcttttattattggagggtataattttaattttatacaagtatgtataaaaaaatctttagaataagtttggtataaaacagctactcaacaaatgtcaacgggtaaaccatattatatttatactgagtaatcatggaccaaagtttgtattaaactcttgtaatgcattttatagttatttatttgtgtaaaaaacattatgtgtgccagccatttactctattcattcacataataaaccaatttgacattagtttccacttatgaaataagttcatcccagcttttacctccacactaacatgttcgaattagaccaaagtctttgagctcattccaaagagtcttgagttgattgaagtagctactggtgtcccatgaactgtgagacaaatcaacaagaaacctcttcatttgaaacactagatgatgttcataaactctgtcatagatcatttcacatatataatactaaaattactctctctgtacaaatacactatactagcaaaatccaagacatcatcaccatgctctttgtttttgcaattaactaaattacaaattatcccataccaaaaggagatatatgaaactaaactaagactgaacaatatctccaatatgtcaaagatgatagggattaataaagtactcatctagtcataggatcaagtgaactaaatgaatttctactgttgttgttttgagaagtgcgtccatgtgcaataagaaatttaaatgtaaagtaacgtctaatacttatcaatttgttttagattcatgtttatgttttaattagtaatttttttctaaatttaatcaaaagttactagtaccatttcaattatgcataataattcatactgaataattattaattccaaaataacaccgaacaaaatagcttatcttttattacattaattcccttatcgtcaatcttttacaataatgcttgacaaccacgccctactaaataatttacacaaatattaattgttatttcaaagctacgatgtgtttgtaagtgtagtatcggctgaaatggagttataagtaagaatagtggattctgtagtgtctgaataattactataaaagcccggttgtttaggaccaggtagaattcccacgtcattgccaatcatagacacaatttctgacatggctggcctgtcagatgcactttcttgcacacacaagagagctatttgaacacacctcttaagttcagttgttgagcatgttccagccaatgctgcatctaatagtagctcaatactttgtccatctttccacaaattccatgcctatatgttaaaagtttagagcaagttattatccaataaatatatatatatatatatgttggaaaaactaagatattcaagcacttacatatcctactaggtttattgattggtttggatgatacaagcctaaacatttctttccactaatgatttctagcatcattactccaaagctgaaaacatcagatttcacagaaaaaagaccgtccatggcatactcaggagacatataaccgctgcgtttagttcacaaatgcaagtgatgtttcatttatagagcaattagttaaagagtcgttaattgaaaaatagaaacacaaagaataaattaaattgctttgcttactatgttccaacaattcgacatgtgtttgctccagattcattgtctccaaatgtttttgctgttccaaaatctgatatttttggactcatgtcattgtccaacaatatattgctgcattttaaatctctatggataattttcagtctagaatatttgtggagatatagaagtccttgagcaattccttcgatgatattgacacgcattctccaattgagtaagattcgtttagtttcatctgtcaaaaaagtatgagttaagtaaactaaaaacaattcaaatgaaaaattgaaacagtgaaacatgaccttacaattacaaaagatcataaagaactcaaagatacaagaaatgttaggtaaaactaaccaaaaatgaaagtatccaaacttttgttgggcaaatactcataaataagtatcttctctactcctttaatgcaacaacccaacaatcgaactagattcctgtgttgtacttttgagatcaacacaacttccgttttgaattcttcttgtccttgtccagaacctactgagagtcttttcactgcaatttcttgaccattatccaacaccccctaaagtattcacccaatcattttactttatttttcaaagagcaaaaatagaacaaaacatataaagaaaactgttggtgtcctatttgataaatgacacatgagattttgttttaccttatagacaggcccaaaaccaccttgaccaagtctatttgcctcagaaaagaagtctgtagctgtttctattgtacaaaaactgaacaaaggtaaatcgggatcgatctttccatgtaataaattttgtccatcacctttatcaatggctgccatactagttcctaattcatgtatatatttctctgtgtctccgcacacttgctttccattacttcctcctttccctgcttatatattcaatagataaaagaagcgcttgaatttgttgctcaattattctgttattcatcgaacaccaagattaggggtataggatgataaatacctttggaatagaactttttccatattatatagcctactgaacaggccagtgtaagaacagctatggaaaccaaagggattacaatcatatttttgttcttcctctttcttggagttccacctataaccatgcaaaagaaaaaaaaaaaatgtcatggatgccaggaatagtactgtaataactagagaagtttctaaagtagtaaaactacatgccgaacaaaagtaatggtacaaaatgaatgttgaatcttattagttgtttaataacaaattataaccttcattattctgtcataatccgttgaatcttgcttacatggtccatgacaatatgtgtatataactctgtatatatttactatgtacattttacctttgaggataggagcaggggtgtttcttttgaatttcttttctgacttctttggtgcaactctggtggcatttttggttgtatcatctactgcgtcataggcgctatcccgaacgtaaaaagtttcccagaatgattcagctacgtattttccataagaaaatgaacaacctgttccatcgggtgttgcagacatataggctgtacatttacagttcttactgcatatcgctctacagtcgtcaagacccaggagactgaaatcttccggatagtcccacgagtccatatgcccagacctaggcatataaaaataatcttcgccactgctacatgccgtatgattttgctttatacatcctttggaaccgaaagacatgtcattacatgctgaaccatagctaattgacgcagcatcaggtttagcaatatagaaagaaacgcccccagtagaattcatttcaatatatgaattgttatatggagtcagagtagtataggtaaagtagctctccttttcattcgaaatatagtcaaacttaaagatgttattggtgtcatcataatacgaattggggaagtagctaaaattcttcccattccagtttccgctgcgccagtagggaagccctctttgccatatcataagttgttgagtgttgtttggatcgacaccaagagtgaaggctcctccatatggagaccctatgccttgccatgaattgaagcttatgtttctaggctccttaagcttcaaatcaaaaaggccaaatttcattcctggtagaatcgtatccgatggataatcgaaactttgccacacgatttcttctcctgctttcagaaccaagtttccagagtc

SEQ ID NO: 20247 - DNA, 7159 bp, Cannabis sativa
  modified_base (819)..(822): a, c, t, g, unknown or other
  modified_base (4120)..(4131): a, c, t, g, unknown or other
ttctgttaaaccaagaaatgccgatagacacttttaatatataaagatataataaaaaaaatatttattatatataaatgaatgataaagaaagaagcacattttaatataagaggtcttgtgcagtaatttatgttcaatatttgagtggccctaattaagaatagaatagaaattgaaccacagtattagagttagggaaaactaatatttagagttaagaagaacaatttttacagttataaataatcagtcccacacggtttacattgttatttactaaaataaaataaaaaacaataatttttactaaatacaagatttaaaataatttgaacacacattttcatgataaaagatcataattaaaataacaaacaattaaaaatgtttcataaaacttgtaaagtataatttttattttttttattgactcttgtaatgtgaatgtttttttttgataagattgtaatgtgaatgtgaacttcgaactttgaggaatttaataaaataaataaaagcaggtagtagacagagtccctagctaataatctacgctcacgccttcaccgattgcgcatcaattaatattatcatattagaatgatcacataattacaggtgctttcatgttctactaagtaatacacaaatttagtaacaaatatatatatatataataataataactaataatacagaaataatgtcaacattcactaaaaacccatctcccacatatattatattattttacatttgtataatatctgtatttatttaatttccttattagagctctctctctctctctctctnnnnctctctctctctctctcttaacattttttctgaagctcttttgcttagtttattctattaattgttagcccttcttatttatttatttattattattattattttgttttaaaaaagaaaagatataccagcaagttcgtttgacatggttggtttgactaaatccaagtcaaattatacattttagttaacatgaatgagttcagttcaataagaagtcgattgagtttcacatactagaatatatattttgactttttcaagtcaacataacgtagaacataaaataaaaagaaacacgtatattattatatatggataaaagtaaagttatacgtagaaaagaaaagaagagaacacaatagaatagaatacctaataaaaaacaataatatatagaacaataataggtgtccttatttttagttggattcaaataatgccttgagagattgtaagtccctgaggcacaaggctttcggccgcgatccatgcttctacggcaaattgctcgttgactttttccgtggcatgaccagagtcaaagaagatatactctttgacattgtcacatatatagttcatattcttttctctcctctcctgcctccacagctcaaatttcctctgtagatccttggagcttgactgtaaatcattgagcagtatggagagagttgtgtgttgtgtaattttataaaggttgtgactttttccaaacagctggcaccagtattgttaagagcttaatggtgcactcacaaaaggacctaaacttattactaacccaatttttcttcctccaatgcggtaatcacatagttacatatctaatgatcagtgaaaaaagaaaataattgaaagccatacaagaatgttttcaaagatatagtatttatatatatatgcagtactagtacgtacgtaacatcagttatgtgttgcctatgtccacaaactgttgggtcgtgtagtggagttaataatgaaaggaaatgagtaatcgttaacaccaacattgaagatgtaaacagctcttgaaagaagagttttggtatctgcatataccccatttgtcgtaactcttaactggtcgctaacgttcttcaagtagctaacttgatcgagttttgagatctatcacttaaataagtaagaatcatcattcaccacatttggttgtgttttggttggaggtaactaattaaatggaatgaaatggaaatgagattaattttcaattcaattcattttgttttgtttcatttagtattagactaatgactattctattttaataaattaaaataaaagtctattctaatgtgagataaaaaaaaagtttaatatattttttttgacgcattttaaattttgattcattatttattgtttttattttcaatcttattcattcttttatgttttcatttttttcccaactaaactcgaccttatatattaaattatcggtgcctttgttggtagaatgaaataaaagtaaaataataattttttcaatttgtattggaatcaatttatattctttaatctttgaattaaaaaattattttatttaattattaattcaatattttctttttgagatgattaattcaatattttaaaatacaaataaaagaataaatgaaaaatattttttttttatttaattttatttttatttctaactaaacacatcggtagcgaaactagaaataaaattcaaataaggcgattatttagatatagagttttgaatttgtgacttagctactagacaaaaagttaaaattaagcagaacaattatctttccaactataccaaataataatatttaatagtatttcatcaaaaaatataaagacatttttttttttaatttgattctaatttcaatcattaaaaaataaatagtaatatatggtacacataaatccaccatctactcctctagtttcaatcaaaggaccagatgttaagatatttttaacctattatttatgttatttttagagttaattttcttctttattattatttttttgaaatggaatgaagcttgttttcgtaattttaagtttcaacacttgaaattaatgtataaattgatcaaattttacaaaaattaatgatctataaattagagaaaattgtgcaagaaaataacatgggatagctaattaccttattgtccctaagaacccttggaagaatggtcttgttaaaagaatgaacatgaccataatagagagagttagatgcatgataatacacttaggatcgccaagaaatttttgggtagaagcatgtaacaaatttccatctgatcaacatatgtctctcacctgcaattgttttcaagacaccaattaaggcaagaacaagtcaccctgcaaattatgaaaggctgaaaacttttagattttcctatgcccatatcaaataagataaactataactaagggccacagtgtatttttcttagctatccagaaagtgtaaaaggttataaactgtggagtgtagaaagtggtaattatcaaaagtttttcattagtaggaatgttgtgtttgaagaggataaagcgacactagaatcaagttcaagtattggacctgagaaacctaataatatctagtttgaggtggaacctgagaagaacttgacacgaggcaaccaagaaaggtgaccagaaatagctactgaagctgaattagaagtggaggaagatggtgaagaggatactggtaaagaggagctggtattggaaggggatgaggatccaaacattctacaatatcagctgaccagggataaaactaaaagaacttataagactctcaagaggtttggatatgcagatatcattcactaggcccttatagtgtctggattatgtgaaaatgaacctaggacctacaaggaggcaatggagtcaaaggataggatcaaatagaatggtgcaatgaaagatgagacgattccttaataaaaaataagacctggatactgatcataagaccttctcacagaaaaataataagtttcaaatagatctatactcatcaaagacttcagttaactagaatagtgcacacttctactttaactagactttacacatacatatgttaagtccattaactattgatcactaataatatagactaacatagcaaataactatatttaaattaatttttaaataaaagatccaagttttaataaaactaataaaagttaatgtaagcacaaataaaagtctagcaattagtatatttaaattaattttnnnnnnnnnnnnaaaaatttaatgacttggaccaataaggaactgccacatggccattgacttgatatttatcagctagatacctacagaagttttataaatataacttacgtatttttgccgttaaaaaataaacttaggtatttatgtacaactagaagttaattaacttagatatttatactgtaaattattaattttacaattaatcctttgtagatcgtgagagttttgatataacgctagcccaacccaaggggagggcaaccgaaccaaggcccatgcccattaatttgggaggcccaaaataaaactagttaattatttttttattattttcttgttgggttgatgatgttttcatgttaattttataaggctccctaaaatattaattaaagaagtaaaagtaaatataaaaattaatataatttttaaaattgggttaaaaaaataatatttaactaatttgttgattattcaattaataatacaaataatttatcaaactttaaaaaaattggcaggaaatactattaataaattagagtgtgttgctataaggtatttattgtaagagattgttttatgtgtggctttctacatttagcaatactcattaaattataataaattggtttctatttttaaattcaattttttttaggataaatataataaatcgatccatcacaattaacttatctaattacaattgattctcaaacattaaaaatctaattataatcggatcagattaaattttatttttgaatatctaattgaatcggattggatgttggatggggtattcaaaaatttaataaatatgagaggtaaaatattgaatagatttgatcctattcaataaatatcaagtctaatttaatttaaattaaaacaatagatacatacataatacatagatataaccgaatatgtggaagttgatcctctaaactaacatatacaccaactaacttaactaactttctgttatgttagttaggtagttagtattgtacctattttttctggtgcaagttacaactatatatagtccaatctttccacttttgagtaagagaataagagagagaattctgagagagattgcttaggtttctaagctgtaaaaccttgttcttgaaggggtcatgaacagtgggtgtactcgggtagaattagagaaactgtgactgtttttcaggggtgtttctcgagtgttgaagagctgtgattgctcttgaattgatgtttgtattgctactctcttattccacatgttaatgaagaattggtgatgttttctcagctgaaatatggccagggatggaattgatctctaggaccggaaccaggataaaatcttgttgtcttcttcaatttcatttttgcttgagttcattgtgttgttaattggatttgtggtattcaagttgttaattcattgtaggttttagattgattttttgatattattgttgctgaaatttacaatagattcaatccaatgttcattgaatggtggaaccattggattattgagattaattgaatcaaatagtaaaagttaacatctaatatataattagatatattagatgtattaataaacaattattgtagtattcatactaaacatgaatgagctgtaaaaatgaaaaataggagataaaatttcaacccgactaactgagatgaacttttcaacacggtcaactcccgcgggaaaaaaaagaaacttattgggaaatatatagtactagtactagtacaatgaaattaatgaaggtctccactccacgcttactcctactcaaataagcgtttgagattagaagaccctgagccacttggctttccattccacgccactatggcaaattgttcgttgaacctctctgttccatgagcaaagtcaaagaagacatgatcgttgacattttcacagagttcatactctttctctcctctcctacctccacaactaggatgtcctctgtactgaccacttccacaacatgcaactttctcttctttgaaaccatattttgaagggtgatttaatctttcttccgtgaatgtgtactggtcaacaaatgagtatttgaatcctttgagctttgtttccaacttttttagcatcatggaaagttgtgtattgtgtaattttataaagggtaagaatttatcaaagcaagccccattatttcccccttcaagcactctaccgtatggatagcacccaaaatgatccaagtttaaaaaccccattttccttcctccaatgttataaatttcctgactcacataacaatatataatatgatgaatgaaaaaaaaacagataaataaacaaataaattttgaaaaacagggaaccataatgcataccttaatcactttggttaagttgcctatgaccatccccacaaacttttgggtgttagggatggtgatgtttctttcgaaagggaatgagtaatcattgctcccaacactaaagataaaaacagctctcgaaagcaaagcttttgcctctgcattccctaattgttttctcagctgattgctaacgttcttgaaatattcaagctgagtattaagatctatcacctgaaaaaggcatcatcattcattgtgatgagatgttatattatttgtctaaacataaagaggaaagaatgtaaacataaatatagattacaaaaatggtcatataaatatgtgacatacaactatatctcttccagtctcgaacaaagcaccagatccagctgaagcaaaattcaccccatagctataatcatgatttccagggtacaaatatggtggaatgaaaggtagcttagcatactcagctgcgtacaattaaacaattattagttaattgtatgtggagtttacaatatataataatatacacttgaatttgaaacaattggctataattatgttaccaataaaatctgagataagtcgaccatcacaaaatctaccacttgggtacttaaagaaagtttcaccgtatggataa

SEQ ID NO: 20248 - DNA, 3616 bp, Cannabis sativa
ctcccccaccgcctccgccattaccacccacgccgccaccagctccataaccttcaccgtgaccagacccaacacccccaccttctccgccgccaccaccatacccttgattagcacgattcactcctctattattatctcccctgccatagaaacttccacaaccccgccaatttctataggagcaattatcatagctgttttcttctccataagaggaacaagtggaaacacagacaatagtccaaaccagaagagcaatgcatacaaattttggaagcgtagtagccattgctctgtttttaagcacttaagctctgtgtttaatgtacttgcttggcttattgttccaatattgccgcaatgtgagttctatatataagcatcacagctatagcccatgcataattttactaatggtccatgcttacgagtgttactgaatttgaaagagagaagcactatcaccagaaacgtccgagtcaagtcaagaaaagtccatctaatttggtcaacaacaatatatacgacaaaacaaaataatcaaaactaatcttagacagggtgactaaatttcttcataggatcattgtctttgcctcattttaatcaaacccgaacaatgttttgtcggattgtgcttaatttacgaaaatcaatgttattataaatcaagctgatatttatggagatggtggagtaggtgattatgatatgtatacattatattatacatatatatatcttcttgaaaaatcgatggttgccttagcgagatacactcatgataacaaactcttatattattatatatgtatattatattttacgtatatatacccatgtgtcatgtttgaaatcgaagaagaccactaattgaatttgataattaaaaattaattagtaggttagtgtttaattaattagctaaataaagagttgtccacataagcagccaaataagatggtgaaatggtccatgtggatgccatgtgatcattcaagctataagctagtgcgataaaaagaaaaagaaaaacaaaaggttgaatatatatatataaatattggtttggtttggttatgaatttttttggggttggtctactcgtatagtggtagactcttgcagtgtagtgtacgcccgccaactcaaatttggtcctgtatatacccataccatctcctcatatactccatactcaatcattttttttttccaacactcaatttagggattgacatatatatgatgaccttaatttttctccaagtcctatatatctaattgaattaattaaattaatacaaaatattgtttggctagctatacgcggctgttgagcagtacaaataatagttttaaaattatatattatggtattatttttttaatatcatataccagtttttcatgatcaaatttattattattttagcttatcactatgaatgaacacctatataggattgtgctgctggtagagctaactagctaggttatgatcttatgtctcttctagaagatattttataaggctaagctagcaaggtttattgattgtcatttatgtcaaccaaatacttgctctagttagtactacacaagaaaagaatgcatgtattatttcaaagatggtatacaataaaaaaaatatataatatatatcggcacgtaatatcttatcaagattttattattattattattttgtcgtagcttgtctttttctacgtagaaaaaaggtccttaatttgatttgtgtatatagctttacttcttatattggaatacaaaccactcccacttcagcaactccccctctttattaattatctttaacttgaagtggagtccagttcccatatctagccttattttcaacattttagaaattcaaaacacaaaaacaaaatatattcagaatttagtgggaaaaagaaaaagaaaaagaataataatagaatcatccatacagcaacataataatattcatcattgtatttatttcatttatttatatattaaagctattaatatgcatgtataaatttttagatttttgtaatttaaatatatatacaatttttttatgccataatgtattcttacaaaaaattaattaacatgtgttattatttagtatatatatatgtataatgtatatagtttgcaaatggcactcaaatttttccatcactgaagttatatcctctgtttcacacgaataataaactcaccaatatataaaccaacattaattgtccttaattaaaagtcgttgtgaatgaatacgaataagaaattacacaagtgcatttaaattaacgatcgatatattataattccaaggttgcgtgtgtgaccctttctctgatttttttttttttttctgaattataccaattgatcatttgataaactctcttatctaaaatctacgtgtcaaattaatatattatgtaaaaagtatatatgaccagttcatgtaatctatattaaattttgtaactttactgactacctatatacatgtggtgtgaaaatttggaaattgaccacactttgtttggtgtagtagaagtagtagtagtagtaggaaattaggaatgtcttacttattttatgtgtcaggtctcagaatttcaaattcactttaataagtgaacaaagtcaattactctactctattatatatagggacatgattttgtcccgtaatgtacttttacggaatgtattctgtaatgtacgataatctctatatgggggagttatttgatctgagggctggagttgatctaggagtaattagagttaaaaaatagtaacatactttgagaccgatctgatgtacgctaacacccatctaatgtaccacgaaatacattctccataaaagtacatcacctcaccagacaaaatcgtcaccctaaatataaatatatatatttatatatatatatatatatcttctagcagggaatatcatttgagtgattgggaattaggagggaaataataataaagttgaatttcaatggaatttacaacaagtgaccattttcgtttataagaaagaaaaaaagaaaccattcaaaaaaaaaaaaattatattttgtacaattacttaatatatccaatttattatagcaacattcagatactaactaaactagttaattaatcagaaatgaagagcaaaagaagagtaactaaattgattgatgaatatggtattagtgatataaatataagcattattgtaattaatttgatgattaatggggctcatgtgcggggcaaatattaattagacaaaatttcgacgtatcttgtagtggatttagccagcgaactggtcattttcatcaagtacattatttttttttcttagcatgtgttaatattctcaatacaaaaatatatgtgaaacaaacaatattagcttgtaaagaaaaaaaaaatcgtgtaaccaaagcacacacgtaaatatatatttatattaggtaaagggccggacctggatataggtaggttaggcctgtgctcagtgacgaagccagaaatttagttgagtgagggcttgaataaatattaagtcaaaactaataa

SEQ ID NO: 20249 - DNA, 5978 bp, Cannabis sativa
ttaatctctttgttggtccttgtattatattgtaatagagttgtaatatcttgatttatctttcattgttataaaatctctaataggcacctacagcgtccatttctgacgggcttttgtgggttttcaacaagataatattaaaaaaaaatccattttcagtcatggaaaaaacttaaattaagcttcgaaaaactttagaaaaatgagattgaaagccaaaaataaaaaagttttcaacaatttttaccatcaaacgtttataataccatacaatactaattatataattatttttatatgttaataccgatattacgtgaataatgtttaattatattagtccacctaaaatactttaacaaagttttgagtcaaaattttagtataatttttaatatgtactaaatttgacatatattttacactatcattttctaatttagtgaacgttaattatttcttttgaattgaacataccaaatatatgtctagatttatttcgtcaaagatacgttgaaaaacagttatatatactaactttatagtaattcattagaaaatagagatgatcctaaactatgaatcgaatggaatacacttaacatttgcaattacacatgccataataataaacataatgtttttggacaaaaagctaagaagtacaaacttagtacttacttatttttggatttcatcttataagatttagagttgggaataaacaagtacaatagagatacccccaacaaagtaacacatttccataacttccctaaacgacaaaatcaataccaaaaacgacaattggagaccaagaccaccacaaagctaattaataaaaaacataactactattaataatactagtaatgtagtaattaattaagagcatgtctcacgggccactccaagccttgagttgggcacatcaaagagcagcctgtggttttgctgctgaaggttggcaatgacattaagcaccgagttcacattgtccggtgcggccgcgatcgccaagcacgcgaggttactagagctgctgtggatcaggaaattgtcttgtggcaatgtcacgttcatgcccgcgaacataaatgttaaggtgggcacggtgatagggactgagtagcacgtgtcgaaacccccgagcgaggaaactaccgcctttcccatgcgcctacggaactcatctcgcaccgccgtgtaaacgggaaccaccaatcgggtaaacaccgtgcctgaatattgtcatattatttttaattagtatgtataataataatgtacattacattattttggcataaactttttgagcaattattttagcttagcctagttgtgtgacatcacataatggaatccaatatattttgagaagagaaaaaacaattaaaaaatttgaaccaacaaggagacatgcatggtggtgagtgggacaataattgaattttgtgcttaaagaatgttttgacaaccataatccataaatgaatctagactcaatcctagtcatccccaccacatgtgctctagtactattaataatacaaatcacccaaatctttaaatttgctttacatgtaaacacattattacataaaaaaaaaaaaatagatattttacctgaatcaatgatagtgccagcaccagtggttggattgaaagccaaagcactgggaggaatatcaacagttttccttcccaccttaatacccaccaaattcacataataaagtgatgatcttcttggatttttaagcaatggagtgtacttaatccttatgggctgtgcaacaggcccaagtctgagtgacccagaaaagttaagggacttgaaactgggcaagcagtaagagaaagtggatttgtaaagattttgggtctgtgaaagaagagagagtgggcctcggcccaggcccaaaagaccctgtggtggtacagaactgcctgtggctttattgatgcaaccgaaggtgtaggctgggatggcgtcggtggccagtttgagagtctcctgggatagggaagctgctatggtagagctaccgtagctcatgttgaaactacacgcgctgccactgcaagtaggattgggtacctgatcaaacatagttcacgggccacccaccgttagatataatcaaactcagccacagtgctctttccccttttttttttgtccattttcaaaataattattaacccgtgaattttcagtcggtcagatcagatcaaaatcaaatcacaattttactaaaatcaacaccatatttataaaaaaaatgtaatattattttattttaatattattattagtataatttaatattaaattttatttattttattttaataaatatattgctttttaattataagataataatttattatgatactaaataccataaatatttcataataatactttttataaatttagaaaatattttttagttaactattgcaagagacatatgaagaggtgctaaaccacactcatactcaaataacaatattcttacataagagcatctatttaagtactttgtcgccttgcaaaatgacatgagaagatattagtggtatttcgttggcaaaactaccctacatcatagcattaataatttaatatcttcactttacaaaattaaaatttaaaaccccattacgatccccatatggaaaaagataaaggtccacaagatcaaagtttctttcattttaaaaatatttatttatttattattattaaaaaaacacaaaacacaaaataaaaaaataaaaaatgcgataaacagtaagtaaaaaagtgtacctgattgcactgaggagcggaacaaggaagaggtttgtaagaggtggacttgagaggggtgaagacggtggaagagcagccgacacaaccgtcgcatggaatccaggcggcgtcgttgctggtgtccatggctaggagcatggtctgtggaggtgtaccgatctgggctctgacaatgtatgttgggctctggacaacctgccttcctgaagcaatgggcaccacagacttcctagccacaaggctggagaggtaaagcaccctggcttggtctttggtctgcatttggaggacactctcctcccatgaggtggcctcaggtggtcggaatggtgagcacgtgctgtacacgtggaacacctctaaggttgagccttgctctttcttcttccaacagttgttgttgtttgatgatgcttgggctgtacttagtagtaatagaagtaccacagctagtgtggagattaagaagcctttcatcatggctaaaattaatctctggtagagacaaagtgagtgtgatggactctaatgtatatcactatgttatgtgtggtttggttgggttttgtaagtgactctcgtgactatatatatagaggtgtatgtatgtgtgtcatgtgtgtgtgaggagggcttttatgtcatttcaacttgttaaatttttcttcttggtgaaaatacaagaaaatgatgtataataaatatcatagtttggaatatactttgtaataataacatgaccatgtacggatatatatgataattataagctaataaaaacatgattaataagttgcttggtatgctaatgtacgtatatagaaaataaaggtgtattatagtgcaatgtatagtcaaatatatatgtttctatatttcatatatgaagctccacaagataagtaagttaatgatgaaaataaataatcattcatatgcatatttcgtttaattttgtcataatactacaatgttgtccatatattcaaaaatagaaagtaatattgcctttgtttggaaataaattgccatatataagataaattgattattcatttcgttcttaagtagttttgagatgggattcatgcattttaccatgtaatcctaaattttaagatgatatggtacctttaagtgtaaaaacttccactatctcccatttaacttccatttggtacctttcggctaatatatgtttattttgaatgttagggtttttcacttgtttcaaaatccatatatttcatgacgtgtacactcacaaatttctcaatttgaccttgtgggattatatcaaatgtcacgttcagtcctgtggtctcttaaagagcgttcgttatacatatacttttaagacccaacgtgaggaaagtgtattagagtgtatggaaataaactgtaatatataagataaatgaactactattctcattaccaatttattttaagatagaacccatataccttactatacaattctaaattctaacacctctttcctattttactactcaaaatttggaatggaagtgtaaaatgaatgaaaaactaaaaaacaatgtgcatataaacaaagaaaataatcacatttcttttagatgagactccaaatttttagaaacaatgtcatattatttgtgtaatatgttaatgtatattttgaattcatatattattactgaaaattaaaactaattaggatttttgttctctaaactttgacatgtactaaatcatgtcatttgaactttttaggccgttaaaaaatccttccgaactattgacattgttagatttaaagaattctgtccaatttcattcaattttactaatacggcgattgtccatatactaaatttcgccccttaaactttgatatctactaaatcatgcccctcaattttttaaaagtacaaaattttgccccctaaattttcatccacatcagactttgtttagtaaaattagacaaaaactcttaaatttaacaatctcaatagttttggagaaatttttaacgacctgaaaagttcaatggcgtaatttagtacatgtcaaaattcagaggacaaattcaaattaacccaaaattaacttttaacaatttttgagtgttgaaacatgaaggacacaaacaatttgaagaaagatttgtaaactactagttagtaaatacttcttctcaaccacaattcctttggatgtgttagataaaagtcatagaataagggaataattatgtgttcaatttgctgtaaaatctctaggctgtaaaatcctaagtagagaaatttgccaaatcaaactcttctttcttgttgataaagaatataaagaaaatgctcttctttccttaattagtttaatttaatgtggtccttgtaataatgttgtgcctaaaaatagaaacaaaaagtgtttagcaattaactacatgcctaattatttacactttatagatttgatcattcttattaaattgaattttcaaagtaatttaacaaaaacatcataattatattttattatatatatatataaaaaaaaattatgttttgggtggtggagatcactactgaaagatttgagtattggaagtaattgatggaagtatgtatagtggggttattgacagcttgtagagttgtagactgagtgggtaatagtatgcttatactcacagactgtattccattattttcatttcactttatcaaaaagctgccctccttttgttttatttagtattattaatatttattttataactctaatctaatctaatacaattaataatgagattctcacacatacaaatatacaatcactcatttttctctattttaagttccatttccccattaattaattaaaacatgtcaaattattgcaaatgccatctcggccacactcaaaccatatgaataggttagaatacttagtcaagtgggacaacatacatataccaaagatctaaaagatcaattctcatttttatttttgtatatcctatataatatcatcacttcacttatatattctgctgggttttataccttaaataaaacttcatttcaatataatctttactctttaaatatcaataaagaaacagaagtatctcatttgtgtgttatttggttca

SEQ ID NO: 20250 - DNA, 2382 bp, Cannabis sativa
tttgaacctaatatatcttgattgaatttcgtctggtctgcccataggagatgttgcttatattaaataaatatcatttgcttgtacctatcgatgttacagatttttttttcctaattgggtttattcattaaaaaagaaagtaaaggatcccttggatctcacaagatgctctctaaatgaattacgctactgatggcatgtcacaaagaatcacccggctctctcatagacctagtcaatttctgctttttagatgaagtatgcaatatttagatttaggtacgtgatatgggtgtatggaagatcagattttagtaatttatcaacacatgaatttcagctataatgtgggctgggtgatgaatatagtaaccttttcttatctggaactaatcaaaactacgtttttttagttcaagtgctttttcctagcttgaccaaggactttttgtgatgatctgatgggtgggaagttagctttcatttacaatttacatgcatggatgcttttctttttccaacattttatgctattagatttggtgatggattgcttttccgtacatctcaagtttacattttagcaacctaaatagatgaaatattttatttattttcccaacttctatttgcagcttttgtagatgtctctccagaagaaaccacagaaaaaagtccctttgagagtagcataaaggatgatgccgagacaagttcattaagagatagtcaaggtcaagtggctagtgaagtaagtaactactattgataatattcagaacttgtgctttgtttagaagtttgacctatttgcatattcaataaggtatatcagaatggaactacctccaatcaaagtttcggaccttttggttcttccaaggagtctcaatctactcgtaagtaaagatttgtttggctttgttactttccttataagaaaattgaatttttgatttcagaaaatttaggctatattttttatgtccaaaatttaatttgtataatatagtatggaaaactgtcagcccttgcattgataaaaatatctatgaagtttactatgtcttactggagacactaggaatccattatcttattcttgggggcattttctaatttatccttgataagtactgtgttatgatgttacattgtattgagattccttttatttccgacatcctgattctgtcattgttaatgttttcttaatggatagaaaaagggaagaccatttcagtagaagctttggagaagatgatggaggatcctactgtgcaaaagatggtttatccgtaatctctcttcctctcaaaattttgttttgtaattagtgattacattatgtgtttttgtttgttatagttccttgtacattttgtaagtgttgtcaaggttctttggacatcaaacttcaaattccatttcttcaaccgttgtgtaaatcgtgggatatttagagagaaaatattgaaagaagtatgtaatttcctaaacaagtgtgctaactatttaacataacttaagctttataacttggaattaatctttaaagtaaaattcaacaatttttccatgctcttactgtaatgatttagatgcgaaaaagaaaaagatattttgagtattttctcttgtttttttagcctttgaaaatgatcaatatattttcctttattatagtattaattgcatgtttgttttctgtagctatttacccgaggagatgaggaatcctactaccttcaaatgtaagtttatcttacagtttcatttaaatatatacctttatatcttctatttttcttcctggaagccgcacccctaaagccctcttagattttctcaatctcttcgcttagatttgttttcttgaaaccctgctattactgataattctatgagaccatatatactgactattaattctatgaaaaccatataccgactattacttaattctatgaattgcatgttgtaatgactatcagggatgttacaaaatccagaatatcgcagtcaacttgaagaaatgctgtaagctccttctttgttattcttgcaattgatttaaggaaacaacttttttttgccattctaatgtggagagatgatcaaacttttttctttcttttatggtgtatatctgaggttgttatgccttattggtgaatgctgtttaagttatttttcacttgatgttgttttccagcactaatatgagtggaaacagcgattgggacaatcgagtgatggattcattgaaaaatttcgatctcagcagccctgaggtgaagcagcagtttggtaagtttgacactcaaaatattttgctcacacatgtacagatacattatgccattttcctaattatag

SEQ ID NO: 20251 - DNA, 3299 bp, Cannabis sativa
ggaaaaatacaaatttttctgccactaatagtagaaaaatctgtattttttttcttttttctttttacattcccgacggtttaaaactatcaggaagtccacattaatgacggtttttaaccgtcgcctattttgcctgttttgtgacggtcgtataggcgacggttataaaaattaacgggaatacttttaacgactgtttaaaaacgttaggaaaaactatttttgtagtagtgtcttgtgcgatttggcagtaaatgggaaactatactgagctttcaaatacatgctaaaagcttcttctggctacgcgattttatgttttccgaacgctatctatgctaaatggaatattctcgtctagaggagttgctcatttgtcagtcgaacggactgataatttaaagatccaacccagttatcttaattgggcatgttgttgggtcttaggtatttaagctgtaattattatgaagacttcacgtgtccctaatcaaaaatacggataataattaagttaagtaatatataaaatttttaacttaattaagttgaaatggactataggcaaaaaaattttaggcccttgctataaaataaattgtatttttaaaaattataaaaaaatatgtataatttttaaaagttatttttttatttgggcccctaaaataagtgggccctaagcgcgggcctagcccgccttagtctagggccgaccgtaaatagaagtctactttggctcttattaacagactaaataagtagacggaagaagtacaaatcaaaacgattatgcagattgaggagtttagctctgatttttttagtctaggagttaattcgtgccaaatttcaaaatttaaggaatttgccgcaaattgcccatttaaaaattttaaaattacaaagcgagcccaatttctagtttacccataaaataaaaagaaaaaataagtccccccacattcaactttggccggggtgtgtgtagcacatatcatcaagcagatcccacaatgccctactggatgcaccatcaaagagaaaaggaaggttctcctaccattgtgatttactaataatattattatatataattttatgaaatttaaaataattatatttatgtatataaaaagtataaaaaaataaatttcttatcaagtttccttttcataaaaaaaaaaaaaaattatattattttccatcataataatttccttctgcaaaccctaaaaaaaaagtccttctgcaaaataaaaggtcaattaatccctgtgaattactaattatattatttttctctcttataaaaagtgctcatcctctgttttgactcacataaataccaattacaatacaaccaattcattaatgcgaaattcagatgtctacattttgaatataaagtcaaaaaaggttcaaaataacgtctcataccccaccagccacaaccaataaagcatttatttatgtatagttattatatcaattatcaaacctctctcttaataattttgcttgcctcaaccacatatttagtatcatatcactaattattaaatcattcaagaccctctaacccccttctaataacttcttcctaaatcatagctctatacagtatcactagtaatttattggaagcatgcttatccaagctttaatttttacttgaggaaattcaccatgttaagttttttttttcttgtgaagttgaaggaattataagagagaaaaatgataatgatttttccattttacttttttctaattgcttttgcatgcaaaattgattctagtctatctaattaaggatagttgctgcataacatcttaaaattttacttttgtaattaatagagatccaataattttttttagtcccaaaactacctcaaattactaaaactataattttatatgtttttgtctgtgagcttccattaagtaatgactaaaatatttgtgtcactacctataattgaaccgcgtctcataattatttgtgatgtgacctaattaaattgtgacacatgttattatagtcaccacttattaaaaattaatcgataattttgccgctaaagaaatatattagatttttttcggttagagtatctctaacttatacattaaatttagtgtcacactaacactaaatttagtgtcaaaatttatttttactcgaaccacaacactaaaaacatattccttattattataataattttttaataaaataaaatattatctttaatgtgtgttaaaatttataatatttttattgtgtaacattttttcattaaaaagaaatacaaaatgcaataattttttacttaaatctaattgaatttaataataattgatattcacatttaaatttatacacaataataataattgacaaaagtccttaaatttaacaatctcaatagtttagggggaatttttaacggcgaaaaaaagttcagaggagacgatttagtatatgtcaaaattgagggagaaaaattactaattaagctaaaatcaattcctgcctccatcccacgtcaagtggagcagattttacaacatagaaggcatccatgacttgttcatattcaatgaacattaatttctctttatgtactaattgtttaaaagagaaaataaaaatataaaaaacaaaataggagtaaaaaaggaaaaagaaaaagggaaacacattcacatgatgagattacaaaaaagaaaagaaaaaaggccgaagatttggctcttcctctcgaaatagtacttttctacctaaatctgatggcatatattccataatatatcacggctaacattatggcattccgcgtcttattatattaactctcacacactttcaccaaatatacaataaatgataaatatgtaaatagtaatttctaaataaaaatcaaaattagcagggaggggcatccagacattgccatctgtcgtatgtactcggctccattcgcaaccttaacagattttattttattttatttttctgaagaaatattagagctttacaaatcctatacccggttcccactactttggaacactaaattaaaactgagtgataactactcaattatctaaagatatgcccagaactaagtttatggcatcaaagtgtacacattcggattttgatcagaattggtaaatataaacgagaacagaaaaaggcagaatatataaactgaaaacattcacaatgtatatcttttatatttcattgagttctaaaatgaagtaatcctcaatatatatat

SEQ ID NO: 20252 - DNA, 2099 bp, Cannabis sativa
aataaatcctttgtacacacacatacaccagtacaactctacacataaattacagtaaaaatcaagaaattgcagtgccttgtgtgatgaactccactagctagtaaaacctaataacatagtattaatacaacactaagaacataaaattcttaggtatatcgtaactcaacattacattgggaaataaagaacagagagaattgggcttcatagaaagtgagtttgatggattgcatacaacataccagtctcgaccaaaagccataccaattctacaagatgccacaaatctggatagggtctcatctagtgacatagttgaaacatcctagaaataatttctcttgttggtcctcttatcttatttatctaagatcaagataagcaacttatataaactttgattctcaattcttgatatttaattggcaaccagagttgtcttagagataacaggaaacccttgaaattcaatcatgcctttgctagcctcaacaatgtcagggcacacaatctcatacttcttcacaaccttctcaacaaatttttcttcactcatttgaaaataataaacaacattcacatctttcttcaaaacacctgttgacatcagaagttgcagaactgaacaccttggaataattcttttctccaagctataatgtaaaagatcaagattcttgcaaattactaaaggttctatatgcaaattttgagtaaagaaactcatcaatttcttgatcttgttcaaggaaataagcatacacatgggttgccttctgaatgctgaatacacctgttcttcagataagccaaaacttttgtaagcttccaacttttgattccacagattcttattaatcacagccatggaccgaaacgctagagcaaagtacaaagtattgggattaaaacccaacttcagaacttcatcaaaaatctctctaatcctattagaacttaaaagcagtgatcttggatgaatcatgaagagtctcacaattataggtttgggaacaccaaggctctccaaaacagatatgtttggctcaagcacctcttccaatttgaacttgagtatccagtaacctgatttcatgatcttgagaacattctcatcagtaccaagaactcgctttagcacttgaaaacaaggaatgatataattttcaagacttcttagtaaaatataaggatgagttgacaaaagttttgcaacatcatcatctgcaaagcccatagctttaaaaaaatccagttttggtttcaaattcttgtttggatttagaaatagtaatgttggatacctcatgattattgatgttattttcttatcactaaaacactgagtcctaaacaactcaactgactcaactagatgactatcaagcacacgtgggtctttgcatagcaaccttactatgctagctctagagagccccaatgactcaagcaactccatattaggcctaagtttatcttcaaagctggctaaaagcaatgtaggacgagttgtgataatgtttgcaatctgggattgagttaacccctgagttctcaccaactgtaggattgtatcagccttttcagtgtctacaattaaaagcttctcagaaacagaaatggcagaatccagggacaacccacatgaattttggagatatgaaaccgtatgagatcgtgagtcagtaaaactagacatttctgagatgggtctgagaaaatacttagtgaaacacaagccatggatactgcaagacagagtctttttgcatattaaacgaatcatttagttttttttttttttttcaatatgatgaataagaatatacctgaagtattagtagttgtagtattatcgaaagattaactaaaaatctctctgcttgatgcgcctcaacctatattttgattctcgctctcattcactcaccattgtcaccactctgcaaattttggcctctttctttacagttacaggtgaactgaagagggagttgtatctcggattgggttcactcgaagcccagcccagcccagcaaccacatcatcatttaatataagctaattagtaattttttttcccgaactttaa

SEQ ID NO: 20253 - DNA, 1533 bp, Cannabis sativa
  modified_base (867)..(882): a, c, t, g, unknown or other
ccactaaaaatttacaatcatgaataaaaattgaactaaataacttttttaaagataaagaaatactaacatgagagagataaagaaagaaaagtatacctctttctcattacacatgggaatttgaacaagaaccatgggataatcaaatccaacaccttccaaatcattagacttaaatggttctttctcaacagttggtttaactttcttgtacttaatccaaaaacaaccaagacaaagaatcatacggtcaagtgattgaattaagaaaagagcaacacagaaatttgatagagaaacaatcaaaggtgcaatgtagtctgctctaaattccaaccaaaacacataaacactatgaaacaaccctttgatctcagaagcattaggaagaatatgcaaactgttgttgttgttgttgctgttctgaaaataatgccaaccattcaagtgggcaaaaacttcaaaagctaagaaactcaaagccattaacaaaaatgttaatatgagtctaaacaaaagctttgatttcccagatttctcactctcttccatagcaactccttcaccaaaaatgagtctttttttcactgaaccaagtaatgcccacataagatttcccacccaagaaacacaattaacagctctatgagcttttagaagcaaaacccatgtgtattgtttagcatttttgcctctatctttatcaactggcctaaatgcttcatctgggccatctatttcaagcactgagtaattggggttttccattgttacaaccactggtgttcccttccttgaattatctttagcccaccattttgagaatcccaaaccaggagccataagagagagagagagagagannnnnnnnnnnnnnnngagagagagagagagaggggaaggattataaaggttgttactttaagaacagaaatttcaaaactttgatatgagctaataatgtagagaacccagatcccaacattgaaaaactcaaatgcccattttcataaatgagagaaagattaaaacttgagctttgaaaaagaagaacagaaaaaaactcacaaacccattcgagagaaaatcagatcccaacattgaaaaacacaaatgcccattttcataaatgagataaagattgaaacttgagctttgaaaagaagaaaaacagaacaaaactcacaaacccatttaagagaaaatcagatccaaaacactagagctaagaaagtaaagaaaaaacctcacttttcagactgagtattaagaaaacaaaatgcaacaaacaatatataactaaaaagagaaaaaaagagtgtaaatgagttgttgttgttatggctattcctctccctttttttctgtatttttaatttttgggcattggagtgagtttcttccacttcttttttagttgctacttgctaccaccggaaggctccacaaggctcccccacttgaggaaattaccataatggtagaaggaatggttaagcatcaaaatctataagagagagagagagagag

SEQ ID NO: 20254 - DNA, 3021 bp, Cannabis sativa
tcaaaatttagtgaaaaaaattactaattaccttaaatatatttgagctaatccaataagagagagggtagggtatataagcgagccgcaaatcgattgagaaagataaccagagcccggtccagactcgaattcttcttcttttcgattcttttcttccgagtttggttctgtctctgatgattcttgatcgttcttcgcctttacccttgaagcgcagaagattcacctacgttgatccaatggaggctgatcaagctaaggtttttcctcttttacatcacacttttccaacttacttttttttttttttttgaattgaatcgtattttgtgtttatttgttcggtttctcaactgggtcgatctgggtttcccttatagtgtcctatttaggtttcaatttgggtactttgttaatggtagtggataataacactgatgagtaaaaatcgtttctttggtagaaaatttcaatcaagggttcaatttgatgttttttttcatttttgacttagttttttcatctaggtcttttgagatttttgtgggattcattgttttgtttacaatggttgtatgattatgatcaatgaagtattcattagaagtttggatactgaaaagtttaaccgggtttttcaatggacttgattccaggccaagctctctgctgtaaaagagaagctgggtcgagagatacgtgtgtttgaaacttcacctccttcttcttcttcaccaaaacaagaatccaaagctggtatgaccgtatgaaactgcaattgatcttcctttaatttagacttctgtttttaagctcgttccttaattcccatcaaagcttttgcatgttttgaaagtaccttttgtattttgcagaggagccagacgatttctatgatttcactgctgaggattattatcgaattatgtcatcaaaaaaggaaggtaattcttagaattctgtcttaggggtctcatcaaatgtgccacatgcctctttcatttgtattatacataattataaggaaggtaactagaatcctgattgctttgattgttggacatagataaattcttaaagacacgaaaactcagggaggcagaagaggcagcacgcaagtcaaaaataacaaaggtgacacaaaaacatttaccatttactttgtgtttcacttgttgatactaaatgagtgttaccaattccttatctccatccggttattgcaggcagtaataagggtgcgatttcctgataaccacacattagaggcaacatttcatccatcggaaacgatccaaagcttggttgatcttctttctaaagttattgctaagccacaacttccattctatttatgtaagcatacacaaaccaaagtgttaaatgtcatatgtgtgttattttagacatctttatatgttgttatgaaagagaagagaggtttgacatgtgggaaatgatgcagatactacccctcctaaaaagcagataaaggacttgtcacaggatttttactccgctggctttattccgggagcgatcgtgtattttgcttatgatataccaaaaggtcagcacaagctttcatatgttcattgttttctgaaatatgtagtttgtgtattgtaatggaggtgagttgactaggctgagcatttttttttattaatctatcccctcagataaagggtagaaaaccttgcaatgaaatgtggataaattaatgtcttaccagaaaataatccttttttagttccttgaatataggaaagagaaagatggatgtgggatatctattgatagaaaaaagataatcaagagggataacttattagcttaaatggttaggcatgtctcatgtggttagctcccacaaggtataaggttggagtcactcccggttgattgctatagttttctagttgacggagtgcctattttagagtaaatagcggcataagtaactaaagttttaagtttgtaagcggcataaactcaatgcttatttttaggagtaagtattcaatatttgtaaaacggtaattttattctagtttcgtcaatgtagattccgtttttaatttattaaaagaagattttgaagtaattgatacttcgtgtttttgtctagacctaataaattagaatttgagccttatatgtgtcttgtttaagacaataacaaagtttgtactgatgaaattagagaaaaaattacagttttacaaatattgagtacttgtgtcgctaaaaataaatattaagtttatgtcacttacaaatttaaaattttgggtacatatgccgctatttacccatctttttattattattattgtgaaaagagaaaaggagaaactgataggaagaaagataggtaggtcttctttaattgacttcattgtttcttatctctcttctaggggaagatgctgctgctgctgccaactcggatcatttccttcaggaggaaatcatgtctttgaaaggcttggagctcattaccgagcaggcagagcctgttcattcagaacctgaacctgtaatcccggtcccgacgcctgttgttcgagagagtaagcctgcagagagaccatcagggaagccaaagtggctgaggttgtgatacgtccaactccaaaagcagacttctttcttatgcttctcctctttatcagccaacagattgtctgactataccaagtttgaggcagatgaatatctcttaagctatgtgaaaatttgtaagagttttgaggagttgaattgtaaggacacacttttatgctttatttgtagttgtcaatagagttgtgcatttctggtctcagcatgaattggaaattgctttctttacatcagtcattctgtatttttagactctgtttctactaccttggggcttgggcttggatgcctactgcttttgtcattagaactaatcttaaaacattgtaaacttgcattgtaaaaatgggagatcaacacatagttaaataaaaatgacaaattgaaatt

SEQ ID NO: 20255 - DNA, 3388 bp, Cannabis sativa
actattgccgctatttttggagcttggggactaatctgtatcaccgtgaactttttggggacttttgccgcaaatttccctaatttatttggtaaatttctatcaaattataccaataatatgcaatgcattaattttatatgtaagatggctttacaatacagatatatcaaaatattaaataccattaatcatacaattactatctatttggagttgattggatgtgtttggattccacatcagcagaaacagaaagagaggaaactacaacacttaacacctcatcaccttggaaattctcttctgattttgaaccagaattattagaacaagtaccaacattcaactctcccaatttttccacacattcagtttgtacaatctcattcataccaaattcaattatgtgattgttgtcaccattaccaacatcttcaattctcccatgactcatctcaccaccactatctccatccccaatatcaatccttatatcattattattattattattagtgtcactaaaacgactgctactctctgtcgtttggctcaaatcatctcctttacgagaatcagctccagttcgacaaatgggacaaaacggtgtacggagaagccacgtgtcaacacactcggcatggaagctgtggttacacgtcggtaataaacgacacttgtcacccatctggaaactctctaagcaaaccgaacactccacgtcatcatccacatcatcatcatcctcacttgtagttttatagtgaaaacttggaagcttttcgaggtcgtctttggacatgcttgtgttgtcggcggtggtggtgagggtggcgccgcctctctccggcaccagaacgttttctaaacctctcctgaaagcccttcctacgatgcacacgtggacaaagatcaacatagctattccgaaaaataagagtatgattgatattactattgccattaccataatctttccaactgccatacttggttcatcatcataattatgatcaaaactctaatctcaccattataaaattaaattaatgatctttttctctcatttaacataacccagatcaccaaaacgagagaaagaggattataaggtggttttctctactatatatatttatataataatcttttattatgtataaagacaaggaataagaagttgagtattattagtgaggacaaaataaatagctagtagatgacttaaaattaattaaaaaaactctgtatatgacataaaagcataaatatatattaattaaatgtgcattgggggttagtctctactgtctatgatggagttggtggtgggctgagaatcaaatacaaataaaataaatggagacaaaaaaataatttaaaaaaagccaaacaagattgatagttggaactttatctgtttgtactattccatgcatggccttccttgttgtcttgtcctgtacacagtgtaccttttgttgtatttgttcatattataagaacccattaataatatgttagtataatttcataaattgatatatagtatgtttttacagtgtccttgcgatgtaattttatttgttttgttattaaaaaaaaaaaaatcaatctgtacgttataattgattaaggtattttgtaaatttttaaaaaaatttaaataatttataattttaaaaataatactcaaataatttattttatacgtgtataaaataaaagaattatgcatgtaacaaacaacgtaaaccttatttttagtgtgttaaattttttaaaattttacaatatatcttatataattataatgtgcacgatcatataaaaaatttctcggtaacacagagatatgttagtgcaccagagcattttaaaattttattttttagctcttccaaactagtactaagttctttttagtttagctttcatttttgggagatttatatagttgttagtttacttgttgaggaagaaaaaaaaaacaaacagttattacatatttatatattaattaattaacttagtagatttaacatattttcagtaatattataacaacttttgttagcttcttctagctagttattgccgcgacgtcgtatatgctcatgaattatagtgtcctccgtccaaatcaatttgatactcaattaattagattaattaacatggtttaattaattagtctctaaattgttacaatataattagtttcaattgttaaaaatttcataaaataaaacaaaatttagtcatatgatatatagagaaaatgaataatgtgttcgaaaaaaaagagttagaaatctctctttggttgcataaaataaaacaaaattttgtcatataagtgttagtttttttatttatgggttaggatttttgtttttacatatatatataaataggtacgcttgaatcagtattattagaaaattttgattttctatactaaattttgctatttaattaataggaatctctcatctttaaaattatattagctgaggtttattctattaattgaaatagataaaaaaaaaataatttaagttcgatatttttttatataaatatgtcttttatatagtgtagaaaaagatttttttttattaagtagctacattaagtatataaacttaaattgcctttcttattttttttaataaatcatgtaattttattaataacaatcagctaaaataataacatgcaattcaatcgggacatctcttccgttggagatacaactaggaataaaatttaaaaaatgagctagaaaatcagtcatctgattttcagatcgtttgacaaaaaaaaaaactgaataaaatcaaataaaaaagattgctgcatcacagttaactcttaagaacacttatattaagtttcatccaccattcagaagacacaatagtagaaatttttaattcaacctcgtagcttgagcactcaactattgtgcaaggtgcgtaactgcactactaacaactcattcagtcgtacgtagagagtttgttattcctaaccactaacaacaatttgatggcaagtcatcgaacaaataagaaccaacaacgaaataaaataaaacaaaattatgtcatataaacaagactaaaatactcatgtcacagagacaatattaaaacaatcaaaactatgtcactgcaaaaataagactaagcgcaattacaaaaattaaatcggagtagcaaaacataatcctgaccaagctgtacataagcccaaggaaaattgacagatctaaaggagaaaaaagataactttcagtagctatagatttaggaaggagaactcctaatttaattatttaattttctttttattattgaccattaaattaaaatttaat

SEQ ID NO: 20256 - DNA, 3956 bp, Cannabis sativa
gaggccattcagctctttgttgtttaatatttattatatttgattcatttttactcttagaatgataataagaaaaattgtagtgataaaaatagtattattttaatttcttttggtataaaataaagatataaagttaaattttattttttatatatgtagtataatagtgatgtgtagaattataatttttattttatataatgttatttatggcaataatactgaaattgttttattttaatacttaattgttttagcgataataatataaaaaaaagtggttttgtgaagtaaatctaattataacaaaataaattaacattacgtattattacttaaaagaaatatttaagtaaatgtttagatattattttgtaaagacattacaaagtttttaaagcaaaaccaaacaagttgaattgtagtggtactttcattacaattcggccaaactagagatgatcttagctctcttttggaactttagtatactagaaaactatcatcttggagttcttaaaatttcatacttcaaattttttcttagagtttttgattaatttacagtctaaactataacaaatattttttatttgtaagttgttcacctaagaatatcttcaatgagatataatatttatagttgtcaaaaatacaaatatcgtcttaaaatattaatctatcatttacatagaatttgatactttttcttataaaaaatacttcaataattaacaactctaaaagttatccactatggtcctacagtatattaaattaataattctaatagtaaaaaattattttttggaaatatactcatttagtatccgactcttctcgaaaaatacatttagtactttatattttcaataatatttttttttttgaaaaaaaaaaatataataatacttatttgatatcttatattttgaaattgtacatatttaatactctaaagtaaaatataataatataatttattaatttgatcaaacagtaatcaaataattaaatttgaattcattaaaattaaaaacaatttcattgtattgataaaattttatcaaaaaattataagtttataataccaaataggtatgatttttaaaacagaaagtcccaaataaatattattaaaaatacaatatactaaattaagaaatgggtatacacctatttatatatgtattatgtaacatcactttatataaaatttatctaatggacaactccgagatctctaagttatcaatttctttttggcaaagttgctttcttttcttttctaataacgagaccaaatcttatttgtcatcttttcaaaactaatcattgaacgtataatctactctttttgtccatttagctctaatattcttctcaaccaaataatagctcattttatttataaaccataccatttggacttccatcacaacttaaaacatatatatttacatcaaaattaagatcaaaactaaccttaactttcacttcactcctcaattttggttccctttaagttaaaccaaatttgatttgattcaacttctcctcacttgttaaaccatttcatttaagttaacaacaaatggaaacgagagaaacattaacactaacaatgaaaccatggtaacttgaaaagataaaaaaggcctacttatactcttatttaaaatatacacattgagatgagagttctttcctacttatcgaaattaaacaacacattcacaacaccctttcctttcctttttctttccattactcaaaccaaccaaccccatcaaacatctttaaccaagtgtaaaatgtaaaggtaaccaaccacactgcagagagtttcatcaggcgactcacttccatgcatcccatcatagtctgcaatggctgcaaaatacagttaagacataagcaaaacgataagccaagacagattatgaaatgaggggatataccgaaatgtctgccatcagaacacgagtccatgttaccgagcaaactgagctactaccctatagtcctacggagacttctcctttgtcactagagttggtgtaattgagacaattcctatgaggaacaaagtggcaatcgagttgaaatcatagagatcaccaatggattgaagctctccaagagctattccagcctgtagttataacaagtagtagcatttcaataaaatattcgagcaaatgctctcaagccattcaaatttgtcacagaaagtgtgttaatataccttcacggtaacataagcagcaggtatgagaccgattaaagttccgaaaaagaatatatgataaggcacatcaacaattggagaagcaacattgataaaagtattaggcaaagtaggagtcagtctcaggaaaagcatgtaatttaacagcctttctcttcttttagccacctgagagagttaacacaaatagtttaaaccattttgcaagacaaattgaaacgagtaacaaaccgggccgagtttgcaattcacctgtgcttgaaagaaattcaatttgtcaggccaaagtgagaacacaaggggacgaccaatcatctttgacaagaaatagcaagaagaagcaccagcagttgcagtaaaaacaacaagagccacgcctctaaagacaccgaaaagggatccggcgagcagagacatgaacacagttcctggaatcatgaaagtctgcatgaaaatgtaaacaatgcaatagcccaccaggacttgggcagtgtaatcacttgtgtaactttcaaggttttctctgcaccaaaaaggagaaaagccaatgaatatctcattacaactatttctttttaaaatgtagaatgaattatacatgcatgcaaatcataacattcataaaaaaacacaaatctaactatcaaactgctaaagacaatctttgaacagtgtgcatctgcattatgcataaatgttatatgaaagggaaaaacaaagagagttccactcaactcaagctaataaaatgttcttgatgaatttaaaaattgaaatccaatctatcatagatgactaagtaccaagttttaaaattttccaaaatacaagcttaaatcgaaaacccatatgagcccttaaatctaaaaccaacaaaaccactcaatttattagattcaaactcaaaacccagaaaaattgtcaccaaaatcaatctttaaaacacccaattgcagcatctattataaaaacttcataaagattaaacatttaccacaaattaaacatgcatgcaaaccataaaaagataaaaattgaaaaatgaagaaaaaaacaaaaactacctgaggatttgaagatcttcaaggctacgagggagcttgagaaagctatagtcagaagaaggcatggttaagtaaaccccaagaagaccaataatgaatcccaataccacagaggaagccacagtcacctcccaaaaactcaatgggaacttattattgttgatgatggtggtattggtattggatcccaccaacccagaaaccttggcatctcttccattctcattattcatcattttctctctgcctactatattattttcctttgttttctcgggaaaaaagagagagagagagagaaaaggggagaaagataatgaaagcctcaattctctcttatttcctttcctttagaggcacttcttcttcttcttcttcttcgtctgttgtcttctttgtttctctctctaaaatttgtagagagagaaactaaagcaaaggaaaggggtggatgaggaatattcgcacttttattttttgatattaactccaaaaagcaactgcttccttcaaaaataagcctaatttatataattgcaaaaaatatttagtacatagatttagattaattaagatttttttgtcttaacttttatatgtaccaaatcacgtctttaaattttttggccgttaaaaat

SEQ ID NO: 20257 - DNA, 3524 bp, Cannabis sativa
  modified_base (2831)..(2831): a, c, t, g, unknown or other
tcttggcaattcttgttgtatccttgccctttaactaattcttccatttcacaattcgcagcattttcacccgaagaggatattccatcagctctgtctttcttgttctttttcttttcagcacagtccatctcgtcattcactacattgcattcctgcaccttgactacctcatcctcaacattctccctcgacgaagatattccatcaactccttccttcttcttcttcttctttttttccttttcaacctgctgtacctggctactcactgcagaagtgtcttggaaattcttgttaagctcatgcccatccatttcatcatcctcacagttctcacccgaagatgatattccagcaattccctctttctttttcttatccttcttgtgctttttcttcttctcttttagttccttttgctcaattgctttttcatttgtactgtcttcgccttctaagcaagttgtctttatagtttccgcaacttcatcagtaatctttttggtatcctcttcatcttccggaaattccttgtcatccttttcatgcccatttgttttctccttgtgcttctcacttttatgctttttcttctctcccattttctcgcccatgccaataaagatgacttgctgaactcagtactctcaatcaaatagtcctacaaagttgaaaacaattaaagatcatcagggaagctgctaaagtacaaattatataaccagctgaccagcatgaatggaatatcagaaaatatagaagaaaggtcaataatcacaatctaatcacgacacgcatataaagaaagaaagactgggaaggggagaatattttaaatcaacaaactcctataacatgtttcagttacataaaatggcaagagtcacagtttggaatttaccaacgatctcaaagtattattagatttatttaaaaataaaagttaaatgaatcaattgaaaaaaaaaaatgctcagattttcgttgttagaagatatagaaggaatccgtgttgcaaaactgtgttaagaattatcaaactgttgtgactctgatccatctccaaattcaaacatacaaaagcttttgtctttctcttcaatgatttgcttcattactattattaattctcgtttttgttgtttttcagactattcatattttctaaagagccacttggtcaatgagccacttgatcaataataaaactagaaagcattgtattaaaaaactgaagactacagaatggattctaaggccttaaacccaaataattaggattaattctacttctaccgacaaaaatcctcaacaaaattgttgaatcagaaatctagagcaaacactcggacttagaatagttgcaatcaagtagtagtactagctgtcaacaaaactgagaaacacctccaatagcaaatttcaaaaacattatggcctctctaaattacttcctagaacttcctcacctatcaccaaagataacttcaattagataaggaattctgttgtgaagaatttggtagtaagtcaaacacttaaaagtgtctcagctacataatcttgacacagagtgaaaccaagaatttaaagactgacaaagaaaaggaaccaaaattctctcagaacatattcaaactacaaactcaacaaatacatcaagtgaaaacttcagccaagctttacatatacaccttctacattgcaaaaataaattatacatatatcttaccttatcttacctatattataaatgcctgtgtaaaagaatttcttgtggcttaacataacatttttaaaactctattagtttcaacagaaacatgccaactgctaacaacaatgctggagagatgcaaatgaataaaccgtaattgttcacaacttctctaaactaattattagttggtatctattcaatgaagtattgtccattttggttcgaaacttctctaaacatgttattaattggtaactagtcaatgaagcattgcttatttctcttctcttactaaaatatcagataaaacttgaaacaaatagctacaaattatctctccaataaacaacacaacattgttcaaggtaacttctttgtcactatgagtagttaaaataattataattcaaattgcctaggaacaccataaattaaattttatttggagaaaagattctcaatgtcaccaaacacttcatcaacaccaagatatagaattatcccaaagctaaacacagtgctgaaatataatatgtaggaacaaatacatacaaatgggattcacatgaaaagtgtaatcccaatgaaccaaaatcagaaaatgatgaaagtttctttggccctggcccttaaatttcaaaaccatccagattaaaacaaaatctcgtatgatgattaacacatataaactaattaaacacaattctaaatcttagaactaaacattacaaactaattacgacaaacctaactattaaaaagaaaagagaattggataatagctgaatcatatccctataaaaaagacatttaatgccaacgtaaaaacaaagagaatcaaaaagtcaaacaactagagaaagtttatttcatcatcaggttttttcaaccctcattagcaagtacctgtaagtgaagtaattgtttatccggccaaggagtgaagcgcagtgggaaacgaaattcctccactccgatcaggttagtgaaagaggttgataatagtagatttctagggttctattctagtgagtaaggttgttcattggatcacatccaatgtttttagacccatccaaagccaatccaattatacattggatgttgnatttctccaaccgatccaatccaatactgtaggctccaccgaagcgatccaataaatcattggattggatcggttccatctaatggatgaatccctgcattggattggatctatccaatacttttgatccaatattttttagaccggattggatccatccaatccaatccaagagtaaaacttaatttttcacctaaatggctaatatattagttcaaaatattacaacccaatataaagccaacctaattgtaacataagtcgaacataaattcaacctaaatccaaaataaaaacacaaaaactaattagaatagaaaggaatatgataaaaaaaaaaagttgattatcatataattaaaggaaacccacttagaaactaattagaattgaaaggaatatgatacatttacatatatctataatacaaaaaactaaagaaaacacttaactttgatactaattcattccaatttaatgcatgatgtcaaatgttagcaagttcattccagcatacaatttaatatatctataatcaaatatgtatcctgatttttcaactcacaaattaactattattggttacatcttttgaccaagttaattagacaaaaatgaactaattaagtcactggtttttaatttcaactatgaaaaataaaaaataagagaaagttaaaagacctgagttgc

SEQ ID NO: 20258 - DNA, 3316 bp, Cannabis sativa
  modified_base (311)..(316): a, c, t, g, unknown or other
taagagaaggggatggatttggtgcgtaccttaaatttgtttgatatgttggaaggaaggaaaaaatataaactataaatatttattagcatatttatggccattataatttaattttgggtctttttcttttttacacttcaaaacagtttttttttgtatttttacagaattctacataaaaactcttattgcaattagcgctgcaacttaaattgcaacaaaaaatcgtacagaaattcctattgtaattagcgctgcaaccactttaaaaacccaaacaataaatttgaaaaaaaaaaagttaaaannnnnngtatatgggataattcccctttaatttttatagcctacttttaaggtaaaaagagagttatggaaaaaattaacatcttcattactcaatccttcatagttccgaaggatagtttttatgggcccaagtggatttgcaatccacaccctcttcccttccttaaccctatttcctcccaaccaaacacataaaagctaaggattgatcaactcaatccatagaccttaatccatcattcctctaattcctcataccaaacgaagtgttaatctctaggtaattggataaatgatgaatgtgattgaaatctatcagaatatatatatttatagaaagcattgtgatggtaaatacatatcataggcactccaaacttttgagcgtgcatgttataaaaacagtttgacacatgttcttgcattccattaaactgaaaatcaaagctgctcgaattcagatcagttaagcacttccagctaggggtaccaaaaaataacagaacagggattgcagggttcaagttacacgacagagttgaaaacatagattacataataatcactacgttaaatctctctcttgcatagtaatgatggttttattgtttcgtataaaaagagaagttgaaacatgaaagagaacaaatgagaaaagaacattacaaactatttatatcaattactcaaggaaatacagaaacttgtgctcaaatgatgctaattttaacccaagaaaatcaagtagtggtcaattcattaaagttaatgagaaaaagatgaataagtaaaaaaaaaatatcaattcttattttgttcccccagattaactatattgagtatcctccgtcctcctctttaatatcaacaatacggggaaaagaaataattagcaaaatccagtcatcctcgaagtaaaactcagtgttggaaaataaagaaaaaaaaaaaaaaagctaagattaaaattagaacccatcaatcattgaaagcttatagtccaaaagactattcaattcacgaacacgcggcaaaaagtacgagtttaactaacaaaaccatattttcatacactcgaataaagagtaaaaacagggttagccgaattaacaactaaacaaagatcaaattggagttcaaacacaacaaagcagaaaccattattattaattcataaagacatgaaccctgtacaccgaaaagatcagcaacccattgaatctttcaaatacaatatactaaaaaggccaagaaacggaaagaagtacgaagtaatttagagactgaccttctcacctctctcgatgtacttaacggctacaagctcgtcagtctgcctgtctctcatcaacctggccaccccgaaatttcccgacccaatatcgcgcacaagctcgtagcgatcgctatcgtgcataatcggtatgtccatgcctggtccaactgtgatcatcgatcgatccatctttctttttctagtctctttataataagggaaaaagaaaagaataagaccaaccactcctctctctctctctctctctctctctctcacattatagagatagaaaggcatatgggcaaagcactatccatgagagtggtcgagatcaaaccagaaaccggtagcaagtgtgaggtggcgtgatatgagccactggattggaagtagaagctgtgggtgggtgaagaaagagactcaaaaatgggttgaggcccgtgaagcttccagccacccttgattataatcaaaacgagtttagattctcttcctttttcttctctatctctttttggggggcaaatacttgtactttgcagttgcagaggcggtgcgtgagaccaaccgagctcgtgaaccctctcactctctacactcaaagctaatgagcttttcttttattcgtactctctgtgattttatccaaaactttatgagtaaagtatcagtacataccagcaagagaaaaaagttgcagtacataccagtacacagatatttctgttaaaatttaaagaggataaacaatgatgaggagtttcatccataaaaataaaacaatctttgttatttgtttactaaacaagagactagcaattttatcattaaaattattattatgcattatctattatgtatcaagtcgatcttttaaattacatgccactcaataattaattagatcaataatagtataatatggaaaaaagtgtaagatactcgtaatcccttttaacaatgctcttatttcaaacttaacaaatctatttgtgaaattgtgacaattgtgaagtgttcacatgcactgtttaacttcaagcttagcacgtgttttcatccattgatttatcgtctaatattcaatgttttgattcctcacttaaacagatttggttaagggtatgatcatagccaaaattttaaatttgtaaagggtgtatatgtttaatattatattttacaatacatgtactcacggctaataaaaatactatttgcggcaaaactattatttgtaattgttacacatatgactctaataaaagaaaatacgacaaaagtactatattttacgattttattgcagttgtacattttttttagttattaagtgcttactaagcccgttaggtgccaactcagaaacacgtagcgatatacgtgatctaataatatatctccacatgtttcttaagttgacacttaatagtcaaaaaaggtacgcccgcaacaaaatcgtaaaataatgtacttttatcgctactttttgtaattgagatcatatatgtaacaattataaatgttaagggatttcatcgcaaatatcccttagtaaaactgtaattttcattcaatttcaccattagagattatattagtggcttaaacaggaaaaatataagaactagattttaatttattgggtctggacagaaacgtgtaatattagttacttttgagtcttctttcaaaaaattcaaaattaagtctagttataaattt

SEQ ID NO: 20259 - DNA, 1928 bp, Cannabis sativa
aaggatctcagatcttcaaagtaacacgtcgggctctgacaaatttccagtaaagttcactctacagtaatcgggaaattgcaaacctgactctgtaatatgtgggcatgacctcacatccaggtactccaaagagttgcatttgtctagaagccggcctataccagcctctgtgatcttagggcaattattaatcttcaacaccttcaaagtcagcgatgattgtctacttgttaagcactcgaaggcatcatctgatacctcctcgcagcaaccaatgtcgagggcctcaatgtttctgcacttggtgaggatacagcttaatgaagaatttgaaatgttcaaacaccagtccatccgcaagttcttgagggtaaattcacaagcagtggctagtaattgtattgattcatcagtaatgtcacgacagccaccaattattagagtttcaagatttttgcagaatctggccagagataatattgatggattcccaattttgtagcaatccaacaacttgagtgtctttaaagaagttgcacatgcctctgaaacactggaaaccccaatatctcctacattgctgcatttattgatgtctagaaacttgatcccacgacaacccctgacaaggtctgaaagtcctgaatcagttatattagaacatccttggagccacaattcctctatattggggcaattcttggaaagggcttgtaaaactttgtcagtaacaagtctgcagccagccagatgaaggctgtgtagtttaggacaaccactagccacagctaccaatcctttatcagtcaactttctgcaatatgatatatccaaggactgtagtgaagaaaggccatttccaattgccactattcctttatctgtaattcctgtatgtcaaattgcataatcttaggtagcttagataaggtttcaactcttcagatatttgaagaatttgggtaaataaacaagttttaatagccaaaattaatatagcacaattatcatagaatctgattgacattaagtactctagcccaaaaatgcaggaaaagaaaagagttcatttctataatataagataaaatcatgatgtcatactagaaagtttgcgattacgcaaaatcatgaatgataaacagagaatggcctagtaatgttgacactttcacaaaatgtacctactgaattcaagatgatcagactatttacctttacaattctgcaaattgagaactttcaagcatttaaacccatcggcaataacagagagatcagaatcggtgacgccaggatagaaggaccgagaaacggactgggagagatccaattctagaagtcgagagaacctggctgccattctctcaagcatgtgcggcccagcacgtgcgaatagcttcttcctctcggtgctctgcaagcggagccatcttttgcagaccaatccaaagagctccttatcctgatcgctctctagcttggccagcaccgaacggagctcgtcgtcagtcaatgcgtcgtttatgcagaccgtttcagacaagggcagaacttcggtagccattggtggagaagaagaaagacaacgaatttcttcaaagcttatacctaattctgatcctaaccctaattgttataataaaatctacaaggcaccgtatggggaaggaaccgagcggaagctccggccagtcgaacaaacttaatgtagttgattgaggttcactatggatttacaaacaaaaatttcactatctatacatattttatatcaaaatttagacattccaccaatttttataaaataataataggctaaaataataatagactaattagtaatttttcctctcgaattttgacatgtattaaatcatgctccttgaattttttttgctattaaaaattctacctgaaatatt

SEQ ID NO: 20260 - DNA, 2942 bp, Cannabis sativa
gaacgttcttagagatgagggcaacaatgtcaaatacagagtttatgccattattcgtgaccaaggtgagaaaagttgggaattcgtgacctaaattctcataatttgtatttttattaataataacaaaatctcatacataaaccctaattattaaataatttaaaatattaatcatatgcggtctttacactcaatgaccgacttcttgagtcagaatggtaactatcttccatgaaactaaccatcctctattgttaaggcccccaaggtgcaggcccctactaagcgtatgatcgcgttgtggtagttcaagatcttgataagtaactatcgtcttgtggtggatgaggttacacatcctatggttcagtttccctgggtgccggtcccaggcaaacatagttatcgtgagagatggtgcaccttctttaacatccatgtcccctaggttgaggctcctaacgagcatattcatctcgtgagtcctctcgcctgtctcaaggaggtagaggtaagtcttgacttgggaggtgcctccctaagtcgtcatctctgtctctgggctggttgatatggtggtggtgcattagtatgaggaggctcaggattccttattggtgatgggggaaacctaattggcgaaggagagttccagacacgatctcttcctccctcatcaataccaatatccctaggaataggagacagatgagaaggcaggctacattattacgtgttgtgtcccgttcctcatgggagcccttttgtgggggatgtggaacgttgttatgaggggcaataggttcttacacatccctccaggtctgatgttgcataggaggaggtgctaaatccctttcattctcatgacctaaggtggttactcgttaccgttgttgtggtggagggcggtcattcctcttgtcatggtatcattctcacgagaaggttgttgaggcacagtattacgggtggtatcccagctttgtgttgtcactgtttgtgacctaaacctctcataacttttggtaggatgacgtgttaagcgacttccatggggccatcttcttctcaccataccaagactcccacgggatccacattgatgtggccttgtggcctcttaggcattatttctcttttttcactctctattgagtctgagagtctcatctaggcatggcgcaacactttgttttccatgaacgcctcatgaacattagtggttcatcgcacaccatgggatggtgatgaaaattttccaacaccttaaacttgacctttgtcgtgaggcatgggttgtttgcctgggcgctgagaggtcccttcgttagcgggttcagcaagttaaaattcctccaggtggtccatattattttcttcattcatggggatgtcagtgtcttcctcctcatagttcatctgtctcatactcaccatggtggcaagtggtgattaacactcgtgctcactgttcacaatgaaagcactgaattgttgacgcgattttttgtcaatgaaactaggaatatcgtaaactaagaatatcgtaaagtaaaccagtttattgaaaatgaaatttgataaaaatgaacaggatgattttatagtgattcaccctcttccgtctgtaataggctagtcgacttcaattgttattggtctcaatatttgatgattgggaggctatatatgcaagaaattattcattgcgaggaagttcttcataaagactagcataattggtactcgttgataaaaaatgtgtagccaaagagcattatagatctgctcatgtaaataattctaagtcaaaaggctaaggtgaatctgttcaaagagggagatgagaacaccatttctttttatcaaagtattaaggcgaggaaagtgaagaatagagtttatgccattcgagatggtagaggagtttgggtggacacaattatttaatactattagccaagcttttctgatcttttatcattacttacttgcaagaattatggaaatatgaatctacttttttgaagtatgttgctatggaaggtcccttgggaaatggagtatcttttgatgcggcttagcttcttgattttcattttcataatcgacgtgtattattttagttactcatctttgctttgcagatggccttattttatcttgtgaaaataattttaaatcaatgtatctttacttcttaagggattttaaaaggttttcgggtcttaagaactaactaaatgagagtaaatcagccatttattgtttcaagtatggatgatggtgaggttcaaagtcttttaaatatgcgttagaatttgaaagttaatatgctttttttatttagggattcttatttgttccaaaagattcaattttacaacattacaaacaaattcatttttaagctaattatcaaaaatatatattgttttgaaacgaacaaattcattgtaaataaaaataatattctcatacactctgaaattatactttttaattattataaaaatatagtgaagtaatatatatgtatattttgattgaaaagcaacttttttgtctaaaataaataaataaatataacaattgcaaattaatggatatatataaattattacatgtttggcatcataacttaaaaaattatttttagttcttaaaaacagaaaacaacttttaaaaactaatagaggtcatttggccaaatttttaaaaataattttttaaaacttagttttcaaactctattttaaaaaactaaaaaacagaaaatatcaaaatgtaattttcaatttttaaaaataacttttttttttctctaacatattatattttacatttttgctcacataccaggaccctagactcggacaatggaactcggaccaggacaccagaccccagaccctggaccctagacctcggcccca

SEQ ID NO: 20261 - DNA, 2990 bp, Cannabis sativa
atgccaagagctattggcggggaactagattgctcaaagacaaggtcagatgaaacatgcttagaactagtaaaaaaacttattataggacaaggagtgagttcagacaatacttgagaagtagaagcagaaacctttcaggcagggaatgaaagcttatcaaaaacaacattcgtagctatgaagattcttctaagtacattttttacacaaataagctttgtgctttggagaatatccaagcaataaatactctgtattcaagtttgtgatgatgatagggcctcaaatgtggatagcaagtacaccaaaaaggtttgagaatattatactcaagaatttcatgaaatagacacttaaaaggactaagattgccaagcacaagtgttggcatcttattaatagagtgagtggaacattagaaagtaccaccaataagacagattaagaccagattgagctaagagagcgaaaccagttttagtaatgtgtttatgctttcgttcagttcttctattttattcatgagtatgaggacaaggttgtttagaaaagatgtacgatcaactaaaaactttccaaatggcctatacttccctcccccattagcttgaacaactttaataagtaagaaatgattattctgcaagacttttgaacttgataaaagtttcaaaggcttgagattttaaagtaattagtagaaagatccaggagaacctactataatcatccacgaagacaatgtagtatttgtagttttatttagaaggaatgttggagggaccccgtaagtcagtatgcaccagtgaaagaggctgattggctcgagattgagacaagagaaatggtagcctatgatttttacctaattgaaaagctttgcaaaatttcagattcttaagagaatgtggtatgtttgctatagttaagatcttgcttagaatgttagttgcaggatgaccaagtttactataccaaacattaatgtcattaataaaacttgaaagatagacaataggattaaagatatcaaaataaacaaaaaaaaaaaaagatttttattacttttttgtttggtacaaccagaaactgaatgatcaatttgagtacaacactcattacaagactgagaatgacaaaaaatagacttggactgaatttctcaagttgcaagatgcacctgcaaagttgtattggaaagactcgagctatcatctcctaaaagatagagaccatcattaatttttcttttgagtaagattgcccatgtttccttgtccttaacaaagtaactagttttatgaaattctaaatatcattgttattagtaagcttaaacacattgactatgtttttagttattaagagaacttggaaatcagaatatagatttaaagaataagaattggaggaaagagtggttgtaccaatattagaaataaacaatttcataccattagcaacatcaatagtttcatggctagagtaagtagaagacttaagactgttaattgaatgtgctatatgattggttgcctctgtatccacatatcaacccatattatcactaaaatatggtatagtttgagctataaaagcctgaagatcgtaatcaagagattgttcaataaggtgagcttgaggccgaaatgtgaaagccattagagtggcctaatttctatcaaacctgtaaagacaagttgcagcagtatgcccaaacctcaagcagacttgacaaagaggtctattattattgacaggtcgaaattcattttcttgatttgaaaactttgatgcatttttgatccatttcctcttcctaagccattaaaagatttatatggtccatttcttgattgcatggtaagattagctgccatctttgttgaaaggtttaagacagtatagtgtctttctaatcttgattcatgagacatcaagagggcctgaacttcttcaagagatagagtttcacttcgagaagtaatgctagacacaacagaatcaaactcgggaccaagggcattaagtagatacaaaatcaagtcaaaattatttataggttgtccatcaatagacaaagaatcacacacaagatttgatcttgtaaaaatgatcagaaatggagaagatgccattatgaacatttgtcaactgctggcctttaagttgaagaagtcttgcatttgattgacttgcaaacttctgttccaaatttttccaaaaagaatttgaagtggaatagcaagcaaccatgccaagattctttcaatcattgaagatcaaagccaggacaacaataattaatttttgcaatgccattgcaagaagagaggtttatcgtcgccattgatgaccttcgaaggaggagcaatattactaaagagtaattcatcatgatcatgacctatgacagtaagtatgacctgagattttcaagaaagaaagtttgtgtgatcgagttttagagtgagtgaagtcgtgagtgaattcaaaaaagaattctataattatgctatcaaggaggactgagctggcacaacagtaataggatcaatggctccaattagagacgagtggtcaccgaaggaaaccattgacattagtcaataaactctgataccatgaaagtgaaataaaggaagaagaagagagagaatagagagtgtgtagaaaagtttaggctaaaactaccttttttttttaattgaatgattaagtatttatagacactcaaataaatacaagtggatataatttgttacaaaacaagttcaagaaattaaacttaacttcaactaacaccaaactaactctaaataactcaagcataggtagtaggttatcaatataccatgcattctcttaaagtatatatatgggatatgattttgccccattattgtaatttcacggattataatccgtgatgtacggcagccgtcagataaggcagttatttgatctgacggctgagattgatttag

SEQ ID NO: 20262 - DNA, 3547 bp, Cannabis sativa
cttactgattgtgagtggcttaatagccttgatgagtaagtggaatcatcctttttaaaaacaattgaggcggcagcaagggcggctgctgcctcggccgccacttcagtccccggggaagtagaagtgattttgtagagtgccctagaggtgtccatgtcttcaggacgctcccaacattgatgatcagcatttccatctcctacctatacaaatacatcaattattgaaatttttgagcattgttattaggttttgaagtgtacttatacactcatagataccaagtaattactctaataaaaatttagtaattgaatcaatgctacaaattttattataatttatctgaaaagaaaataataaataatatatttaattatattaatagtgatataacattttgagcagtgtagcactgatatctttcaacatttcacattaaacatatttaaacaaaaaaaaaattacacaaagtaaaattgtacttttctttacagatttttttttatacatatatttttatggatttctgcttttacaaatttttcacttgtgttttttcagaaaatatcattttttttagcagtgacgtttaaataatataattttgaaaataacgaaaaaaaaaccctctatatattgtaaaaaaaaaaaagttaaaatccataatatatatatatatatatatatatataagaaaaactgtagactggtacattttgtaaattttttatcatttttgagtatttttgaaaaaatcccttgaatgaacctaacctgagtatatagagttgtgggtgaagtatgggcctttagaatgaagtcagttccccagcggattgcatcttgaagatggttgagttggttggcagaagatatttgggccctatactcaattgcagcccaactcaataagcttacagaaaacgccatgggccatccaaacttcacattatcacctgcatcatagtatcctcccaccaaatcaacctatccaaattcaaacatcaccacccttttagtcttctagatatataacatattaagaaattaaattatcttaatcaccaaatgggcagccccggaatttagcgggctataagaaaaaaaatatttttgagtctatttcaaaagaatatagtatttttttaaattaataaaaaaatatatatacatttttgaaaaggaatatttttttttgaactcctaggctaagttggctctaggctcaagcttaacccgcttatagccagtgggacgtgtcaccaaatataacatcatatgataatgtgtaacttaatgtatcaacatatatttttttagataaatcaatcttcttccttttgaaatatatatgctgtctctatataaaaagtgataatataacattgttagaagaaaaaaaaaggtagtaatataactattcttggttgaaatattaagttgatgaaacattagctagtgtttctattaaaccataaatgttacaagcttcctaactaggaagggtatatatttagacactcaaatttgatatattttttttatacacaataatgtaatgtgtatttaattttaactatataataaaaagtgatatggttaccacttaaaattatataggattaaaattaaatacacattattatatgtgaaaaaaatatgtataatttgaatgtatatttaacactattctcaatttaattattaacgataaaaaattatatgtactttttcagggtttccatctgaaagagcagaatctcccctccaattaactcgttgattggttggcaacttcccggacctctgcccttcaaagaacaagatagccttgtctagggcatctttataattgtaattaatattagtatcagaagaagaagagatcacccattgattattatcatcatcaaaagctagcccttctttcacactaaacaacattagtacaaataatagaaaagccaaactagtaccccaaaataccccacactgccccatatgtatactattccaatagacttaattttatatgaacctctcaatgttatctttgaatgaattatagtagtagtactactgggtatttatagaactagaaaaaacaaaaagtaatattgcatgaagtcctttagaattaaagaagttctaattacaattttttattcaatttttattataaaaaattttatttttagtcacaataaaaattgtgactatatataagtataaaaaattgtgactaattataaattattattcttatgttatgactaaaaaattcgtggctaaaattattagtcacaaaaattacaatttgttgtgactaaatatatatttagtcataatatatattgtaactaaaactaaactagtgacaacttatatttaaataccatgctatagttacaagtaattttttgttgtgattaaaattaaatcacaaaaaaattatgttgtgactaaaagattgtcactaaaagtaaatttttcttgtagtgagcttcacgttcgaaatcacattctgaaatattttttttcatttattttcatagcaatatttagttactttatcatctatgtaaatttttgaaattttttgaatagtttacagtaccaaaaacataattcttgatattccaatctaccacgtgtatttaaaaaactttaaacctactttcgacattataaactattcgaaaaaaattcaaaaatttacagaaatcatgttgttgtatgatattgtaactataacaaacaccaacatatatcaatttttttttaaaataaatattctaacatgtatgttgattgactaaaagattataattaagaggttaatgatgctttgattatgatgacacgccaaattaaagggaatggagattgcgtgaatttaatgattgagtcatggagattattttgagacattattaatttatgatcatcatgcatgggagagagtatagtttcacattaatgatatataacaataatattgtccaactacgtacaatagtagttattatagtacactgtaattggctaagtatatgatgttagtgtttgatctatatatatatatatatagtatagtttatttgagataccacaagaagaaagccacccaaaattgaataaggtcttgtttggaggtatacatgatagatttttggcgtgaaactctcaaattaagtttggcatataaagaaaattttgcttggaaacttgaggaggagaacaactttattagcttatatatgtgacccataatataataatgcataatgcactgccaataatgatgatgtcaaaaggttgattctctatatcttttggcttcatcatctctatatataccatgcaaattaatatatacttttttattttttttaaaagttaaatgagaatttctattataataagtatattattacatctagatcaatattactcattgagtagaatgtataataatagaccaattaagtcatttataataaatagattaaagatcctaatattatcttcaactaaataa

SEQ ID NO: 20263 - DNA, 3418 bp, Cannabis sativa
  modified_base (821)..(822): a, c, t, g, unknown or other
taatatggctgaccaatcaattcccaaaacagctcacaaatcaacgagtaagacagcctcacttttggagggttggaggaaggtcagccagcccagcccagctccataatattaatagttctcttttaccatctcaaccgttcgattaagtccacgtggcagtcacatgaatgagatgaatattcgcttggcgctggtgtctcacaacgtggcaggcagctgctttccaattttgaaagaaaccttgggttgggacttattcgtaaaatgttcaggatccttattattattattattattattattgttattacgactcacaatttcaatccaacttttttctgtttctgtcttctttttggagcctgttgcttactttccataaacattgctttcaaaagtttacttactccctctaagagcatcaccaatgagcaacttgataccacactatgtgtttgtcgtaaataagccaaatgaaagatgaggaatgaggagaaaaaaaaaagtaatttatcacaaaatttattgtataaatacttaaatttatctcgaagttgcatataaataaatgttagaatttagaaataagataaatgaggtcctatctcaaaatcaattgacaataagaggagtaacccattcattttatatatcacaatttatttttacggtactaactctaataataattaagtttaatttttgacaggaacaattcataagttatatttttaaaacttatacttgaccattaaatatcaagtcaatggttacttgacagtttctaattagtacaagtcattaaatttttatttttnnatttaaaaattaatttaaatatgctaataagaaaatgacatgtagataacgacttgatagatacttacagaagtttcaaaaataagtattattacggtcaaaaaataaatttaagtaactgagagttaaacttaaatatttatgctgtgaattatttaaaaaaaaattaatttaaagtgtaaaaataaaaaagttctaattattatgtatggttattttaaatatataatattaaaaatacgttaatatccacgataaaaataaatattaaaatcaaaaacaattattaaaaaatatttacagcaataaatagtaaattttaaataaaactttcaaataacgaaaaagttttgttcggttttaatttgattattcaaatattttaaagaaattttagttttttactttagagaacaaatgtagtgcctttcttttttatctgtttaactgattttgcatccaagcccctcataatcatatcttcggtaggggtatgatagcaaaactatttcttgagcgaaaaggataaagcttgctccattaaggaagccaaaagtaataaaatagattacaataattgcacattgaaacattgttccaatacatgaaacttaaaaaataaaaaatgaagggttataaaaacttttgttttgtaatttactgatgtatgtggggccattaccttttctctgtttgaaatctgatcaaaggcctctctatatatataagtaggcctgtgtaaaagaaaatatcataagctaaagaggtattcagagacagccttttaaatatatttaaacattttctttcttctttgtatgtttgaaggcaaggaaagaatccatttgtaagttaaggaagttccttccttgtagtttcttagagttcactttccaatgctcttcttcttttatatataaataactcaatactcaactctttcttcaacaaaaccaccatcttaattttttgttgccttattctctctctcttgtttcttttcaaaagcactataaaaacaaactcttgttctttgctctatctaaagctttctacttctgcttcaacattttgatatcctactttacatttcacaagtttactctttgattctttttcatcaaaagagaaagaaagaaagaaagatgggagttggaggaactttggagtatttgtctgatctaatgggaagtggccataaacacaagaagaagaagcaattgcagacagttgacctgaaggtgagaatggactgtgatgggtgtgagcttaaagttaaaaaggcactctcttcattaagtggtaagtaagttatatttatacatatatgtatttggggtttggttttatttctttgtcccctgtttttttggttgagctaatgataaattgaattcatggttttgcaggagttaaatctgtggacataaacaggaagcaacagaaagtgagtgttagtggttttgtggaagcaagcaaagtgcttaagaaagccaagtcaacagggaaaaaagcagagatatggccttatgtaccttacaacctagtggctcagccttatgcagctcagtcttacgacaagaaagctcctcctggtcatgtaaggaaagttgagaacactgccacaactggcactgttacaagatatgatgacccttacatcaccatgttcagtgatgacaacccaaatgcctgttctatcatgtagatcccaaaattctatgaataactgtaaaatccccatttaattagctctctctctctctgtttttttttacaaaatttcttcccatgtagccatgtaggaattaagatttggtgatgtttgatatatatttttgttagtctctcttctctacacttggccattgtgtagtatgtggttttgaagtttaggttagttttttttttctctttctctgagagggtctaggtcctcttggaggagtgaaaatggttttggtttgtgggtattggggttggttgtagagtcatgaattgttgtgatgaatcaatagtagtttcatcatattttcatttctttctattattacataattttgtacatgtcttgcattgctttatctattcaacacagctatatcttcctctaaaaagaaagcaggctggctactatttgttaatgactagtgactagtgactagtgaatattttttcccatttaaagaagagaaggtcattgtaatttcatgtcataaaagtaacaagcaaaacttgacctcattaatgaaaaacatgcccctctctttaataaaagaaaaaaaaagaaaaaaaaaagaaaagaagaagaagaagaagaaaaacgtgcccttttgattctatttgtccttttatatgctaataattggagcaatactctccctccgttatattttaaactgtattactaaaatttaatttttctatttttcatttatattatgctttggcatagtcaccttaaaaatagagtaattatgttactacaaattatttttattcttacataatttttaattttttccaataaaaattatatttttcattaatttttttttttttttttaaaaatggaaatttacatgatgtactaact

SEQ ID NO: 20264 - DNA, 4023 bp, Cannabis sativa
attttgtactatacattgtttaatgagtgatgccagaaacacacaaattcaggtgatcatcatctcttaaaaaattaagtaaaaataaaagatttgccattaattatatatcttttaagtttattaataatttaatttattaaaaacaaaaaagtttttcagggctgatctatattttatatatattcatctaacaattttttcaaaatgaaccaattaggttttttcgttttttttctttctttttcagtaagtatgaaagttgaacctataaattgaattcaatatttttctcccctcaaataaaaaaaattgatttggaatgtagtgtcattgtttgtttattcatgagtatgaaacttgttaacgaacttttacatgtcgatgttttggctcaatcacctgcttgttatgcagtaaggaaatgatttgctaatttaacttatgcatatgaatgaatacttatataatgcatttggtctttattttctttttgaatgattctgttatcttattacatgagaaaaatacaagaaaaaaaatgatacaaaaatgtgtcaaacttatatataatataagttggtgagacaacgcttaataattttctaaattttcaaataacataataagtcagtttgatagatttggatatgtttcgttttttttcccttccccactagtgtctctatttccttgtttcaaactttggatcatgtatcgttgaccaactaatacattgacgctataaaataataatataataaagaaaaaaaaaaaaaactatgtgaaatactaatgatcacgagcaattttttttttttaatttttcttttatatatatatatcattatattataatataataataatactgtttagaaaagagagaatagtgcgcaagagcaacatgggttgggccacaaaaccagaaataataataacaataaaacagagttgcgaaaaagaaaagaaaactaaaaactaatatatatataccgctataccaagttgttggggatttctaataagggatagctgacacaccactggtagagaccttttccatgtgtctggtatgttagggaatggggtctactaataaaataaatatcaatacattttattttctgaatgtgatttttggtaaatctattaatataaaaatataaattatatatatttttttagattattgtttataggcacactcaaagtgttttatatttgaaggatccctcatacctctttcactacacaggaggagagagaaagaaagaaagaaaggcatatgtagatggagaaagaaaataagaagaagaatttgaacaaggggaaagaaaagtagtgcaactagagaaagcatccaaagggatcgcattgatccatcctcatatctatgtttatatatatatattattcatcttctaattattattccgtcccattgttttggatcgatcatgctatccctttggattcctcctttggtcacttatcactccatttttttacattaattgctggagaagactggtcgaactaccagcaaaaaaaacggtggtaataaattatgggaaaaaattcttataatctttttttcaagtaagttgttctcttttttcttttttaacttttttctttttatgtatatatataatttttttgcagcttatatactaacaagctaggttatacattattttgatgaattaacttgaatgaattaataaattaatttatatttaaaacttgaaaactaacaaggcataacgtgtcatcatatctttggaaaccacagttttcttgttaagttatgaccactatttctgcatctggaatgttggagatcgatcttttatttttgtttttaattattatttgtggtaacaaaactcaaaataattaattattttttttctgttatatatatgttaataaataaaacaatcaagatatgggatctggtctgaagatcgaggatttggctcggtctcttaaaccggagatcgacccttgaaaacgttccagtagtgctatagattattgatcacctcacccactatagttgtttacagttgtcatgatatcaaaatttaattatttccttatatatacatatatatacttctaaaatattttataactatagttgtatacatatatggacacacatataataacagtagaatgtaaagggtcaatggaatcaaacccaaagaaaacagtgacatatatatttactgaagatattatctggtcctcttcaatatagaaatatgcaatttttatttcaatataatttcattgacaaaatactttgagacaatatactttcattgacttagtgcgataaaatatttaaacagaatcaattaaggtgatatcctttgatgagatgagtcctcatgattatgcagagttgaatctaactaagtggaaggtagtttttattagtgattctaataacattaatgggaataaaacagtgggagctcccactgtagaaagtagtcgtgggactattgcaaaggccatagttgctggtatagcaaaagatgtataaataatatttatataataattatttcaaagatgccatagtatatagttgacaatatttctggcccattattatcggaagcttttcatcattacaaccttccaacaatttgatttcaccttttgtcaaaaagtaactttatgtagatcagaagttacctattatatatgagtaactctctcctctttacacatgatgagaactaccattctaccaagttctggtgtgactagacaccccaatttttaatttgtcctcaaataaacttgcttgtctctaagacaaaatatacacatgataatttatgtgtatgtattatgttctacttttgctgttagaatatgcaatattttgggcagtatgtatggtgaaatgtgccctaaatctaatgataaataataagtgattagtataattaatctttggtgcccttgacccaaaaaagaaaaaaaaaactgtaaatcacatgctttgtaggactttaattagaatcgaaggcaggcacttccaatgagtaaagatgatgatcatatgtaaatatatatgtatatttgtgagtgcatgtgttatcggtcctcatatatatatatgtattgagtgtccccaaggcaaaggaatcatacacgtgatgagaccttaaaaaagaagtctaaaccactgctctaaatttgaaataaaggctcttttttgctaacctcatatggccacatgaccccaacattaatataaatttataacaactcatatatggaatgcccttttgtcacatggctccaatacaacttctttatatttaattgtaatatatatatatagatagatagatagatagatagagaagtgctgcctcgcttttttttaatgagaaaaaaaaacacgaaaaaaaaaagtactgccttgaattactaaactatgtatgcattgcactattaagccattcccacttgctttctgtaatcttttaatggttgtaggcctcaatctgactgacatatcgctttggctgagcgaaaacactcactgccggaccacttgctagtattaatgaagtaaactaagatttattggtagacttatttgtatatatatatgtccttaataagataaaaataccctttaatttttctttcgatatatatatatgatatataggtttgggatgtagttacttctttttattgttccccaaacagttcataatattgttgaagtagtttagaaatgagttttctacacctgaaattttcaattttttcatttttactgtggggtggaagtttttttaaaaatactgcgtttttttaaaaaaaaaatattgtgtactgtgttaagttttcagtgttgtttcacggttgtttttttattgttccattgttgttttaattgttttgttttgttgttttacggttgttttataaaaagacagtgtttttgtaaaaaaaattctgtgtcatagtaaaatt

SEQ ID NO: 20265 - DNA, 1641 bp, Cannabis sativa
tgaaaacgcaattacttccattaaaatgaactcaacaattaggaaaagaagaactgagaattatcaaacatattaacattaataattttattagattacttcatatttattataaaaagcttcagccatgttagactgaatgcaactgtaacttatatcttctttcttccattacatgatcccttatggtcaagaaaaattgtaagcagaataaaatacaagcaattgagagtaaagatataaagcctaaaagggaatgagaaaagtacttgttcttttctatgtgtggatccaatttcacaggtgcttctgaagaattaccatcattggcctcaactttatcttcacaatttgagctagggctgcataaatcaataaattaacaaacacgaaacaacatgaaaatgatcatccataggagctgaatcaaaatatacaatatcaactactgaaaatcaacttaaaaaaaatcaagtgtcagaataagttgaatgaataaacaaagtaaaggaatgaaattaatataaaaaccccttaaaaaaagattaaaagcaagacccataataactatgctgatcctaaaaaaatctaaagaccaaaccaaaccataaagatgaccacagaattaaattgaaatgaaatttataaacaattgagtcctaaataaattttatttcattttattttgtactctacttggttgaacaaacaaacaatagtaggtcctatcttattctattgattatactaatatgttgattaggtataggattcaaaacctagtgtacatacaggaaaacatcactagaattgagcattcatattgtttgattgaaaagatcattaagagtctgtaagttgtattttgtgttatttcttgatcaaaaaaaaaaactatgaagatgcaaaagggaaaagagagagagataggtgacctcagattatgcagagagataacaaaaatggtggagctgcattttccgataatgtgcattgggagttgttactatatttaaattacattttgaattccaaaatgcacttcttaaaagtgattgaatgtcctttcttattcctaataattttttaatcaattttatattgtaaattatagttattaaagaaattttagtaaaattttaaaaaatttaatacctcaaatagaatttaatccctaattattttatttaatatatttgtgaaatagatttacattattttttatattataaattattttaattcttttttataaaatatcttatataactataatatatatgaatatgaaaaaaataattaaaaaattcgataaatagtggcataagtactaaagttttatgtttataagcgacataaatacatatttctttttagcgacataagtacccaatgtttaatttcgtcagtacaaactctattattttcttaaacatgccacatataaggtccattttctagatcttgagtctaaacagaaacatgtagcaataaattcaaaacaaagtctgtactcacaaaattgaagaaaaattgcaatagctatttaccttttacttttatttttttaattaaaaagaaatataaatgaatattggaaaaaaaattaataataggctaattaagatttttgcctcctta

SEQ ID NO: 20266 - DNA, 4017 bp, Cannabis sativa
  modified_base (3582)..(3586): a, c, t, g, unknown or other
gcataaaacccaacatgcccaaccaccaagacaatggtcaacttgggcattggaaactgtgtcggtgccctagttgataatagtgggtgactaggtaggcaccgagatcgagcaaagacgtttctgggtgccatccttcgacaaaggtcacacaaacatgtcctagtgatcctaaaataatgaaccataaagttgaggatgtcacatggacatcccagggctcaacctgggtccaacatcagtgctaggcgcccaggttgacatcctttatgctgtctcgcattagttttggtttccatcaacttcttatggcaatttgcttagccactttcctaagatacatgagagacatgccccaaccaagttttagactttggagataagtctacaagtaacgacacctaggcaccatgaagccctaatgggcgcccaagttgtcatctagtcgatctgggtgcaccatggctagggtttaggtttctgggaacattcttggaccttgattcctcaaataaatcaaggaacgacgccaggacatgatatgtcatcaacgacatcccaaaggagcccaatcacaactatgggtgcctagtttgacattccaacctgggcaccaatttcctttcactgggtgacgcccatgcaaattcgacgaaactgaaattcgtggagtacttttcaccaaaaagaagattgaacatcaatgagaccgatttcaaagatgttcaccctcacctgggtgcctagtgcaggcccccagaccatcttaggcaagcaggttgacgtatctcaacctggggcactcatggacttctttcgaaggaagttttatgggaatttctcttatttttatccatgaggaagatatgagtgctttcaagaaacaaacgaagccactggagcgtagatgaaaagctggacgcctagggtgacaacacccaagtcactgggtgctcaggttgacataacgactcttctggtggttgtatttagtacaattttttataattttgcatcactatataataataaattaaaatgaaaatttacaaaaataaaaaaaaatatattatttattaataaattgagcatattttttaaataatgataatattataaattaaaatatatattaaaaccacgttaaagaaaaaaaaatatagttattattttgtcaaattagcaccattaaaaatacagcatatatatatatggtacttctacaatgtaccctttttaaaggggtgcattgatgtacttttttaaaatagatgtattgatgcaccatcttacaaagaatgcattgatgcaccctctatttgttttggtgttcaaaagaattttttagtttaatttttttttttatatttatgtacgttatagttatttaaaatatcataatttttttgggaaatttagaataatttataatatagattgcagtgttcaaacagtctattttatacgagtataaataaaatagtcactcgtataacacaatgtttgaaccgtattttcggcgtgttaaatttttctaaattttttaaaattttgagtgtccttaatgactataacagacatgactgagaaaaaatttgactaaaaattattccagataccaaaacagatagggatgcattggtgcatcccttttaagggggtacattgtaaaattttccatatatatattattgggtgcttctacaatgcacctcttaaaaataatgtactgatacaccatttacctgtttcggcattcaaaagaaatttagtctaattttttttatattcgtgtacattataattatttaaaacattttataaaattttaataagaaattctgaataattataatatagaaagtaaggttcaaatagtttattttatacgtgtataaaataaaatagtcacacgtacgacacactgtttaaaccctattttaagcgtgttaaatttttctaaatttcttaaaattttgtataatatcttaaataaccaaaatgtacttgactataaaaaaaacttttaactaaaaaattattttaaatatcgaaacaaataaaaatatatcagtaaattctttttgaagggtgtaatataaaatttttcaatattattttaccatcaatatttgaagtttaatcaattcacaatcaaattgttcttattttctaaaagaaatgttgcaacttgcacgtgatgttagatccattatttatttatttatttatttataatgctcttttcttgttaatattttatagatactgatagaaagaaaatgacaaaggaacacgtgaaatggcacaaacagtagtttggggaattttgttgttactctcttaattaattagagagagaggataagggtgatatgaggcctggtggtggccctcacagctattctctccttggctaataaaccagaagcaccttcttttgttgtagatttgtatcaatattagcaagggaactctgataatttttgtatttttgttggaggtaataaaatagagtagaatggaaaattgaaaataattttcattttattttttttgtttggttacacattaaagtattggaatataattttattagaatgatctttacactattttagtgaatgattattccattttaaaatagaaggaaagactattcaaatgcttgatagaaatttttttataattttttcatcaattttttttttttatgtattttaaattttattccattctattcatattctcttttctatttctattcttatattttcattccttccaaccaaacgccatctcagttctatcaatttttttttaacatataattgggatattgacagcaaaaatttaaatcttcacaattattattttacttgtacttaattatttaatcttaaattttagtaataaaacctactaaactactaaatgttagtaaatttaaagtatcatctatttactatagttaagtgccaactcaaattacttatatgtatactcttatacacgtagcacatatatattggtacacttaatataattatctaagtgtttcaaaaaaatataattatttaaaaaatataaaaaaataattttaaatttttaaaaaaattagttataaaattaataaaataaaaaaaaattcttcttttttcttcgcgactctctctcctcccacgctctttccttctattttactctctctttccttcccaaaactaagagcttccactctttcccatccatgactctctttctctcttttcttcctaaaaacacaataaaataaaaaattctaaaactcctctttttggctcactctcattcattgccctctgtgtgttgccttctttaatgctcgagtattcggtgaagaaggtcgaagactactggcttcaatagaatgagttttagggtttggggtgcaggcgatctccatcatcgatcatagtcgtgctcaacgggcagaggaggtcctctcgcagggccgggcctaggcataggcgggctaggcccgtgcctagggcccacactttccgggggcccaaaataaaaaaatttattaggcttttattnnnnnaaaatttaagtgtattataagcaacaagtatttatagcttagttggttaggcggatggcataatgtccaaggtcatgggttcaaatcctataacactcttcttttgatattttttatatatttttgagggtcccaaaatttaattcgtcttgggcccatatattttcagggtcggccctgtcctctcggtccgagaagctattcgtgtggcgaaccaaagaaaaagagagagagcatggaggagagagaatttgaaagttgcatagagaaaaaagaaaagaaaattaattggtacttgatcattggtttcagttttgtttggtgctagggattttaaatatataataaaagattttttttttaggaaattcaaatctagtaatggaaaatttgtatgttttgtgtttttatttcaaatctgaagtagtgtt

SEQ ID NO: 20267 - DNA, 4626 bp, Cannabis sativa
tgataaattaaatttttgtttacctcttatttaagaaatattatttatgttttttatagtatgaaatttacttaataaagcatgtcgtttaccttattttaggcatggagtttacctaatacggtgttttgtttatcttatttgttaaatgattcatctaagtacgagtgtttttaaccgaataataatacaaaagcttaaaaaataacaccaaaggaatttccctaaaaaatatgtttttaatgataaaattaatattttaccttatttacgacatgaaatttatataacaagacatattattttttgcctaatttacgatactatgtttacttaataagttgtgtcgtttatcttatttattaaaatatcatacatacaaatgagacatgtaattaatttgaacattgttctttcattattttataattactaataattaggattaactaatgtgatgacataaaattgttgtttaccttatttaagggtagtcgtttaccattttaacgatatattatgttttgatttacttaataaagcatgttgtttacttaataaggcatgttatttacttaatttaaggcatgttgtttatcttataaggcatgttgtttacctaatttaaggacacttttttttttaccaaatttaaggcatgttgtttacctaataaggcatgtcgtttaccatattttaggcacattgtttacctaataaaatgtctgtttaccttattttagggtagtaatttttgtttaccttatttaaggcatggagtttaccagcatgttgtttacctaatgtaagttacattgtttacctaataaaacatgttgtttgccgtgttttaggcacgttgtttacctaataagacacgtcgttatcttatttttaattttgtttaccttatttaaggcatgtcgtttaccttatttaagacatgttatttactttattttaagcacgttgtttactatattttaaggcacattgtttacctaatattgaatgtcgtttacctaaattaattcatgttgtttacctaataaagcatgttgtttaccttattataatgtagtaatttttgtttaaggcatgtcatttaccttattttaggcatgttgtttactttattttaaggcacattatttacctaaaattgcataacatttacctaaagtaagacatgttatttacccaataaaatatattatttacctaatttaaaatatattatttatctaaaataagtttatgcacatatgaaatcatctattaattattaagacggctggcatgagtgattatgtttactctctttggcttagtttactattttccaattatacatatttattttaattatatatgtttttgcactcagtttcaaccactcatgtctagttttatggacaagcacaattgaggtgcacaagattttgtgtacaaagctccttgaattttccaagaaagtattacaaagataattaagtaaagcttatatacacgtagataattagcagcgtatgatttagttatctatgtagtgctaaaaaaatgtcaaatatttctactaattgactttcaatatgcctatattttatatttttatcaatcaagatgatcaagtcaattcaacacgcatggatctaaaaacttttagcagagctaaaaagagtgattatgtcaatcttaagtttatattacaaaaaagaaaacccaaaccttggtttttcgtaaagtgtgcatagttgattcaaatgctttcaaatgcacaataaatagataactagctaaaatctacacattaatccttgttttatcaaatctcgcaccatatgatagatcaacaatttctaaggtcatataatcatgatatttgttctgtgctagaaaagtctctttatcattattaattaccataaaattatatggagcgcacgtatgagcagaatctggatagaacaaacactgcagtgccatcccagtcccagccacagattcaattaacatgtttcctaatcacttgagtatccacaatcaatgtcatcactacaatgcaagacggaattgagacaagcaaaggggcatgaagcatggccttcccctagaaacccctgattaggatcaacaataacaatataaagaataagtccacttcacaaaattagtctgaattcttctttggtaggctcagctgaatcttggcccccaacaaccataattgctattctctcaacactgcaaataaaaggaatgatactgaatcaactaataataatgatctaattattttaataagaagaaaccttaactgacaaatcacaaaaaaacaatgagcacaaatatatttgttatttaatctcttgacttaattagcttcactagcacacttaaaacaaataagaaaattagctccaagtatcaaaaatattatagaaaacaatcattaccaagacataataagataaatcaataatagtaattataacttcaatcattttagacaatccaaaaagtgactacttagaacactcagtggatctttaggctgttaatcattataaaaagtaatcaaattgaaagagaattactaagagctcatgtgacacacttataagccagctaaaattttcaattaacacccaaaaccgaccattcactactaattctaaaagataattattactaatacatatcacatcatccactaattagtaggtccctaataccaacaacaattttcaattaaataatacaagaacagaacagtaatactatggaataaaaaccaaagaataaaggattaaatttaaatatgtgtaattcaatatttaattacgtcaataacaaaatgatgttgttgcctattaactttctcaaaagtaaagcataaatttagagccaaaacggtcactagagagaaaaatatgaccgagctttgactagctactgcaagagtactgagtaaaagaagaataaaatagaatgagtagtaatcatcattaaagcgtgtgcaactcaagttaaaaagctaactaatcaaaataagatatccgattataatttatatgcatgtataattactaatttacggtatgcaattggttgagccaatgcctatggtgtctataatgatttttgcattctatgttggtggtactatttgaaagagcaagtaatgcttatgaacaagctaaatcaagtaatattaataaattggttaccaataataataataattaataataatgttgttttgaacaaagctgatgagaaaatagtagatttttatgaggtgaagggtcatcaataaaatgatgatgatgaaacttattgtaataaaaaaaaaaaaagggagagcaagttagattgaataattatgataaagctaaagaaaataataaagatttttattaacgaaaggaaactcgtagttaagaagcttctcaataaagaatctcaccatcagtcatgagcatttgtctgcaacagtaagaaaccaagcctaatggatcaagagctagcattcctgcacactgcacaccaataataaaaagtcaataatggaacttctctaagtatttcaaaagaagatgttggttaataatataatagacaacgcaaactaagaaagaacaaattaacaaacccaatccaactttactatacttgagaaatgcataaattatgaacctttctttcttcagttttataaattttttaacaaaatccccaaactttatacacctgataaggtcagattttgatataaaacttaagccatcaagcattatatataaatccataaacaatggaacttcacaagcttctagtcatcttagggaagcgttaaggctgatgatctagggggtttataaaaaaaagtataaatttcatacaacaaagtgaacaaagtaatttaagaaaaatgcacataaattaaaacttatcataccaaaaaaaatatataataataacaatacactcagaattttcaaactccaaaaaagcatatgagataaaagtgaaaacagtaaaatctggaaaagagtttgtttttaccataaatcaacaatctaacaatcaaatgctatacttgcttgtttagaaataaaccatgaaccatcacaactatgtgagatccaaatcaagctaattaaacatgccaaagatgaaaagaaaatggaaattcatttaaaacctaaattaacaatagattaatgtaagataaaagagaactcagatgtctatggatcttcgtacctcaatcctatacccagttagcataaataatctaggttgggcctcagtggagaggataccagaaatattgacatggaggactgagttgagccaccgttcgactaagagatgtacaccataaattggccaaaatcgttgatcgcacagaagaagagcggaggagtggtcatggtgtttctggagaaaaagtagttgaatatttgttttatttaacttaaatgaagggtacaataggcacgttacttataaatgtgggtatatatgaatgaataaaaaaaagaaggtaaaaattaaaatggcttagtcaaaaggggtatacaatctaatttcctcaaaataaaaatttgaaactaataa

SEQ ID NO: 20268 - DNA, 3683 bp, Cannabis sativa
gggtaagtttttctctaaaagaaaggtttttaatgggaagcttcggtccattttgacacaaatgtggaatgttcatcctgggtggcgattgcaagaaatacaaaacaatatttatatttttcgtttttcttctgagacggatgctctgaaagtcatgagtagaggcccctggggcccttgtgggggtttcttgttggtgacttcgatgccggataatggcaaatggcaatcgactgatctccagagtgtttatttgtgggttcgtttactcggagtcccatatagatacattacagatgaaaatgtgggaaagattgctaatagagttgggacccttatctcagcagataagactagagtgcttgttttctgtttgtttcaggtttaaatggtaacattcataatatgaattaaaaataagaaaaaaaatgttaaatgagatgaatatgatgaattatcatagaatttggagtcttagaatataattagtgaaaaattctaaattttggatgctcaacatgtttcgtccgtgatcgaaaattaagtctgaagcttcaatcaaattttgaactatgatacatttactttaagaaaaagtattgtgaatagaaggaaattgacaaagcgagagtaaaagaacgagagggaaagagaatagaaagatggtttatttttggatttttttgaaatgaaaggactaatttgagagtatactaaaaattggcacacaaaatctatacacattaattttaatttaggtgttaaattttaatctaataaatgtatatttaatcaaattgatgcctaataataatataaccatcaatactaattttaaagtatccattaaataataacaaatttataacacaaagcaaaatgcaattccttttactaaaagattgggcatccactaccctcaatccacacaccctttgcagtagggcatgtagcaaggttacaatgctcagtgtctatatccggggaagaaccccaccaatggagtgccttattttcaacaccaagtgagaagtaaagcaagaccgccatgaaagcaaccccaccgtccaaagccgcagagaggacgtagttatacctttgccaccacttcttcctatacctaaaaacaaagaagttgaacacagttcccaccacaatccacgaagtgtagttcagcggcgtggcgggtggcataatcgcggtggcgccgagcagtacgggcaggttaatgtaaggaatccacttctgtttggggaagagcttgtggaagaaccaaaccaagaatggccccaaaattccccctaagaagaaccaattcagagatgggtactctccctgtgacccaaagattcgtttcggtcccaccaatccccaaatcactgaggcatcgaagaacacgttgtcgtttgggcaagtccatgtgttattctcgtcttggcatatgttgtctacggtgttgagaagtagccatgccacgctcatatttacagttcccgctaacattgtgcctataaactgtatagaacttataatgttaattttaattattgaaaattgcattattagtagtaataatatgtttatatatacctgaactaggaacatggacctgggaggaatcttcatgtaatggcctaatttgaagtcactaaggaaagagattgcttgagacatgctcatatatccatatgtcttgaagctgacattggctatgggtcttcctggataaattactcccattatgtactcggtgatgatattaagtcctggagtctgtaaaaatagttccacatcttttgtgtgtcactcttgtttaatttctttataatgttttgtatatatataacagttaagtgtttgaatcctattttatatctaataaattatttagaattttttaagaaatgtgtaagagtttggctaataaggtatataattatgaattgaaatgagtacctgattggtggtagctgtaataacactaacgggaagagtgaaagagaaggcaagaaaagctgcaaatagaagtccccaataaggcaactgaatttgctttttgagaaatatgcaaagtgcaagagacactgtaattgtaaccgccagaagcaaataaaaccaccacgaaggtatgtctttgtagtttttcattaatcttgtgtgaatatcatcctttcctttcaccgaagctctaaaccgatcgtaaatctccctattatatatttttgtatatttttacataatgtcacttcattttttttgttggtatatatataaatatatataaaaatagaccttagttttagatatatatataccttccatggaacaaggccacatgagtaagtgtagaagctatagtagcaaatccaaaaccataagtgatagcaaaaaaagtgcttaaatggacccttccttgctttacatactctacttggtcaagctcaaatagatcattaacaatcaaagacacattgtagggttgacccgaacccgtaaacaaatctgccgagaatatgggaaattttctagcaccgaatacatctaaaccccagtacgaaacgggcatgaccacatatattatcacaacatagcccaccataatgttggcgatggcgaaaaatgggctgactagtgggctggacaagtatgaggccacagtagtccagtccagagtgaatgcaccgagtccgagccctttaaggcccgacccaatttggtgggccctaactgaattgggaaaggcccaacaaatccacgaaatgctttgcaaggtttggaaaaggtatcccgggaacacgtaccagcagaaactacaagtcaatgcaatgatgaagaactttgcacgagaaattcgttttttgttgtatttgtcttctacttcctcttcttcatgcaaggtccttcatgtgtttataaatttcagctattaattatcctacgcattatgtctatattatatataaacacattagtcaaatataatatatatacaattatttgagtaatttaaaccgttaaccattaaaacatctcaaatgcaatgttccaaattataataaattttatattactctaaaatataatattttatttttttttaatcatccacatcatatttggccactgccaactaaaaaaatactctaattaatgcaagaaactctaaaaaaatacgctaaaatataatgtttagtttcaattattaacttttactcttattctaaaaacaaagacaaacactaccgttgctactggtaagtcgtcctgacagcacttgatgggcaactcaatacaagccgcattggagctgcccttatgtgagtgatttgttgtaatgataatgataataagagcattattattagataccagtagcacctaatactttttataggtagcgtcctataattagttagtgatattctttaaaagttatttttttaaattatataagacacgatacttaattacaccaaataatagtatgacactaaaaaaagtactgctttaggaaatgaaatcgaaattagttatgatgtttgatttgttagaatgaatattaaaatatataataaacataggataagcattatttttgaccttgtgttttgcaaaagttaccaattgaattctctattttgttaaatgacaaaatagatcctgtattttttaaaatagtacaa

SEQ ID NO: 20269 - DNA, 1723 bp, Cannabis sativa
tctaaccttggatggtatctttccagtgtcagaagttatctttgtaattacatcagctgtgaaggatgtttgtggaaagcctcctaccgaacgcctctttctagacaagtacggaaggatttgcttgtgtttggatgaaattgtttggaaggtgaggccatcaattattatatttatatatcttaaagcaaaactagtaagctgaatataatacattcctaataatatgcaccttttgtttctattaacgtcatatgagcttttcaaaactgcattaaatcatgctaataattttcattaaaagcaacttaattgcataaagtcagtggaggtatatttttgtgagcttttattgacatattgtggtactatgctgattttctccgttttgcttttgtttgtttcttactttgcttgatacaaattaatttttgtatttccaaagggatatctggagaatacagaaaaagatagaatcagaagactgataaggttaaaacctccctctgagttctaaccaacgtagcctctctcgtgatcagtgattaagataaaattgacgttgaaattatgtcgcctgcatgtttcaagacaatggcattgtgtgatttgaaagcatttaggtagctatgttgtattgatttcccagacaggaagcgttgaatgttgatgtctttgaatttaagagtagccggtcttgttgaactttgaatatacagttcagtaatattttaaaatgattgagaatctcagcaatgaaatgaaaatggtcttagtattgcttattttgtttcacagctgaagatgtgtcattcaatttttagtattgcttaggactattcaattaaatgggctgggaatattggaatgggaaatgggataagtttacaattgtcttgtgtatgatgtgttctggaatttggtgttgtttttaatgggataagataaatgcagtgtatatgtattttttagctaatttttatataattgaactttaatgtggtctaaatttaacataagccaaaaattgtattaaatttaactcaaaatatattaggagtcaaatgttacactataataaatgttactttgattatttactccattgctagttattattgttaattaataattttattggatttttatttatatatttaatatagtttttatatacttgttcaaaataaaaatatagtttttatatactttttattaaaatttaatatttttttaaaacattttttggcacctttttattaaaataaagtttcttttactcctagtacattgaagcataattataaaatttaaaaaattacaatacatatttcttttaaatttaaattgatgtttttaatttttaccccttctttcaaaatttattatgtttacctcttttccaatcattctactaattttatccctatcatttcacgatagtatccattctttaattaaaattttgttcaaactttctcacaaatttacacatctatatttccaaataacacaatctattatgtttaaaattgtatcttggttatgtgagggtgtgaggataatttgagtacaatactcataaaaggaggtatgtttgttatataattttatttgggggtaaatttaattaatatataaataaaaaagtatttttcaatcccaaccaatctaatagaattggatatcgaatcataattgaatcagatcggatgtaaatttt

SEQ ID NO: 20270 - DNA, 1562 bp, Cannabis sativa
catccttttcaatattgcatatggggctaaactttggaatttatatttcgtaatgaatttcagacatcatttttaagttctcaaacatttcaagtcagaattggcttaactggttcattgaagagagtaactgcattgtcttcaatcaaatgtgagaagaaagacgaaaactcaaagaaagatgaaaactataaaaaagtttctgttgagcgcccaccatactacagctatttagactcaacatctggggagcttgaaccggcatctggtgctcgtgccagcattccagagcaggattattggccagaaggcactgctagtcgagtaagggctgccaatgctcccgagcctacaggtaaatctgttggatctccatcattcggaaagagtcctggaagtaggaggaagaagcatttaacatcagttgctgctcatgaaacctctgaagtaattgtagagtccagtgatttagtagaatctgaaagttcagatgattccatggacgatgccaaagagaaatccgaattcgttgagtatcagagtgaaccagataaggaagaaaatactggatatgagctcgacaaaaaattgggacgtcctcatgctttcattgatccaagagtgaagaaaccaattggggaatcacttacaagtgaagaactctggtggaactggagaaaaccagacaaggaacagtggtctaggtggcaaagaagacgacctgacgttgaaacggttagtgcatatataaacatattattttctatatgtaaaatctgaacggggagatgattagattatcaatatatattgcattttggtgtatacaccatcacttgttgaagcctgataagttttattttctggcaccttcatgtttaatgtattagctttcacaaattcggtgattgtccatttatacattcatgcacaacctaagacttatctaaattatcttttgttttggatttgagcttgtattttaatttcaggtctttctcaaagcaatggcagagactgggcaggtaaagctttatggtgaccatcccacattgactgaaactgctcttttcagagctagacgacacctatttaaggaagagaggtaagtttgtgtctctgtatttgtagtttgtacacatgcatatatcatatatgtagagacagttaaattatgagcttaagatagacatagttttgtttccatctataagaggaagaagttgtttttgtagaacggtattagaatgcaacatttgaactactcgaatggtatttaatattttcttttatgcttttaagcttaaaagaaagctatttcttaaggtagcagctgaagatttctatattaaccctacatgtatggaaacaagcaaatgcttatatgtttaagttgtacagtgtatggttggaatttacaaaacaaaatcgcttcttgatctaagttcggaagatggatattagctgtgctaactttagaaagccttaaaatgctaaggttgtaagttatttttatgagattagtcgagtcaacttctcatggcattgttgatcagatatgt

SEQ ID NO: 20271 - DNA, 3666 bp, Cannabis sativa
  modified_base (32)..(33): a, c, t, g, unknown or other
tgaatagaaaagattacattgaaatagagttnnatttagggcacaaagcccaacaacgaggtagggatttgagtatgggtttgggatctgggatttgggttagggctaccgtatcgagttcgggggttcgggtctgagattgaggtttgggtccaagtttgaggtctgggtcaaaggaccaggtcggggctgggatccggagattgagttgaggtcgaggtctagttttggggtccgagcgatgatccagagtccaaggtccaggtcagtgtatagggttcaagtcatgtcgaggtattgggttaggatcagatcttagctgaggtatggggttctagtcttctagttgcgcaggtatggaattcaggtcggggtccagtgtacgaaatgcccagccccctaaataaattaaatattgatgaaattaaatacactaaatagactattatttaaaaaaactacttaactttgaataaaaattttagtttccaaaattttgatttttattttagaatataaaaaataaaaccggttttatgacatgaaaaataaaaccggttttacattacatgtttttataatatttgaacgttttaattaaaaaaaaaaaaaaaagttatttgaatataatagttacataaagcatgctatataattaaaaaaaaaaatcagagatgatatatatatataatatttagctaataattaatcttattgagaatgtgtactcaactgtgttaatggtgggtataaattaattgattaattataccggtgaaacaacgatatgagagaacaaaacccaaaaatacaaaatacaataatacaaaaaagaaataaaaatacacaaattatgagaaaaatgtaggtatagttctcatcaatttaattgcacttatttcttgggagcaatggagaacatgccagggacgtaatccacaccactgtccttaacccacgcgtctcccatatagaactgttcgggagtgaaagtagcggcctcctcagctgtgatcttcttcactcccacccacttggcgcgaagagactgatctgctgcgccagggccgcggttgttgaactcactgtagtagcaagtgtcgagagcaaaatttccagcccagggcaaccatcccacaggctgaatcaactcatcaatgaaagattccatgatgatggtcctggagaactccttccatggcctacccaagtatgctttgctctggttcattactggcacgtattcaggatcggccacaaaggtcccgttttggatgacaatgcctgttggttgcctcctttctttacggccttgtgctgttactatgcactgttgattgtcgtttggctttctgactatgaatttgcagttttggaagaccacggctgcgtcaccgaagacgaagtctatggtaccggagacgttacactcacggtagaactgacgcttggcgtgagtgtagagtgtgtcttggaatccgtccatggcacatcggtagaaaatggcctcgtctgagttcactcttagtgctacagcttggtgtttgcttgctcctgcagtgttctcgaaaccgatgtctcttgccaggaagttatctccaagaacaactgaaatattacgtacatattaagattacaggctataaatattaaatggtaggtaaagtttgtgttttgtgaaacggagatatctgctatttagtattagatttttaatgtaagacgtgatatttaattaattgcaccaataaatactaaggtgtggcatgatgccttgtagtaatgctcagtttctcaaaaaggaaattattgtggcactgctataaactgcaagctagctaattatattgatatcaattgtgaaatatatattggtgcaaattaatatgagatcaatcataagatccgatgataattattcagcttttcaagtaataaaaccaatatcaatataattatagagatcagacacttaccaacagtggcagtaagactggttggaaagccatcgatgaaattcttgctaccggtgatcctggttttattagcaccatcaccataaaccatgacattggtcatgtttttctgaaaggtgacgtactcctcataaactccctccttaatataaatcacaaaagtctgattactcttctttggaatatctttgagtgcctcattgatggttttgtacttaccactcccatctttagccacaatcacgtccggcttcaaattttccttagcatccaaagcgagaagcctccgaactccagttgcaatccaggggctagaaccctgatcaacttcgtgattgggattttcaaactcaagaagtctcctacggctaatgttcaagtccgcgaaaaccgaagagatctcagaaaccatggcaagagcattactactcaaacgcattgaagtcttcaaagcctttttcattttctctgaagcatctccagtagtattttcgaaactatccaaacaagtctcttggtacgtaacggtggcactaatccatatctttaagtccataagcatctcatcaaatttagtaatgtcaaagtcactgatcttttcaaccgatttgtgaagctcgtccattgagttatccatgagctgcttgcaaagacctagagctttggaagttcttgggtctttctctagctctttcaatgtctcggatttctttgcagcctcgttaataaacttcttggcgacgttgaaaccagcttggatgagtttctttggatcggttgtgtttccagcctcagaacccaatgtcttcatacaatcttctttgtaatcagttggtgcacaaatggctttgattgctttgtttgaggatgaaatatggtctttgctaccgttagatggacttgaagattcaccattgttgagacttactccaactgtcactgcaatcaccatggctaccaataagaaggaagacacaccgataactgcatacctctttctcttaccaccatcatctccattgttgtacgccataatatttaatttttgttttttatatttttatatgtaatatatatataagtgttatatgtaattaataataatgagcagctcttcgacacattaaagggagccaaaaatgaatgtatttttctccttttcttcgtcacaaaaagcgttctctctccctctctctatctctcctccctgtgaggccaaagaaagctgctttattatatcgtagtagagagagaaggttaaattatcccttctttttttattatattgaagctttagatagagctatagcccagctctctcggacctattgatgtatgaatgtttggggggtttgatttataaggtttatatgtgatgatatgattaaattaaggtataatagacttatatgaatgaccatatacgattgggagattggagtgaaattagtggaaaggagaggacgaacgagaagatagggtatattggtttattactattattgtgtttttctatataattttgaggtagaagggagatttgaatcagctggccgaattaatggtcactttttcctccacgcaatgatattaattaatctcttaatttatttcaccaaaaataaaaagaacgtcctaattatagatataatcatatagatcattcgtattcacaattcacaagttgtac

SEQ ID NO: 20272 - DNA, 3457 bp, Cannabis sativa
  modified_base (35)..(36): a, c, t, g, unknown or other
cggcccaaagtatttttgtaattttttttcctttnntgtatttttctgttttttttttccttttatatttgtaagtcaatacagtattatattacttttatttatttttttcttgaaacattatattacttttattcatgtgattgagattaattatataaaaatatttaactgctttcaacaaaaaaaaacatttaaaataattttggagtagtttagtaacattttttttttaattttttaatcacaaacataaaaataaaatttatatttttaaaattttgtttttaaaaataaaaatgtgttgttatatgatcgttttttaattttaaaaataaaaaataaaagtgttctataatttttatttgtatttttattttttgattttatttaagtcaagtctaggcttgggtttgggatcgaggccgtggtcgagaaaattacattgtatatccactttactttacttgttttaatttttaccactatttttatatttttttagatatatctatttttatggatgatgtctccattagaccctttagtttatgtaaattatatgctagccttaagtagagagtgagggtatattagacaatctacttaagaaaaaaagtaggttgattttaataaaaaaataatatgaggatattttttattcatgaatacaaagaggagatattttccaacttatcccgtcatgatccgttactaggattagggccgaggcagttaggtctcaaggtccagattgggatcggagtctaaaatttttaataaaaaaactatttaaaaaaattttgaaagtaatttttttaatttttaaaatgtttaaaatttgattatcaattaaaaaattgaaaagcgaaacagtttcatagaatgtgtttttagaaaatgttttcacctttctaattaaaaaataaaaaactgattaaaaaaatattaatgtatgtgaaaaaaatattcaaatatttagctgcatcttagcaaaaaaatgttcaaatataaaaagctgtaaactaacactaagcgcttagagcgttttctttgaatttttctatctaaaactatgttgaattctaaaattctaagtttctatttatatgaaggtaaaatgactaatgtgcaattagaacttattacaactttcatggagtaaaaatacaattaatcaaagttgatagagttgccacgtctcatttgctgattggttgtaaaaggtgagcaacaatgatgaaatagtgccacttagcgaatcttttagttctctgagggttgatgaagaaaggaggaaaaatggcccattctcgggcccgggaggtggtgcgcacgcacagtccaggaggagtcgtgcgcgtcacgcgtgggtggggcgcggagggaaacaaaggtgctaacacgcctatttttggtggggcccgctgacgggactcagagagaaaggggagacaaccccctggcccagctactacgcacgagtaggagcccgccacgtggcgggaatgtcgggtggaggagaggacttgggccaaatgggcctggccgcctgagctagtttcggctctttttgggtgtcaaaaatgccattttcatgttttgggtcatctttttgtcactttttttaatatcttttctttcttatcacaaatattattttctcaatcaaacacaaacaaaattaaatctaaacaaaatattttcaacgtaagatatatcgcattaatttcaatgaaaatatttattcaaaaatataaatcatttaataaaagaaatacattttttatctttttatttcttttttttttttaattacaaacgctctcatcaaggacctccttctcaggatgttgaacaggcttgcagacctcctctcgtagtgtgtaatgactttgtctcatacgtcttctttgagaaagactcctcgacccggttgaatgtcataaatactaattatattaactatataaaaaaataaaattaattctaaataaaatattttcaacatacaaatatataactttaatttcatgaaaatattatttaaaatttaattaactttgtatttttatactacaaaatatgcaatattttgacacttaatattagattaacttaaaaatttgagtatttattaattaatatttaaaattctaataattctaaacattttattgtagattgtttgtaaaatattattgaaatgttatataaaaataattgaagctaaaaaaaacatattgtttagtaattatcttattaataataaaaaataatgtgaaaaaatataacacaaattcaaatcgtataaaaagtgagttgacctatataagaaaaaagatcagccagagaaaaatgacacgaaactaagtactaggggtgtacataaatttttgtaaaccgtccaacctgaataacccgtccaaaccaaactgagataacccgataaaaaatacaaactgaaaaatccaacgaaaatataactcgtccagtctttatattggacggattgaaaatagtatcaacccaaattaaccctaccaacccgattaagaaggtttatatatataaatgtttttattatatatatttatatataattaatttttatatatatttaaaaaaatataaagttgaaattattctattttttttttatggtgattgatttgaactttgaattaaatctatatatattagtttcattatcacaattaactaaaatataataattgaatgtaaaaaaaatattggtgttcggtttgggcgggttaacccgaccaaaccgaccaattcattgggcgagttattagttttttttttctcaattgggcgggttgcactagatttttctaacccggtctttacattagattgaataaaatgtagcataaaccgaccaaaccgactaatctacacccctactaagtacatcacaaaattaccggacctacagaccatgtcaagcctatcctttaaaaataatggcatagtacgatccttattttgaaagggaaatttgagtttttcatttatattggtagtataggcacattttattatatatatacctcaaattacccctcccatctcaaaaaaaaaacacccaaattttttcagcccttctctctctcccaccagctcattctctcttcccttctctagttcccaccaaacttcaccactgaaaccaccgtcaaacatctttgaccaccacccatgaccctccctctcttgttggttgtctttgttgcgtgaccaagaacccacgaccctctctctctaattctctatagtgcatggtcgatgactcacgaccaccaccgtcaaacaaaaagattagggcccgtttggtacgcactggattggactaaaaaggattggactggactggacaagattggattatgctgaaagtaatcctgtgtttagtttaagaatggactggactatt

SEQ ID NO: 20273 - DNA, 1859 bp, Cannabis sativa
gagagagagagagagatgagtgacggtggtactcgtggtcgcgaagaatagagtggaggagagagagaggaggagaaggacgaagcgagaaagagagagtggaggagagggagcaagagagagtggaggagacagtggtggtggctcgtggctgaggggagagagcggaggagatgatggtggtggtggctcgtggttgaggagagagagagatctgaaatgtttttgggtgtttttaaattttaaagggcatcccaaatgatttaaagctgtcgggtataatatacatggtagttttaaaccttcggggatactccttaaaaactaatttcaattttaaacttatgactattttataccatcgagaatactaaataactatttaaaattatcggaaatactccactataatcggcggtttaaataatcacgtaactttattagtgacggtctccgaaaaaaatcagtttaaggaccgacgtgaataagccttttttagtagtgcagatgaacgggccacacgccgtcgcctatatgacccttcacctaaattttaagctagcgatactagatccaacaacgcacgatctcaacccaacccctatctctacatgagtatttgagctttgcagttccaaccatccctctcagtaccctcgatctcctttctagtagtgttggaatagccatatctaacccttgttcgaaaaaaaacagataatattcttgtatgtgccccctcacatttaatttgtcaatgtctggcctccattctcatcctgcatccctaactctatcaatgtttgggttcttcaaaatcattggagcttaaggaaagtgaatcacattgtgagatttgatcaaaatgcggagctaggtttagggggtttggaaatttttaaatgtgtatatatgtgtacgttgttagatttgaatttatttaaatttttttttttttgtgatttgcgtttgagaaataggttgcagtggtggtgttggtgagtagtggtggttttggtggtggtgaatgcttttattgatggtggtcagtggtgggtccgtgattgtggatggtggtggtagtggtgatggtacggacaatgaagaagaaaactaaaaactaaaaaaatgagttgttagagattgagaaaagaaaaaaaaaacaaagaacatgtgattttttttatattttattttatttttgtatatttatttatgtgatcaattaaattgtgtcatgtgtttactgtattgtctatcaatatgatagttaatagccaaatatgaattgatatgacaaactgctaaaaaaacataaattttggaagatttgccatcaaaattttaaattttaaaaattaattgctagcgagatgatactattagaaatttcaccgtaattattgctctaacttttacctatacatttttagttctgattatattgactttatattctatgtttgggtatggtcttattagtttcttagatatagaataaaattatgtcaaggtataaagagcattattgatgatgttgtcactgctataaaggcattattttttttttcttcttttttaatattagaggaagggcgattcaaacataataagagcatcaccaacgaggcttcacatttggtgatgcagtggaattggccctccaacgtagctgcaaacatgacactaaattttcgtgtgtgccacagcgtacagtatatatgctgtgcactgtacacaagacatacttttttatatatatagttaatttttatatatgtttatagagtaatttgcggcaaaaccccctcaactatcaatttacttgcaaaaaaccatccaacctcatattttggtgg

SEQ ID NO: 20274 - DNA, 4257 bp, Cannabis sativa
  modified_base (4148)..(4156): a, c, t, g, unknown or other
  modified_base (4198)..(4225): a, c, t, g, unknown or other
aattacatagcagaaaccgaaaaagaaggttttacagtgtcaaacaaaagagctaaaaataatacaagttcatggaaagagtcaaagacgaagccactttttcttttggtcccccctaaatcccatccctggagggaagtaacttattttggtccccctaaaataaggtgtatgataagatgtatgaggttctatttttaaattaattgccactgagcagagtagtctatgcatattgcaataccaacttttcacacattactaatattggatttagaccggatactcgttagaatgtacggaagtgtggttgagaaaataggatagagtgagatgtatggtgattgcatcaaaaatcaattgacaatgagtggaacagctcacgcatcttacacacaatattaactttccgaacattatcaatgtaagactcacactataagcttaacatatcaatgcaacacacttaatgcgtacttgaaacatagaagataagttagtgaaagagaatacctcggtattcccattactagtcaccaccttgaatggatgccaacttggattgttcaagttttcttgccacaaggagcaaagggtggcagcctgcacttgagcttcatcgaatggaaatcgttgcttgcaaacgtcgaggaagggcttaatgtcaagatctcccattctttttatctcaatgttacttggactaatcaacaaatcaggcaatccctacaaagtaatttagtcttaaaactcaacactagtaaaaccaaacaactgatcatagacagtctactaactgatctagtgagctaaactttctatgatcactcaacaaaagataaatgatgtacctcaattaatgcttcccgagcgtcttgtaactcgttactggtctgacgctctctagtcaacagagtttgatttaaaattttcaaaccatccaaatcatccacgttttcatgtaattcatcgttcatttctttcatcttcttctgaatcgattcatcgtcttcatcttttagatgcttcatcacctctaactttcctctcaactctttaatttctatctccagtctctgcttagcaaccagctccttttctagctgatgtattttattcaatgcattctcttcatctctctgaaagtgttaaattttaactgttatgagtcagggtactgagatagtaacacaataatcaaattttaggaagtagataaaaatcatacctttagctcttcaaccagcctatagacatgctcatcaatctttttaggcttcattggagtcaagtcaagtgatttgtttttcaggttattctacagaagaaaatgaataaatcagcatctatatatcatcacatataagaaagccatccattcattttgatgttacattcaatcatgtactctcaccaaaaagacaaattataactaaaactacccaaacattactaaagctcaaagaaggagaatgaactactagatgggcactaaaaagtaaaaaaagatacaccaccttctttttctcctcttcatgttttttcctttcatgttcaattaatgcttcgcgcttgtttatttctttgctccaacaatcaagtttctttttcattctatccaactcattactcattttatctttttcatccaaaactctttggcattgaagacgtgcaaaatcctgcaacctctttttttctgatcaagtacaaaaagttatatttcaagattacacttttaaactccagctaatcccaatgaaaccataacttagaaaaaaatatatattattatgaccacctattttggcatgtcacatactgacatatatatatatatgtatggtgatttgttaaatatctatatgatgttatgcaagtatgtaaaaaagacatatctaaacaaatatatgttactaaaattgaaacaagaactgtgaatatcagatagctataaacattcagaatgagattaaaccttttaaaaaatcttgctcagccttcttcatctcatcaattcccctacttaaagacaaggttgcttcattgtacttgtattgtagttcaaccagttcctcagttaacaaatcattttctttactttgttgtgccacacctagaccattcattttctttacagttgcttcattaacaatgtcagacacagttctcagctctccattcttgcgaagatactcccctatcggcccttcagagttataatcatccgcacgagcacaccagccatagatattcgagccacgatgcatctccaaagcatttatccaatgtcgtttactgaaaccatctttctcaaacttcctctcgaattcattcacgtaattaaaaccaatccagtcattgttgaactctataataacctctgcagtagggttcttcccattccaaaaaatttgagctttaaatggtctatatatggcaaactttgccaaccaataatcagaatcaaggagggttaattcacccttaccctgacaaacaatgttaacaataatgccagtccaaggccacgcatacagttcagcttctttttcgtgttcttgaactgacattgaaataccaacttgttcaataagatcttcttcatctgttagttcatcctgcaaataatatgctaaggaaagatggtttgccctttctattgtacctctattagatgaaattttggcaactccagaggcatgctgtagaagatctttaaacttgttgaatggcttcttcttattcccagcacaaaaggggcacttaaaagtaccattcccaaactttattttgtactttcctgctctcaatagcttatatggtttctcaacaaagtcattgatgttaatatcagactcatcatacgacctataatccatctgagttagcaattgttttcatcagtaaaatgaatacactttcagcaagactagacaaaaaataaaaccacttagcatttaatcaaacaatcatctaaacattctaacatcgtcttcagtaaatgacacaatacatttcaccacaagctttgtgttttagggacaagatcactttcacaagtttcagactttgtgcataaattaaaatgtggttttttttttcttaacatgcaatcatcaactgagttagcataaaaatacaatctttagctttgagattctttaaattcctcttaaacatcatcctttacattcaaaatcaaaatttgcaggaaacaaaagttcacaaaactgaaaaatcacaacttacgtcaaaaattacagcagtattacagacagagagagagactgattgagaagaaaaagaagaaagataaacccttttcaagattaagaagtgctaacacttttacataagctactttacatcttgacacgtgtaaaattacactcaaataaaaaaaatgcccaactataaaacaatgtggttttataaaattttaaaataatttacgaagtagtgttcaaaaagtattttacagaagtacaaaataaaatagttactcgagaaaaaatttactaaaaaattattttagataccaaatagggctgcattgttgaagcagttggcaaaatttttaagtgattttttatttcaacagaaaaaagagccccaaaaaagcaaacgattagtactaaacttggcacagtctgagatatgaagttatggaaaactagatataaatcaaaatttgagaaattgaattaagatcttaaacagaattctatcaaataaagctgcatcatcatgaaaatgtattagcttcattttctcaaaagaagaattggagaagggagaagatcaaccccatctaatctaaaatcaaatgaaattgtgttgtttggtgaaaacaagacccaaaatgatagcagaaattgcaaaggtaaatcaacaaggggtcggagattacctggtggaagaaataagaagttgttaattaatggcatcgacggcggcgttggccagttccggcgtttgaatggtgagataaggaggagaccaaactaagcccgtgagaagcaccaaactactgttatgttttttttttaaggatctatttttttttttaatttttaatttaggaaatcacactttagaaatgtttgcttcttttgttttgttttttttttgggttaatttcacannnnnnnnnaaacaacaaaaaaaaaataacaaaaatacggtttcacggaannnnnnnnnnnnnnnnnnnnnnnnnnnntttatttacataaaatacagtctttttatgtt

SEQ ID NO: 20275 - DNA, 3213 bp, Cannabis sativa
agtaatttatattgttatatgtaaaatctatatgtatatataaaaattcatattaaaattttactctttttttctttaattggatggaacaaatctaatccaatacatacatgatctaaaatattggtttgatccgatccgatccaaaaaatactaggtctaaaatattagattaacttaaattaaatcaataaaaatatgaaatacattcaatggatagaatcgatctaatctaaattaaatggatattggaccgattggatatatgactgaaattaattggatcagatcggatggtaaaattattaacatctaatatataattggattggacctaaataggcctaaaaacattgaatatgactcaaaaaaacactcccgagataaaatgttaccattattgggcacaatataatgatttaggactacggtgaattaaacacgtaaaaagacaattaacatcaaaataaataaattttacacaaacatcacatgcatatccctaatccccctaatggtaatttttttttatacaaacaacaataaattttatcaaacgtatttttagtactataaattattcaaaaaatttcaaaaatctacaaggatgatgttgcaagcataacgaacatcgccataaaaaatttggaaaaaaaatcagcatgtgttttcgcacacaaagattgactaaaaagttgtaataggaggttgacggtaacactccccattatatatataacttaagacctaatatttacttaaagggaatgagaatcaatggtatggtattgattctcgtacaattatttactaaattttaaaaagagagaaagtagtggggtccaaacaaattagaaagaaaataaaagaaagattccccctatttatatcgggaattcctttctctttcttaatttattttattttaattttagttttattaattaaaaataaaaaggacaaatatgtcctttaaaaaattgatatacaaaaaataattgcatattctaacaatagtaattttgtcaaattaaatcattccgattaactttgttagttatgtaaacaaaataatatgattttagttttcaatccgtacaatttagtaaataacataataaaatattgttttcgattaattattttctattttaaactgatttattttctttattgattattttgatttcagttacagtttaataaacgcgcagtgaagaatattgttaagtttgagtgtatcacgtcgcaatggaacaacacatttttgttttttttgtttctttttgaactccatttttattcttttactatacatttcttcatatatttttcttttaataaaaatcaccaataccacatgaaaagtcttgaaataccgtccaaattaaagctagcccttcaaaatctctccatgcaactacggaatcatccaccactatcatcactacatgtactttattagattagataagaagcactttaccattaattaacatatatgatcacattattttaaggtcaacaaaagacaaaaaagtctactaagtaatggcaatatttcttatcaagtagttgatactttcgattatttatacaattaacacgatcataagaggataagataattaaccaactccaactagtttgattgccgatcgatcgatatgaatcatgactgattctttaaatgaagtgaaccgcatataatatctaatatactatacaacatggaattattaattatatttatacgtttcattatatgtatatatatatatatatatggacccccaaattaattaacttatacacttggcgtttggaaattttagttctcgtgcgttttggtttttgtaaccgtacgtacattagcagatgctgcacattgtatagtcaaacgaaaccgcgtgagtgaattgaacttttaatgagttgcagatagggagttagccacattaatgacatgttatatatataaacattaaacaatgtattttgtattataaaaatgtaaatataatgagtaggagagttcattaattattagtagagtattgttattgtatattagtagtgttcaacatgttctataggtggcaacatatgattggttagcgatattttttaaaagttatcactataagaaatgcaaactacaatggtaaactgcctatctcgcaaactgcgttggcaaaaaggttaaaattttaccagcacacatttggagtggcaaaagtttaacttttactagcgaattatcgtgctaggaaaagttatttttgccagcgtttttctttttgcgccggcaaaaattctaataccaacgctgatttgctaacacatcaatagtagatttcgttttgccagcacaataccaaacttttgccaacacaaaaatatactggtaaaagtgacatttcttaataagtgtatttttttaagttatatgtgatctgcaatctaattacactaataaccgtatgaccaaaaaaaaagtattagacactaatagcacttttttagtaattcccttaattatattgaaaattacccattttatatatatatatatataaatcttacttcttcaaagtgttttgtatatgtaaatactattttagattttattttttgcaaaaattattgattagatcttctgttttgttaaatgataaattggatcttatatttttaaagggtacaaaatagtattttaaactgattttttgtcataataaaagttaataataacctgatctagagttattatgataaaattattaggtatattttctgtatctgtaaatgttagaaattgttttcaagttagttatattatatataaaaaaaaaaaaatatcaaaaactgagcttatggtactattttgtatattttagaaaatataaagtccaaatttttcattctacaaaataaatagtccaattaataatttttgcaaaacacagattctgaaatagtttttaaacctttaaaattaaataactcttttttttttagagtaaatcatttcaaaaatagtttttgaaaagttatttgtgagagaaaatagaaatcctaactttcctaaaaggattattaaagattatataaattataactatatataatgcaaatacgaaaggctattattcatttagcatatgtgattatgggctgcattaaaccaagccattaaaccgggcatcgatc

SEQ ID NO: 20276 - DNA, 3622 bp, Cannabis sativa
  modified_base (2534)..(2535): a, c, t, g, unknown or other
agcctagtatatatatatatgtatatcttaaatcatgatacatatatgtatatccctgtcaaaatttttattgtgcctttattatcactatatactgtaagttacaaaaccattaataaatttcatatatgagatcaaatacaagattatatatttgcgtcattaccattgtcattatcatcgtcatatatatataaataattatataaacaataatactaacttatacaagttacttccaacattagtaaattgaccccaaaaagatcatataatgcaatataaatagtctatcgctctccttaaccaatatctatatgtatatatacttgtcatatatatatatatatatatatgaaaaacaaacaaaaaagtaaattgttattggtttttattgtattagctatcatcactttggtggcattttgctgatggctctcgtatcattttcattcactttccaaatgtctagctaattaatagcacttggtcatacatatacaatatatacacacatgtatgtatatatttatctcactcttaaaagaatgacaagtggatatacatatagttacattatatatattttggtcaatttagctacatcaaaaacgcaactttggacggttagctaggttaaaagaaaaagtaaacgataaacaatatatatatatatattgatcataaatatatatatatgtatatatcatcgtatcttactattgggattctctcttattaatcaacccaaaaagtacggtgaacttagtaaaccctaatcatattcctcagtaaatacgtggactaatcacaattggacacaatgacatgcatattataatataattaagcaattaactacttacttacttatattatatctatagttaattataatcaagttggttaatatcctaattattaagataatatataggcaatgcaaatatgaaaagagactatacccttataatattttaaaggtcatcgtcccaaaaaggaatggtccctcaaatatgtatgactgccactaatattgacacgtgttagaataatggtttgggcaaatctaacacgtgttatcaccaaactcccaccgtatcagatctcaaccctgtctttgcagcccaccaatagtgtgaactctatgtcttataataattataaattttttctatatataataataattattattattattataaaagtaatgccatctcttccatccaccaatgctccaatttgaggtttttttttatatatataagaacaatcaaatcaaatcataactattaattattcaacaacaaaaatcattatgattaattaatttatatactatttataattatatagcaaaaaaccccattatgaaacaaatctttaattgcctagtggcgtaataacacgcttatgccttaaaaaaacaagaaatttaattactactttttatttattcacacccaaaattatatatataaaaatcccaactaaataaccataagttggctttgtggcaggtatattacattatattaaggaaaatttttactttttacatttttttatatttatataaaaatatacgaacaatttaaactataaaaataaaaaaaaaaattagaatataatatataaaataattcctcttatattaattataaatataatatagtttattaataaatttaaaatgttgtgaatgtagagttagaaaccaatatagttacgtacacttaacaaaaatagctgagaagagtgtagagggggacacactaaaaacaagaaggcttttaatctttttgtttaataataataataattattagtagtttacttttataacataattaaaccttaaacttttgcttttaaccaaagcatgcgtctactatacatacatatgagacattgcttgtctttttctttagatttcttttggcggctttttcacacactataaattatagcaacaaattttaatttgatatatatttatatttatatatgttttcacacaggaaaattaatgtatgaaatgttcataattgaacaatagtttaaacttcttaattataaattaacataaagctacattgttacatgcatgcatacatatatttataaatataaaaatatgcttctagattttcttaggagtataattaaatatatataattgtagattgttaattagatatatgttctttattaaactagaggcccaatatgctatatatatgtctacataagtacataatatatattaattaaatttcatttgttttatattgttgttatttttggctacacaaaaacaagatcgcagacatgcatgctaatatatatatgtatatatatataatattgataaaatatattagctcatggatcacgtacgtgtgagtaatcctataatataaagttgtaataaactcatcaaatgtgaactgagcaaaatatatactttaaggtacatatatatgtagtgttgtagctagctaggcttgagtatatatatatatatatanntatatatataaatatgtatatattaattaattatataataaggtcgaaaaccaggaagccaagttgttttgatttgtttttgtcaagattggccgtcacgccaaaaaaaagtaagaataatataagtttattttagcgtttaatataattttgattggataaggacgaggaataatatataataacatgtatattttcatacttgaaaagactataacactatgacaatattgagataagagaataaaccaaatttatcatactttaatttaatgtataacatatatatattattatataaatatttacaatattcatcccaaaaattaatgtatatatatgctactattttatgaattataatgtattgaaatatatatagaagggattaaaacaagggttataattgaagcacaaattccaaattaattaacgtgtatataaataaatatatatagttataagagataaatatataatatcctcacagagaagaccttgaataggagtcaatgagcttttatatatatatatatattacttgttaatttgaccttctttttctttttgttagtaatacaaagacttatatatatagttttcttatcctatatttatatatatatacataaaatttccacttgcttttggaaatagaggtatatatataatatagatggacattgaagcactaagagagagatacaatggattggttcacattttcatatattgctactcttctcccctactttattatttgatgtgtatatatttcaaacaaaaaactaatacaatacgtctatatatacatacatacatacatatatatacgactgtcaaaaagagaataataaaaattcttatacctaactaatcttaataataataataataaattaatgtatatatatgtgtgtgtgaggaggaggaagaacaagatatatatgtctatatatagatatatatatatatattatatctatatacgcatgccacacaaagaggtcaacaatagggtaataagaattccaaatcatatatatgtttgggtcaaagacgcttcacatatagaaggaaaaagtaa

SEQ ID NO: 20277 - DNA, 4117 bp, Cannabis sativa
  modified_base (3998)..(3998): a, c, t, g, unknown or other
ttaatttcttatttgagtattaattatatgtaaacactatacaatttgtttttttttctaaaaaaaaacgtggaaattatggccgcacacaattcaagtcaactattaataaattattcaattaaagacttgaaaaaataaaagaaaaaaacagtactagaggaactatagctaaggttataaatagctaaggattctttcatcaagtgaagtactaagtgttcaagaagtttataaaaatggatgaattgatcaaagagatcaaggaaaattttttgtcattgttagacaaggatccttactctcttgtttctccttgtccctacgagattgcatgggtagccatgataccacatcctaaccgaccttctgagcccatgttcggtagttgtctgaattgggttcttaataaccaaaccgaacatgagttctggggcaactgcaatagtggcagtgaaaagccaaccctagattgtcttactgccactcttgcttgtattgttgccctaaagaagtggaacatttgttctgacgtgataagtaaaggtacatatatatatgtttgtattatttatgttaattcttttaattaatactttattatatgttgatttttttagggttggagtttatggattcatcaaatgcgaagaagctcttgaaagaagtggaagatcacggctgtccgcgttggtttgcaatcgttttccctagaatggttgaattggccgaagaagttttgaagataaaaatattgaaggacgatcaagttcgaaatattttattcaaggctagaaaaaacattttcgaaacgtaaataacacaatccatcactaaaaaccctacttctaacatagtcatattaaaaatattttttctcactatttaaattaataatcttatttttaagagctctcgcgtgagagattacgtaaacacttaacaatctatttcagtataaagaaaaatatatgataatagaattataatatgtttaaattatcaattttcatttttgttgattaaaaaaaataacgttaaacatatattatcactaaaaatgtttgtcattaaaaatataattaatgacaaaatgttactattttgtacaacaagtgacatgatattatgagtgaagttgtcactatatataattgtttttcgtattatttttgtgtatatgtatatatatttatatcgatcattttcttgtactaatattgttttttttttttggtttttaaatatgtagagtgctaatgaagaaagggaatgaggatttattgctatggcatcttgaagtgttaccttcatcatcatcacatgattttgggattaataatattattaagaaagatgatatagtgaagcacttatgtgaaaaaggatctttgttcaattctccctcagccacagcaaaagcttttatggccacatccaactctaaatgcttacactatttacaagctctggttcataaattttccaataataatcacatgactattggaggttaattattattattattattatttcaatacttataatttgatgataataaataagaaatatatttggtcacattctggctctgaagtttggtgggctatagataaaaagaaaattttgggcccttatttacaaacaaatatggtatttttaaaattaataatatatatatgtatttttgaaagggaattttttttatttgggtccttggactaggtggccctaggcatagacctagcctgcttatgcccaatgctaatttggtcacgtttgagatcagtagtgggttatagacatcaatatcgagttttttgctgattttaaaatattacatttttttttctaaataaggacccaatttcttttttctatgactaactaaaatttagggtcggtattgcgtttatctcgttaattattacatacacgcatcattcattttatatactttgatcaaagtttgatgtacattgactttcagtgattaaaaactgttcgatcatctgaattatcgatctaatggttagagagatgaacggaatgtatatccaaacggtataaaatctaattaaattaattttatgtatgaatgcagttcctactacatatcctatggatgaagatcttataaagctttgcattatcaaccatctgcaaagattagggttggctgagcatttctcgattgagattgaaaacattctccaacaaatttataagtatgtttttaacaattaatatattttaaattaataaattgatctaaaatttactaaaaaagtttatttgttatttattgattgttaaattccaaacattatgaattatttcaggaattacgatggaaaatcatacttaaaagttggtaatttccattcatgggaaatgttacaacttcaattacttaaagactcattagcttttcgtcttctaaggatgcatggctataaagtattttcgagtaagaataattatttgtatttattaattttttttataattaatatgtttatttttaatatttcttttcggcaaaataaattattttaaaatattttaaaattaaattaattatagaagtatgaaatttcgtattatatatatcttcattaaaagataaaaatataattaaagacacccctataatattataataggaacaactgtgacatctctatactataaaattttcaatttatgataaatattattttaatttattttgtttttatttttcattttgtgtgcatgtagggcaactctgctggttcttacataacgaagaaattaaaaatcacatcgagacaaactgcgaatacttttcgattatgttgttaaatctttacaaagccacagatcttgcttttcaagatgaatttgagcttaatgaagcaagaaatttttcaagaaaactacttgagaaatgtatttcaatggaagaaaatggagatcacatatttcataatctggtatatatatatatatttgtgtatataatattagctattatactaacatttatgtgtataaaaaaccaaaattattttttttaaaaaaaattaactataaaatattaagtaaataccattttagtttttattgacaaaaccaaaatatatttatttaggtatcaataaattctgaatctcaattgcgtaaaaaaaggataataaacaatatatgcatgtatattaattattctatgacattaaaaaagtaattaaaaaaagtacatcaaaacaaaaatgaacttgactttttaattttttttttttttttgaaaaggaacaaaacttgacttttttttttttttgtaatgaacaaaacttgactttgaattctatatgttgttatagatataaatattatatttatatttatatatatatatatgtataacgtactagggccagggctagggctagggctagggccaccacctttacaattatataaagaaataaatatgtacgtatgtacacgtgtgatatgcagattttgtttttgttgaaatccttataacaattaaaatttgattagtcttactataatgattgaaaactatgtatatggttgattaattagactgttataattatgtagattatattaaatgtgtgaaaattattgatttaatggttttttttttcattaaattagtctattaattataattctttttaaattagttttgaatatttaaatttaatttaaaagtatcaataaaattaaataattatttttttatataattttaattttaatttgaattagacattaatttaattaattaattaatcatactttatattaaattaattattagttaaattatttaaattatctaaacttatttacttattttgttgtttaataaaattagttagatatatattattttataaataaatttaaaattaaattaaattttatatatatattttaaaaaatataattgaattatattagatttaattttattattnttattattatttaaattaataattagataataacaactctaatacaactctaaacaaatatatattacatgttagtaatatacctagtatatataaaaatgtatgtaatatatatatat

SEQ ID NO: 20278 - DNA, 2561 bp, Cannabis sativa
atattgttatcgtattctatattaaatacaaatagatcttgagtttattgttaatttatctaacgatatcttgatgcatttgctggaatagttacagtatcatgtggacactgtcatcctagttttgtaaatgctgccattgaacaaaccaaagttttttttttcaactcggcattttagagcactctcattagcttctctattctatctttcaaaatacattaccaaaccttactttctctattttacctcaaacttttacattgccatgcatcaacttctttaaaatacatcactaaaattctattttttttcttcaaattttaatatatttttatttatttaatatataatattaatatttatacatgtcttcatatacatgtaaaattaaaaccccaaataattaataaaatatgtttagagcaataaataatattatataaatgtagaacatgaatagtgaattttaaagaagttttaaaataaagagagagtttagagtatttgatgtagcgtgtttttaatttagttctttaaatattttagagattctctattttaaatcatctgatgtgagtgctcttagcacgatatttataattaagtagggtttcactttagaacgagaaatgtgatttttgccaaaaaaaaaaaaatcattaaattagggtaatatattaagcctctctttgataaggaggtcattctctagataaccttaattcttggaggaaattagactctatccatgttttacattactaactctcatttttacactctcttttaaagtctttcatttctacattttttccaaacactcaactaattttacccctatcattacacgatactctccattcccttataatttgaattctgctctaactctccctgaaacctgtctccacgctcaaaaagcactgctagtccccatcgagatcttcaaagtttagcttccaaccgtcgtgggctccaaggattcaaaaccaccattcaaccatttacatattgtaccgtcgtaggcttcaaagatacacagatagaagatggtaactagacacgccaaagctgatttattatgcctatttgtgtttcttctctcacaaactggttagaaaaaggaataccttttagattggttggataaacaatcattacttcactcatgttttaactctaaatcctctcatctgccattagcaacacatgaggtatacttaaaatctattatgattatatataatatatatatatgtgtgtgtgtatgtgaaatttcattcaattcatagtgcaaaatctgttatgaatacatataatattgaagtgggcacatgcaacctgtttccctttgaaattaagaaaagaaaggaaaaaagaaacatgaatggaggcctaacttttttgtaatgagttttattgcttgcatttctctgatttggatttttttttacaataagcatagaagataatgttttcttctcaaaatatacttttatttgatgactgataaaaagaaaatttttgtttgatagtcggctcataacaattataatatatatatatatattgattctcataattcatattgtctctaaaatcgtacattcttagtatcatacatttatctataataataatcataaatcatactctaatacacaaagaattaaattatgcaattcaacacatacaaaactatctaatttccttatctcaaatctcgctgcttaagactttgttatctcgtcactactccctataataacacataggtcaaggccctaacattaaaattctaactcttttagtacagtagaaagactattattttcgaccaacaactatacaaattcattgaaagttgctttcataaaaattttagacaattcaattatcttttcaatgatatactgatcatttgaaatagaataaaactgagagagctctatcataattttactgaaacaacttctgagagaaaatatggaataacggatcacagaagacatcaaaacatacaatattttgacactgaaatattccaaataagagaaaactctcttcataaaagtttcattaagtttaattccctttcgaatgacactaaaatatttaaaattgaacttataacataggaaatatagatattttactgaaacaatttcttagaaattctatttcaaacgaatttcgtactacaccaataacgtacaatatttttgacttagtaaaacaaatattcacaaagtactctcttcattaaaaaatatagatactttattaagctttaaaatgatataaagaccttcaaaaaccgacaagaattgagagagatataatcattgttttgaaataacttttacagaagctatgagaaaacgatttacaatatatacaatataaatattactttttgacataaataatttcttaattggcaaaatatttctttacaaaacacataggaaatcgaataagctttaaaatgatatacatatatcttcatattaaaggaatgagaattgagagagttattgcattttaagtgaaagtac

SEQ ID NO: 20279 - DNA, 3121 bp, Cannabis sativa
gttttgtggtaacctcttttttgtttgaagtagttttgcaaagttatgttcatcttctaatactacaaatatgaacttttccataatctcgcaacaactcctgtaataatccttgttttaccagtttcttattatgtgatgagaggatcggtatatatgtttagatagtcgtttgccatctggtaaacttgaatttagattgtgatttgataatgattttgttctctatcttttacagcgccggcttcttaactttgttggaaagtcccttgtcgaggatgtcatcccgattctcgtagcttcattccattgtgaattgagtcaactctttgctcaatgccttgatcgagtggcacgatcagatattgaatttatatctcttgagaaggagcttccatatgaagttgctgagaaaattaaattgctccgcaaaaagcccgagtgtagtgaagaagaagaggaagataaaatagaatttgtagatcccttgcgtgaaaaaagaattaggagaatacataaagccttggattcagatgatgttgaacttgtgaaacttcttttaactgaatctgatgtaacattagatgatgccaatgcgcttcactatgctggagcgtactgtgatcccaaagttgtaaatgaggtgcttggcctgggtctggctgatgtcaaccttagaaattctcgcggttacactgtgcttcacattgctgcaatgagaaaggagccatcaataatagtgtcgcttctgaataaaggagctcgtgcatcagagctaacatcagatggtcaaagcgctgtaagtatctgccggagattgacaaggccaaaggattatcatgcgaaaatggaacagggacaagaaactaacaaagatcggatatgcattgatgttctagaaagagagatgtggagaaatccaatggccccggaacaatctatgtctttgcatacgatggctgacgacttccacatgaggttgctttacctggaaaacaggggtatgactactgaaatcatttctttcctaatttgtgatcgcgtgttattatcgaaggtcttgatgtttatttttctctactttttgctctttttatggccatgactttatgtcttccgacttcttacaaatcctcaatactttcaattgatttaatgtggatccatttctgtagtatgcttgatatagttaaaatgctgaagcttgttatttatatcacagtggcatttgctcgattattctttccatctgaggccaagctggcaatggacattgcccatgctgaaacaacatcagagtttgctaggctttgtgcttcaaagggttcaaatggaaatttgagggaggttgatttaaatgaaactccgcttgtgcagagaaagagacttttttctaggatggaagctcttggcaaaacaggtaactgtttgttcatatctcacaagtcataatgacaattaatccaattatatcaatgtagttagttcttaatgatgaaatcaaaattctagttttaaatgagaatagaattattccaaaagcagtactttttatctaatttacaccatacattaatctttgtgtgatttctttatgacttgtataaactttgtacaaaatatagcctatgtaagaccatacttgtagaattttaaatctgccaattcactttaatccagtgtcagatacaatacaatctattgatctgataatttatcatattttcgggtttggcagtggacatgggcagacgatacttcccccattgttcagaagttctagacaagttcatggaagatgacttgccttcgatgctttacctcgaaacaggcactccagaggagcagaagatcaaaaggacaagattcatggagcttaaagaggatgtgcagaatgcgttcaacaaggacaaggctgagttcaaccgagctggtgggttgtcttcctcgtcatcctcatcttctctcaaactaaaagatggtgtgaagcaaaaggctagaaagttgttgtagcttacaaggcttgtaaatttttgtctctaattaacaaataagatataattgccaggtgagagagcctcttgtaagtgtttggctattcttgtatgtctgtatcataaagtggcaaaagggctttatataatacctctttctactaaatagctaaatgtcaatctcttacaatgatgcttgattcggtaatgttgtgctaagggttggtttcctgaacttgtcctacagaacatgaactgaccgttccaacaaattcagacaaattaagataacgtacgttactattgcccagattctaaaaatagatatgatcaattatccaagacttacagttttaggctctctactctgctaaaactgtatagtttagtttggtcattaaaaaaaagaaactgtcaagttggtgaaagttccagtatggcattggattttgaccaaatataagctggagtaccttttgtaatttaaggccagtgtcatcactatgactggggtgattgtcacttcaagtcgtacttcttttttttttttttttttataaattaagttgcaatatcattgaataagcaaattaggtaaagacaacttaaaaatatcgcatagaaccaccaaacaccaactcttcatcacccccacggctctccgtacaatctatgagctaagtcgatatcttgtctaggtgaataacatcagaaaagaaatatggtgtctgatatctgctataacatcagatggagttggcaatcaaggaaggcatgagagatcgtttttgcatgtcattacagtatgcacaaacgaacaccttttttttagttaagttgagaaatagtgggaagaatatgatggaaagcacacacgtaaaggggatgacgagtagtctccttaggatgagtgttattgtttttcccattatcagtcatggagaagaaattccttctttcgtcaggagggatttgtttgagcttttatcacgtaggctcttaatgaaagcaccaaacttttaatgtaaattttcgttaacgattatgagcctattttcgtaatagattttgcacagaaattataagagatctaagaaagaaaaaatagaaacagaaataacaccaag

SEQ ID NO: 20280 - DNA, 5677 bp, Cannabis sativa
atgatcaagtaaaatctggcaaaggccaattatcaataatggtgtactttttctaccaagtaaacaagcatctgctacatacaccccaccacattctaatacaaatacgaaggcactataagaggttatgacactgacctgtaatctaagatatgcaaaaattggagtctccagcaagcgaatcaatttatccaactggaccaaaaattttacattaatatcctcctcccccagagactggattacagcacttgcatgttgatatgtctgtaccattacataaaaaatgataagacaatagcccaaagctgtaaaaaaaatgaacaacaaaagatgaggaagtggccaagaaattatgtaaacttgcctgagctaacaagcacagacttatgatcgccatgggcgagtggcaccatgaagcatacaatgaaacaaataaatccttcccggcagggttaaccagtgatttttttaaaagatctcgaagttcagataattctgaggatgtaagtaaaatcaaattcaaagcctgaaaacatacaaggaaaaccatgaaattaataaaaataatcaaagatgataataaataaaaagataatgatcagaacatataactaggaaaaaaaatccacaacatccagttacatcataatctcttgttatgagcagatatgggcttgcttcatttcaagaaatacaaaatcccaacccaacctcatcatcaatcattagattactcaagtatttactggtttaagctctcagaagaatgacaacctgaaccataacagatgcaaagttcagatcagattctccttctaatattgttgagaattcccgatagaccctttcagcatctaaatgtacacaaagtcgacggattatcaaagcaccacgcctgagatgataagaaacaacacatatcaaccactagtgatgacagtcaaactgtgagtaagagagagcaaagttataaatctcacttctccaaaagagaattgtcattcctaaaatgatgcactaggaaaacaacaagctgacggaagtgttggggatcttttgcaatgcatgcatgaacctcaagaaccagaagtacaacctggaaagaaaattcataatatcttaagacaaggtcaaggtcaaggttctaacaggttaagaactagaacattattgtggttaacatgcaacaacactattgtatctccacatttaaaattgataggaaggattaaaatcgttcctttatttttataggcacataattcaataattaaaagcaaaatttcagtttgaaattatattgatgatggtctcaccaccttaccatactataaacaaataacagtgaagacacggaatactgcctcaaatatttttacactgaagagttgtttcattttgtagccacacaaagaaatcattattgtccatgtaatttgaaaacttgcaacatattattaaaagatttggtgtactaagttggtggctggacaaactttaacccattttacattttaccacatctttataaaaatcagaaaccattatacatccccaagatgaattccaatagtggagtacaatcacatcctcacaagagatcaacccaaaactggatattgttgaatataatagcacgcatatgttggctacttctgcagtaaagtctagtaacctcacactccatacaacatccaaacatgttatacacactaatgagtgataaaacctgagcgtaaatgttttttatgaagcataaggtggagttggcaagaaaaaatgtagatgtttaagataaggttacctcatcagaaggatctgaaagtggattcaaaagtgtctcaaatatgtctctcaaagaagtcaagacctgttcaattaaaaaaaaaatccatttaaatttttgagccaaaataaggaccagtccattggaaaataaatgcacataaggaactgtaaacttctattaccatacatcatgtaatcagagcttttcatatttctttttaatcatttcacaatagtacccacagaactgtaataataaaagcacaaaccagccttttctattttcatacttatattataaaactaaacattcatctgtcaataaaacaacatctccaggtaaattagacagtttgtctgcaagaaaaatccccctgattttcttgtaagaactacaaccattcaataaaaattgaccaaatctatcagaagattttttgtgaaaaggaagttcaaagaaaaagacaagcatgatagcatagatattaaaagctgatattacttgagttgaaacaagccctctgttatttcaaacagaccataagcaaaatttgagatagttcacttgaaaactctagtgagttaaaaatgcatggtaatagatatatcacaaatttcaaacaagtactgacacttctgttttttataggccaagaaagaattcatagagaatgcaagttcctgcttacctcagcacgatatctatttaaaagtgtcgaaatccagtgcaatgcttcaattttagtagcctcccattcactagataattgcctgcagtcaaaatatccatgaattaccacctatggtagcgcagcaattgttttgagataagttaccaccactcacttaaactaactttaagaaggaagcttggcagcttaaaagtaaataagggtaacatcaacatttcccgaagctcttaaatgagagcaagtactatattcccataaaagtgaaacttctaataacaattcaaagttttatttcacattaaaaaaattgcacctctttgcaatagagagtatggatcccacattaaaatcgtcagatggatgagctctgattgcacgaagttcttcattggtttcacgagcaatcttcacaaataaataagttaataatgagttttcttttccttttttcctttttaataataaaaaatgataaaacaacgaacaatcttctaaaactcactagtctaaataaaataaggaaaaactattgacaaacttaccactctaattttctcttctttatcagatatgcaaggcaatattgcacccagaatatcagcataataaggaacaagctgttctccaccaagttttacaaattcatttatctgcaaagtcaaacagcatatatatttgatcatcttataagcaatgatttaatttgacctgtaattaataaattgggaatacaacataaaggaacctacccatgtgacggctgttaaccgagtaaattcatctggagaagcagccctttgcaccaaaatctcagccatgcgaccataatctacagacttcaagagtagagcactgcttgagtcagaaatcacaaatgaaaaagataatttgtttccagtaaaaagtactcgacaacatgcacacttatttatcttgttggcataagatggatttgattaaatattaagaaggcaagaaaccttgtcactaatcaaaagcacagacatagatttgatcaatattaagaaagaaagatatgatcactaagcaaaagcataaacataaatagaaagagaacaaacaaggcataaagttttagaaaagtgaagggagaagttaacaaagtcatcatcacagctatatacttaaaatcaagcagaaaattttctagaaggccatgtgcggatgggagggagcatattgccagccagcaacaagttttaggaaaaatagaagggcgacagcagaatcaatatagccaaatagctcaatataaaattagttcttactggggagctcttgatctcttgaagaaactctgaaagagcagaatcagcttgttgccgtatttcatggctagaatcacttaacatattgaacaaacctgaaaataatggaaaactatgaacccaaatgcacatagaaggaaacgaattaaaataaaattactacttatatgtattaccatctaggaaatcaggtagaaagcccagcatatcaatgtctgggacactgtctaatacagtgatccatcctaccaaaaactgacgaacataaggattaaggacattcatgcgctccctcagcaatggtataaattcttcaatactgaagaagaacaacaccacataaggaaacttaattacaaataataaggaaataatcctcaactcttgatgagaaaattggaaaagtatgacagagaagataacacacctgaattgatcactttcagtaacaatatcctgtgccacaacaaaggattgaaataagaatgaaataccaagcaggaagacaactagagcaaacaagctaaaaattgaaattaaaaatgcaatcaatcagaaggattcagatgacaatccaccttcacaagccgatctagaagatgagcagcactctgtacattagcatctgagtcggctgaaagcttacataaagcatcaaaaatctgattaaagaatatgataaaatcccctcttacaacctgttcaaaaagcaagaatacatatcacacccagtatcaatatggggagttaaacatgataagcctatcatacttaagtcagctaaccactcaccttcgcaatattgtatagagcttcacaagcataatatcgaactctgctgtcttggtcagagaacgaattaagcacaggaggcacaatttgctggaaaataaataaaaagaaaaaggaaaaataaaaagcttgtagtgaaataaattcagttcaaaacctaatagcatatacatctaatgataaaatacttgatggttagaaaccaatccatgtttcttaatcaataaactcaagaaaaaaataaaagaaaatcgattccaatagggtccaaacttcactaaataaaaacctcaaatggatgtgaaatctatagttagttatatttaccaaatgctaagaactgaatttcaacgaaacagcacctaaaagaccatatatccaaatcaattttgaaatagcaaaagcacaatcataacaacttggcattttccaattccctaacaacccaaccaggtgcaaacaattggaccagataacagctcttactcctacaggcttcttatacatctacacactatgtcccttcaaattaatcactactaaaagaaatctaacagttggaaaacataaaaccaatcgtcataaaaacttgaatttgatgtgaatgaatcctactttcattatactgatgatgttgaaaatacacaataatataaattacctttcagcctaacttgattgttatagtgaactcaaaatcattttaagccaacatccgaaaacaacagattaagatcagactactaacaaagaaaagatggaaagaaaaacaaaattgaattcaatccttacctctagatgttgtgccgcatcagtactcaacccaactgtcgcagcagccaaccctatcaatcctcccttcacaaatttgtaaaaaaaaaaagaatcacttaatactcaaacagcacactcttaacagccatgtgagaccacaagaagatccaaatgcccaattccaaatcacctctcattcacataccttcctgtgattcgcttgaggcgaataagtaaattcatgagtcaaaagattgataattgctgcaatcttatcgtgatccgcattcgaagctaaactcttcacaacattctcaacctaacatacacaaaacagta

SEQ ID NO: 20281 - DNA, 2487 bp, Cannabis sativa
gtaaaataatttccaacaggaagcccatgagcttgaatccaaaatagacagaaatcaaactcttcaacatcctaaattccatcttccagccatttttgattaatcaacaatttcctatggattatccaaggtctcccttgaaaaactttttaacaagatgaatcaaaattaaatctcaatcctaaagttccttcaaagaccaagaatggtaagtacttcagaatattctttaggagacctttagagaaaaacttgcttcctagatatcttaccagagtttgttagaatttgggaataaagtaaatgaggttccatctcaaaattaattggcaatgggagcagtagcccattcatcttatatatgacaatttatctccacacattaacaatgtgaaactaactctaataaacttttccttgttaatggaaggctcctttccttcttcaatcagctgaagacaaagggacgggtcaaagaagctagctaacaaagggggaagagtaggagcacccgacgagaaagccattcagaagaaaatgagcagttaggaaaaaccaataaatagaaagaaaaggaaagcacaaaagggagattagtactcacaaacaagaaagggtgagaagttcttaagcagaaaatacactcaaaataagagaactccactacagagagagatccatacgctctcaggatacaattgtattatatatatataagagatagagagggagatggagaagttacatacatataatcatttattattattattaataatttttcagttacaaatagacatgtactagtactgatatatgctttaggcattatactttacattgtttacaactagcattacttaaattattaaaacaataattaatattattaacatgagtgtaggtttatcttttttggaaattgataaacttaattccataagcatatacaaagagaaagagtagagcccaaccaacatgggctatggcaacaaatggaagaaaatcatagtcaaaatccagcctttccttgatgaaaacattcactggaacactaaaacctaactcaagtatcttcatattactatcaatgtcccccaattgagaggatactagtccatgtatggtccaagacacaggagaagcccaatagtaccatctccaccagattggaatttgctgcaccacaaatattaccatacaagttaaagtgaatgcattttattatatattgatgtaaatcataccatactaaagattactactactaaaactaacctttctaggaataagaaatccacagaacaaaacccagaagctgtaaaagaagtacaagaaaattgcaccaatttggtgaccaggtgtcaatgccacagccatcattccatacagtgtgaagtagactaagcacatgaatatgtagtagaagaaccaccatactttatatgctctccactcaaatccaatcattgagtataggataaacatataaactatagcttgaattgctgaatagattatctctatagtcacctgtaaataacatcatcatgtattgatcaattacaagattcacaaagtgatctcttttgttccttaataatgaaaaaaaaaatgaatttatttcattcttattattacctgggaaattgcataaggtaatgctgaatacattccagctgctctttcacggtagaaaactgttctctcaatgtccacaacaggctgcactgaagaagcattgcttgctccaaggaaaaatacagaagtaaacaaggctcccaaaagagtcattagatcttggtatgtacctctgtcattacacaacacaataattgttattagatttagctcaaacaaatatgtgcttttttatattttttgttttgtaataaacacttacgtcttttgtcccctgtcccagaaaataagaccaaacaaaatacccatgattatggtcatgaagaatcgaatgccgttgtattgtggatttctccaataagaccaatgttgtttccataaaatagctttgcattggacaaagaatgattgagagtatttggtaggaaagtaaaggtccttagattcaggtgatggggtactaagttctttgataagcttttcattgttcctgaaataatatcaagtttgagtattagaatcattgacataaagaaagagatcatatgttaggataattttttaaacttactggtaaagagaagacttgatataaatttcagcaaaatcaacttcaagttgagcctcaactagttgatttgtgacctcaagcatccatgttgcaggattactaccatccttaatctttggaactcctggaatgtcctgtagtgagcttaacatgttagtctattattccatttaagccaatattttcagcagttaatatatggacaataataataggctaattaggatttttgctccctaaactttgacatgtactaaattatgcccttgaatttt

SEQ ID NO: 20282 - DNA, 6024 bp, Cannabis sativa
aaaaatataattaatttaatttcttcaaaataaaaaataattattcaatatttgccaaatctccgagatagaaaataaacaaaattaaataaaataaaggaagaagaagaagaaaaactaaccggaagaagaagaactctgcaattaccagatttgacctcactaccgtttctactttgttccccctttcactctgttctattctcttcttaggaattttcccgccaaatgagagaagttttagcatatcaccaccatctccatcgccatggacgttctctctcctcgaaccttcctcttcttctccatctcactccctctcatcctctccttctttctcctccgtttctcttctcccaattctcataaccatactgtaacccttaattccactcactcccagatcaacaaccgcaacaactacatcgtccgcttcctcgagtacaacagggccgaggctcaccgtgactatctgcaactaggcctccgatcgccgggatggggttggatcgagcgccgcaatccggcgtctcggtatccgaccgatttcggattggtttggatcgaggagtctgccagggaaggggtgattggggaacttgagagattggggatggttaaggatgtgaatgtggatgccagttacacaaggggtttgctcaaggaagagagtagagatgggcgtttcattgatgaaaacaagcggcctgggaagattttcacgtcgatgtcgttttccgaagctgagaacgaacatggcgcagagatgagtaattcttcttttagcttgcgaagggagctgttatcggaggtaaggatatttgtctcaactgtacatgattctgcatttcgtttggcggggttagaaaaatttctgattctttattttcttttctattatttttcatgttttctttctttcttaattattctatgccgtgatttatctttaaacgtagagatatatacaatcttttatgtataataaaattaagataaaagaggaaaccaatgggtttgttcggttgttttctctgatttatcaatggttgtagaagcctgcaatgtgtgtaaaattttattatcacacgagtacagcccagcactcttgaattaataaaactgaaaattttaatacaagttcttgtataagcattaagaaaaagttgatgttaatcattaactggacattaaaagtgtcagcaaaaataataaatacgattgcacctcgctttgttattaccaatttttccctgaatgaaaatattgtcataaaatgtgatgaatagggattaggccaaaggaatttattaccttaatttaactcactcactcaaacactttttccatcaattttgcagagatctcaagttacttcattatttggagctgatgctctttgggtgaaagggtataccggttcaaaagtcaaaatggctgtatttgacactggaattcgagataatcatccccattttcggaacatcaaggtattctatggtagcagtgctgctcatagtttaatcttctcatgtaaaaatttatatacttcttactttatcttctttgttatgtatagttgttgtatgataaagcttagcagtcatcatattattaaggttatgaaaatcagtatttttggcatgagaggacaggtccatctgtgcttgtgatggctatgcttattgtgtgcagtatcagctatattccacttgaacaaatgttgtttttaccctgtgttactgtcagttgtgttggttttaacttttgagctttttcaggagcgaacaaactggaccaatgagaataccctaaatgataatcttgggcatgggacatttgttgctggtgttgttgctggtagagatgcagagtgtcttggctttgctcctgatactgagatctatgctttccgcgtgtttacagatgcacaggtaatgcatattgggcactggaggcaaatttacatacgatattgtccaacaattgctttttgtacttgaaagcgaaacaaagtgcttctttgtttcactttgtagcttctactcaatagctggttccttgttgaaatgtttgatttacaacgtgcgctgttgcaatatagatttccactttatattgttgatttattactgcaatttaaatttccttaagtctttttctgcatcttgtatctggtagtcaatcaacaaaagtagttgttttgaagctcagagtaaaaaaggaaaaataggagccattgacaacctttgaagaagtttgtatcctgcttatgactttggtttgataacgtttttctttaatgatacctgatttagtcgatagagttttagtaagattatgagagtttgtattcagctaattgcaggtatcatacacatcgtggttccttgatgcattcaattatgccattgcaacgaatatggatgtgttaaatttgagcataggtggacctgattatttggatctcccatttgtggagaaggtattgctccattttatctactgattatttttctctgtcttcatacaaaattgtatttaatttatttttctaccaggtttgggaaataacagcaaataatataattatggtttcggcaattggaaatgatgggccactttatggaactctgaacaatccagcagaccagagcgatgtaattggtgttggtggcattgactacagtgatcacattgcttctttttcttcaagaggaatgagcacatgggaacttcctcacgggtagttgtcatcttcttgacacagctaaatttttctgcaattttttttttcatactttgtcatcatacttaccgaagtgttaactatgtgtagttatggccgggtgaagccagatgtggttgcttatggacgagacattatgggatccaagatcagtacaggctgtaaaagcttgtctggtacaagtgtggcaagtcccgtggttgctggtatggtttgtttgcttgttagtgtcataccagaaagcaatcggaaggatattttgaatcctgcaagcatgaaacaagcccttgttgagggagctgcaaagcttgctggtccaaatatgtatgaacagggtgcaggcagagttgatttgtaagttttctttgttaatttcttaattagactcttcagtttgtatgctaatttttcttttctagattgaaatgtcaactttattggcatcctggtcttgtattgttattatcagaatttctcatgtatcttgttttggtcttaatactcttacttcctcaccaggttagcatcctatgaaattcttaagagctaccaaccccgtgcaagcatctttcctagtgtgcttgactatacggactgcccttattcgtggccattttgtcgtcaacccctttatgcaggtgccatgcctgttatttttaatgctaccattctcaatggaatgggtgtaactggatacatagaaagctcaccaacatggcatccttctgacgaagaaggtaatcttcttagcatccatttcacttattcagaagtaatctggccttggactggttatttagcacttcacattcaaattaaggaagaaggcacacaattttctggagaaatcgagggaaatgtgacatttagagtgtttagtcctccagctccaggagagaaggagctccgtagtagtacctgtgtgcttcaactgaagttaaaagtagttccaacaccaccaagatcaaaacgaattttgtgggaccagtttcacaatattaaatatcctcctggctatattccaagagactctttggatgttcgtaatgatattctcgattggcatggagatcacctacatacaaatttccacattatgttcaacatgttaagggatgctggctattatgtagaaacccttggctcgcctcttacgtgctttgatgctcaccaatatggaacacttcttttggtagatctcgaggacgagtacttcccagaggagattgaaaagcttagagatgatgttattaatacaggcttgggattggctgtatttggtgaatggtataatgttgacacaatggtgaagatgagattttttgatgataatactcgaagttggtggactcctattactggaggtgctaatattccagcattgaatgaccttttggctccatttgggattgcttttggtgataaaattctgaatggtgatttctccattgacggtgaacagagtagatatgcatctggaacagacattgtgagatttcccagaggtggccatgtgcacagcttttctttcatggatagctcggagagtggggccactcaaaatgttttgcggacttctgacatggctgtggtaagtagacatttagtttatgccaactcaaataaagttgatagacaatgaaggtgtaggcaagtgatattagaattgtttatttatttattcaaattttgaaagttcgaaggatggattattaacttacctgcttgctactgaggaatttcatctatcaaataaaacaatcttaaaattttaatatgaattaacaatgaagaagcaccaggaataataattctaactatttaattttggttctaaacttgtaaaagaaaataaaaaaatccaaccgtgacatcttaatttgatttaggcctaaacttataatagtgtaatttatagcttgtgaaccacaaaatgtaaatattggaaaaaaatttcatgagtatagatatgatgaatgcaggttgactttcccatcctcggtcttatagaggcgaatgaaggtcgtattgcagtctatggagactctaactgtttggacagcagtcatatggtgactaattgttattggctcctgaggaaaatattagatttcactagtggaaatatcagagatcctgtgcttttctcaaactcagctaaacaagattctgccttatatgaggaggacagccaattaccatctcgtagaactgatgtgaatttctctgcctactcagcagttgtaggaaaggagttaatctgtgggattgattccagatttgaaatatgggggaccaaaggctataatttgcaggtaaggggaaggaacagaagattaccaggttatcctgtcattgacttggggagaggtctaaattcttccattcgcagttctacttcaaagcgtcgaaaagttaatgtaaaaagtaaaagcgattctttgggaaacaagtacttgggtttgttttacggagaggaggtaaaagaaatcattacaattggttcctgagataatttttttctccattctttcatggtgaataatgcttttataccttaacctttgcagcttgatatgcctgtattagctactagtcattggattgtccctgcactgattgcagtaattggttagtcattgatgactttgtacttgtaattttggtgagagaaatatatgtagtagatcctcgtttgatcatcagttctcttgtcaatgtaggtcttctgttattcttgagcttctggagaattcggcagaagcgacggcggcgaaggaaaggttctggctctgcccgatattctaatctctagttctaatcttgaatcaatcaattttctcttccctctacttttgtagttaccctcttgtaattttgattatgtagcacagaacataggagcttcaataacaactcaatagtaaaatctgtcaaaagcatcaccacaggaaattttgtttgagtttatatgttatacgtattattgtcaaccatttaaaaaaaatgtcaagagaattttttagcacttgccatacaaacaatgaacaaataaatttcttttcctttcttaaagtaatactaagtatggctttcatgtgtggtcttgtggagtatttgcataaaagttttttaggcattatataatgttctttatattttaaagacagagcatatcatgtcttccactgtaaagggcatgcgtaaatccttaaaacacacaaaattaggagaagcctcttataaattgcacgctattttatttatatattata

SEQ ID NO: 20283 - DNA, 2648 bp, Cannabis sativa
  modified_base (817)..(825): a, c, t, g, unknown or other
  modified_base (2405)..(2409): a, c, t, g, unknown or other
gctaggtgagccctaaatacagacccgaacaatgtggtgatgtggtagtactaaattggtcactcttgaccaatcacgtggtgccacgtaattagggatataagtaaataatgagtatatatacagtacctgccggtgtagagtctttcccctaggacaaagtaagctaaaatggcaaccaatatagtaccaactggattgaacattgtcacaaaaactggtcctttttgttcagtgcaccatagttgaatgaatattattaaacctgaacaaactactccctgtgaaaattttaataattaaattaattaattagtgtttataatattaattaagtaaagtaattataaattaatatggaaattaattaatttactatatatatatacttactccatatagtatggaccacaagtcaatatcaaatccaatagtccaagcagaaggactatgctgtacaaacactgtgaacacagctgattgtgctccaccaatgaaactcatccacgtggtcaatgataattgtgctgggtatctttttaatgtgtatgcctatcattcaccaaattataaatggaaattcagataaatttgtgtcaacatatatcaattattagggtaaatactattttagattttatgttttgtaaaaattaccaattagattttttgttttgttaaatgataaaatggactctgtattttctaaaattgtatgaactgattttttgtcaaaataaaactgaatatgacaaaactgattacattttctgtatctattcgtattagaatctgtcttaaagttggttatattaannnnnnnnnttgttgaaaattgagctcagagtcttatttttactattttggaaaatacagggtctattttcccatttaacaaaacagtggctccaattgataacttttgcaaaattaatacagggtccaaaatagtatttaccctaattattatgattaatttagagggataataatatataattaagaagaataattagtagtaattaacctgcattatgtaccaaatagaccaagtgatgcagcttgagacagtgagaagtgaaccctttaaccaatgctcatgagagccattgctaccttgaattttgatcaatggaggccatacatttctcacaattggtcccttgtacaatgtcatggtcatcacaccacctaatgagattagggttccaagaactttggctatacccctcgaatttcggagattaattatctctaatctgtgattattattattaattaattaattaatcatcaacataacaagaagatcttactaattaattaatgtattaattaccttagaacaacagcaattataaaagttagggaggcaatggtgttgaccattgaagcaacaaaagttggagatgtgtatttcaagcttgcaaaatatgtgtttagtgttaaaccaaccctgtcattaattatatatataattaggtgattaattaattaatagagatattcttgtaaaaaaaaaatctattggaaaggaatatatgcatatattctatgtgtatttaattttgttaccccaagagtgaaagaataaaaatctcaacaaatagagggaatgttagctttggcctttgctttctgcaacacaaagaagaataaaatgagtgtcattattattaaaaataatttgggaaatttaaaaaatatttatatatatgcacttaaagtataccttttttttaatttttcttttcaaattatatattacattaaataaaataaatctatatatatatatattgtattttgaacatattatatatattcatgaataataatagcaataataataataataataaaacaaagctatgtatagtcatacaaaattttagtacttaatttatcttgtctattatataaataggtatataaatgaaaagcttaagtataaatattaatatagatatagctagatatgtatgtaatatatatatatatatatagtacctctcaagaaaaaaggcaaaaggaaagatgaagagggcagcaacaatatgtctataagtgatataaacatgaggattcattccattgttgaaagaagcttctgtgatgaaataaagaaatgtataaccaagttgtgttgatatcatcaacacttgaggtttcaacttcttccaaatattactataattacctaataataatttcttcttattcttattattcatctctcccattaatttaattataataaatatgcatgtcttgcatatataattctatatgtatatatagatagagagaaagagaatatagaagagaagagaaagagggtgtgagtagtactgtgtgatgatctagttgaatagtacatgcaataacatatatatatatatatnnnnntatatatttatatatatagatattttattcgtgtgtacattttgatcatgagaatcatgttctcccattaacttagtagtacatgaccttaacgttacttacatagttggttggtattttatataaaaatgtagttatgtttaacgatattttttgagttcttatttcaattttaatagaatatatatcctattatttaatagaatattttttattaattgtataatattattatatat

SEQ ID NO: 20284 - DNA, 1812 bp, Cannabis sativa
gggaaaaaaatgttgaggaattgtgggaagttatgcttcaacaatggaggttacttgatctttcaaaaaaaaaaactgaaaagaaatcaaaaattaaatgaaaacaaaaggaaaaaaaagagagaagtgattgaaagttgattgatggttgatagggggaagccacacttgtgtctgtgcatgaaattgatgtgcaagtggtatatatgtaataaaagaaagaggaaatgtaaaaatgataatgtaaccgtgtgtggatttttttgtaataaattgtataaattgtatttttgatgtaaaaatttctacaatttaatataaattttgtgtattaaataaggaatgagatcaaaaaaaaattattagtggagagctagtctctagataacatttcaatgatctcacccacacgtgtcatggagtgaaagacaagctgtaataaaacaaaagggtccttatttaacaaatgggaaaaccttacaaaagattaaaaaaaaaaaaatcgactcaaagtcacaacaaagctgtgtttcttgttatagtaaagctatgcaaattgtacagtgacacattggtgcatagtataacagtaaggatgggtaatcatattgaaagccacaccatcatatcaatcttcaacttcgattatatttgccttatagtgggtgacctcatatccatttttgttttttctctttagaaaaagtaatttgaaacccaaccacgcgcacaccacatgtatggtgaagattcaaaatcattatactatgatcatcaaacagtaacatcaaataaccaatcttagtggtataaatattagtcgagtacacctagctcttccatatgtactagaaaggtagtttagtaagagagacataacaaaaagaactccccctccttaccctccccacccctaccccaaaaaagaagaagagaaatagaaaagaaaatggttcatcaagaagaagccaggaaaggtccatggacagaacaagaggatttcaaactagtctgctttgtgggactattcggagatcgaagatgggatttcatagcaaaagtttcaggtttgaaggtggagggagacaaaataaaataggtatggttattcggagatggcggattatacaaaggagcaaatttttaaccaagttttgctgcatatttttgtttttgtttgttatgtttatatttgtaggtttgaacagaacaggcaagagttgcaggttacgttgggttaattaccttcaccctggccttaaacgtggcaagatgactcctcaagaggaacgccttgtcttagagcttcattccaaatggggaaacaggtttgatattacataatttatatattgatcttgatcatgaaaccacacccccaacatatatttgttaatttctatgtgacgatgattttattattaatgggtacgcagatggtctagaattgctcggaaattaccgggacgtacggacaacgagattaagaattactggaggacccatatgagaaaaaaagctcaagagaagaagaaatcaacaacaacaacaacaacatcatcatcatcatcatcttcatcgccaccacctgatcatgatgtgtcgtctccatctcaatcttcatcctcatcgaacattacgaccgtggaatccttacccttccctgacagcaccactggagtggagagcttctacgacaccgggggtcgtgtcgtttcagcctatgataatcgtggtcacgacaagatgaaaacagaggccaaaaaccatattgaagatgagcaacaaaccgccgccgccgccgttgcaggg

SEQ ID NO: 20285 - DNA, 2115 bp, Cannabis sativa
atgatgatattagtcgacaactgttaagtatacgcatattaatgttatgttttcttaaagaaagtagaggaagcttgcttcatttaagcaaaaaggttagcttcattgtcaccttctcaatagtagtgaacacctcactgttatttttgaatagaaattttttaaaaaaaaattacccactaatttctcataaaccaaaaattcagttatataggtacattttatatagaatagatattataaataaagtaaaatttttaaaattaacaatataaagaaaagaagagaacaaataacaacacaccatataggcccgcatgtgataatttttaatccatataacaaaatatttttcttcatatcatcataatgttctaaactacctctatctacatgtgtacaatacaattgtgtatataaaaatcaatgttttaactaataataaaagacaattgaaaagcaatatcagtgccaatggagggagaggagggaattaacacagtgaaaagaatgccctttttttccttaattacaattgacttggtcaaactaccaaagcccaagtcataatatttgacaataaaatgatatattcaaatgaatttttgtttaggcacacgtaatgtagcagtagtagtagtagaatatctagtagaagtataagtagaagcaatattacgagattaagcaagactaagtctctagcacttccactattttccaatgcctcttttttggttgtaaacagcattgctcaattaagactttcattgcaggtgaacaattttcagggatgagatgcctcaaattctaaaacacaacaaaacacacattttcattattactaataaatttctcacattaccaaacaaacatttaaaagactaactaccttgctcaccacaacaaaagctgcttgaatagggttcatttctttatagggtattgtccctgccaccgattcccacaacacgagaccgaagctgtaaacatcaactttttgcccatataatttgtgctttattatctctagcgccatctatctgtatatcccaggatcatcaattaaagcatcacagtatgcttccttacaagctataccgaaatcaattattttcatgtgagaatctccatcaataaagatatttttgggcttaagatctctatggatgataccctacgagatcatcaaaatttcaatataaataacaaattcagcaatataatttttaaacaaaaagagaactcaatttatataacaaaacaactattttttttaaaaaaaattgccaagtaaattagcctatagtacaaaattaaacaaaagaagagaaaagaataatgtctaggagagtgtatatttaaaaattaatttgatatgcgaaattaatagtattcaatgttaagactactattaataaagagaatttgagagaggaaataggcttctttatattttttagctgtttgtatagagaatcttaaaacattggaaatactgagaatactaaaaaataaaaaaacagaataaaaaaacagatgaaaatactaacaattaaaactatgaaaatcaactttaaagattaagaatatgaaaatgcatcaagataaaaaaaaaaaaaaggttaaaatcaattaaaaataaaagggaaaacaacgaataagcgtggtaaattaaatacaaatgaatacctctaaatttttgagacaatcaaattcattgtctcataacaataatatgatgctcctaaaaatagaatttgaaaaaaaaaaagaaaaaacaataaatcaaactttagcatgaataaatacgaaaccaactccccttaactaatctaaatcactaaaaaacctactttccaaatctcaatccaaaaaaatcccacattttaccaaacaacataacaattaaacacccattttatattatttaaaaaaaaaggaaatggaaaaaaaacaaatattttactttccaaatctcaacccaaaaaaatcccaactttcaccaaatcaagacaataatttaacactcattttatattatttaaaaaacaaacaatgaaaataatttaatataataataaaaaaatgaaaaaccgtgtttttgcaaatgtc

SEQ ID NO: 20286 - DNA, 3506 bp, Cannabis sativa
cccccccctttttatggttaccaattatttcattaaaagcacctatacaaagccatgctcccaccactgagtctttgatccgccgaaataacttccatgaatcatcccttaaggactggtttgggttgacataaaacccagtaaaggtccatgacaagaacccatttccagcaatggttgcaagaatatgtcctagagaagaataaattttcaccgtaattgtctccttccacataagaattaaaccacgactcctaccttgtttatcaactgcccagaactcatcaaaacccagccttcgcaccacctttgctgcttgaaaattattgagcttactctccataacaaacaccaaatcagggttactctacctaacatgggatcacaacgttttgaatgtccacgagttccccaacccttgaacattccaacttatgagcttcattattctcgacggccttgacaatcaaggcttgccgcttcagaataagagagggaagggcaatcaaaaccattagaaaaacccatcccgaaaggaactttaacttcctccacccctttatccactttttccccccatgaaaggagttgatacttgtttttccttcttcagttgtgcccttaggcacttcttttcgtcttttttgtccttcctccctagcgatcttcttaattgagattctttttcttgtttttggattcgtttctctgctaacacttcttcttccctcaacaaaaccactattgacgattttggtaagctcctcattgtatctgtactcttcaaaagatcgtactccatcctccttcgacccagcaccttgagtttgccctgtcactttcctctttttctccctcgaaattttagtccccttctcaatcgtctcagtcgttatctgattgagcatttgtcgtgtttttgtttcttctaaatcaacggcatacgacaatttactactctcacccattacccctgccacctcagcaattctacccccttcctttttcttatccacctcagcttctttatttccttttttcccactcaatgccacctcatcttttcttttcctttcatctattaattctcctaccccttcctcttttcttttacttcccgttacactagccaccttaattcgactccactccccaaggattgattttgtactctaatgggccagcttattattagccaccttttcacgaatcgtatatgctcccactctttcctagttatcatgcccaatattttttgaaataatgttcatcgttattcccacctttagcttcaacaactcttcgatcctctccccttcccgtactccgacgaccctccgactcccttcttcccatccccgccttagactgggtttccaactccgcatccaatcttcgatcatctaaatccacctctcccttcctattattatcaaaacaatgtttgaccacattattctctgaatttaaccaatcaccataaagctgcactatttcaccgttgccaactttttccatcacaactttttttctgtagccttctgatcataccccaaatcccacacatatagtagagcaatggaattttctcaaatttgaagtatatccaatgcttcctcccctcgaactttatgtgctttccaaccataatacttctattcactagaaacgcaactaacatccgagcagtaccactaagccacatacaattattattcttccatgtaacttctatcacatccccttccaatattcctcctattctatgcacattgctttcattgaaagctttcataggaaaaccagccaccttaattcacacagggactgcattcaaagcagcatcttcccattgtccactttctggccactcttccaagatcattaaccctcccttaaatcgccatgggagggtgctctttaccttcacataatccttttcacagccaaaggaaaagcctgcatacgtactgcatttatcatgtttatacgccttcacctcccatttttcgtctgtcttccacatcctactgaacaccgtactaataaagttcacattgcatcttttctttgaaaacattcttccaatcaatgataatttcccaaaaccagagaccatattttcgtcaacgatccattgatcatctttttcgtccgagacttccttctcctcttgattactcttatcacttgattcttccacttctcttccttccactacatctccatcctcctcgcttccttcccttttcgccatattcatcgagtttgtctttgttattaactcttcaacctcctttgaattcatcatacttgtcgttagcatcagcaaaagtatcgaacactaaggaatcagggtacttggaaccaaacactcacactcacagggtcctaatgaccataatagtaacattctttaaggatgctaaaaatatccacacaatctaaaaatataataatttatttgatctctcttccataacattttagcactcttacttctaaaattcactccaatgggtatagcaactctttaaaaataatataattataatctcacacattattatttaattttttagcaataataattttttagttttaattttttattaaaaaaataatgatagcatcaatgctactgtacaacattcacacatattcttagaataacattattttccctaccatctcaatattttaccacttcatctatccacctaagcaagcactcttaattttttatcattagagatgctcttagtggtctttttttttttttaaatcacaccaattataaaatttatcaaattactaaatcatattatgagttaattgattagtggggttatgaatgatattttgtgaatgattagtaatatttaataataattattaaattaaaatatatcatatttaattattttaatagtagtatgatacaagcatctccaatagtactttttaattttttttagctaaaaagctaaattaaagagtcatttttattgttgttgctctaatcatacttcctagtttagttcatatttaattattttaataatattttataatttgagtttatcaaatataaattaattgtataaagtaataaaaaaaataatagtattttttttattaaaatatattaaaaaatattagcaaaaaaataaggagctccttacatttagagaactccctattatagagagctacttttggtatggttggagtcatggccaaccagagggtgggtagcccccctaggccctaggccccacaaatttggaggcccaaaaaaattaaaattaatattatatacataaaaataaaaatataatatatatgtatatatataaattttggttcaatgatttttataaaaagacttatagtacaattggtaaagggaatttatgttggttggtaggtattgggttcgattattggatacttcacattttgggccttttaaaaatttaaaggcattgattaaattttgtaaa

SEQ ID NO: 20287 - DNA, 2759 bp, Cannabis sativa
taagatactggtaaaataatttccaacagatgcctccgcttaagtctccgggccctgatggttttccaattaaattctttaaactttattgggacatagtgggaagccaagtggtggagtttgtgaaagaattattttgttcggggaaattctacaagctggttaataagagtttcattgttctgatcccaaagaagtctcatgccagctgttttgatgatttccgcccgatttgcttgggtaacactatctataaaattgtctccaagttattggcgaaccggctctcctctcttttggataagcttgtttccgcgttccaagcggcttttgtcaagggtcgtaacattgctgaaaatttcattattgccaatgagatttttcatgatatgaagcagcggaggggaagggaagcctatgttggaatcaaatgtgatatgtctaaagcctatgataggcttgagtggagatttcttcttaaggtattaaaagcttttggtttcaataaccacttttgtgatatgatcatgttctgtgtcacttctgttacctttcaggttttaattaacgggggaatcaccaaaaaaaattctcctaaacttggtttgagataaggggacccgctatcccctctgttgttcattttgtgtgtggaggttctctcaaaactattattggcaaaagaagaggaaggtcttattcgggattactaggttggaagagagggtttttcgattatgcacttgatgtatgcagatgatcttcttatttttgcaaaagctgagaatggtaatgtgactgcggttttggatgctttggataaatactgatattggtctgggcaacagcttaacataagaaagtcgaaggtgttcttttccaaaaattgccctctccgacgtcgtgaatcagttaaaaacctgttgggttttgaggaaatggatggtggggaaagattcctgggtaatcctttgcttctcaaaggcaatagaagtaaagatttcgagttcattgttgataaaatcagttcccgctttgaggggtggcaggcgcggctcctttcccaagcagctcgattgacgttgattaagagtgtcttggcggctattccgatctatactatgtctgtttttaggctccctaagaaaacaaccaatcgaattgatggaattatctgaaggttttggtggacgggtcaggctaaggaagggcgttatctatctctaaaagcatgggattctctttgtaagcctaaatcttgtggtggtctgggctttaggaaggcggaagatgttaatttctgtctgcttgctaagcttggttggattatggcgtcggaatgtactagcctttggaaatcaattttgattgacagatattgttttgagacagcctttggggattcgacacttccttcaaatgcttcgccggtggccaaaagcatttgggcgaccaaggatttcattgtcaagaatagtgtctggttgattggttgtgaagctagagtcaagatcggcaatcagcaatggtcgggtttcgatggggatttttttgactcggatgtttgaatccgatggtgtgtgatgacttgtatgtgtgagggatttgatgatggaggatggtatgagttggaatattcatttggtcgccacttggtttcgtccaactttggctgaggccattctcaagattgcccttccctcttctcaacctttggatcatctttgttggaaggtaaatgcttcggggcagttttctctcaagagtgcctattgggctctgaataattctcgttttgatcatgaggatgttgtttgtaagcatatttggaagaagcatattcatgagagactgaaattgttcctttggaggcttgtccaagatgttctcccgtttggttctaaattggcttctgtttttggatctacaattggccggtgcatgctttgcggttctgagggtatggatgttggttctcattttgtctcggggtgtgatgttactagatccctttggttctcctccccgtggggtattagaattcagagtttcaatttggtgggaggtagagagttggtttcttggctcttagatccaagtttcctagttgattgtggtggaaaggtgttgtatgagttttttctttatggtgcgattttgtatcataaattgtggaatgttaggaatcatattttccataacaatggggtgctatgtttggcggaggtgcggaaggcaattgatcggagttttgcagagcataaacctctcttggaggctgcttaagatatcgaatgtaaccaaaagggtatttgtgcagttcggtggggtcttcctcggccggctagaatgcgatgttatgtggattttgcttctgcaggtgatgttggtgcggttacagatgttgcaggtgaaatctttactgcagctgcttctaaggtgcaggttcactcggtggtgcagggtgagctcgaagctgtgcggtttgggctcgatatggctacgttgttggaggtggatgtgggcactttcttttcagacaatcagactttggtcaaagctgtggttgaggaaagtccccctctttggcaattgcatttctcttttgttaatgttctcaggactgtagttatgaggaatgtagctttttgttgggtctctcggatgaataacatggcggcccatgctcttgctagatggggcttgtctcatagttgtaatggtctgcttagtttttgggaagtgagtccccatgtgct

SEQ ID NO: 20288 - DNA, 1406 bp, Cannabis sativa
atttaacaaaacagagagtccaataaataacttttactaaacacaagatctaaaatggtatttaccttaaattataatcaaccaacaataattaactcacactgatttttttttttatcttttttctttttgagatattttattttacttttttttattatgtttgagttgagttttatgactaaattttccaaatttgaaacgggtcgacccgatatgaacacatttcacttttcatttattatatgaaccaaacccaccaaagacaagaccaacttttttccactttcaagtttgaacatttcaattttcaatcctcttaaacacacaaaaattcattaattaataaaccatctagaatattaacaatttagctatattatactaaaatataaaatcaaaaataaagaaaaacaatcatcataggcttttcatttttcaactctttctatttcttttcattttttagctaatgataattattattatttttttttttaataaaagttagatatttgagcttaatttccacaaaatcaatttcttcatcaaatttggagagctcttcaaattttctgcttctatgtttgacaagttaccttaaccaggtataataattgtacacagttttttatgttcttattttctgggtttttggcttggaatttttaagttagttatttatttttcttattaatcacattgaataggtatttttaatgattttgtgaattgagcttttgagttgagtttttatttatttatttaatttggtgaagaaattttgaatgaaataaagtaagattgtagagaaaaaaatggaattttgttttaatcatatgggtatttctgatcataaagattcttctttttttttttttttggtttttttttggaaaaagtttgaaacttttcatatgggtattgattatataagattgtagagaaatgggatttgtttatttagaagaatttttttgaaaagtatggaaattctcatatgggtgtttctgttcttaaagactcttgctttggaataagtttggtactttttatatgggttttgattatattcatctgggttttgtttttctaacatgaatttcatgtttgttttgtttgtttttttttaatgaaaggtgttggagaaaataatgagttgtagttgctttggtgcttcagcaacaaagaccaaaaagggtttttctggtcaagctaacaatggcatagatggtatgagtactttctctaaaattgtctatcttgtaatgaatttcgatttgtattttcggttcctggtttaatctaatgagtttcagtgtgtaaaagctggttcttgtggtgtaattaaaccttcattgaaagattattttgaaaattcttgtagtttcggttaacatttcggt

SEQ ID NO: 20289 - DNA, 3817 bp, Cannabis sativa
  modified_base (3760)..(3775): a, c, t, g, unknown or other
tatttgtggttggctccgccactagattcaaatttgggacctcctctttgtgtgaagtgtgaaactactaaactatgtctatgaccactttaattaattatatattaattactatttttataattatttttattattttttttaatttatactccccaaaaactagtaatatatatacagatgaatgagcctttttgttttggttcaattattttgtcttttagtagtttaattttttttttcctttttactttttttttttgtgtgtgtctctttaaagtattaatatttcaaatttaaataatttaatatttattttttaatcttatagttttttttttacttaatatatttataaactcttctatcttttaagaaataataattaaaatttaaattttaaaatatttaatatttatttaaagaataattctcttagaatttaatctttatcaattatatttagcaacttaactattagactcatactatttattttattattatatatttaatgtattattaaattattatttttaaattgtaacaaaataaaatgtaattgttgtattttaaaaatattaaactatgaaatttaaatttatagtattttttaaaaagatagaagagtttttttttttttttatcaaaagagaaggatttctaattaatcaacaagcacaaatacaaccaagaattaacaaagtctcgacaacaaactgcaaggcaaaactcacaccaaaaggcgacaaattagtctatgactattagtatctatcttcttgtgactattgctatacaatctaaacttcacaattctttgaatctcttcaacaatatgagtaatcgtgtaagaactataatcatgaatacatttgttcctattcatccaaataagataaactacaagagcaagaatcattatcacaatgttatctctaatcattccacctatactagcaatgaaagacctccatccatcaaattgaatgctccaggccttaaaaccaatccagctaaataaatcatgaacaacctgctttgagaaaaaatagtcaaaaaataggtgctgatgactttcaacagcctgaccacacaccaaacacccatgcgaaggaatgttgatgtggatgttagctagctgatctcttgtaagaagttgaatatgcatcgtttgcaaaaggataaacctgtgtttagtactattaagcctactccaaaaaaccctgtaatatttgtcttcctcacacctcaggaaactgtaatatagtctacctgccccaaatttatttttcctccaagttgccattagttgctgctgattgaaattatttcttaaatgacaaagtttcctccgagtactaacttgaatcctgaacaagcttaaagttccaaatataaactcattttagatatattacattgacccatttgaccaataacacttcatgcttcttcattatggccaacaagtacttagccaaaatagtccaattccacttggcccctaccttaaattcgagaccaccaaattactttggtctacaaaccttctcccaagaaccaagatgaactttacttctaatcctagtttgaccccaaagaaacaacctacaatgcttctcaatctccttgaatacactttggggaagaaaaaaaatattcatccaataatttctttggcctagcaagacaatatcaattatttgtaatctacctgcttaacataaatgtctcgtagcccaagtatgtagccttttttatcttatccacaatgatccatagtctttcatcctccatttggtaggtctcataggacttcctaaatacttaaggggaaacctaccctcctcgagcccaatcatattagatatctcctttttggtagaatcatccactcccccaaagtaaatattccacttggcaagattaatagtcaaaccaggaatcttactaaaatcattcaaagcttccttcagatgtctcacagcctgactagtacatttacaaaataatattaaatcatttgcaaaacagagactaatcaacttgagattcctttagattattgcaacaatcttctagtaaggaattccattaccaacacaaataaaagaggagaaattagatcaccttgtttgagccccttcttgccgttgaatttgccttgaagcctaccattcatcattagattataagatgttcctcttaggcatgtcataatccacttcacaaattttgcaggaaaacaaagaagattcagctagttctccaggaagctccagtcaaccgtatcataagctttgttgagatctatctttaaagcacaccaaggagagaaattctttctattgtagctcttgataagatcctggaatattaggatgtggtgagcaattattctctattgaatgaaagctccttagttctgattgatcaagattggcaagacctcaccaagcctagagcacaacagctttgaaatacgcttgtaaatagttgtacagcaggcaatcgacctatagtcaactgcacaagaaggagcatcaatgttttggattaaggaaattgttgtttcattgaaaacatcaagaatgctttctatattgaagaagttctaaatagcagaacaaaatttttctcctaattcaagccacatattcttatagaattttgagctatatccatcgagtcctggggtttttatgttggggatacaaaacatagctttcttaatttccttcctattaaatagacaaattaacaatagctgccgatcaagtgtaagcgtttttccaaacttaaggcattggatagttgagttagcaaccggacttgctttccctagaaagctattgaagtgatccataaaatgttgcacaacctcagtataatcatcaataatctgaccattgtgattcttgtaacaagctattccatttttttctcctctttttttaatgcaggcaaagaaataagcattattctcatcactatttttcaaccaattgattttactcctttgcattaggaagctatggatcattttatctttttcactgaacttggctgctgcaattttttcaacttccaataaggaaaggtcctctgagttagattgagcggcatgctttgcactcagatactgctccttggcctgttgatagttaatctccacatcaccaaccttcttgttaaaccttctgggaacatgtttcaacctaagacattcgtaatgaatagccagtaaacctgttgcttgaatcagctgaacccaactgtccaaaacagcttttttgaaatcatcatgatcagtccaatggttatagaacctaaaaggtttaataccagtgtatagtatgataacagacgaaacaatgcaagaacaatggtcagataatgtctcccaactcatgttaacaaaagcattagcaaacatatctaaccactcttcatttttgaaaacatgatctattctagaataaattctatccttccctccttggttgttagaccatgtaaagtgggaccccattttcctcaagtcatctaccaaacccaagggtaaccaattattggcgtcttctatttatcatctagtaatcaaattccccccactcctatctccaaaatcagtgaccgcattgaaatctcccattatgatccatggtttggacataatagaaagattagtcaagctacttcataatattttccgatctcccaaccccccccattagctgttggaaattattttacnnnnnnnnnnnnnnnnctcacaagtatgttgtttaacagcctaaatatgaactttcta

SEQ ID NO: 20290 - DNA, 5194 bp, Cannabis sativa
aacaactattgtgaaatatttatgatgatttgagtaatgaaaaagtatacatatatatctattagtttcaacgttttttaaaccgttagaatactacttttttcacccaaagtaaaacaattgccttatcttcttactttagataaagagaaaagtcagaaagaagataataagggaagagttttggttgggtcgtaatcgtatctaatctaatgttatatacttttttcaacctcatacaaacgttacataataaaattatcaaaaagcagtataataagtgtatcataaaaacttttgagccctttttttattttgatatcattattgtgataataatgtttcaattcaaagttgctactatgatgaataatctgcatatgcaaataattatatgaacagagtagtatatatctggagaagaagaaactagtaactgccattcatctcaaccgacaactattttattttctatataaatatatatatatatatttgtattatattatataatgatataatggccttcgaaataaacacatacatgataaaataatgtggtacatacaggacagctataatttaatgcgtttttaaatacttgataggacatggttgaaatagtatttggaatccaatattgcacttaataataatttggattcacaaaattaatttacaccattatatatatacatatataaatatataaaggagtagaagtagaattgagaagtgagaattacgtatattccaccgctgaaaaaatacagtacgtagcatttaattaatattagttttttcatgaacaaagtgatgttcttattaacttcagatgaatatatctatatatatatacatatcaagttttgagtacttcattcatacatatataccctttaaatttaaagatgtgggtgattattaattattcatcatattttagaattattgttcagttactcatgagctactctcaccaaacatgaagaaaattagaaaatgttgtatatggaggatcttatgacaatgatatatctccaatgtgaataatttagattatgatttgacatgttttaaagaaaacagagaattgcatgtcataatctaattaaatctgttctcttcttaaattccgtaattagtatattaattgttttttggggttatgtaattgaatttgaacattatataataaaacgtagccgttatcctttcgctttctttgttaataatatgtgtacctcaccaaatttatgttctgataatgatatgctaaatataatttagtaataataagtatatataagtagtgttgttgagattaaaaatcatgaaattaatactaattggctctcacttttcctttggtgattgtgagattaaaaatcatgaaatttgatcaattgcattttaaacaattttatttttttcataataaaacaatagattacgtggtgcgcgagtatttttccattctttcggtaacttaactacaagaattcacacctaataatattcttctaactgagttattgttatatacaacataatttctcttatgtgatgagattcgaactcttgacctaaataaaaataatataagaagatcatctagcagtttctgtctcccactacatttacattacacaaccaccattactcattcatacccttcattagtctctatttcaattattaatgaacaaatttcactaaaagtcaccattttgtacacatacccatcattctagtgtttatattcttccaatacttttgattcaattagtgtctaaaactctagggagggacaccaaagcctccaccgtcattttgactttgcatataaatgaaatgaaatctctttagccttttttctattgttgggtgttgtaaaggctacaaaatgagctaatatccatgaaatttcccactcatccaaaaaaaaaaaattgtgttccataacgttatgtggatttttcaattaaacaaaataagagcaaagccagggcaacagctgtctcatatggtttctttcttttataatctcacacatgagaaaggatgactctttggaccacctcaccgtcctcatattttggcattttttcaatgcttatagatgatgtgttgttttaaagaaaaatgaaaaaaaaaaaaaaaaaaaattgtttctacttgactactaaaaaaaataatgattaaaccaactaacatgcattaattataatatgtagtagtatcgatatattattattatcaaccacataatagtaacactttagcttaaatcattcttgcattaattgcaattggtcttcctattattgaggaagccaaattaaaatttaccaaatattatataatatctatcataaaaaaaaaaacataagttaataaatttcttatcaatcaaaaccaaaaaaaaaggcattacttaatatgctaaaaaaggttgggacttggggactaacttgaagtcgagccattggctaagctttcttaagccatttggttcgaacccaaatcagataagagtgagctaaattatttgtgaaagtgaataattaatcagccactgcccaggtcatatcattttggaaaatccaatggcaaacctcgatccgacccggacccgacccgagtgagagaaaagctccatgagttgggctccatgaagatgtatccaaatgacagatggcaacaccgtggttaatcttagccttagaattcgggtccaaaatatccgcttggtaaacccgaaccttagggacagagtggcagtaatacagtaaataagggaacaagctctggtgacaagagactgactgcgttactttcccaccgttgattcctttgaccgaaccaatcaagatgtttttctttgacccgttgacgttttcggttgtccgaacgacgacgtttcgtcccaataccgacgtggcaaaatcgatcatgtcttcaacagatgaaacgcaccgtttcgtctcaccagcgcttggtgccctctcgcactctgagagtgtctctttcatcattctctccatcgatgaattgtcggcggctttgaaaatcgtcttcagctcgaccagtttcgatgtcgaaaatggtaattttgaggtaattgttcggggcaaaaacgacctttcaggcatcttatctctaatatcaggcattggcataacaacccctttctttaaattcgattcgcgaaagaatttacccggttcgacccatttatttaccaatttgccactgacttccgccattgttgttacagaagctttgcctggacctgagctcaccttcgtgtagctactgaatgtgataccctctttctctgcgtactccttgaatgtattgttcacgccgtagatcttgaacccgattgactgacccgttgctccttttccgtacccggtgaatttatcagttccttcgttgaaagatttaccgtaattgttgaaattgatctgttctgcgtttgaagatttcccgtacgagtcgaatgagtcgtcacccacgttggattgagctctgtagtttgagaatttctcttctactgcgtttcctccgtcgccgtagtttctgaaattgttttggggattgttactgtcttttccgtagttagtgaacgtgtgttttccgccattggaggtctggtcgtagctcgagaatccagacccaatcacattggcactcgttccgtaacccgtgaactcgttctgtgccccatttccattcttggaatagctagcgaaagattggtcaccggcgttggcgttctcactgtaccctttgaatgtttggtgccggccgttaacatcgtcggagtaagaagtgaatttgagatttgggacattaactgaatcggcatatttgctaaaatctccggctccacctatggaatgagcaccgtaagtgttgaaactctggtctacaacattgccatcggaaccgtaattgttaaatttgtcggagtgacccagtgagtcacgactgtaccggcggaaagaatcgacggggatgttttctccgggagagtagtttttgaactggtcggatcccccttgccgatccgttccgtaattagtgaagttcttgttggcatagccggcaaagttggaatctttgtcgtgcttctcgagactgggagccaaatcgggaaaacagagaaggtgggcagaggagcaaaactccggtaggcgcgtggcgagtgagttttgggaaacgagttttgcaaaaatggccgaatcagtagctgtgagaggagaagcctttgagagaagaaacgatggcttttccaagttgtttcggatctctttgttccagtaacgattcaaataagcctgtggggaaaatgggttttcttctccggcaagaacaacctgcattggccataacactcagttatatatatataatactcatatacatacaaaaaaaagattaataagagatgatattatgaaaagacttacattcagatatgatgatgagatgatgaagaagaagaagataaagagaacaagagtcacaggtctctcattgaactgaaaaaatttcatttttaattttaaattttttatatttttgaaaaaatgaaagaaagaaaagagagaatgttggtgcatttgttgggttgtaacaaggattttatattgtgagtgtgagtgaagagagttaaaagagaatcgggaaggagtgagtgagttagtgtgtgcgtgcgattttcaaatgggtttggggctttgggcctttttttaggaaataaataaataaaataaagagtagtgttagcctgaatttctattataatattttagttaattttttatttgaaaatatatattgtgtttttttttttttttttgtaagtggtgctatttgttaggtttataatatcatctttataaaattttgaataatttacactgttaaaaatacgtttgaattttttgaacatacttaacaaattgaaatatcagaaactctatgttcagcattgtaaactgttcgaaatttttcaaaaatttacaaggatgatacggtgagtataacgaagaccgttatgaaaaaaattaaaaaataatattccaacatgtaattggagattgataaataattgtaataaaatattgtaattaatactcaataaatgaactgttcttgctttgaaactaagtaaaaagaa

SEQ ID NO: 20291 - DNA, 2945 bp, Cannabis sativa
tgagaataaaatctatcaaacctatacataaactaaaatgtagcacatgtagtctttgtaagtgtagagaaattctattcgacattgttcagtgagaccgctttcatttatcatatatctcggcaatgccaccaaatgaagaccatatctgtaattgaatagcaaagaagagaacattcacctatccaaacgacaaatttgaccagtagtagctctgttgagtgtttttttaatggctgatttccacgcaaaagggaaagaaccaccctgttgaaaacatccaatccaaaccatcaatgctcaacaagataaggaaagcaacaacttacataattcaacattcgaaagaagaaagcttacccagccaaaactcctagataagtcatttcctgtaccaagtggaattattcctacgggaggaactggatttcgactctgtttgtttagttctccaagacatcctaatacccaaccaaccgtaccatcaccgcctgcaacctggccaatcatcacaatcaaaaattgacgatatcctaaacgccaaacttaaaacatcaagtgaaaaattgtcaacaacatcacttccactaatgtcataccataactctcatcttttcacgacactctttggcacaggagtcaccaagttgagccaacagttcgaggcaacccagtccataacggacaaattcgtgaggcttcacatctgataggtcaaaaacctgcattaaatttttattttgccaattcaaaaaacgcccaagaacaaagaaacaaaatctaaaactggaaaagtaggttcacagagcaaagaaaagaacaaaaattccaagacttcacataatattggaaaacattcagtgcacagttggtttcaagttttccaaaactacttaaatacagaaatcaacacacatatagacctgtactgagaaaccccatcagaaatgaaatgaaaaaagtaggtgaactgaacacgtaaaatgtgcctcaaattggattgtgcaagattctaattgagaaactacaaaacaacaagcctcaaaataagaaagtcatgataaattctgtctcatacataaaacaactaactaacaaatatgacagaacaattcctagaagtaccaaaacatcactactccacagtctcaaacccatcattgttcatactacgatcccttaagcaactgaaacaaacatcaaaattcaaaactacatacacgtgcctacatgcatttccaaagtaaaaaaccaacctttttaccaaaaaaacaaaaacaaaaccggaactttcttattggttggtttacaaaattgggttttaagaaataaaatcaaaaaaacccaatttccatcgaaaatcgtgagaatgttttcacactcaaactcaaacaaacaaacaaacaaagagcaaacctgttcttcccccattaactgttgaagcctctccttaagcataggcccatggcgaccaccgctacgagaattaataaaaaccaccataggacacaaaggcgaatgctttaactcctcaaccccaaccccatcaccatcaccatcgccggcggcagctatagaggaatcagcatcgccgcgttcttggagacgagtctcaccggcggtagggtctttaaacctaatagagtcacgcatagcgagacgcaagtatcgaggcatgaaaagcttcttcttcaaatcctccttatcaatcctcatcccactcagtccacaacccctaaacgagtcaatcatcgatgacctcgccgcgatccgggtcgggtactcgccggccttcggcggcgagcccattgtccccctctgagaaaaactttatttttttttatttttgtaaaaaatcaaaagcccatctttctcaaaaaaaaaaaaacccaaaaatccaaaaatcacatcataatcatcatcatattatatatatatataactgtaccgtatacgatctatacgtataagttgtaatatgtaataatacataataaatgtaataatgaataattaattaattctagatagaggacagttcgccctggaaatttggcctttgaattttttaaatattttttaaatattatttttaaatattatttaaatattatttttaaatattattttttttaattttaattttaattttaattttggcggcggttacactctctgaaaaataattttttaatattaaatcaaaaatgaaaatgttttttttttcttcggaaccgaatcttaagtcaggtccgcgtgttttactttgtttttacgaaaatacccttgattataatttttatttacagaaatgccagtgagtggtgctttttcttttttaatgtcaatctggcataattaaattttgaagattcgaatctccaactaaaaacagctactaactactcaattctctctttttattattattattattattataattgatttgagtgtgtttagggtataagaattacgtgttgagaaataaaagaattctctttaaaaaaaaatgtgttcaaaataaaaataaaagaatattgcctcattgatttgtgtgtttgaaaattcattatatgtatatagaaagataatccaaaattttaattaaaaaataaaaactttatgataagttatctaaaagtatttttttttggtacgtgatttatctaaaagtattaaataaattaaataactagaaaagttgaataattactgcatggagaatgtttacataatagttgaatctatttaattaataaattatctattacttttttttgaaaaaaaattaaagatagtaagttaccttcttgagaatggtttataatattttataaaatttattatattcattatataacgtttaatacttaattacactaataataatataatttaaattacattaattaataaaaatatataattaagagtaaacgagt

SEQ ID NO: 20292 - DNA, 2960 bp, Cannabis sativa
gattgttgatcgatgccaaggattaccacttgcagtggtagtcatagcaggtcttttatcaactaaacccaaggttgctgatgattggaagaaactactcacaagtctaagctcggagttggaatgtaatgaacatctcacaagcataacaaaaatcttgtctcttagctacaatgatctaccttattatctcaaatgttgcttcttgtatgtcggttatttcccagaggactactctattagaagcggaagactcattcgacagtggatagctgaaggcttcgtgaaatcaaagagggataagacactggaggtaactgctcaagaatacttggtagaactaataaatagaaatcttattcaagtgtcggaggaaactgttactggaaaagctaagacttgtcgtattcatgatcttctgcgagacattatcctaaaaaatatggcagaattagacttttgtcaaatttttgctagaaatgattcgaactgcaagatattaagtcgacgcatgtcagatatcaatggtggatcttatgaatctattcaaagcaatgctccagaacttgcccaagtgcgagctctttttatatttgatggaggagaattgcctaatagtgttgtatgtgctatctccactaattttaagctcctaaaagttcttgactttgaagatgcgccaaatttagatcaccttccgaagaatatcggaagcctctttcacttgaaatacttgagcattcgtgacacaaaggtcgcagagttaccaaaatcaattggaaagttagaacatttagagactttggatctgaagcggtcactagtggttgagttaccgattgagattaagaagcttaaaaagttgcgacatcttcttgcttaccgtgatgaatatagggatgatgttctgtattttaattcgcaaaaaggagcaaaagttaataaaggaattgggcagttaaaaggtttgcaaaatttatatcgtattgaggttaatgttgttggatttaacatctttgaagagttgaaaaatttgactgggttgagaaagataggcatcactatgttgagaagtgaagataacaatgaattgtgtgattctattcagaagatgattcaccttgaatgcatttcgatccattccaaaagtgaaagtgatataattgatttggaatctctttcttccccacctcaatatcttcaacgcctcttcttatatggacctttgaggaagttacccaattggattacaaaacttaataatactgttaagatttgtctacgatggtcgaaactggaagttgatccactgaatgtgcttcaaagtctttacaatcttctggaattgggactttcatttgatgcatattgtggagagaaacttcagtttgagcaaggagggtttccgaaccttaagaaacttgatctcttttcattgagtaaattgagtttgatagaaattaaagaagaagcattatgtaatcttgaaacgttgcagatcaagtattgcccacaactaaaggaggtgtcatgtggattccaacaattaacaaagcttaagaatgttgatttggaagaattgccgacaactttcatggtgttccaaaattttaacatcttccaaagtgctggaccacacattcactttgattacagagtcgatggagaatggcagtggtgtcaattggaatggttgacacctatctttgagtcgatacgaggtaataagacagacgtacagtgttatttttagattttgagtaaaatatgtttcatatatatatatatatatatatatatttatttggtatctaataactttacattaataatatgtttatttttatttcacacaggatttgaattggactgggactccattccttttgacaacataatgagtaagattaattttattcggttcatttattattttaatcattcagattaattatttaactttatgttattttgctataggagagattttagagtacgactttgatgtaagtgtagtggttgaccagattagtaagtggttgcatcccaacactgcaggtataataaatatgcattctaattaatatctaattattaaatcatttctaaaatattttagtttcgtggagatattattaatttcttttattactcttgtttgttcttgctcctaattaaaattggtgaattcatctaccaatttttgtatgaatattaattatttaataaaacatgaattcattcctttgttgtcttttattttttatacaatatatttcacatgatatatataactataaacttgcaattgatatatataaatttattatggtgttgtcatcatacatattgattatttctttaatttggaaaatcatttagtagcaaaaaataaaagtcactggttttctgatatttgacttctctctttcttcatttcgtggaataataagtaactaaattttgttttctgatatatacaaatatatttaaatatatatatgttaggtggatgttcaaatgataacaaattgtaaagatagagtccagtactatcaatagaaagaaatcttgacagttataagttttcattttctatgcatgacaagtaattattttactaaataattcattaatgattaattttatctgattatttttctaaatatattatttttgcagggagagatgatgagagaaggtcactccctaatgagctgaggagtttagctagctagcactccaattctcatatttgagatattaataatgaaagacagaattatgtttattaatttattatcaactctatttgtgctttgatttgctatgtataataaagctatatagaatgtttcgattttcacaccctttagcttccctttttataaataggggtgaaaaaacagcctctaaaagctaacattgtagtagtggtgtagccaaaaactatttgtgga

SEQ ID NO: 20293 - DNA, 6038 bp, Cannabis sativa
cacttgcgtatctaattttaacacaacagttgctcaagctttgttgtatttgtgatagtttaattattggcgatagtccaaaccgcaaaaactgcattgcatcgcactattttttgcgatgcgatttctgcagttttttaattttgcggtgtgggtgcggtttgggaaattagaaaaaccgcatctgagggttggtttgaaaaaatggtcataaactacaccacccgcaccgcgaacacccctaaaacatgaagaacgtgtttgatgagttcttaaaaaaacacacgtttagatttgacatgcaccctggccggccatgggggtcttgttcaagacctggccagccatgggtcttcatcatggggtcaggctggccatagggggtatcccaaaggctggccatccaatgcctaggcatagggtttctaatcgcccttcatggctgggcatagggtccttggtcagcccttggctgggtcatgagacctagtcatccctctcttagcttgggaaccctggtcaaccaaggccaaggttccaagcgagcgaccaagtattttgtcctcttttaacatcgacatgggtctcgtgatgcccttttaggcatatacaagtttaatctcatgcgtggctcccttgggagctttgtataagattttgtagtgagtccattatagttgaatgcataacttaggactcaccatttgtctaagtaggtaaacttgagacagtacttcgctgatacccagtcttgtacaatgtaatttatctggcaagtacccttaggtatgattggccaaaactttgtctgtatcttgtagctttgtcaagttgttcacctcctcttgtctcttctatgtaggtgatttcaagtgttggtctggggaggtgacaactgctttgtcataggtccagtcagtcttacttttgagagataacatccaatttgtcctcttttcacttgttgagtaatctctggactgatagtgatacactatgtctagaactaagcggtcgtacgatagtgcaccaccatctgatcctcatgttgtcagggtggcatcgatgggtagggttggcatagtggaggaggccacacaacctctcgataatagagatccaagagtcagccaaatagagatgcttatggttgaccagggtattgagagtccaaacaacaagtccgaggtggaggaggttacgcctgctaggaggaggatgtataggacttgtgttgtcttctctaactatcccttgggctcatatgatgttgacaggcagccattgaacaagcttggtcaaccttcggtgataggtttagaccatgtcttggtacaggcttctgagccttaggttcttgatttcatgtcacaagggacattggtgggtctctcctccatctattatcattgttgaggctttcgataggatactggagagtggactggtgagaggcgtccagtgtaagatgcctttgagggatcagcaagcgcactgaatggcctttagttggatggcatggttggagcgccacctccagtagggggcagtgctgcctttacacccatattttagagacataatcgcttactttgggatgtgtcccacacaaatcaccctaaaaagtattaaatacctctcaacaatatttgttctctatacggagctaggttagcttgagcctactccgtataagattaggtattattttaatttgaagtctgctccaaagcgaaaccggacaaggtacttttacttcagccaagtcagctaccagtggttgggtgacaccaatagcacgcctctgtcgaaagttggtggatatgcttagaattacttcattgcctgggatgtctaggaggtccgacatcattattttaagtgagtgcctaactacacgtgctctatctctactctgcagatgagggatagagcttaccacatcctatccctccccgtagagaagaggaatataataaggttggcaagtgtagctaactttcaaaaatatggcatgtaccctcctgcttctagagttatggaggtcgagggcccatcaggtggtgtagatggagccccaaccgctaaggagatcagcctaggtggtgggcatgctcccgacatggatgatgatgtgcctctatcccaaatagcctgggacttagagaagagagagggccctctgccaattcttggctcgtgggggcaccgttcgggatgctactttacggatcaagcccagaggctagagttctgttgggcctacttgccccttgcctacatttagaggcaaagacaaggcagccattggagattcaaatgattcctcttctggggatgatggtatttgattattaattgcactatcttttatattcttgtcttgcattgaatatttgcaacttttattctaactttgttactttcttcttgcagatatgtcttctagattcaaaggtttagctagtggaccttcaaatgagcctacaggtggcccgaaggccaaggtggcctggaccacccattttgataacgttgttgggtcatcttttccttttcctcctcttgggactgcgccagctgggcagcctatgatagatgaccctccattgaggagagatcgcccttcgggtaggggtgcctaaaagcctagtcggggagcaggttcagccatggggcatagagccatggaggcaatttgcaggcatttggacagagcccttcctactgttgataacgagttgcaagagcttggtaacgacgagctagagaggctctcttctgtcggtcttccagagttggcctcagtaagttgcacatttaactttactcactttttgtgttattttaggctagtcggccataagggttgttgtatgaagctggtcagccattgtagtatctttgaaaggctggccagccttagtagcaccgtagaggggctggccggctagtggagtcttctggcactaatctttgccttgttttatttttaggcctttatgaagcttagcttttcacatggcaactctagggggtcctcaagtgctctctaggagtaggtaaagaccctagaggctaagctcctggcgaggggtaaggttgtgaccgatttggaggctcttgctcaacaaattcgggacataacttttggtttagagcttatgcttaacagcagtaattaagagaatacctcactcgttgttgacaactccaggttacagactgaactcagaagaagtgaggagaagatgaaggctaccctttatggccagcaggacataaaggacaagtatgttggcttatctttagagctcatctacgagttcaagctacgcaaccccagagctaatctttcttacatgggggatgcttctttcatggaaagcacactgacctaagggaaagcactgtatgagagcaggttagaagcagaccagatcatcatccagccagatggatcgtcattggggcagtacaatgaggagatggtcgatccacctgattaatggtgaaaaatgcacatttcttgatcttaaagtttaaaataaataaaatttaaattaattttttcatggaattaatagaatatatttttatattgaaaaatttttatttgaatttaatttattgttattttgtaagaattagtattgttgttgaagaaaataaggaaaaaaaagagaaatcaagtagcaaaatttaaaagaaaagaaaagaagaaaggagcaaagaagcccaagaggagaagcccatcagcccatccacccattccaacccaagttgtggaccttttttgttgcgtgagcgccttagtggctctctcccattcgttatcagaagtctcgtcaacgcctaagtggcgcctcttccttcccttcagctctccacgtgtacgccacttgtcttccccccattggctctgctgctctctcctgctccagcacgtggagctgctgcctgcttcctccaatcttcacacaaggcatcccatacttgcatgatatatcaaatatcaatcacctaaatctttcactcctattatcaaccatgcttattttgcatttattatttgtcattgttacctgcaatcgagatctccaattaatgcaactccatttcgcatgcgatatgcaatctcctcccacagtcttccctatttttttttccttttttacccttatcccatgatcactaagcatttacttcttgtcactccccaacttgaccgtgacccccatttattatgttttcagaaaacgattggtttctctcctccctgggttcattttgtgtagacccaaatcatcatgacagtaggctggagtagatttgatctagaggttgctacgcttgatatgacatctcttcgccttctctcttcttcaccaagtttttccaagtatctttcttattaaatatatatatatatattgctttttgcttttttcgccccacacccctctatctgcctgctatcttctctactgtctggtatttctttgtgcaaccttgtcaacatgtctgccacttctgataaccctaacctcaccatccatatcactgaagaggaagcccttgttcatgaattcgatcatgtttccataatccggctccagttgcttagttgtcaaaattttatccactaaaaccatcaagcccgattagattagcaatgcgattaaggaggcttggataactcattttcctttcactgttttggattatcattctggcctttttttattcggtttggttgcaaaggtgatggggtcagccctgacattttgacatatccttcatgctctttgccatccttgatggttttgacactatcctcccttcccagctccgttacatccccctctggatgcaagttcattttattccatttgggaatcgatcttatggtcttgcccagttcattgctgatgccataggtgatcttatggaggtccatctctcatccctttactactccataaccccttttatgcgacttcgtgttctccttgacactaccaaaccccttcataggggtatgaatgtttgatttaggaaattagccattactaaatggcttaaattcctttatgagggaatccaaaattactgctaccattgtggtaaacttgaccacacctacaccaaatatgaccatttcctgcagcactgtgatacttacgcctaccctccttccctgagctacaaagatactcttaaggcacctcctaaatttgtctacaaaaagagtatttttgagctatccacctttatttcgtttgaggagcagccatttttttcaaaccatgttagccaaggcttttatgaaattatttatcaagtccttgtcccaagtattggtaatgcgactcttgcccaggccccttctcttattattcgcccgagccccatctccttaaaccattcctcccaaatggaccatatccctactgttactactcagactactacggtgcttattcatgcacctattgcttctgctcctatcatgactaccactgttgtgattgctacttctaaaggtaaggagtccatgtatcctgaaccctctaaaggctccaaccttttcaccccggtctctcttgtcgaggttacaactgaccctaactctagaactaaacgatccttcactagacttaattgtcaggttggatcctccgtccgaagcatgctcaaacgggctcggtcctccaactctgacttccttgttgtcccatccatgtctgacactgaagaacaggcaggtgttgctcagtaaccccgcccagaaaaatgagtctcatcagttggaattagggatgcacacggggcggggaattagcgaagagtgctctccccgtccccatccccgttaaggattttaatccccatccccgcttattcctcatcggggacggggcggggacgggacgggtaatcccctattgtaaaataaattttattttaaaaatttaaatgtataaaattattaaattacataaaagataaaatattacatattatttactattcaa

SEQ ID NO: 20294 - DNA, 5445 bp, Cannabis sativa
  modified_base (3751)..(3752): a, c, t, g, unknown or other
tagtgacaaggtgaattaaatagaatcaggagtcattgtagcacttgagttttttcttttaatcaatatggcaatatttttaaagttgttgattgttttaataacgaggtttcttcaatagacacaattttgacattaatttatccacaaattctaaatctttggatgaaacttaatctaaaggttcaaattaaaatatatattaataaaaaaaaaatatagtgaaagcaaaaataaagaaaatgaatttaagtagtgtttggttgacaggaataaacatataggaatatgaatgagaattagaataagaatggaataaaatttaaaatgcataaaaaatttgataagaaaatgattaatttttttctctgttatattagaatgatctttcttttctttttaaaatggaatagttattctaccaaaatggtagaaagggcattctattagaatgacattctaataatttaaaatgtaaccaaataaatgaataaaataaaaattgtttcatttccattctattacttttcattacttccaaccaaatgtgatcttagtttttgttttttttttcttatgtgactaaaatataaaaaattgcattggtgtttcatggttcaaacacaaatacaatttgcattggctgataaaataaaataaaacaaatttgtttttaaaaaatgtgattaatttgcattttctatcaagaataattaaaattcgcatacctaatgaatatctcccatgaaacgagacagaaacaataaggtctcaatcatattatgtgcaattcataaagaaagtaatccaaaaatataacatgaacaaaaaaaaaattaatctcaaaatttcaatatgaagcattataattattaaacaaatgaaaactactcttttggaccaataaaatgtatttttatttcatttttaagtatttaaataatctttaaataaaaaattaaaaattaatgatttggaccaataaatgatgaaacgtaaacacttacctgacatttaacagtcaagtacctacggaagttttaaaatcttaacagaataaatttttatcgctaaaaattttattgaagtatttatctacaatcgcaagttaaacttgagtattttcaccgcatattactcttactagtatgtaaaaagcataattcattattcaaaaataaaatatatgtaaaagcataattttttttaaaaaaaatacatattattttactaacattttaaattctcattaaattagtatcattttatattattatatattttagtgatatttttaaattctatcaaaattaaatttttcaaacttattatttgatggatcacttaaataaatctttagatcgctatgacgctatgcttttaaacttattcgatcattatagatcaggtgccaccggtgcaattcacagtaaatcttggacgcctctcctaattagggggtattttagaacaatcctatggtcctattaggtagcagaaacaagctgatcggtggatcactcaaataaatgtacctctttatgatgctatgctttcaaacttacttgatcgttataggtcaggacctatcaacgcaatgtgcagtaaatcttggatgcctctcctatttagggggtatttcagaatgattctacggtccaattaggtagcaaaaaattgctactcagtggatccctcaaataactatactttgctatgacgctatactttcaaacttactcgatcattatagatcagaacctaccgtcataatgtacagtaaatcttggatgcctatcctaattaggggatattttagaatgatcctacggtccaattaggtaggagaaacttgttacttagtagattactcaaataactgaacttcgctaggatgctatgctttcaaacttacttgatcattatagatcaagacctattggagcaatgtgtagtaaatcttggacgcctctcctaattgcggggtatttcagaacgatcctacaatccgattaggtagcaaaaacttgctactcggtggatcgcataaataaacatttggatcgctatgacgcgatgctttcaaacttgatcattatagactaggacctaccggcgtaatgtgcaataaatcttggacgtctttcctaagtaggagatatttcagaataatcctacggtctgattaggtagtagaaacttgctagtctgggtagatcgctcaaataactgtacttcgctatgatgctatgctttcaaacttactttatcattatatatcaagacctatcgatgcaatgagcagtaaattttggacgcctaccctaattaagaggtatttcagaataatcttatggtccggttaggtagcagaaacttgctactcggaggatcgctcaaataactgtactttgctatgacgttatgttttcaaacttactcgattgttatagatcaggacctaccggcacaatgtgcagtaaagcttggatgcctctcctaattaggaggtattttagaatgatcctacaatccgattaggtagcagaaacttgctactcgatggattgctcaaattactgtactttgctgtgacgctaagcttcaaacttactcgatcgttatagattaggtagcaaaaacttagtacttggtagatcgcttaaataaacatttggattgctatgatgctatgctttcaaacttattcgatcgttatagatcaagacttacaggcgcaatgtgcaacaaatcttagacgcctctcctacttaaggggtatttcgaaacaatcctacgatcctattaggtagcagaaacttgctgctcggtagatcgctcaaataattgtacctctctatgacgctatgctttcaaacttactcaatcgttatagatcaggacctaccgacgcaatgtgcagtaaatcttggatgcctcttctaattaggggtatttcagaatgatcctacgatccaattaggtagaaaaaaaattactactcggtggatcgctcaaataactatacttcgctatgacactatgctttcaaacttactcgatcattataaatcaggacctaccggcgtaatgtacagtaaagacttaatgtcgccattttccgtgatcgagttgtatttagttatggcatagtcgctcaagactttcaaggggaactagtgatgactaagttgaacaattttactattataggcgttttgaatttagctaaagcaattagtataaaaaaaacgctaagctggattaaacttaactatggcaaaaagtgaaactggaatcaaattacttggtagcaatacaagctattcaaaactcattactattctcaactatgacagaaagtgaaattggaatcaaattacttggtagcaataaagctattcaaaattcattactattctttcttcttttagagttattatagaagattgtcgtaaattttttacatctttaaacaatattttcttatttttttattaaactaatatagttgcacatagacttgttagagcatcctgttctttttcaaatcgagtgctcaacaggggtgatatttctcttgagttacagtcttgtatttaggcaatttgacaaattaataaaatttctatatttactttaaaaaaaatagctttgctgctaattttcttaaatttattaatctcagaaactaactaaaagttatgttaaaacaagaatcctttgttagaaaaaaaataatatatatatnnatatatatataaataaatatattacctaaagcacaatatataataccaactcgctttatttaagtaacttggccaaatcatttaacttttgttcctgttgttgaagcctctccttcagttcttgaatgctagctgatttggtgaacgttgatatcttaggcttcaaagtattataaaaaaaacaaagtagacatataatcattctccatacaatattattaattgaactcatcaaaaatttaactgaagttaaaatacttacaattctctcttgatgatcatcaagtaactctccttttaccatattcatcccttgtcgttcttgttgttgtttcctcatagttgtcgtctcccatgcggcggttaatctcttggcaacaaacccttgccaatcttcaaggtttatccactttgcgtatgactcgggtggataggtaagaagttcagaagcaacgtctttgtacttatcaatcaaatctctagtgagattggtcttccaattcctccattgctccccggcttccttcaagactttcttcttcgtggttaagtttacgtctaataatgactgcataggttggcatattatcaaataacaagttttatttagtgaaattggttgtaacatttggaagaaacattttaacttaggaccgcctctttgtgagaagaaatacagcactactgaaatatgtttaaccacttatttaatgaacatattactcgagaaaagtattttaatcttgaaattaacctggatttccttccaaacaatgtatttgtgtttatatggaacatccttccatttgttgtagtttaaaggcacatgtctacgtgtcgacacatcaatgaaactctctatctccgttcccgctcctttttcaatttcttgacggccatagtgattatactcaattttcatcccgagactgtcacttctttctttgatgaaatcattgaatttcttctgcgttagttgtgatggtgtgtctattgtctttgtaccgtcatcgtcatcgtgaaataggttaatttcatctcgaggaatcgatgggttcataatcaatgtatctaagaacaaaggaaaaccaaatatataatttgcttgtggtgaaactcaagcaatctcaacaaagggttgaaatagagaattcggaaaatgtttcttacttaagcatctctaatccctataaaaataaataaataagcatctctaatctctttttatgtttgttaatcattctgttcttttaattgcacattctcgtggttacaatattgtgtcattttgttctttatattcactactcttgatcgaaattatctccatctccaaccctaaaactcataaataagatcgactttggcaccattatttcatcaacaaatgcttaaattacattctaaagaatagggttggtgattactcacaaaacacagcaacgcaactaaaaaatgacccgaaacaaatgagcttaagtaacacatttaattttcgagtcataatcaatcttctcattctctttattaaaaattatgttaaaactatgaattgtacgagtaatatttatctttatataattatgttaatttgtgttttgtttaatcgtgggttaaacatgtcagttttatatcgacgcacctattaaatatcttattgtgccatgtcgtttattaaatgttttattcacac

SEQ ID NO: 20295 - DNA, 6117 bp, Cannabis sativa
gttaaatttaacagaatattctaggtatattctgttaaaccaaaaaatgccgttagataggcacttttaatatataaagatataacattagtgtgcaatatatatatatatatttgagactgtgtattatttataataataataagaataatgtaataataataataataagacattggacattgttttccttattccaaacacaacgtaataagaaaaatatattaaataacaaatctataaatccataatgttttttttggtattctgagacatacaggattgaaaatcaatgttatttaattgtcatagcagattttaaatttgtcagtacaattttttaaatgctctccaacccaaataaattaatgataatttttttaaaatattaatttatttttccacatgttttgtattaaaaaaaacaggtaattaattccattcatgaaatacgacctctctctaaacttaattaatttatggaatataataaaggaaaacataattaaatatatataactaaattaataaacttgactttgccaagaaagatacatgtggatgaggtttcttccaaaataagtggatcaatctcttcttaattattataggctttaataatatatatatactaataattaaggtatttttatatcatgaaattactaagttagttgtatataatattatttataaatatgagtaataataatgtgatagtgggaccatatatataataagttaagtaagtaggtcaacctgtgaaatttaattgaatattgttataaataaaataatatagttgcatgaaggaatgcaatcatggtaagaaggaaagacactcagatcatcagcagcaatgggttggagttggaggggtcaccatttaagaatttaatggatataataatgtcccaactcaaatattgaatatatagcaaacaataaggttttaaatttatattgaaatggattcttattattaattatttttacagtttaggaccacatatatgcataatggattcatatatatatatatacatatatgtagttatatatcatacctatatagggttcttataactacaaataactgttaccttagtattaatgttacttttagttataacaaaatattatatttatgattaaaatataatatttaaatacaaagttattactaattttattttaattaccatgagtattgtaattaaaaacacatttaaccacaataaaattataattgttgtgactaatatttttaatcacagacattttaattataatttttttacttttagtcacaagctttgttttgattaaaagtaaggttttttataatctaagtatttgagtaagtttaaagtgcaccatctttcggtagactccttatttgtatcaaagagaattttttttttcatgatcgcatacgttatacttatttaagatcacttgtaaatttttaaaaaattacaatagactgacaagaagggtataaactataaatccaacatagggcgtggaaggtcttgatccttttgttctgggaggaatagattctcatcatattgtagcaggaaccttggatatattggcgggtctattctatcttagtgtcctcatgccccaatttttatacaaaggttatgtatcgtatgggaaatattggcaggtctattctatcttagtgtccatccgccccaacgttcatacaaaggattaccgtggcatataaattaacaaccgatattgatcaattatatttgggttgattgtttgataaatttttgtcctaagattgccaatagtgttgtgttgcacactctttggaaaaagtagcgctctctgtctctatgtctaattattatatttgtcagcctaacaaccgatcatattcaaattttagggttcgtttagaattgtgtttagaattgtattgtattatattgaattgtattttatgtaatatttttatataaaattataagtggcattaacttttatggacacctaaatatataatattttagtataaattagaagtttaatatagtattatataaaaatataatatataatccaattcaatataatacgacctaatatgacgttccaaacgagtctttagacacctttttcctcttcaaattttatccactgagtttactcttgagattctaagaggcattttcaaaaaaaaaaaccttatatacatttaatattttttttatcacaaactaaactgtaatcttaaaaaaaatccataatctttcttgttccgaaaaagaaagattacctaaatctacaaattagtttcgttttcagaaatcatagtttttgcatgcatgtgccaaaaaaacatttcaggaaaatgccaaatatattttatttgctaatctttggtacattcaagtacataaataactgattctaaatgctcttttttgactggatatcacttgagaattggaatagaaacaaaatgactgctaaaaaaaagaagttaattatttgacccttctaaattttgaagagggacaaaaatatcattggtcttatttgaaattatgacttttaatgattataaatgatgaattgtttgctatgtggatactttgatatttaatggggattacatttatatgggaatttaaattttagaactcttaaatttgattttgttgttgaaagaaagaaagaaaaaggtcataaaacattaacaaaacttcttgtagaaataaaaaaaatgataaatagaacaaaaaaacataaggagtgtaatttagtgaaatgaaacaagagtatttattgagagagtattcaaaaaatttagtgtgatgatatttaataaatgtctatgcttatgtatctgtggtgcttgggattcatttagaaaagatatacataagaatttgaatataaattgtttttttatttgtccttcggaatcaaaatacaaaatgtataaacaaccaataaccacaaaaaaataaactaatgtatttggtaaaaaagaaaagagagacaaaagtttgaccactattgaagtatatttgtgacatttgaatcctttaagttgaaaattacatttattttgttttgaaggctaaacaatctaagaatattgacttaaacataatttgcaacttgaaaagatgaaaatgaaaaataaaataatgttttcactctttcaaagataactgaatgcatctataaccatgtgttgtgtggtgtagtggtaaaaatacttttactggaatccttccttgcttatgtccaacccttcattggaagagattatacttaaccctttgagagactagctagttgtgacagaaactcctgaggtgcataccgataacttaattaagcgaaaataaagtataagacttctataattggcacatggtctccgaaattgttaaaactactgaaaggatggggaagaaatatgcaccacatgatctccttttttatttgccaaaagaaaaaaaataaaaaaaaaaaagattgcatccatgggggaaatcatcaaggtatgcttttcaattaaaatggacactaatcttatccaagctccacaagagaaagactagtgaggtcttgaaaagcagaacactcatataaaactcactaaactgcttgagtgatgtaagcttattaagtcattattaatctagtttagctaacacacaatacagctaataacctatggaaagcttaatttaaattaccttataaatttaattagaagttataggcattcaattcttttaatactaggtgggtacttctttaggataaaggtaggtgacctctgtacttgatttcttgtccagatttagtatctagaaaatgaggaagaaggttgtgagtaaacaatgctattatggtacaaggaattaagcctctctttctcaataagcaacatttccactttccactatcaaaagtgatctttcatgtctttcttcatcctcaaataatcaaaagtgcaatcctttaattaaatcatgattgtttactttaaagtataacatacaaaaaatagaggacaaagacggattattcttcacttttttaaaagaacaaaaaattataaataggagtcttagaatagcaagataattatttcagaggtaacaagtctaagccaaaaagactaaatttggtttcattgctgaattcaaataaagtcagaatttgattctttcacaataatcagtacaaaagagcaaagttaatgcatcaaaagaaaattcacaaaatgaaagtacagatacatagataggttcatgttattgtgtttttaactaaccttgaaagaagtaccaagagacagttttcatatgtaaagattactttgaggcctccaaatcctaagaagtcggtcataaaacgagcaagtagcgaccaacgagttcttgctttcttcgccatgaataggttcttctctatgccaatcagctccatatgcaagtgactcatgcttagaatatctttcaattacttcaaactcaccccctttaatattgacaatagcaaatccattatgcatacaagctgccaacaccaaacctggaacaaaagggtgatgctttattctccaaactcctcctcctaaaccaagagaaacttcattcacaggtctcgaaattgatcttacatcccaatgcctcaagttctcatcatagcttcctgtaagtagtgtgttgggatcattggggctcttggcaatacaacaaacacccattttatgtgccttggaattatgaaatgctgctttggatgtaccctcgcgtaaatcccagccactgaatttgcagtcatcagaaccagtgtacacaaaatgaggttggtggttatcaaaggaagttgtccacagttcgtaatcatgagctttccatttgtgttttagctcaacatgagactctgcaagagaggttattgccactgaaccgtcggaaagccccactgtaatgtctgttcccgaacaattccagtccaaataaaggcacattgaagaacaaacctttaaactatttttctcttccaataagaatcctgtaccaaaagttaacataaactaattataaaacagagatgacaatatatctcaaaatcaaacttccaatcgaaaactagtcaattgaacatcataaacatactttgcgatccatctgaactgctcaagagaccatgaattctcaagaaaccatcggcatcagcttgagctagtaaaggaccagagttgcccccagttgggttccattttatatcaaagattcccgcggtttcaacacaataagacgtctcaaggagacatttttcagcatcaatagtgaagagcgaaatgctccctaatcggctgggttgatcaccctcatgtaatgtgtacgttgaggctgccaaaacatggtaataaggactatgcggacaaaactcaacagcatcagtgttgccgtccagatagaaatgtgccacatccatactctaaatctgctgcaaagtacaaagcaaatacaaaataactacatataactcaaaactcatatggaaattttaccaaacaggtcactaacccaattctagaaagaatattatagacgtgttcatttagttgaaatctaaagcaatgctagtgataggacagagagttcagaatgaaattcaattaaatctttggtagctgggtggattgaaagttagatggagaaatataagtaaggtagggaccaaaacaaaaggaaatcatagacacaaaaccaaaaagagaattgaagaaacaacagtgttttctaaaaatagtcattgtgaaaatttttattcgccatataacttttaaagaaaattattagtaaaaaaactatgtttggtcgcacaaacgattaaaaattacaaccataaattagttgcacagtgtgaattcaatgtgagtattttattaatttaacatttcatttttgttagtttgacaaatttcttaaaaaaaaagaggcatttcaacaaacaccttgtgtgcacagcagctcaaataaaattaaatagaaagaaagagagtaaaaccaacctgaattgcttctttatctttgtactgcaccaagccccaga

SEQ ID NO: 20296 - DNA, 1473 bp, Cannabis sativa
  modified_base (1224)..(1244): a, c, t, g, unknown or other
aaaatcacgtaatatgcctatgctagttagggtgttacatcctccctaatgtacttctttgtgagcatttctgcttggctttgtgtgagagtagggcctctgcatacaattctgcttgttactttcttccttccttctagtttagttcccagcagagtttcatagtaagacacaaaagcatctgtaatttgttgagggtcatgaactcttgatccgtcatgttgctctattaaaaaaaatctgattctgttgaattctttgcttgatactggcatagaataaggcagtatttgagtccccattctgtacccaggcacactttgatttctgctgcagaaacaatgagtaatttctctgcacttgaacatatcgatccctcacttcctgttcagtagctagtaaaccatggtttagaggatcctgctggagttgctcttgaatactttctaattctagctttgtttttaaagtggcagcctgtagatcagaaaatcccttctgatttatatatttaaacacctgcttcaaggctttaagcctactgaccaatatgtacattttggagccatgctttgtttgtgtccaaatttcctgaagttttgaatcaaactcaggatgatttttccacattctaaagtatttaaatggcttcttaccaccatgccattgaggatacaaagttaggacaacaggtgtatgatcaaagaggccttcatttagaaaactagcttcaacagtaggatgattgtctaaccaagattgattcgccatgactttcaattttggagtagatacgatcatccccttgttgtttgttggtccaggggaaaaaactccttgttgctttaacatcttccaaatgacattgcataatacaatccatgaaatcagttgcagcttgaaatttcaccttatgcccaattctttcatccttagccaaaatatcattgaagtctcccatcaagagccaactttcttttgttgctatcccattcaaatccttccataactcttgtctccctattcgatcattgtaagcgtataacatagttaaaaaactgttgtagtgagcatctgtagtggacacttttaagtgcataagtttacttgtgcatttaagaatgttcacattatatctcaaagggttccaagctataacaattctccctcctctatgccatgcaatgatgcagaatttccatagtcttccaatctatgattgannnnnnnnnnnnnnnnnnnnngcacttctctctcacaagggatttcgaaattctctctttttttctctcgtgattcggtgtgatccaaaggcatacaaagagaagagagggggcgacaatatatagagaaaagggagaggtcaactttccaaataaacagtttcctcttttactgagtaattgattaactgccttatttggtgtgatccaccactttcctattattgctaggtttaggttagcaattact

SEQ ID NO: 20297 - DNA, 3204 bp, Cannabis sativa
  modified_base (104)..(115): a, c, t, g, unknown or other
  modified_base (2338)..(2338): a, c, t, g, unknown or other
gagagtattttgaagtgacaggggcaaaattagtacaatatttaaaaaaagaggtaaaaatgaatagactttaaaaaatagggtaaaaataaaagaggacaatnnnnnnnnnnnntagagtgtaatttcctcaaaattgggagtagtaatctcgatgtatgcaactactttaattagtactaataagtcatctccaatggtaaaactcaaatttagtattaaatcaacactaaaaaattattattttaatattaaatttcttttcaattccaattacaatagtaaaaattacactaaaatttatattctttattatgatattattttattaatataataaaaatattttaatactaaatatatataattttttaatttttttgaaaaagtagtatttaattattaaaattagggccatttatgaattttgttataatgttttggagtaaatataatgtaaaatcacattatatttagcgttttaaaagggggttgaagatgactttagcactattattggcttattgcatacttttaagttttaatgtaaatgttgttcgttattttcagctgtaaattaatattatataaaaacatatggttgatatcaaatatatttttgtatattgatattctctgcgatgttataaattaagttaaaaaaagtgtgaaaagaccaaaacttataagtaaaataatacaactaacctaattataattataataatggatctaatttatgtccaagttaaattgaattgggattggataatttataatttataatattcaagtttcaaattaaattgaatttaattggttaagatataaaactttagatatagcattgctataagtagggtgggtgtgcatcatccaattcaattcaattgaactgaaccgatccgatccaatctaattacaaaaaattggatattcaattataatttgattgaattggatggtaaaagttagattctaattggattggatccattattggatgtaaatctcaaaattcaattaaaaatcaattcaatccaattatatttatatatgttaataaattatttatataataatatatattgaaaaatataatacatatttattagattttttgtgtgtgttgaatttgtaacacttggttggtttgtttatttattttcatgatattttgttctatttaattacttaaaaatatttttgttttaattatttaaaacttttagctacattacacttgtaacaatagcatatttatgaaatattaaacttaaataaaatgtgataattagtttttacttttctttatatttttaagttaatattaaaattgtgtaattagatatcaaattaaaaaccgatctaatccaattagtaattgaattggattggattttgaggtctaattggattggatcggatgatgattttctaaattcaattactatcagattggatcaaataaggaaaaaaggttggacggatgcccactcctagctataaggtattaatgtggtatctaacactatttaaaggttgcattttgtaaataattaatgatattttataataattattaaattaaattatatgtgacttgatacttaattatactaataattatattaacaactttaaaaaaataacttttacaaaatattattaactaattatttgtagtgacaaattactcttaattgcgtttttttaattttctttctattagtttatgggactcggatcctctgtccaatttatctgtactaaattctgtctaaccaatcagatttggccacactaattaatgaattaacagccatccctttccaatatttatatttaattttaattctttaattaatatttctagaagatgatattgatcaccttatcttaaacttcactagtctttctccatccgagtcactaaaatcccagctggccaaagttacacttttaatactatattctcaaaagtgaagccctttttcaaaccacaaaatttttatagttgttctttatgactatacatatcacttctataatccaattaatagtcatcatacattaaatgaaaatgaaacactaatatttatttactttcagagaaagaccaagacttgttcataatgtagaatttatatatagagagagataagtaaccaaattaagttatcatacactcactaaaattaaaaataaaaaatagtgacaattgtttagttataacatatttttttttaaaaaattattatgtgatttttaatcacaacaaaaagttacttgtgattaaaatataacatgtaaatacaaattatcactaatttagttntagtcacaacaagtattatgattaaaaatatatttaatcacaacaaattttgatttttatgactaataatacctttagttatgaattttttagataaaatatgaaaataataatttataattagtcacaacttttttccttatagttataaattttattatatagtctctcaaatttgtactaaatagtaaaattacaagtggttttatataaatatattttttatggcttttattgtagacttcaaatgtggtagttgagttagagcactcatagtaaaatagttaaaagagttaaattaaagaataagttaaaaaaaataaaaatatatatagttaagaatttaagttaaaaaatatatacatgttgatgaattgttctagtataaaaataaaaaattataagtttatgaatagtgcttaactagtagtaagagatttttaaggcttaaaaaatatatatgtataacattttttaaaggaatgatttgaatagagcacttaaacaatagggacaagtatctatctaaatatactcttttaaagaattagtaacaatatagaagtagttagtgcatgaacaacactatttatattgtgcaaaatagcattataaaaactactaccaacaattactaataaagattagagagactacatcaataataatagaataatatatatgtataacatattattatttgtgttttataaatattatttaaataatttaaaattttgatatatacatatagtgtaatattaatgtgcataaaataaaaataaaaaatatgtgaaattttaatgtagtattttaaaaaatctttatatataaaatgttgttatctaatatttttattggtttaa

SEQ ID NO: 20298 - DNA, 1498 bp, Cannabis sativa
acgatgatgaatcttgtgcctcttcaatggctaaaaggatgcgtctttcaccccttgctgatgctagcaatccaatcatggctcaagtatagaagtttatgtacataattggtcctttttgtcattattttctagccaaagtcaagttgacatcagattttattccacttttccaggcagcctttctgtcagctttggccggtgtggaggttgccgaagctgctgctcgagctgctgtaacagccctttctgatggggattatggatcagttagaaatgatctacgatctcatatgaaaaatctcatacataacggtatgtgtggtttctctagttgaaccactaatctcatgaaatgagttatagctattttacactgtttagtgtgctgagtagaacaatgctaaatttgcagaagctgttgtgacatccaacgaaaacactgccagcgtaaatgcagccgaggtagctttggcagacgcaaaatcacaactcgagaaggaagagcaggatgttgaaagatcaatttctggaatattagaagtgcaggtgtgtaatgatttgggtacaggttggtccttactgagttttttaactgcttgctaactctcatgtaagttctgcagatgaaagagatcaaagataagatcgatcggttcgaggccttggatctgcggatggagaaagagtggcaacagttggagcttatgaaaaatatgctttttgttgatcagcttacgaatttctttcataaaggttctgtacaaaatgctggagagcgaacagaacagagtagtgtaaaaacagattgatatattgtaatggttaggtgcttttgtcctataattccttgttgtctcttatcatatcttcccagttttttcttagctagcttgtatttatctatttatgcttatttatgacctaaaatttgagaaaaattataaaaatatgtcatcacgattttttatttttttttatttttacgttttgaacatttttatttacaaaaataagcttttcaacgaaaactgttttatcaactttttgattccaaataaccatcatttggagctcttcaaatcacatacatatagctgctgaaaggaccacattctttgtaaacttgctcattttgatccatcttataaggtgttttacagatcaaattcaactattcgttttccaattcagccgaacagaatttaggagttggaatatatataaagtgtaataatgcatgagaagaaattaatgatatactaacaaaacatcttaataatgcatgaacatctcatcaaatattccatttaaaattaaagtgaaaaaagataaaagatgttcataatttttgcatgggagaagataataattaatcagttgggattccccaagaacacatgggtaagagcggttctagtatgcagagaagccttcaacaaattcaatccctgtaccatcattaaacacaaaatgcaaaaatggaggtttgcatcgt

SEQ ID NO: 20299 - DNA, 2184 bp, Cannabis sativa
  modified_base (1833)..(1833): a, c, t, g, unknown or other
tttttttttttttttttcataatgactaatgcaaatgaaagttttagattgcaatactagaggttgcatagggcaatctcataagcttctttactttaatttttaaaatatttttactaaaattttgtattttttattttacatatttacacataaatatgacacatacctatgtgctaagtcacttcaactaattatttttatttaaattggatctcacctaatgtctcacttttgtttgtaatttatatgtgcacatatcattactcaaatctaggaatatttagctaaacactactcatgaactaaaattttgggctataaaacttattcattggatgactttttaaaacacattttttttttattcttaactatatttttatctttgtagctattttacattaattattataataatatcggatcttacatatttatctatttaaattaatttaatttaaataatgtgaaattcattactaggagcacttacattaagtgagctagtactcttttcttcacaattgagaagagaaagatgaaaaaatatcaaaaaagtggcttcatcatatatgaaatattttaactcaaattttaaagaaagttactgtgtttattcatttttcaaacaatattttaataatatatttaattaatattgtatttatacttaattattatgtattaataaaataataattaattgaatgtagagaaaaaataaaaaatttaatatgcgatgtaatgtaaaagttttagaaataaaaataaaaataaaataaagtttaataaagtattttaaaaaataaattataaacgttggtagaatgttcttaattcatgtattctaaagcattgggtatcatattgttgtgtatagcaatactctttcacgatcaatcaaaagacatattattggttagagttatatcaatgtggaggaccctaattaggttaatagaagctgctaaaactagcttataactaaatatagacctacaaaagaggttattgatagatagggttagatatacacaagtagtctttgtcattagtatattatataccaattatctaaaatgaacaacaaacaaacatgacatgtgattaattatgccactaattgctaacctaataactaccaaatagctagaaaataaagaacagggcaaccattattttcatatatacatccatatgtctgacttttatatatgctttatagataagaattcagataatgaaatcctattgagcaaagggttggttaagaactaaaagcttttttttggccaatcaaataggtttcttatggaatacaaaaatatgtgaaatggatatgtgagagtagctaccacatcaataaattttgaatcttaatcatgcaaaatacaaattaaattaataatgtgaaaccttatattttttcatcttttgcttagtttgcaaaagctactatgaatagatcacaatcaataagtcaaaaagttcgatagtctaagtttatacagagatagaactaataaaatctaattatacacaatatcattaatgtatagatcaatttcattctttatcaaaaccctataactctgattgaaagcaataaattaatagaatatagtaatgatttccttttagttagaaaccaaaaagtattgaaatagatttataatgaagattttaattcaatgtatatacactataaaaatgttacttttatcagcacagtttgttactgtgcttttaccagcacatttcgcaaactgtgctggcaaaaaaatccaagttttaccaagtcatatttactgtggctaaaatctaactttnaccagcacatttacgcgctgagaaaattcatttttgccggcgtttttcattttgtgttggcaaaaattctaataccaatattgatttgccaactccttttaccagcacttcaaaagtaaatttcattttattagtgcaatactaaacttttgtcagcacaaaaatatactggcaaaagaaacatttcttatagtgataataataaaaagataactagttttttaaattttattctactttattctaatcaattttgaaacgtaccctaaaaatatatgtgtagaaattaaagaagtcccaatatgacaatataattttttttatcgtattaattaattaaattattgtatt

SEQ ID NO: 20300 - DNA, 4127 bp, Cannabis sativa
attagcaagagaattatataaatatatagattatcctcacacaattaatatcccaaggagagaaaaaaaattaaatactattttaatcttgatatcacaaaggttttatgggtgtccaagatacaaggtttgttattaatgtttgattttagtttttttgtataactttttaggtctaatttacccttttttttcagaaaaatgtggaagatggttgtgggttcttgtgttggattgatccagacccaaatgaaagacatgtgaatgatttagaaagactggctagaagggtagaagaggttgataacaaagttaaggagctgcaacttattattcagagaagagatgatgatgttgcaagaatactgaagtggatgagacatattaaatttggtgttttgatttgtgtagcaattttagttttcttttttgtgagttattaagtcaagtgcaaaatgtgacttgtgtaatttgttacaaaatgcaaaactgttaacttttttgaatgaatgtagttttatcatatttatgaagtattgaaaaaattactgctgaaagtttgttgtaaatatcctatttattcttcttgagtggagagtatacttactacttgtagtgtatattgttttggaatactaaaaataaattcttcgtaagaatatactcacacatgatttcatacaatatataaaataaaataacatccatagacctgacactctttctctaatacaatttaatgatataatttaggtctaattatatcatgaaaaaagaaaaattgtgttagatcatgtgttttttttcaatcaaaataactgtgatgaaatgtatgtgaatttgctttgtaaattaaactactattgaaagtgaataacaatttaattgagataattgaaattgaacttataactttagtatcatattagtatttaaatatgtgttccataatatgagattatctggaatgctatacacaaaagaaattcaaaatatccacttgtttttgtcacttgctgtttcaaatgctatacaaaaagtaattctaaaatgcatttcatagagcatgaaagtaatctgaaaagttgatttatactcaagcatttcagccacaaaaaaagatgtccttaaaatcttgattatgcttctttgatccttgcttcaccttgctgaaatgctatacaaaaaataattctaaaatgtatttcacagagcatgaaagtgatccaaaaagttgatataatcccaagcattccagccacaaaagaaaatgtccttaaaatcttgattatgcttctttgaacctttcttcaacaatattgatttgctacataatagaaaatatgacataccataagtccaagtaaaatagcaaaacaaattacaatagcaaaacacattacaagttcatgcaatatacctgacttggtggagttgaggaactaacagaagtatgaagtacttgatttgttggagttgaggaactaactgaagcatggggttgtggattgctatttctagcataagtcccaggatcctgaactgtgttagtttcctaccaaaaccattgcaagcattatatattaatgaactcattttagtcatctaatataattaatttagttaacaacaaaatactaaccgattttgctttattccttgcacaagttcggaagttatgccctgatataccacaaccagaacatctaatattcattcctatccttcttagtttgtgtgaatcttttggagccagttgttcaagttccacccttctacacttcttaggtctacctggttgtactttgcttaatggttttatcattcccacctttccagttctaggccattcatcttgattcctaagtggaaaaatttgattacaataggtctttaagtagtattctttggtgtgccatttactcacatacaactctggatcctctcttcttgaccatattgcagccacagcatgactacaaggaatgtcagtgagctcccatcttctacaagaacatacccagttactcaaatcaacagagtacatcccaccatacaaggtgccaacttgataaaacaagtctgatgatttctgaggcaaatgcgaacctgcttcaatcttgttcttttcaagaatggttgatatcttaggagcaatgttggtcttccacattactatagaatctctattttttgacatcctttgcatgaaatacatcccaatacgctctagcattgacaatattggtctatttctggcagccaatattgaaggagttccattaaaaccttcacacatattgttgacaagtatatcacacttaggacctgttctaaagtgtgatctaacccagtggtgcggacctgcagccattaaccatttaaaagcctcctcatttagttccttaatcttttccatggcagcttcaaatctacgaacagttggttctctagcagccttccacattagatccttcaatgtcttatccctaaacaccttgataaaattcttctctaaatgtctagcacaatgcctatgctcagcctcaggtaccccttcatcccacataccctttaaagcttgttccaaacctttttgtttgtctgtgatgaagctccaatggttcgagttttcaattttcagatccactctcaacaatttcacaaaccaactccaagagtccttattttcgatttcaacaacagcaattgcaattggaaacatttgattgtttccatctattcctactacagtaagtaactgccccggatgtacccctttaatatgacaaccatctaaaccaatgactggtctacaaccctcattgaatccctttcttagcccttcatagcatatgtacatccttttaaaacgaggcttgccattctcacctggctccgtcaaaaattcgatagtagaacctctgtttgtactcttaatctcctcaacataatcccacaaagcagcatactgctcctcgtaactgccctcaatttttcttgttgcaattagtcgacctctgtttgccttatcccttgatattttaagagtttgttccttaccaaccttttgctggaatgaagagatagttaacttgtcattcatcttgaattcatttaaatacttttcacttagccatttcgcagttgcaaatctgatttcaaaaacaaacaatagcagttagttatatacaaacaacataatgaaaaatggtaataataacaaattaagtagtgacttctagttaagtagattaagcaataataacaaattaagcagtgacttctaattcaatcttttttaaaaaagtcaaagagttgactgaagttggtattactaatgaactagaatgcccacaagttcttctattctcttccatattcacaagcagcctttggtagatcaaaatagtttcttacagaagatatatcagtgtttcatccaggcattacttcataccaattactgctccccattactaattcaatctttatctataacaatattataatattagtttttcttataatattactgctccccattcctatattggttctcattataaacagggtagtatattttccatctaaaccaagttgatcatataatatccaataaataaacaaggtagttctcaaagctgatacgcgattgtaatatataaacaaggtaatgtctatattagttttcaaagctaatctaaaacataaggatgcatttatttcatagaaatccaagaacaaattattcaattaggacaggttagcatattttcttcaatcaaaataaaatatagcatgtttaacctacatgtttgggttctttcgagagcacttgtgaacatccaaacatgttttgatgacaaatgtttgagtttcatcaactttcgaagcataacacacccaacgacatccaatagccttacattgagcctgataggccacccttaacttttgtgtatgctaggaagaataggaagggtactatggtcaacaccttaggggattgactactgctgaggtggcaaaagttgttagcttgggtgtttgtgtgagtgttttcgggcacagctttggctggaataagagaggcaggttttgtcttttgtgagtgtgaaaaattt

SEQ ID NO: 20301 - DNA, 2828 bp, Cannabis sativa
ttttttttttttttttcgatttttagattatgctcacccctaaaattaccctcaaacaatcacataactaagacataatttcaaatataataaatttgtattctttgtagatggatgtatatgtttgtgggaaaattagggcaaacttttgattagaaaagaatgaaaactattgtgaagtgatatgggtaaaattgataagatgattaaaaaaagagttaaacataataaattttaaaaaggtaaaagttaaaaataacaaattaaaagaggaatatagtgtaattttctcttgatttttcttcctgaacaatagctagggactaactggaaataaaaataaaagaatgaggagctaagaaaaaattaagaacaaaaataaaccatcaataaagaaattggcacttaggttatttacacaaaagtttaagtgaaagctagagtagtaaaaatgtcatattccatacagtaaagcagaaaatattctgagaaaaaagaagagttgtgaacaagccatgacggtagttttttatgaatttttgcaaccatttattgcattgttgcagctccctctacactaccttgcccctaacagtccaagactacataacaaaataaaccgtgtggaacatgtttgactgagttaacatatagttcatacatatatctatcagggaatactatttatattgtgagtgtcccttatcttatatttgagtattatttgtatctgtctcaatagatgaacatgcagctgacattcttttaggaatacagtctcggatatataatatttcttgtaagacaataagattcactccatcgaaaaatgatagttagtggtcaatttggtctcaaaagaaacttgtcaggctagaataaggatagtgtgatctaactaattaattaaagctggcagcaaagatgtttaagagaaacttgtcaagctaaaataagcaaacaaagtcttgactcttgacagattcaaacaaaacaaaatgacaccaatagaaatagaactccagtcattaccaaccacatctctacatcctaaagctgctagaaaaaggagtgacatattagcaatagtgaataaagtttactggtcctgctaaagctcagaggctagaggtggtgttttccttcaagtccattctcaaaatgctccctcgtagataaagaaccagctaacaatcaatgcagtcatatagtaaattataaatgttaatacagaaaaatcacaaactaaacatagagacgaggtaactgctgcttctaagacaagagagaggcttctaatcactactacagtaatcccaccaattgctacaagttaagcaaaaaatgaaaacacaatggaagaaaaaaacatttctaagttaaagaaaaataaaatgaaaaaaacatgtaccgttacatgtcgtaatcacttgaggagaagctgatgttatcattatcggattcactaccagtgtaattaacccatggtctttcatccggggcaagatagttcttgaaccatgcatcatcgaacatttcagctgggaggccaacagcttcttttcttaaatttggaacaacatcatcactgatcacttctgcctcaccatattggtgaacaagacttttcattgcaatgtcatcaatttgttcattccattgaaaattacaagaattgaggtcatcatccgcattgtcatccttatcaacttccattttgctactcgtctcatgaacatcccaaaacagtctgggtctcactttttgggcatacttcaacccgaaattgccattgagataaattgtttgctctgcatcttttgcaagtacaaacgcagtgtcataagtaactttgacacggatctgagtgatattgcatttactaggtgttccagcctctgggtctgtgtcaaaccatttagctttgaacaaaacaactcggtgaccaaatgaatatttcaactcccacacgttgcataaactaccatagcactccgcaaccttaccttcactttctgaaatagaatacaaaccactattctgagcaattctatggctatctttctcttcagtaagaaatcttactcctccaactacgcagccagagtaggtatttatctcaaaatcaggtccaatagctaatgagaaaagctcatctgagaccttcgttggctcagtttgacgcaaccgtttcacctaaatatatacatatatatatatatgttatttatagtataagcaatattaagaaaaatattcaagtcaggaaaagtacaaatagtgactaacatgattcgccaaccatgcaggaaattcttcattatgcctttcttctaagttgacatcagatattgccttcaattccttcttatgctctctgaaaactaattgattaggatcattttgtagtaaaacaaaagttcaaggaggaaaagaagaagcaaatatatcacttacttaacataaggcactaactcgtctgataggagaagtacaaaccagtgggcctgttgcaacatttcacgagacaacttcacagatccctcgtgtccaaatggttgaacacgtggtttaacatgatgtgagaacacacgaaacgacggaagagtttgtttaggacctaaattgtcatctttttcactagaatatgtatcaatgtcatggccatatatggagcaaaatctaactgcttcattagcaatgtaagcctctacaatcgaaccttcaggctgacaattttttctcacatactttgtgagtttttcccagtttctgtcatagataagaataaaaaaattaataacatattcttcaagcaaatagaaaat

SEQ ID NO: 20302 - DNA, 1631 bp, Cannabis sativa
gattggattggatcggatactttgtgaacacccctaaaaagaagaatacagtggtaaggaaacaatcgctgtgagaaatggtaataaacttcctattcatcatattgggcttggctctctgcatactttgtttgcatctccattagtcctaaaagaaattttacatgtaccccaaattaccaaaaacctacttagcattttaaaacttatatttgacaataatgtgtatgttggattcttctctgatttgtgtcttgtgaagaacaaggaggcaaaagcaggtcgtactctaaaggaggcttaaagatgtactctataagtttacattccacattcaacatcacatcttgcttcaaatccattggcatcttgtttttttttttttttttgtcttataatttcttccaatcctaatgctgctcagcttgtagttagataaagtgtttgttcaatcaaagatagatggcataggagattaggccatccatctagtcgtgtacttgaagttgtttcaaccacaattaaaaaaatcaaaagcggttctctccgtttttgtgatgcctttaaattgggaattaatctcatacactaccatataaaaataaccctcttcgtgcatttaaacctcttgtgcatacagatctatgaggatcatctcccgtaatatctaacactaattttaggtttcatatccactttgtgaatgaatacaaccaatatacttggatctaccccttgagaaccaaatttgaggcatttaatgcttttactcagtttaaatctctggttgaaaactaatttaatttttatatcaaagcattcactcagtttttgaatgatcatggtattgagttcacacactcaagttcatatactttagctcaaaatgattgagttgaacaagacttattacattttttgctcaagcacatgttcctcaaaaaaaattggtgggatgctttaaaaacatccacttacctaattaactaattgcctactcttgttttgaaccaaaaatattaccctttgaactcagtattaattaacttttacttttgaactatttttaacctttcacctgaattgtaaaaaaaaaaataaaagaatataaaaaaaagtttaaaattctagaaatatttatatggaacaataatatatatattgtatgtacatgcatgacaaatgggatagaaaatttcatttcatgataggtcacattcttgtctccttcttggtaattgaggctagctaataaaatccaaccatttaatatttataaatacaaaataactttatatatatatatatatatttatacatacactttattcatttggtcaacaaaaacaatattagttaaattactttattgcagaaatgtctacctttcgtaccttattatattctcatgatatcagtattcagtagttagtcatctcctaagtcacaccataatatttatattaatttcaatctttctttttatctcatattattatattctatatatatatatcatccttttcagaacataaaaaaaactctttttttatttaaaaaaaaaatgaaaaagaatctattgatccttttagattatatgcatgttaattatttactataatatatatata

SEQ ID NO: 20303 - DNA, 2647 bp, Cannabis sativa
cagtccattcccgtactggtgtttcagccagaggacttcaaagatggtctcgaatgcgcggtttgcctctccgaccttgctcagggcgaaaaagctaggcttcttcccaaatgcaaccatggcttccacgtggattgtatagacatgtggttccaatcccactccacttgcccaatttgcagaaactcagtagctcaagatagctcatcctctgagttctcgagtttgtcaagggaagagactgtacggacacccttggagggtttaccttctgattcaacagagtttccgaatttccccaccaacattttgttttggggaaaccaaacccaggtaaccgctggtaacactagtttggaagagggtcctccttcttcacaaccttcttcatcatcaactccatcgtcatcgtcgtcattgactacaacaactaggccagagggtgttttggtaattgacataccgagtgagagctcacaaacgacgtcgttaggtccttcgggtagtagaatagctatggaggaggaattgaagtcgcctgtaacgacaagattaaggtcactaaaaaggcttcttagtagggagaaaagggtcaatccctgtagtcctaattctggtgaccttgaacaaggaagcagaggacagagttagaaagaaaaatgtcgtttttgagatagtgggtgtttgaattaatttactattcaattcaagccaatatatttgtacacataatttgatattgggaactatgatgccggtggtgacaagaaaatttgttgtctcaagagtgtctgataattatttttcaaatctaccatcccagattccagagctctttgaaaatgggcaaagttaacaagtaaaaaacagttgttattttgctcaatgtcattttgttcttgagaagattaggtagatgtttgagcttgagaattgagatatctcacaaaagagaaaaacagtcctttgtgtggactgccttctatacaagaagtttgtacattttttcttttcttttatttgataatagatttaccacaattgtttgaaatgaatgtatattgagaaagcaaaaaatagttggtttgtttgattttcccacttgttccttatcgtacacaatttagtttcaaccatattttgatttttattaaattgatgcgtatatattgtttgtgttgttccaatggtaatgtccccaaagtttagggaatgaaattctgcagtgtcttattctggccatagaaaaggtcctttcccatttatgatgtatatttattgatataaagaaagagaggttttgtttttctttttaaaaaatgtaaagaaagagttaatttactattaatatcttatttgcttgaccctttgtttactccaaaacggtactagctagtcagcactaatgacctaattttggataaacatatgcttgtgtctcgactttaatgaacaacattatatgcacttataaaatcaatttctatggttcttactgactataccaagttaccacagaaaaagataaaacatcatatgacaagcatgccaattaaggttgttgattaaagttgaatgcttttaaaaatttatatatatatatatatatctttcccaaaacatactcaaaaaaagtcgccaagtgggtgagatttactttgtttttcttcctcatggtgaaaattaaatcacgattgattactttccatattgacattaatagaaaattttaagatggtcgattttgatttgatgggaagtctttttcatttggtttgaaatgaaaagtaatcaatcgtgtttcaaattttcacgattgaatttcaagtgtattgtatataggcaacaagaacacaagaaaccaggaaaaacacattaaggtttcatcaaaaacactaatgactcgtataaacaagcgaactgaacttattagtgccttagtattccaaataaaaatgttcaaatgcattacaatcccagctaaggttcaaaatttagaattcaatgctaaacattatagtaaaatctaacatatttctgaatttcaaatttttctactgttccatcaaaaggaacactcgttgagatggccaaaagcaccatcatctggtgctgctatactatcatgccttataaacaggtccgtagccgttggtagaagaagaagtgctgcagccaagttggccaagacacaaatagggtaactcagtgtctgatcttcttgtagggttgaatagagtagcaataggtccggacatgggacgccgaggcttgttaactggtgcagccattccacagctataaactggtccagatgcatagcctccttttgtctttggaactctcgaattggtcacttgttcaatgtgagacttgctctttttctcacctttcaaccatggaaaaagtaaagctttccatgctttcttcttctttttcttctcattcttctcttgttccggtcctctctttccagcttcttctttattggcagaagagatctcaaagttcaactttttattgagttttgcttcttggagaaactgaccaccattgtcaaaaccaaatgacatgagaaattcactatactgattttttttttcacagttgagaaaaaagactaaagaaatagaagagaattagcaat

SEQ ID NO: 20304 - DNA, 1996 bp, Cannabis sativa
ataaatttaagatgaataataatttttttttaattactattacaaagtataatagtaatttttgtttttatttaaattactattatacttttaattactattacttttaaatattattaatttcaaccctatttccaaagaaaaagaattatgttttctaattgataaaagtaaaacggtgcgtttattaaagtctgaccttactacgtaggaattaaactattccaacaaaacgacaccgttgcgagaggaacacaacacaacacaagtctatgactatgattcttcttatagatagttgaacactgccgcttccatggcgtcttctacttcctcgcttcaaaaactgctgtgtcctctcctctgaactaaacaagctttcagcttttcggcttcagtgaaaaatggggaagaaaacgaagaagcccggaaaaggaaaagaaaaaacagagaagaaaaccgccaaagcagaggaaaagagagctcgcagagagaccaagaagctctctcccgaggacgacatcgatgccattttggtatattcattatcgtttctatactatatatttcgtttttagattaatgggtattattgaaacactttgattgatctttcttttgctgaaaattttgattattgtagtgagagttatgcatttataaaaatttaaactttgacttgaaaatcttcatatttatcatttaatgtgtcattcagaacttgctgtaacatgacatgtgtttatcaatgctgtgagtacttttgttttgggtaattgaattgacatacaaaattttcaattgatgaaagagagatggaatggagtgattttggaagaaatataacaccattttgttattgacacagttaagtatacaaaaggaggaagctaagaagaaggaagttcatgttgaggaaaatgtcccagctccttctcctcgatcaaactgtacggtaatgtccttaccttgtttgtctgtggctgtgtttttgatattttccccttaattgaaagatttcttgatgcttgtgctgtttgtgtagttgaacattaatcccttgaaagatactgaattgatcctctatgggggtgaattttacaatggcaacaaggttagttcttgaaaaaattcacaagtgtccttggtttattccttagtaattttggtttttcttattgtacatacctatgatcaactcaatttggaatatgcagacatttgtctatggtgatttgtaccggtatgacattgaaaagcaggaatggaagttaatttcgagtcctaatagtccacctccccgcagtgctcaccaagcaattgcttggaagaattatctctatatctttggtatacatgataaaaacataatattcgattttgaaatgatataagcattaggatatgtgtgaatcattatttttgcattgtgtggcattaggtggagagttcacatccccaaatcaagagaggtttcatcactacaaggtgaatcctttcatacatgtagttcattgtaaactggtttcaatgtttgaacctagctatcaaatgtttcggggtaacgagttactttgtattttggatctttaggacttttggatgcttgatctaaagacaaatcaatgggagcaacttaatttaaaagggtgtccaagtccgcggtcaggtcatcgaatggtaaatattaattttttttacctgacatttaaaatatctggaggtcttttgccagtaagtaattattatttatttatggcctttgttattttgttacaggtgctatacaagcacaagatcatcgtttttggcggcttctatgacactcttagagaagtgaggttgtttacagattttatctagtactttgttcttatcttagatggcctagtgttttttagtgtatgtatgccattataattttttatttttttaagttggtactgtcgtgaattcaattaggcaaccttaattgtaaatttgattgtcttcctcc

SEQ ID NO: 20305 - DNA, 3466 bp, Cannabis sativa
  modified_base (2724)..(2725): a, c, t, g, unknown or other
tatcccttgcgggcaagtgatcatatccgatccgcacctatacagatagtgaccatgtccactcttatacggttcaagatagtgagccatttataagaacatgggctactccactcattgccaattagttttgagatggaaccaatgattctcaacagttgggccactaatttggaatggtgctgaagatggagaatttggataatacaaaagttaaggtgaattccttagcttctgctactatttcacttatgaagattctagtttcagttgagattcactatgaatttaaaaatgttataccagaatggactttcatttgggattattatttgcttttatgtcattcttgtcaatatattttgatgaatgctatgtatctgttgattttgttttgtgcagaatcatagaccaatatatgatctatagtcctaaagcaaaatggagaaacatgactgataatttcatgtttgattttgtttattatcatttgattgttacttttttttgtccaaggactttccaattctctatttgagaaacttgcatgaagaaacagtacaagaatcccatcaaaatgcatgtcaaccccaacctcaatctttatggcttgcataatcatgatcacattatctagatttcaccaaaataaaagccgaaaatgatatgaatttaagctcagaaaggtcaagttgagatttttttttaaaaaagtatctatattcattcagttagaatctgctgaattcaacacttcaagatgagaaattggaaggagtttgaattctcactaatgtgtggccatttacggttgtattattcttgtgttcacatctcaatttgacaattcttcgatactgaaatatcagatgaaataaagaaaattctgagcaaaaatcagtaaatagtgtaaaaagttgcacttaagtcatgaagggggtgtttgttataaaagtgattttgttgggctaaaagttaattccttcatcactttataggtgatcttcgataaatattcaagtgcagctttgtcagtacaaaccaaatttcttatgtaaagatctagtaatttgggagagaaattaagatgggagctatgtgaattgtcaaactagattgatattagcctctaaaattatatatgtgacaccaaaccaacaacattcccacttacaaaattgcatcaaacataaagggtaattcaattttccacccatcccataacaaacaaccccttattctcaacacgcttaagggtttaggctttacagaagaaatgtcaagtcaactactaaaagaaaaagaaaactccaaaactcacgaacatgcttgctcactactagtgggggacctatttattgtcttttctttagtaacgtgtgaactcagttacttgttgcagcttgcaatgagtatcactaacacccttatgttcaaatcccattgatagatatataaatatatataaatattgtagatatacccttttccttattcttgtatataattctgttccaacttccaaagtcccattatcaattgctagttatagtacaaaagcattatcaaaaaagtgcacaaaatggagagaatatttacattggtggtgttggtttatctggtaatcataccaatttcaattacatcatcaatgagaattgatcctaaaacaacaacagcagctccatcttctccaatactagtttcttcatcttcatctaaggcattctcaattggtaaaaaaggtagaaatattattaagaaactcaagtgtacagactttttgaaagaggaaatggtcaccaaagttcttgaccatttaaaagcttctgatgaggtaaagaagaaattgaagataagtgccaaatttggagtttgtgtagccaataacttctgtgattgtttggttgtaccatatcaacctgtagtttatgcttgtttggctgaacttggatttaagtgcatgaaaaatgctctttcaaactcagctccataatcaaacattactactattactaccactttcaattatcaaactcgggtatgtctataaataaatattcatttagttttgtttaatgatctattgaattgatcccatgttgttttcttgcccctgatatgtaattaatcttaaccattagtccccactttaaaaattaatactttatgtttaaaatattgtagtgtgtaaattaagattgcatgtatcattactctaaaacatatggcaaattgtcattgaaatatggtaatgactaatgggagactttggaaatcattttaaaccacataattactgcttatcattatgtgatgtgaagaattgaagaaaataataagcttgattttttttttcttttttttttcgttggttttatattattctaatttcgattttcattattcttgtgatagatgatggcctaatgggagatgtctgctacagcaaatgcatgaagagaatttagcttttttctttttctttttcctttctaatactgctcatcaattacttttgtgtaatgggaaaaaatataattttatctgaaaaaaaagtctatagaaagtagaaatcataaaaaaaattgtaactttatgtgggacaattgccaaattcatgttggtttttggtatcacttaccctaaaaatatttagaatagtggactttttctttgttacatgtgcatgactattgatttatctatctatctatctatctnnctatctatctatctatctatgttaccacttagcattaaagcatgaacattgatctttatatcccctttcaataaaattcaactttggcatttttcttcaaataattgttgcaattttcaaaaatatattttaaaaatgatatatagttttcttttcaagaaaaatttagatcttttcactaaaaagaaagttttaacttttccgataaaaaaatagaaacgtataaattcttaaatcacataagactattttgtaataagagaattccatcttaaaattatttagtaatgaatgaaatagctcatacttttatatatagcttaatataatattttttaatatttttttatataaacatttttattttatttttgaaaattatattgaaaaatatttttaatataatgattatttcacaaatacacaaaaacaaccgtttcacagaattttaaatatttttacgattttttttattttatgtatagaaaatgcagtcttttagtgatgtactcttattaatttgttattgattttttgtcatctgtattttattttttgttgttgctttgatgttattttcatattacttctatgtaattatcttattatttttatgttgtttctatcaaaaatcgtaaaaattttaaaaaattatttaaacataaaaatataatttttttacggttacttatctaattattcctttaaatttaatatatgtgtagtagatatttggaaatc

SEQ ID NO: 20306 - DNA, 2216 bp, Cannabis sativa
agatttgtaacctttcttagtcacttcccaatcttattaaatcctatttcattatatatccttttgacaatcaaatcagatcatgataggtttatatacacaaataaactatttctctttacaacacaataatgaaaccgtcaattatggaggcaaaatattaaaaaaaaaaaaacctaataaaacactgaaccaaataaattgatcctatgatgctgattcttttatgcttactggaaatttcatgtgaactatacatacatatatgggtctttgaacttggaatagagtctattcacgtacaaaattgaccattagtgcctaaacacaacttgaactctccaaaagggaataagggttattttaataatttaataattgcatcattactaggatcataatcactatttactagtcatttaatatacatggaatggaaccataaatgacttaaaaattaaagaatgaaagaaaatagcataatcggtggatcgggtagtgtgagcccacttaatcataataggggcctatttagtgattcgccaccaatcaataatggccgccaaaaatcaagcggcacaagagttgtcctatttcaaaattctaatctcgcacaatcacaacttcaattaaataaaagttcattttctatcagaaaaaaaaaaaaaaatacaaaaaccaatcaaaagaggtagctagctattagctaatcaggaaaagctggcattgggccaccacataggatcttgtgaagcccatatgaaaatcattgggcccacttcatatttttgcgtacaaaaatgagtactagtactaatagtgcgttagagaaatcgaccttagttacacgacccctgaccatattttggtttggtgcactcaaatgaatagagacttgtgcggttgtcatcttttttttttttttttagaatagaaaataataaaaaagaaaaaaaagatttagaccatggattcacaccttgggcgaattgacccaagggttgggtgaatctaccacgaaccatctcacgtgatcaaaaatagagccgacaaagtttactttcgccggccatttacatattttctcctccaattcagccttgggcatgtgtcatcataatttgtagttatgagtactacttctcatcactttttacatgaaatacgattttcatttatgataatggctttctaaaaattaaaaataaagtttctaaaaataaaaatgaaacacatatatgaatataaaataattctaacaagtacacaatctactcaattagtgtaaaaatacaggtttcataatctagtcttatccatttcatatggattaccaagtgagcaagtgtgtcaccaccattactataatctggcaatttatatttatttttaaaatattattattaggtactagtggtatctaacaatacttttaacaactactctaccctattttttttttgaaatatattaccaaaactttttttttttttaatttacctcactcttttacacactatacattagattctctaaattttctctatatcacttgttattttttaatatttttttttttactttcaaatattttctacaactctcaatagtatccccacatcttttaatatttacaatatctccttatgtatagtatcatataattacattttatttttttaactaatcaaaatttattaaccttatcaaatatatacaaataaataaatgccataataattacttaaaaatgacacaatatataatttaccaaccaaaggcctatatatatgtatagtatgtccacatttggttgcttgacatattgtaaactcttttaaatgaaaatttaaataaataaatacaatatttggtctttgcacagcaattgtaatggtacccaagcaacagagaaacaggagaacaaagaaaatgattgatgaattaataaaataagattttaaaagatgaatagtattagttaaatgtagcaaaactacaatagttcaaggtaaaatgtaaaattatgaagtccccacgagttatcttgctttttatatacttgttgtttttttaattataatttttaaattaaaatatataaattttatatttaattacaacaataattatatcatatgtatgtcaatgtggtagtagtactaccactcacatctactttattttttttcttctataaaattaaaaaaaaaaaa

SEQ ID NO: 20307 - DNA, 3741 bp, Cannabis sativa
aaccccgccgaggaaaatgagtctgctaagttggaatgctcgaggtctagggagtcctcaggcatttcgaaatctctccctgttagtgaagccacaccaacccattttattttttttcatggaaaccaagctcacctctggtcatggactcgcatcaagaaaagactagattttaataatgctttcaaagttcctaggagcagtttagggggagaactcttacttttgtagaacaataatattaatgttaatattttaacttactcccttagtcatatagattgtattgttaatattaattaatgatgaaatgaattggcacttttctggtttctatggttccccttattccagttacaagcctttcacttgggctcttttgaatagactttttgattatgctcctaatttactgtggcttatttatggtgattttaatgactatctttcagttaacgataaaaatactaatactagtcccccaaaccatgccataactaatttctagtctttcctttacaagaataacttgttacccctcactcatattggtaacaaataaaactggaagcatggcccactccttgagcggctcgactggagtatcgccaacaatccctgacagtctctttttcccgtggcctccctcttccatcttgggttttatgggtctaatcatagatcttcaaagatcactctagacgatgaccttaggaaacctaagaatcctaacaatatcattttttaaaattattggctcactaataaacatttttaccattggtcaactcctcatggtccaagtccaaactatataatcttcccttcaccctttctgatttcatctcttgacaaaatagttgtattcaggatattagaagatggaacataggtcagaattcccttaaacagcagatcaataccactcagaaagaccttgacctctttcttcaatccaacaatcctactacctgggatctttccaaagccaaatctctacaatccaaattggatagtctcttacacaaaaataaaatttactggaaataaagatctcgagtcaattagctcaagtctggggataaaaacagcaaattcttccatcacaaagcctcgagtaggaaaaaaataacctcataagatccattaccctgaaggatggttccctggctagaggtacttcttctctcctttcttattttgttgatttctacactcaactttcactactcaaggggaggaccaaaatgctctcttcaacatcctaactgtcaatttttagattgttagttttgtattaggaattagttttcttatatttgcataagtaaagaatgcatatattttgtgatagttttttcatacttggagaattttgactgagattagtgctttaatttctcgttccaactattttgttagtcatttcttagaatatgattagttccattcttaggaagtgtatgttattatgcttttgatcactttgtcaaaataaaaagaaaagcctactgcaaagtactttgcactaaatcagaaattatgaaaataaaaattatgaagttcagatcttacataattttttatgtatacacattgtctatgttacttgtgaagaggcaatttacatttcagacttaatatatgctacatttttggtctttcaaagtgcataaatagtcttatactcactatttagtatatcaatatcagacatttacttataactttccatgattatggtgactgactattattagtcattgatattgtaaggcgtatcctcaattctttttttttaattgttattttttagtttgttagttttatcttaggaattaattttctcatacttgcataagtaaggaatgcatataagaaagcaattattctttttgtttgatatttttttttttcattttgcagcatattgatatgtcattttactacctgaggaagaagattaagtatgatcaatctatcaagttgaaaatcaatacaactgattgttattttgcaactcaaatttttgagttgtatggaaactatcttgacaagggggagaatcgcttttctgttcctaagaattttagggctgctagctatattgagggattccgcatgcttgtttcaaagccatggttgttgcttgattatgttttgattccagtgaatgttgcttcattggcacattttattgtgatcatatttgacataaagaatagatgtttaaaagtatgcaattcactgtctgttggcaaatttaaaaacttgaacaactttgtgcaggcttttgctgtgagatgatcccaattctgctggcacaaaatggtttttatggtcgcaggaaggatattgacatgtctaaaggatttttcaggggaagcgtgagtatgatccctttgatatctttatagttcaaggtctgccacaacaaactcataggtaattgttctttagttagtttttttttattattattattatagttgttttgttttgtattgattgtttaatattttgtttttataaccttttttgtctttctatttattcattgtttatgttttattgcagtgattgtggtatattcattttcaagtactctaaatactttgcacatggtttgattgaagatattccaaatcctttggatgtgaagtttgtccggaacaaactttgtgttgagttgtttgtgcatgacatggaaaaacaagtaaatggatacatatcttcatttgaacatcctggaagggcgccagttaaggacgatggtggggatgagtagattgttgatagtagtgcatttttcaagtactttttgtatgtaatggttcaaaacagtttacatgtaactgattaagaataaactttttatgttacatcttttgtgataggcaaactacttagagtttgtaatgtttttaggagttttttgatttgtaaaggtaatgtcttgcttggagttttttgataagcaaactctttagagtttgttgtttgtttgaagtttatggtatagttcttttcttattggatactgttgaaaacaaactattaagaatttataatcttttgaaatttttatggatatatgaataggcgctgcctggttggattttacttgcttttttttttcaatcttttggttttttatggatatattcaactttatagtttatatttttttgttccttgtttttttttttactattttagtttttaggattaaaaaagtttctaatgttcatgttataagctttctatttttctaattttcatgtcataatttattttgtatttgttttattttatttttacaattatttgtttcagtagtttttattttattagaaaaggaatacttttgaaggaagaactaatgtgcaaattatgactgaaatagcaacttaagttatacatttagcaacaggttagtattttaatagaaattaaatctaattttgaagtttttatattttgttactatactattttttctattttcagtaattgactttttttttgttatttatttttcaagatctttatgggggaattgaagttgctgttagatagacgttagaatttttttttttttgtacacgtatttttggcttttgaaatcataacaatatcattctaacaataagaacaataaagtaaaaaattttaatcatattatgagaataatatgtttaagtaaattagatgcagtatatattatgtttgaattttttt

SEQ ID NO: 20308 - DNA, 3819 bp, Cannabis sativa
  modified_base (3758)..(3768): a, c, t, g, unknown or other
ttttttatccattctttttctgaggagggtgtctctaagtggggttgttgttagatcttttaggttcttgttatctgtcttttctggtgtatgtcttcaacattttatgcgaaatggtaatatcgcagcatggtgagtatgatatgcactacaaatagaaaatgagatttcttggttagaagaaatttttcattgtttaataactaatgtattgtttgactctctacaataaaattggttattatattaaaaaaaaaaatagcgtggctcactattagcaaaatttaatctttctttcaataattactatgagtggtgacctgactaatctgattatgttagtttttctttgcaggtccatctctattgattaatgatatttcccaaatttttcctatattcagcacgctcaagagattttaatgaagtattttcttaaaaatttaaatatatatattaaaaaaaaatatttaggcacaacacaaattattcattgcatttacgagatcgaatgaaacttcaagataggaaacatgtatgttattcatattcaacatgttacaatcaaataatccctaaaaataagctataagaacactaaccttaataaatagggagcagaaaacgattttcattgtttttaataaagtgtaataaatactattttagatcttgtgtttcgtaaaagtgactaatagatctttcctcttgttagaagacaattcaaaccttgtattttacaaaatggtgcaaaatagtctatgcccacaatttttatcaaaataaaatttaatgatgacctgacctaaaaggtgttatgatgagattggttatatttttttatccatatgttcatgttcatgttagaaattgactttaagttagttatatatattataaaaaaatggacaaaattgagttgagggtttgtacaacttttgaaaatacaaagtcatatttatcatttaataaagtaaataattggactaataacttttataatatatacacaatgttagagacctttaattaatattacaaacaaaaatagtataagtagatttggggtgtgagtgaaaagtggaaaatattgattaaactatctctttaattagaaaaagaaaattaaatctgaattttagacttaattattatataattaaagtactataaattgtaagtatatgtattgttttgaaaaacttaactcaataaatggatcagagatgttttcattataaaaaaaaatggagatgttttttattcttacatcaaactctagaaaagaaaaaaaaaaagttcaaaatataatagaataagaatgttgtttgtagtaaaaaaaaaatttccctggcttacattacagtatatatgaaatgaggcaaaaagttattttgtgattatagtgaatattagttaattatgatgaatgaatttataataataatgaaaatgatgataatagaataacaaacatgtttgatgcacacatgacatagcatgatatatttatatatatgcattattatatccgtttatatccatatataggaaagatatatcatttggatatataatcatttcattcatatatatttgccatcactacttttttatacatgtaatgcttagaggaaagaaatttgaaaagcttcatgatgtgggtgttgcaataattaaggtgaagaatgtttatcagaaacatgaatatataaatatatatattgatataattccctttgaaaaaaaaaaagttaggcaatggttaaatttgacgtcaaaatctcaggagatggatttgtttttattcatactttattaattattttatgaggacttcaagccaattaagcagatttgaaaaactttcatctcaactctctttgacagccaataacacaattgtggctgatgacgaaatgaagcccagtttaaaaggtcaattattaaaatacaagctcgagtattaatgaccatgtttttttaaataactaataaatatttggtgactcacatagcactactacttcatcagttttggatcgaggaccccaccagaaaccatttcatatacatatatatattttctttaatgtatataattaatatacaatataaaattaacatcaaagtataccaaagaaaaaaaaataacgatctctctcactggcattttactctatttagagaggtttttaataaatagtgtttgaatttaggctaagagcgatttattctaagttctctgttcaattagtttgggttgggaacatgttccttagccttttcatcctgtttcccattttcttggtcaatttaagctttagtttttgtcatgtacccactgcaaaatttccttttctccaaaggtgatcaaattattttttttttcttcttttcttttcttttctttctgaatgaaatttaaagacccttttctttaaagtttgtaccatcgctatttgtgatttatattactgccgtacgtgtcctgtaatcaaatgtatttatttaatttttacttgcccacgtactgctgatctttgatctaataataatacctttttatccaattaaacttttttagtgattgagaactttgagggcatattaaatcaaatagaaaaagtgtcattggaagagaactaattatataaatagcactacatatgtaatgtgtctatgtacgatccatccctacctaattaactcgtacttcttgccttgaattaaatatatgtatagatttaacatggctgattatgatttataaatagtgcacatatatttttatatattatatacctctagttcacttccacatagttccactatatattatatattttactagtatttaattattcaagcagccttcatatctcgacacctaatttaatttttttcttcttcttttgattttgataataataaataaataaataatcatcataccacatattatatactgggaagtgggaagtggcagtctctagctaactgaagagtacaaactaattatctttacatgtatatatagtatagtacatgtaaagtggtagccagttatataatatctaatctcttgttatggtccactacttgcaaattgttgagaaaagtttaataataaaagaagattagatcaaaaaagtcatgacaaatctcagaggtatcaacttatatataggaaatgcaaacgtttttattctatttatattacagagcttaatattctatcctttctcccctttcgttttcttctctctatttaacaatataatatatttatatagtttaggtaattctccactaaacttccattccgcttctaaactctaaagcatatactggataagactgaggctaattgagagaaaaaaaaacactctagtacttccgaagaagagtacaatattttatggaaacgatattcttttctttttcttttttgtaaattttatatgcaacaaacatccatctatactattatatgatagttaatggtaatatttgtgtaaaaagatttgttaggttgtttttagtattaatttattttttcgcaaattttcttattcacaaaatctctaatatgtgaaagtagtgctgtaaacactgattggactttattgacacgatatgaaattgacatgagcacaacgaaacatgaatagattaatctgaaaagcacatgccataaactcaaaaatcatggcacggcatactaaatttttttataatttaataataataataannnnnnnnnnnataataataataataataagtcatgaatttataaattataaattatttaaa

SEQ ID NO: 20309 - DNA, 3276 bp, Cannabis sativa
gacaaatttctggaaaatagagtagtacctggagaatatgatacggatttggttggcgattctggcaaaactgagcaaatgaaattgtcggcgtcggcaatgaatggggaagagctagcactggcgctaggcaagagaaactaataataacaagaagaaattttttggttattattctattttatattttatagtagaggaaattcgatcaattggttaccttggaaatgagtacatttattccagcggtctttgtatcccatccaaactcagcaaaggaataagcatttgagtatttgacaccatcgatgtctatatgtttcacaatagtactacttttcaaggtttgtctatttgtcatgacataattccaatagtaaggttcatttgttgccttgaacaaccatgctgctccccataacaattcatcctattatataatgacatagaaatcaataaatataaagttcaacaactagccattttttaaaatttaatgttttaatatataattcggatacctgatagccactgaaatcacaatagaagggacaaacccaatgtccaagagtgtcattgtaggatcccctgttcttatcagcaaaatcaaacacctaatccaaaagaagacgaaaaatcaggtggtcacacaaacgtactacattattgtaccaagtgctatttcttacattagttaccattatgtagtaactataacctaatagtttatataatataattaattaccatgtgtttgaattaatcacatagtaaactcattggaaataaataatatataaaaagagccacatcatataccaatttgacactatgtagcactctatgtatggttgaaaagtaaagaaaataaccaggaatggaaaatatggatatatagaaaataaaattaaaaaatttatatgaattatttgaattaaaagtatactatataaaagtatttctcaacttttttctttaatttgaaaaggaaaaatattggtgagaccaaatatgcagctggtttcaaatggttactataaaacatttaagtcatcctatttaagtaccaaattaattgcatgttttataacaccatattcacacgaattaatattaccggtaatcacctctaaaaaaaaaagtgttaaaatgtggtgataaggtgaatgaggttccatctcaaaattaattagttatgggcggagtaaccctttcattttatatatcacaatttatttccacacattagcaataataagatggaaaagagaaaacattatattcataccattctggctcttttcagaagcctagcagagtatccccgatcagtggagcgaaaggccatggaagaagccgcgagagcggcagccatctcggcggaaacctcagagccaggaaactgtttggagacggcgaagggtgttctaggggtgtccatatcttcgggcctctcccaacacatgtggtctccataaggatctccaacttggacaaagacaaagccagggacactcgtggccttaaggaagtagtctgtgccccatcgtatggcgtccagcgcgtgtgggaggtccggtcccatggactttccgaactctatcacgctccacgctagcatggtcgtagaaaacgccattggaaagttaaacttcacgttgtctcccgcgtcgtagtaccctcctaccaaatcaacctattacacaatgaaagaaaaatcttaaaaatatgtagaatctcaatatatttttttaggaaaataagagcaaatggtttaaaagaaaaaaaatccagcatttctattgagtagagttatatatggaatttaattattttattttcaagtgtaatattttttttaatcgttttagatagagaattaatacgtcttaaaaaaaggctagaattaaccgttaatacagccaacactttactgtgtatttaatatttattccataactcctcatatataattggaaattgcatttaatgtatttcgtaaaggcatattaccacaaaagtaatttaaataattaatcaaaatggaaaggaataaatatatataaaataaaaatcaaaattaaaacttggaatattaatgaaaaaacacagtagcatatatatattatgtatcatatagacagatgatcttgacaatgagaaaatggttgagtaaataacaatgagaatatgcataaaacttactccaatgtcaaagccatctgtaagagcagaatcctttctccaagtcattctttgagaagagggtagcttccctgaacgctggccttcgaagaacaaaatactcttggacaaggcatccccataattgatggaagctgatgatgctacctccaccacacttaccactactagtaataatgccagagttttaaagaaacccattatatattaatgttattatattatgctcagtaaaatatcttacataaatctcttatgattatgtgctttcttacctacatatatatacaaatgtttctcttgctatgatggaaggaaaataagtgcacaggcataaaaagaaattaaatatatatagtatgagttggatatggtttcatcatttaacttttatagagagaggaaaataatatttatatatatttctggtttggtaaggaagttgtaatgaatttagatgataagaatgaatattaattagggagaagagatatttgcatgtaaattaaggcatcgaaatatatatatgaataggcacttccggggcattcgcataaggtggtaaatgttggcacattttcgttgtttttgaggtttgtatacagtgcatatatatgtatataaattgcttgcattgtacctgttatatatattactctacttaataaaaaccaaaattcttttacaccaacaatcaagtgtgtgcggctcctatggaatgtttctcacactttgactttgtttaaataataataataaaacagaacccaaaatataaattatattcatagtctaattttttccttccaatagttataatctcatttatattataattatttaagatattaaatatgttttaataatttcaaaataatttataccattatagcaattaaagttcaaataatttatttcacatgtatatatatgaataaaagagtaaggtatgcatacaacatacggtttaaatttttttatcagtaaattaaattattttaaatttcttgaaatttacacgatatcctaaataactaaagtttacactcttatatatatatatataagatc

SEQ ID NO: 20310 - DNA, 2433 bp, Cannabis sativa
ataaaagtatatcgttctgtacatcttttttgaaggagtgcattataaaaaatttcaataatataataattaaagtaaattaattaattaattaattacctgataccacaagagttcgtgtcgcatttgtaatgctactccaagcatggaatccaatctactttgttgtggttttttggcaacaaggtgtaatatgttgttgtttgttgtttcatcttcttgaattcgtacaacacttttcaatacatttatttcatgtattaatttgaatattttcacatgacgattcaaaattgcaatgtgaaatatggtgttgttttcatcatctttttcccaaattaattccggacacatgctgaaaagtactaccaaaagatcaaaatttccattctttgcagcttcaatcactaagttgaatggatttctaattatgcttcgaatttcaaagtactcgtactcatgtccttccaaaattctcttccatatttcttttgccaatcttagagctggcatttcatcacgtcgtcttcgtgctgattggaatgaaatttttgaccaaactcgatctatatataaagagaaaaatatcgtaacaaaattaaatagctatgatgatatcttcaactatttacaagacaatcgactatagtggtaaataattatattgctctttgttttaatagacaaacaaaaaaatgaaacgaaaattgattcctttcaattcaattttctttcctattttaaagcgtttaatattatatcaacatgacactttataattgcaagaacaaccttaaattaggcccaagattcctttttctttttgtatctaaagttggattagattattttattgtcttattatttcacaaatctaccattttttttaactaaataatatattgtataaaaaatttgtgccctcagattgggtaaatcctaagcaccaacttagctctcttttcaacctatataattaacattaacagtttcttatattatttattaaataaaaatacatcagatcaaatatttcgtatttattttataagtatatattatagatatattaacttactccatgttccaatagcttgtggatcaaatgtaaattccataggtcgttttcgagacaaaatatgcaaagcagtttcaccgtttgtatcgagttgatgaacaatatgacgtctattttcaatcattttcaaggctaagtctgcacaaaaataaaataaattaaacatcacaatatcaaatatataaataataagttaaaatgtatatataaatattatacgtaccgtagatatcgttatgtatacaattgaaaaatattccaaactgctctccattttccaaatcaacattgttaattatggtatgttgatacaatagtgaagctatttgaggttgtccaaaccatgaagcaatgtataatggtgacatacctttctcatctcgagttgttacgaaataattattaatattatttaggtggagagtgagaaatttcttaacgatttttatagctccaccagcaatggctgaagaaaaagcagtgttgccatttatatcttgaaaagtcaaatcaatatctggatgattaatcaacatttgtacaaactcagtttggttggctcctgcggccacatgaagagcagtttcccaagttgaatttgtaatggctgagtttactatttcatgtcgattttgaggttgttgctcctctaagattttcttacccattttacaatctcctttcaatgccgcatggtaaagagaattgcacgttgaccaattttctgttaattaattaagaaaaagaagaagaatgaagaagaagccacacaaagatcaccaaagatttcatctttcttttttttaaatatacaatatatataggtctcatgatagatgtaatgatttaattgaacaaattaaatgtaagaaaattaataagatttgcaaatatgaatttaaagaaaaataattcatatgtactaataataataaatatatatttatatacgtgcctgtgctaagtagatttagatgaggaagcttaggtatgcgttgtgttgatgtggaagacacagtaacataatcttgatcacctgaagatgctgatgctgatgttgtacaactataataagtacctgacatttcaatccacttatatatatattatgtatgacaatcaacctactatgtatatatactaataataatatttatagttatatatatatatattaagagatcatgatattttggattattggtcgatttgatgaggctcgtcgaagatttatatatatatatatatatatatatgtatgtatactcaaacaaaaagctatatgatgatcttagagagaattaataaaagtggtaggcatttgaatctcctcttatatatatatatatatagag

SEQ ID NO: 20311 - DNA, 2904 bp, Cannabis sativa
  modified_base (77)..(78): a, c, t, g, unknown or other
attctaagttttctctaaaactttctagagtgttcttgatttttcttacaaatttcttagaacattgtaaaacattnnaacatattctagatttgataatgatttttaacatgtagtaattcaaaagagtgagagtgtagtagcatataaaattttgaccatacatggctccaatgggacacattagctattgtttatataatatgatatgaatttgtttgaccatacacggctccaatgggccataaattaagtacctaactacatgtgctttcacgtgtgaacttatgaaaagaagagattaaactttgaaatctgatcattttattatatataaaatgttggaatcagctatattatcacaaatacacaataatatatcactgttatttatgtagtattatcataaaataaaattaccatgcttactgaaatctctcatcattaatagatactttttctatgatctcaattgatggttctccttccatgtatagtttcctttgaatatgtatgtgattccataacgaattgtgtcatgtataataaagactatttccataaagatgatttttgttagattgttggagaattttcattacacttgagagaatatggaggattacatcaaaaactcgatattaaaaaataaatatagaatcaatattacacgagaagaagagagaaatattacaacagtgttgaacataagaaacacataaaagaagaagaatgcttaagacataagtaagattcaaaacctttcttctaaaaatctctaaaattgttggggtatcaacccaagtccttattggaacaataagccaaagttgtcttaaatataagtgttccacctattctattaatataagacattttggaaagtgcataaaaaaaccgtgaggcccaaaaagcaaacaacatcatactaatgagagtcaatatgaggtagcagcctaacaaggttgaagaacgggacgaagaaaaactacttctaacaaattaataattcatccatccttacaaagttttatatgtactcaacattgtaactagtgtgttacacaagggaataatatgctctatacattttactctcatttaaacatgaataaaaaccataaattgtttggatgttaccaaatgttaaatttctttggatgttactaaatgttaaatacatttatgaatttaagttgatgattatgagattatgtgacttgttaaaatcgagtacaattgtgcctaaaagtaggtatgttgtcttcaattttcagcattttaactttaaaatacatcaccacaaaacattttttttttttattttacgccatatactatataatcaacttctttatttttttttcctatatttttttatattatttaaatgatatattttttgatatataattaaagttaataaatactacttaaaaaaagtaaaggatgaatcatgaatgaactcatcataagatcatatctttgttttacgccgttggtttattagtactgtctgagagtaccaagactacagaatattctttaattataaaatgtagaggtcaattatgaacacaccatatcacaattttactgatgttatatatgtataatagtaaaaaagcagaagaataattgattgattgtaattaatatatatataaatcattattgatcaaagccttaattcatgggaatctttctttttgtaaagtaatacatgcatgaatttcggtatctcaattttgttatgtttatgtctgttgtcatatttggttatccaatatgtgataatcataaaagtacattattcaaatattcctagattgtacattatactcatatgaactttgttttatgtgtggtgacaacctttttcatcccaacagccaagcaagtgatgggaggtctaataattttcagaacactgtcaatgtgaacatcttcggcaagcctcgcaactactccactcttgtctcgggagctcgaaatgcttcctgccaagactattcttgaaacaacttcacaagtgttctggtctagaactaatgttgatgtggtgaattctcaccctcaaaacagattgttacaacaataacaatattcaagaatgcataaacaaaactaaaaccaatcccaaaatcaaaacttgaacttaattgaaattagacaaagaatgaatgataaatttttattgaataggaatagtcagtaatacacaatttaatgagcccaagattacaactcaacttagggaagtaatataaagaaatgtctcacattgagggaaattacttcaagagtgatactcccattacacacccctccacacactcactatgatcttggatctcctctctctaaacttgaatctaaaactaaagtatgagcttggagattagagactagaattcagaactctctttgggaatagaggaacacctatttataattgttggtggggttccctttaagttggtattaaagccaactgtcataactaacagtaattttcttcagatttatctgatgagcatatagatagacctactgacttgaaaagttaagtgagtttaatctcaacagttgatgagtcatttcttaggtgttgcaaggagtacaaaacgttggggctaactcgattatcccataaaattctcatcgtcctgcaaaatgtaacagagaatgaaaaaagggttcataaatttaaaaaatgataggaatgttaagaaaaaatggttcatagatttaaaaaatgataggaatgataggaacatcacaaaatataaatataagattacacatcacaaaatataaaataaaaaagaagagtcaaaccatcatatatacctgggttttaaaaacagaaagaatgtaataaattgatttaaaacaagagac

SEQ ID NO: 20312 - DNA, 1965 bp, Cannabis sativa
tctttttactgagagcaatgtttcttctgctcttcagtctattgtaatagcggatattgctatttaatgaattacttttttttttcaaaaaaaaacaaataataaatacttatagttagtttaaatttaaactgtaatgttttaaaaaaagaatactttctcttatataaccacaataattataacatagataaatatagaatcaagatctcctgttaaattaaatatattaactatttttgttcattcaattagagttttaaaattagttatatgtcaaattttaattagtttaatactatatgagacactattttttaataggattttgattcataaatatatatatcactattcatacattttcaataatatattatacacaaattgctgaacaattatacagttgtatggacaaataaccatgctcaatcaccacacaagaaagcacaccgaaaaaaactaaaactaattacttatgtgggctgtgtagccagaaatgagaaagatatataaggctaaagcggatgatatcaaatatcgatatttcccaacaacttacacaatgattgacaagatagcatttaaaaggagggaactaataaagatggatgggaagtcgaggctccataaccgcaacaagtgggacctttcgaatagtggccaatccataaacctcctccatactcacatcttcaccatccatagtctcaggcaacttccacgtaaatccatgcaacatattcgccaagatactgcttatcatcttaatccccaagctgtaacccggacacatccgccgacccgacccgaatggaagcagctcgaagctctgcccgttaatatccacgcccattttatcaggctccaagaatctctcgggccgaaactcgtcgggtttgtcccacaccgatgggtctctacccaaactccaggtgttaacgaagaccgtagtgccttggcgaatgtcgtagccgctgacgtggcaatcgcgtaaagcgaagtgtggggcgagcaaaacagcaactgggtgttttctcatggtctctttgattatggagtcaatgtaagggaggtttgggatgtctctctcttcgacccacctttgttgtcctatgactctgtccagttcttcctttgctttttctatgatgtttggttgtcttatcacctctgacattgcccattccaccgtcgttgctgaagtgtctgttcctcccgctactaattcctaattacatgttcaacaaatttattaggatccattttcaaatgttaattaattaacatgtttaagtctatgcagagctaagagttctcacaattaaaaacaaacagaaaccaatatcataacatattgcaatttagtatttgattttacaaacataaaaaaactaataatgaccactcataagaattaagaagtgacctatgtgttgcaaaatatcttggtgtgcccctgtttagcgcatacttagtcatattgaaaaattgtttggataaaatttagggaaaatatattattttttttttaattttttttttcaaatttccggtttaggttttcatagtgatttctatagtagtttttatataagttgctataattattatttaagttgctccgttagttgcaatatgaattttttataaaattccgtaaaaaggaaaaaaaaaactattttgaaaaataaaaaaatatcctttaaaactttaaatttgatcaatttcacaaacttcaggatcaaattaatggtcatttttgacagtatattctagtaaatataaaaattaaattggtattttgaaaattgatttttataattacaaacttatgagtaataataaatatatgtgcactaaaagaaaaaaaaaagtatatacagtactgatcaatatgttacaatttttaaccaatcacaatattttgtaaacacttcatataacacttgtccatatcattgc

SEQ ID NO: 20313 - DNA, 2685 bp, Cannabis sativa
aaaaaaaaaaattaaattttaaacaaaagtttataattttattgctacacggaattttttataaaataaccgtaaaacaataaaacagaacaatttaaataataatgaaacaattgaaaaacaattgtagaacaacaatcaaaatttaacacagtaaacactataaaaaatatacaatatttttttaaaaataaattcgccctaaaataaaaaataaaaaaaattagaaaatttctatgtataaaaacttttttgttttcaacataaataattttacaaaatgaactattttattcaatttatgttcttttttcctcggtttctcctcatctctagtaagttaaagttcaccgatcttaactagaccgccgcgtacacgatctttgataccagtccggtgcgcactgcgcattatccaccgataacgaccgccaccaccctccctctctccactctccactatatatatagccacctcagctcagctcagctcagctcagctcccttgtgcccttcggctctgtctttctctctctctgattcttggttttaatcttcattcattatcattttcatgctctaatttctagggttttacttcctttcttttaatcaagaaaccctaaccatggccgattggcaacagctgattcaatcaatcgttattggactcattttctcttaccttctcgccaagctcatctccatagtaacgtctttcaaggaagagaatctcacactcactcggagccacacccaggacgatcaacttcttcccgagtccgaatccggacgggagactgacggagaatctgttcgccctcctgctgtgggttctggagatttgggcgggtcgcacgatgttgattctgtgattgcggagcacggtagtgttaggaatgaaagcgtagctggtagtgacgagtttgatgatgaggatgaagattcggacgatgatgattgggagggagtggagagtacggaattggatgagatgtttagtgctgctacggcttttgtggcggccgcggcggctgatcgactatcgacgaagaaagtctctaatgatgtgcaattgcagctttatggactctacaagattgctactgagggtccctgtagtgcgcctcagccatcggcaattaaaatgactgctcgcgccaaatggtattgcttcactgttactgttactttgtgtgtatatatatatatatagatttatttattatatttttcgtgggtttgttttactacaatgataatagtttattgcgtaatttaggaattctgatacttgtcttgtcatattgagattgagctctgagactaattaaggctaatgaagaaggttaaggaacaagttgttgatattccaaactgttaacaatttctgtagaatggtaaattgatgctggaaaattgaaagcactattacccagatgttgtttagcagatagtttatacttaggaagtcattatagatacattacacttttggggagaattaggcgttgtctgttgtttcatcataaattttgtgataggtgttttagagtgatggacttttgaaaatcgaacaacattgagaaagagatattgtgtaaattatgactgggaaaaccagtattatgaggaaccatgccaatgtatgaatggcagacattgagagtctatcaaatttaatggtaagagtttattggttggtacttactagctgtagcattaaattcgtttcatttgagtaatactgtttgtgaaaatacttaaagattatctacctacatttatttgtttggtgaatggggtaaaattatagatttctaagacaaaatttaactgtttggaatttatgcttggttgcttttaccttattccattagggtagtgagaatgttttatcaagatggtttgatagttatttctggatcaacattctaggcaagcatggcagaaactgggtgctatgccaccagaagaagcaatgcaaacatacattgatattgttagtgcactgtatcctacatggctggcaggtgcaagtatggtgagaccgtgattctcttttctgtatgtatttatttagcatttctgttcatataatgactctgtgtatttcatctgtgttaactagaagagcaggggtggagatactggtggacctagtaatgattccagaggaccaatgggaccagttttcagcacctttgtttacgaggaggaatctgcaaatgatttgtaagattcttagaattttaaacgtataagtttgcgtatattatattactagttttctgcacattgatgtaaatgaactttatacggtggaggctactcagtactaagtacttgtacttatacagagagcggagtaagaaaactgcatattacttcttccagaagctataaaattgaaagacatcttttattatgtccagatctttctatggattttatgattttctgattgttttcacatctatacctatagtttactggttattaatttttgtgacaactgttataggattctaaaaagtactattacgtttcagcaagatggatgctattcatggtttcgccagagaaggagaagtggacaatttgctcaaaagcattgaaagtggtgtaccagtgaatctgaagggtttgtttttacatcatcggttacctacttcttttccttct

SEQ ID NO: 20314 - DNA, 2235 bp, Cannabis sativa
catgggggccatgagaattgaagattgtaattgaaaccccttaattactttcaattacactgtaattacatgatcagacaaacatgcaaaattgtgtaattaccttcaattatacacattgtggctttccaaacacatttatgttcaaatgagaataataactctataaataatgatcatattggtcatttgtgatacataagttgaaaccactaattgtaagattagaacctagtgatggtatgttcaccctttaatactatgctgaacaacatatgaaacttgacaaattcttataagcatttctaaagtttttctaaatattcatgtcagtgaggagttgacttttatgacaaatattttgagtgttcttcttctctttgtttcttatgttgcaaaatattgtaatatttctcttcctcttcccacataacctttgattttatatttatttgtaaattgcaatcttctattttttattagcatttaaaataatttgattaattgaaatattaaaatagagaatataattgtctaaaaatttataattgtgtttatttgtgtacgagaatacttagttagattaaatctcataaattgttgtgaacaaattaaattattaatttataatttcactgtattaagattgaagaacatgtttagagttaacatttttttaaaggttttaagattgaattgaatgtggttggttgtgtgtgagaatatttagttagattaattgtaactaaattacattatttaattgagcacataaatctcataaattattataaaaaattattcttattactacaataattatttttccgacttaaacttatttaacctcataccaaacataaaaatgtgaaagataatcattcccataaaatattacatcataccacacagtaccatactcaataaatggttgtaattatcaaaataataactaattatcttgtctaagtaatataaatccctattaaagacgtatccaactaaaacaggcaattttaattatttaaaatgcttttgtgcagaaattataattaagaaaatataaaagattaaatgagttgagcaatgaatggcaaatggggatacatatcttatcggtttctataagaaaataacgttaattttagatacatcaaccaaaacaattttttttttcctaaacatgtttgtagcgacctcccaccaaaacaccacctactttgccataataataataataatcataataaatctaggaatatttttaagggatacttggtgtttattccattatatcaatccaaatataggtctcacctaatatttttttttttttgaaaatatatccaaatataggtctcacccaataattaaacgggaaatttgaatttccatacttacaatactttggtcatatatgactacattactaatttctcaaaaataccccacatttaaaatccctaatctcatcagcctctctctcaactcactcttgctcaacccacccgatcccaaccccaacccaatttctaaatatgattctttttctctctccaaaattactcactcactgtcattccattaacaacttggaattgtttattcaagtttttatttttttttaattaatatattaactcttcaatcggccggtatgaaacatccagaaaaaaaactatgaaaacaagctctctattgaaaatatttttttttctttttttaaaaatattttgaatgtagaaaccattttaacaagccattttattctcgactagtgttaacaaaccattttcacaagttttataaatagtatatatatatacattttttatgtgtctaaattctaaataagagtaaaaattatttcaggtaactgaactgaagtgtggtgggatagtggtagcatgcacattcgaccaccgcatagttgatgcatattcggctaacatgttcttcatttcatgggttcaaatggctcaatccaaacgattatctcttcgaccctctttccgccgatctctcctcaacccccgtcgccaccaaattacccccacaacgactcctccattgacgacatgtacgttcctgtaactgctctccctccgccatccccatccaccgctttcgtcgccgaccacctcatcagcaggatcatcggacctccacgaatcggaccatcggacccatgcaacttgaccatcggacccaacccgtcggaccatcggaccccat

SEQ ID NO: 20315 - DNA, 4906 bp, Cannabis sativa
  modified_base (680)..(683): a, c, t, g, unknown or other
tttgccattatttgaacttattgtgttataaggattcttttgtgaaccttatttattttgttctctttttaagttcatgttttcatttatatccagcaacatactgttaattctcatgctaaatgggcaaatttttaattaaaggaaagaggcaagcatgcttcgttagctaccttgtttaaataaaggataaaactaaaactcaggatattgcatatagaacactgctaaagaaaatacaaaatatattaaatatgaaattatctatgacttttgcaaaagagtaaggctaaagtgttctaagtatgccattaggcatatctaagaaaaatgagtttctggtttgttttgtaaataatttaatttattgtacctatatatatacttagtaagtcaaaattatgacattgcttatataagtataactatagaaggttatttgtgaaactaagagccaagtgatgatgaaagattcatctttcagggcaatagggaaatacctatagttgaggctataagaatattcaaactatagttaatgactagtcatttttagatttggaaaagacttatagagtatcatcacctagatgattttttggttttgaattctattttgaataaattaggttattcttgttcaattagaatttgaaagtcttttccaatattggttctannnnttctttaatttataaatttattaaaatttgcctcatataaagaaaccttatatgagataacagatgatccaccaaaattgatttcatttattaatgaacggaagcagcttgtggagtaggcgattgaatatgaatggctcccatcgaagtgttcagcttgtgcaaatcttggatatacagttgccaactgcaataaggagaggaaagtggtctggaaaaagaagcaacctgttgagaaagaggctaagcaggatagggagggtgaagatcgaagaaagaaggaagactcagagattggcacgacatgagcaagacctgatattgaacgatgagcagcataaccaggttgtccagaaatccgataaggggaaaaaagagtggattactcctaagagaagagggctgaagcagaatgaagaaatcaaaaacaaggaagctccaaacatggcaagttgtaataatggatacgctgttttacaagcaatttcggttgatgagatgatggttcctagctctattcttactcatgatggatgcttgtaacatgataagttggaatgtgagaggtatgaataaaaaagaaaagcaaattgctattcttgatgtttgtaggatgaacaaaattagttttggagccttatttgaaaccaaggtaaaacatgagaaaacaaaagatatcatggagaaaaattttccaaattggaatttttactctagtaatataatatttgggagaatcttgttaatatggaagatgaagtatattcaggttagtattgtttgtgaagagcctcaattagtgcactgcaaagttaaatgttgtggttttcagaagcctttctttgtcacaaccgtttatggttgcaactcgatggaggtttgaaaagctttatgagattctcttgctggtattgggaagctcaatgagccttggatcatctttggtgatttcaactcaatgttcagctttcaagatagacatggaggcagacctattcaaaataaagacaaaatggatgctcaaaattggcttgcaatgggtcaagttgaggagtttaaatgctcgggttcttattttacttggaaaaacaaacatgaggtgggagataagatattttccaagctagataaagttttcatcaacgatatctggttaaaggattttcctactactgatgcttgctttaaatgggaggttatatcagatcattgtatgtgtttaatttgccattttgaacacaacaatattgggattaaaccttttagatacggtaaccattggctgtcatacccaatctatgaaaaagctgttatggacagttggaataaaccagtcactggttttgaattggatagtctggtgcagaaattattcagagtaaaacatactctcaaggcctttaataaaagcgcagttggagatgttgcaatggagtataaccaagccaaagctagctactatcttagccaagaaaaggctgctaacaatccaaatgatgtgctaatccaagaagtagtttcagagcacctgcaggttttcttgactgccaagaacaggtacactcaagtccttagacaacaaagtacgataaattggatcaaatttagtgatgaaaacactaattattttcatgctgctatgaggaaaagaagactggaaaatagaattacaacttacatgaagggagatgttatggttgataactttgaggaagtggttaagcactttgttgagcattttgagagcttcatgggcagtaaaattacaactacttgtaagatagatgtgatctgcataaactaggggaattgtctcagtgtggaacaacaagtccatttgatcacccttttctaaaggagatgttaataaagcattgttcaacatccactcttcgaagagcccagggcttgatgggtttggttatggattttacaaagatctatggaacaaaattagagatgaggtctctaatgcggttctatgtttctttgaaaatggcaggttaccttaaaacttgattgaaacaattttttctttaatccctaaggttgctaacccttccactgcaaaggatgacagacccatagcttgttgtaacacaatgtacaagtacatctcgaaactgttatgttcgagactttttgaagtgctccccaacattatccagaacaaccaaggcacgtttatcaaaaataggcttctggctcacaatatcataattttccaagaccttctcaaagggtactcaaggaagaatatttcagcaaggtgcatcatgaaaattgatctgagtaaggcatatgacacagttgattggtagtttgtggaggacttgcttaagtctctttgctttcctgctcgattcataaaatggattatgacttgtctgaaaggaaccaattataacctgcttatcaatggaagaattcaaggaaatttcaaagggagaaaagggctccaaggtgatcctatgttcccgttactttttgtcttgatcatggaatatctcactaggcttctcagcctcattgctgggaaaaaagggttcgtattttgccctctttgcaaagactcgtgcttaacttgtgttttacagatgatcttgttatattctgtaaaggcaacgttaacttggtgaaacttgttaatgatgccttcttattgttctgcaacaccacaagattgtctgctaacacttcaaagtctcatatatactttggaggagttaatgatgagattaaagtaaagattcttgatctagttcaaaatgaagaaggctgatttcctctaaaatacttgggggtcaacttgcgtcctacaaaatggaaagctttagattgtggagtgattctggacaagctcaataagaatcttaactgttgggctagtaggaatctttccttagctggccgtgcgcaactaattcattcggtcttacttggaataaggaattttcgaatgagtatttttattataccctcaaaagtttcagtagctattgacaagagttgtcgtgatttcttttggggtatcaacagtttagaagcaagctccacagagcttcttgggaaaaggtttgccttcccaaaaagcttggaggagttggttttcgagaaggcaaaaagtggaacaaggctcttatgactaagttcctttgggcccttgcgaataagaaagatagcttgtgggtcaaatggattaactccatttatttgaagagccaagctgtctggaactaccaaaaaaagcttgatgttagttggtatttctctaaagtgatgagtctcattgacaaaatagatgaaaccaaactgaatcttactgtaacaggagggaaattttgtgctgaaaactgttataacttgcttgtgaatgagttgaaagtggattatgcaggtgctgtttgggacaatttgattgtgctgaaacacatgtttatatactggcaggttgttaacaaacatctcctaactagagactacttgagcaagatcataaatatacaggtggagctttgtccgatttgtgatcaagaggttgaatctcatgaccatttgttctacagctgtattttcgctaagaaggtaggagctgaaatcaataagtgactggggtcttttcattggcctggctcatggctgaggtgattagcaggtgctgtgattggaaaggagatcttcaaagcagaattattaacactgatatggcagcaacattgtacgaaaacatggaggaataaaaatagatgtatctttgaaatgacatgctcttctcccagtagcataagtttggttgttaaaggtatagtttggctaaggattttgagtaaaggtccctttaaagattgtcccaaaaatatatatttactgaatgtaattaaagggtggtaatgggtgtggttggggttgctggggtctttgcagcagctgtcgtggttgtgacttgcttgtttgtattgttgttgctagttttgaataaagattcttcttttttcataaaaaaaaaaaaggaaaccttataatttctcttatggtacaaaatataaattgaatcttgagaattctattatactttggtctaagtattaagattatatctcccaaaaggagaatagaaagacttatattttattagaattcttgactccttgatttaataaattttagattttgtaaaggggtaacaaacaaacataaagaaatcaagtgacaaaataaagttt

SEQ ID NO: 20316 - DNA, 1561 bp, Cannabis sativa
aggtaagaatccgaaaatgaatgcacaacaatcttaccataaaaggaaaaattattttgtcaactaacttgccaaaagaggactttacaaaatataagaaagaatacgatatgtatataaataaattattaataattataaattataagattagagagtttgcatatttattaaattcttttcttcttgtaaacaaaaataattttattgagactttatttgatttagttgagatatgttcacaactgatgacacaactaatttgtttgaagcttttgattcctccttaaaaaaaaaaaaagcaccatatatcatttcttttctttatattgcatgcaacctcggaccatttggggatacgagagatatagaataagttgagagagaatttgtgagggctatataaatagctaaagttacatatttaaaaatatatagtattagaatgaatataatattttacaaagaaaatataataaataattatgagatattagtaaaaaaaaaaaaaacacaacaataaattaataatggaagaagcatttatttgtattgtatattaattaaatgtcataatatatattctatatctgaatgagataaattaaaataacatatacatgattgatacaaatacaaataaacctaaatagaacatatattaatacaagcctaaatgtaaatgatgatatatatatatatataaatattgtcaattaattaacacatattgttatggttagaaattcttctagccattgcagaatcacacaaagaagatgaaagaaagaagtgaaagctcgattgaaagattgttattcatagcacgagagaaaactacaactggtttatatatatatacaccagagaacaaggcaaaggccaactagaataacaaacaacagaaagttgttagaaactaaaaacagttacaactaactgtcttgacacatatgctgtgctcattcttattcttttgtgcttttctattcctcctgtaacatcgaaaaattcgttgagtagatatagctgcaaaagatttcatgtcctgatcattagaattagttgagttgtgtttatgaaacttgtgccaacaacttgaaagtacatgtttcaagtcaattgccattaaagcaaagccttcaacttttgtatgggatttgagattaacactagagattggaaggtccttataataggatgatgatgatgattccaagtttaattgccattctatgagttcatttccaaaaaaatcacctttttgaagaccatctatgggacaagtactacttccaaatgtccacacaacaccttgtgttatcaacaacatcatatcgagtggctctccttttcgaatgatataacttttctctaaatatgtcactggcttcaaatatttgcaaattgtttcatagacgtagtcatccatgttttgaagcaatgaaacctaaaaatacaataaataaaaaactttatatatttcatatggcaatgtatatcgtaattatacaagaatatatggttactaatttttgagaagttttgaataaattgttat

SEQ ID NO: 20317 - DNA, 6412 bp, Cannabis sativa
acaaaagtgatactatccaaaaattaataatttacatctatataaaataaaatttcacaaggcatccaattcaatccaaagagtttatgaattaagcacacgatttaagtttcaatccattgcaaaaataaacaacagcggttcaatcaatatattggctcaattatcaacacatggaaaaaaaaaactaaactaattaacccactaaaaataaagacagtaaaatcataaaaattttaaattcctcccccaagcttaagactcacattgtctcaaatgtgatataatatttaaggtgaaaaagacttacctgaacccccatcagaaggggttcggtggaggtggctggtcataaggataaaattaggtagatttggcaagtaattaggctcctcaatccggatattcattctggtgataagtgaattcggctaatgcacttaattctcatcaaagacactcctttgcgccatgtaagtttgcatgtgcatgtttgctgaataagataattcagttggtcatgtgtatacttcatggttggatcaatagggccaacaatatgttgtggtaactcctcaacatgctcgtcttcaggaggaggtcttggggctctttgctgtggttgaggaggtggctggccatatggatgtggggccttaagtctaagcaccgttccaacatcaatcatgcgctgtggaggaaccttcgtatcataggaatattgcgcaccccatatgcctcacacaaattagtgataatattagctacaccaagcccacccctagaggctgcttgaataatcaagttaaagctatgcctaatgatatcccccacattcaaattaaagcccttcataacctagcactcacaaaatacaaccaagctttagccactcggttcaactcacacccgtacaactgatagggtttctcattgtactcatgaaaccttaattctgggaaacccaaagtctcagccatatcaacataatcgaactccccttcttcaataatttgtaggcgttgctcttcacgggtaaaagtttgtaggttaaagatggcatggatagctctagtagtgatcggaacgtcgacacccctaacctttactatgtcattcttccactcgggccagttagcaaaaaattctagggttaaggtttggttgactctctcatcaacaatcacaaattgcacccatcctcgtttttcaacctattcccttatttgctcaaacattggatgacaaggaactctggtgtcaccaacatcaatacccctatcatccatgaatgccctattcttcaattctagatagtgttcttgggcctcgacacttacgaacctttccctatctacatttgatcgccttgatgacctttacgagttggatgatgaggcacctttctcactcactcttgatctcttaggtcccattttcaatcaattcacctaacactctagaaaaatttcgccagcacttcaccttaattttactctttcttgggtgaacacgcaatcaataatcactcaatttttcaatcacaaacaatatatccacaacaatattcaagacaattacaaaaacacacaccactccttgcaagattctcaaaaattcaaaattatctaaaaatttaataaataatcatgaaaaattacttacattgatgagaatctccttcactccacctccattgatgaagccattgtaaactcttgaggtagaaggtgatgaatagtggatttttgaaattaggtgaaaattggggattataagtgtggttataaaaagaagagatggattgatgagagaaataggattttggaatgattagggatgaatgattgagaaataagtgaaaaagaagtggtttttgtgagatgatattgaaggttttttgtaaaggggatgacgaattctgaatggggagtttagggttgaagaaatggtgtttttggggttgaaggtcaaaatgcacctttttactgggcttgggccatctcgtcgtggcgagatggcgagaatttttatcccccctttgttaacttttcgtcgcggccgtgcgaaagctttatctcactgcggccactgttggcctcatcgcacccactaggcattgcccaaaatactttttttttctcttttgagaacaaataataaactaaacatttagtttacaaattcaatgaacaaaaactaacataaagtaagaaaaaacatttaggaatgttcaactaaaaacacaattaaaacttggtttgcctcccaagagtgctgtctttatcgtcttatagccagacgttgattgttttcttcaaaggggcgccagaatcatggcggacttgtcttggtcaatatgaccctccaagtagagcttcaatcgctgcccattaaccttaaatgtctctgggctctcgccttttagttcaatagctccatatggaaacaccttaccaccgtgaacgggccagaccatcttgatttcaatttaccaggaaatagtttcagcctagaattgaaaagtagtaactcacacaagtgcacgtaatcaagtagtaactcacacaagtgaggtcaaatcatagggaattggactgaatacccttgatgtcagccaatgtccacccaatggctttattgtgcacgcggagtactctaagcaacttgtcagtctccacatcagaaagtgaagttgacactatcactggaagcttcttgtcttctcccaaaaatttataccgtagatgagcaggaagtaccttcagttctaatatggtggtttctctgtagatggcacatgcttcttatgcacaacccccaactcttcataatacttcctattcaatggcccataggagtcaagccatttagcatatcccattgcctccattccttcttgctcattcaactcatctttggttaagctccattccaaaggatcttctatcaacttcttcttctccactatagtatctacagatcaacaaagaagcagttgtcacttgcctttggataagtcatcgcctttagtacattgatgaccacttcttccccttgcactctcagcttcaattcacccttctgaacatcaatcaatgcttatcgagttgccaagaatggtctcccaagattaattggaacatttttgtcttcttccatgtccagaaaaataaaatcagctgggaagatgaacttatcagctttaactaacacatcctcgatgattccccttgggttagctaacgatcgatcagctaattgcaaggttactatagttggctttgcctcacccaactacaatcttctgaaaactgacataggcatcaaattaatgctgccttttaagtcacacaatgcatttatcccctctattctcctgatggtgcaaggaatggcgaaactgccaagatctcttattttgggagggagtttcttctacaatatagcgctaccaccctcgatcaatgccactgtttcatagtcttccatttttttcttctttgacaagatctccttcataaatttcacatagctaggcatctgttccaaggcctctgcgaaaggaatgttgatgtgcaactttttaaagacctctagaaatttcgaaaactgcttgtctaggttggtctttcggagtcaatgcgggtatgggatcttcacatggtgatctatactgactagtggagaagcttgtatggtgtgagactctcagtagtcttcttttttgttgatgttggtgccggttgatcttgaatctcttcttccgctggttgtcccccatcaggcccttcatacttcttctcgcttctcagggtaattcccttggatttttcttttgggttgacctttgttgtgctaggcaagttcccctgaggacgggttgctatctgagttgccaatcaccccatctgagtctctaaagctttaatggatgatctagtctctctcataaactatagcaataaaactgtctgcagactagataccccactagagccttgttgctatgattgctcctgattctgcatttggttttgatttctttactgatagaacccctgttgttgctggttaaaaccactgtttcttcggccgcctccttgattgaaccaaaagttgttcttttgagagtaattcccaatggcttttgcttcatccatcggcaaactattcacatcaaccgggcattcctcataagtttgagggcccccaaaaagctcacaaacaacctgagcttgttttgcttgcataactatcagttttgtaagggcctcaacctgggctatcagttttgtaatggcatctaccacatgcataccagctaccttcttcgtttgacttctttcagttggccattgctgattattcatggcaatctcttctagcaaaacataggccttatttgcacttttcctgataaatgccccaccagctgcgacatctaaattgttctggtattaccaattagccctttgtaggagttgtggaccaacatccacttttcaataccgtgatgtggatatttcctggtgagatccttgaacctctcccaagcctcatggagagattcattgtccagctgacagaaattattaatttctcctcgcagcttagcagactttgctggaggaaagaacttagacagaaacttcgttgccaaatcagtccatgttgcaatagagttcggtggcaaggagatcaaccaactcttggctcactctctcagtgagaatggaaagagtctcaagcggatggcatcatcactaattccattgactttaaaagtctgacataactccatgaaatttgacaagtggatattgaggtcttcagagcggagtccaccaaacgggactgacgactgcaccatttcgagtatggtaggatttattttgaagttgttagcatctacggcgggtggtcttatataagactggacccccatcagagttagaagaacgtagtccctcagactacgaccatttgcttgatattcaacgacacctccattattatcgttgttgcctccattattaccaccattcgcattctcatccatgatttcttctgttttagcagttgctgaaactctttcttgcctcttgtttcttctgtttctcctacaggtattcttaacttcaggatcaactggcaatatgacactcttcccttggccttgcatacaacgtcaattcttaaaatagagaaagacaatgttgaaaaaaacaagttagcaactagtaagaaaaataaaccaaagtagaatttaatgtaatcttatgcaatatcaatctgtaaacaattccctggcaacgagaattaatacaactagataaaatctatgattctatttggcaaatcgagaattttatgattgcgataaaaataaaagctaacaagaaaataataactaagagtgattatttatggataagcaattaggaatatgaatcctgttggttcagtttctcaatttctaatgttaattataattctctccctactggggatgacagattatcaatttaatcctaactcttctcagatcattaagatcctaaatcataaatcatctattcgaatctctgcaatagaataacatacaacttgcattaagaacagaatctacaaatcacatgagctatgtaaatactctcgttttacatcaacttatctttattttattagagcattcctaatactcacttctcagatttcatcttaggatcataagtcacatttaagatggccagtttaaaatatgtaattaaagcaaataagaacaaatggcacaatcagggatgaaaaataataagaacattaactgaattagagaaacgtcatctaacaatcatcaaatccctaaattgggaatttatttcatgtccaaattcataacaatactaaagcagaatttaacataaaagaaataaaaggagaagaagaaagaaactgttggtggaatgaattagggccgcgactcttctccttctgtcgttcttgattgcttttaggtctaaaattctcttcccctcttctctttctcgtagtatcctttatattttttgtcccagattttaaaagatgaaattggcctccagttgtacggaacctcgtcgtggcaatggattacctcaccgcggcggtggagtagctcgccgcggctactgggccagtctcgaaagcttcattctgccaaattttggccatcgccgcaagaagtgaaccaaatcctgcttttctgatttttcttggctcgactttgtcttttatcatacttttgaaacctcgaacatccacaactatgggaaacttgaaaacatagaaacacaagcgtaattctgtcctaaaacatcaaaaaacgactctatttgtgacccgaaaaataggcttaaaatagcctaacact

SEQ ID NO: 20318 - DNA, 8161 bp, Cannabis sativa
aaagtggcagcgcctatagtaatccaacaggtgaagtggtgaggagcttattttgttggcacaccaggcaccgtcaaagtctcgaatatcactacgcattccttcccaatacaattcagcttcaatacgcttgtaagttttcagctcacccgaatgacacccaatcggacttttgtgaaatgcattcaatacatgtaaaataatgttagatttttttagaatgaccagacgcttttgtaatagaggatgccatctaggatggtaaacccatggtgttggtgttggcccaattgaagaccgtcacgaagttggacaagaaaagggttagctgctatttcttgctgaatttctagccaaagcggccattcagctgtcacgaaaacctacaaatcagctacatctgtttggcgagacaaagcatcagcgaccctattactggctccacacttattctcaatgtcaaaatctaagcccattagtttagagacccatttttgatacttcgttccaattacccgctgcttttacaggtatttaagactttgttggtcaattctaaccaaaaaaattctgcccattagatacggtcttcatttggaaatagcataaacaacggctagtaattccttttaatagattgattttcgtctagcttgggcccttgaaacttggctgaaatacgcaataggttgatggttttgcagaagaacagcccctaacccatgatcgaaggcatctatttcgatcacaaacagttttgagaaatttggtaacgataggacaggaacttgagtcatcttaagcttgagttcctggaatgcctcttctgccaatttgttccaattatactggtccttttttaattagtcaattagtggtggagccaccagagtgtaaccttccacgaacttcctgtagtacctagtaaggcaaaggaatcctctcaaagctttcaaagttttaggtgtaggccaatccaacatggccttcactttttcggggttggctaccactaccttgttggagattatgtgtcctaaataggatatttcaacttttccaaagtcacattttctcttgttgacgtagagctaattttaggctaggctttgcaagacctcatctaagtgttgttggtgttcttccacggatttgctatacaccaatatatcatcaaaaaagactagaaccaagtggcgaagatggggtctgaatatgccattcattaatgattggaatttagttggcgcgtaggtcatcccaaaaggcatgactgagaattcgcaatgcccttcatgagtccaaaatgttgtcttgtgaacatcttcagccttgacacgtatttgatgataacctgatttcaagtctaatttagaaaaaattgaggcaccatgaagttcatcaagtaacttatcaatgactggaatagggtacttatttggagtggtgacacgattaagtgccagatagtcgatgcaaaatcgacatgagccatctttcctttttaccaatagcaccggacttgagaaagggttactactgggttatccgatgccagttgtcatcatatctttcattaaatgttcaattgctgacttctgaaaatgtgggtatcggttagggtcgcacacttaccggagatgcacctcattgtaaattgatggcatattcatggttccgaactggtggtaagccactaggttgagcaaaaaccccttcatgtttgagcaaaatcggttgaaggaactccgaagtatctttggctatttggttctcctctaggcccccaaaattgaatcaattaaaagaccattcccctcaacgtacattttttagacatggcctgagtgagagataaggcttctctcaagagaaggatctcctttgatagtaatttgttggttgccaatttagaattgcattgtttgaagtttccaatctgtgtgtgtcatccttagagttgccaaccattgtggtcccaaaataacatcaacactccccaattttaagggtaggaaatcatcaaaaatttctatgtaggtggacatttttgcatatctccttcatcgtgcatggaatctccattgcccattgtaacaccgtattgactagtcttagtaataggcttgagtttatccaccaacacttcagagataaaattgtgtgaggcgcagggatcaattaaggtgaccactttgcattgttcgatcaaccccttcaatttcatagtgttatttgaaaaaaggcccgctattgtagagaaacctccactgtgcccttgagttctgccatttctaaatcaaccacaccctcgttagcctcttctgaaccttgttctaaattaataccttcaatttcatcagcaataattaccacatttatctctttgtttgcagcgatgtcccaatgaccatttatcatcgcaacaaaaacaaaggcccttatctcgcttatattgaaactgactgtcggtgtatttccaggtatcggtgactggtttttggtatgtgtctttcatatgtgttgaggtaaaggaagtatgaagtggtggtgtcgtagtgcggctgaaaccagaaacttttggtctatagtgggtggttgcattcacctcttcctcgatgtcttggacgatttccatttcctcatcaatatttcttggtcgttgcagccggagtttcgcgcggatagtgggacgaaggccattaatgaaagtactaagttgtatttcaggtgaaacattatccagaggagccagaagtcggataaactgcctcttgaacttgattattgtaccctcttgccttaccgccacaaattgatcatataaagaaccagcttgtgtatctcggaagtgcctcaacaccaattgtttcatctcctcccaactcaagattgcttgctttaatctcaaactgataccaaaggagtgtgtcacccgagaaagagataaacgttgcctcgaccttttcttcctcgtaatggcagcaagcaaaaaatcactctgcttgcataatccacccgtcgagattttccccttcgaaagttggcatcttgagtttctggagtcactgatcgtttcgatgatggtggttgtaataatttcgttccattggggcatccactataatgggatttctaccactgttgaagatgcgggaagcaccaggactcttgtcctcaagcgcatctcgagtgtcggatcggcagaaggcttctcccacatgttcttggacacttcttgattgtccgtgatcatttcttggttgttcttggacctttcttgactgttcttgggcctccaaaatgagttgtagctgttgttgcaattgttcatgaagctagcgactcatttcactcaccgagtcattaataattgtccagacggaatttgtgacagtttccgtgaccgattctagaattgattcctagaccgatagcatcgtcaacttcaaagcctcctcttcaagggtggactccaattgactcttctctactggtttctttagcattgtcagtagctcaccacaccaaattgatacaagttcttagattagaaatctgctatcaagtattagaattcccaggatgaaatccctcaaagaattgccttttatttaggaataatgatcaaattacacccagctttcaagaggccaatctctccaagtacacaacctttcaagagagttgctctctccaaaaaacttcactcaattcttaatgctctacacccttaactaagttctaatctcctatatatagataataagcttgccacatcagcagatttaattaaacccaagtgaccaatacaaaaagataactcaacccttccttaaaacaatttgaataaaactcaactaaaagacttgagcctggcctttaagccctctctttctatggtaaacaaatctgaccaggggcttatcagtctaaatatataatatagtaactacataaaatgtacaacttggtttcccattctaaagggacaccacttacttagattatctattgctagagttttcaattatgaagtagatattttgttttatatcaaaatatatttgttaccatggtttccctctgccacaagtgagggttatcaataaacatgagcaaggtcaatctaagacaagtgacctctatctctttttcaaaaaaagaaaaaaaaaaatcttaacagataccaagaaataaaagcaatattttctacagtacctactagctattatacctcgtccactaggaatgctatgatacaaggctatgaaagaatatgaatatacattcaatcttgtccagttgtccatacaaggctatttggcttgtaagtacaatatgcaattttcattccttttattttagcaatattatttctactagataagcaatattaatctgatgtatacaaacaagagctaggagaaggcagttgacaaaacaataatgaacctaccagtctagttgccactttcttcccatgttcatctccattttcgtaaacaagcttgagagctccaggaagaaccttccagaattcattcacaaattcactgccctttcttctgctgttttgtaagatatcattggccaggtatagaaaagatatgcgttgttctctctgggaagagttaaagaacttatcccatgtttcaactatcggcttagccttctttcggcaagagatacaccatcgagacaacgctgatcagatgtttaaagaaaatccatgcaataaaacagaacaatatttttcccttcaaccccctttttcattacttatggaataaaaaacaaaagaagaaaagctaaaatcatagaattataaaataatgaatagtaaaatttgcatttcaccatatcataaatctgacgtttctacagattggtcttttacttggataaactgaaatgagttgtaatagaggtatcaagctatttgagacggtataaagcaccagtcatttccatatacattaacattgtaggccatcattagcctaaattctccaccaaaacattataatggcttccccggataagaaaagttaggaaagtaaaaaaaaaactagaaaagctataaaagctgcttgcgtaatgcaactgtttatttgtaaataaaataaaatacacatacaaatacaaatactaagaaaaaagtcaagtaaatgcacatgcatgcatagagaatgactcacaaatagatagaaagcaaaatttattaaaaaaaaagttgcacaacaaatacattgttaaacaataataccaactatgacacccaaaaaaattaagggtttgtaaaaaaaggtctacagggaatcaagagacattttagaacagtaatagtaccataaccatgtagatatagtatatggacaccaagtcaaggatacattcaatgctttgctgtgaattgttaagtttagacaacttctcagctaatgccgggccatcaaaaacctcgttgctcatactggtacactcttttacattccctgtatcaatttggaaaacaacattatcactgtactacaatcacaacagtcaagatgatgcaataacaactagaaagaacaaaaaaaattataagtttcatttactgtgtaatgcagaacaggaacaaatcaaatggcattattattaaatattatttagatttaattttttctttttctttggtatgcatttactgtgtaatgcaaaacaggaacaaatcaaatgacattattattaaatattatttggatttaatattttccttttctttggtgtttgggggtgtgtgtgcatgtgtgtggtggggaggaggagttgtgggaaaaaaagctggcttgtattgatttaaaaggaaaatacaaagacgtgaaaaatccactggcatcacctacacagataggtgatacaaaagaaacaatgtaaacaaaatctagcaacatgaaagaaagaaaaaaaagaatcacaaaatgacattccattctcttgataagacagataatgaaatctcctcaaacgcctaaccaaagcctatttttttttcccataaccaatttgcggcattgttcctcaaaaaatctacttgttcctttccaaccatcatataccccaaagaaaaaccaacacagcagtgaccgaaagaacttatttgtataatgcggaacatcaaaatttccttacaaacaacaggcattccccaaaacaaccctaactcatttactagtttgtactgtgatttcaagaaaaagccataattgttgaataggtgtttgctattcttattatcttttctgcacaacacacactagctaggagaaaatatcataaatggcttcttcttttgaagaaattcctgcactttcaagaatgcttccagtcctctgacttccatatgctctcttctctctcctctttctgagaacgtttcatgcatactgggcgtttccatggcccttctagccatggaaaacaccaaaaccccactggttttgggaagaaaaaggccttcaccccactagtgttggctgggaaaatttctctgatccaaattgtgatcagaaacttcacaagtattagagttttcgtaccaaacacaaggcgtttatgatcaccttgtcaaaagatggaggttcggttagaatttgtgagagaacaagactttttgagtacgagataggggtaacaatcgatgcagcggactggatgactgaaattctagaggaactaaaaaagaaaactggacagcaaagggttgctttcaaaagattcttcagaaacagcagtggaagttattttatggaatgctttactaactctaatggagctttcttgaagatctcaaccttgaagaataacaaagtcagaatggtgattattccagaagaaacagaagctaaagggtggtctgatctatataattgcctctctggtgtacttaaaaggaagccaggaaacgctcatgatggagtaaaacagcaaaaagaagtgaagataggagaatgcaggatgaactctcaatcatgggctaatatcgtcaaaagatcggggcagcatgttactaaaccaatgggggggaatgtggtgaaacaaatggagaaaccggcattgaaaattcagcacaacaaggatgctgcggttcgaaacaggggaaaagtggaatggagagaattatatccagaaatcaacctcgggtttaaaccaaaaaatctatatcctgagaagagattttatcaacctaaattctatgaatatatgtgttcaaaagctcaacctaaagattggagtttggcaattttccttgctagggacaacactcacgcggactggagcactattttctttaatctttcaagagagctagagagaaagctaatagttagtcaattatttgatgatagatgtattacttggtgtaaggatgagaaggaaaaagaagagttagtcaagctgtagagaatgtatgttccgagggctcaatcatatgttacattctctccttggagttgggaaaaccaaaagaataatgtaaaggtggaatgcaaaggatcttagattggtgttcaagggctccctttgaacctttggcatatgagaattttcaggaaaattggagatatgtgtggtggcttaatggatgtggacaaggatacggctgaagctagtgttttatctcacttaagactccaattgatgggtgatgagttcggtttagtacctgaaaccttatctcttaaccacgatgataggaattacgaattaaagctcttcaagctcaatgatttaagctacagattccatggatggtttaatacatgttggtatcaagattttgataatagaaaggtatttggtgatggggatgtaattgaaggagaaaggaaaaaagatggagatgaagaacggatagaaggagagaacgtgtgtgaggcaaacctggacaattgtgtgatactggcctatgagaaagaaaacagggagtgttcaaccggagaggtaggcagtgaagatgatatagatgaggacgcacaggtggagtgcgaggtggcggctgcagacggtggagaaggagggccggttgaagaggaaaagccagaacagaggaagattgaggacattaatgagattacaaggacggatgttgggagtcgactctcgagatttgaat

SEQ ID NO: 20319 - DNA, 8484 bp, Cannabis sativa
  modified_base (27)..(34): a, c, t, g, unknown or other
acaaataggatcctgaactgatttttnnnnnnnntaaaacttaataataatctgatctagagaagttatgacaaactggttacattttttatatctgtttatttagaaattgtcataaagttggttatattaaaaataaaattgttgaaagttgagctcaagatcctatttttactattttagaaaatatagggtccaatttatcatttaacaaaacacaaggtctaaaatgatatttacaacaattaaaagattccttaatattaccatcatcaatctgtgccatcgataaacgtgctcaagaatttccccttgatctttagaactagcttatagtatcaataacaatactaaagacattaattaggtatttttcttatagaatacttagcttgtgtattatttaaaaaatgagatcctcggacctcactcgcaagggtattctgttccttaacatatatacttagtggatttttgtattagtgttaaatttatgaagaattagaactcttccgagtgaagctttccaccaagcttaactttgggtattttagggtttttattccctccacctacaccttccagcatttattgctccaaccgtcacttttattgcaattaatttcaaccctgtgtaccttcatgattaccaacccgattaccaaaaccctaaattgcctaacatcgattactctctctgctttccatttaatcctgacggtgcacgtttaatcatatttattatgggttcaaggaactaatggcaatcctccgctccaacgtttccaccctcctcccttaactgccattttcaacctccacaaaccttatcaaattatcattgcaaatctaatgatggtcatccatgcccctgtgaaatcccaacatggcgacttcttgatctcccattttcaaggtggctctccatctctaggtatcttcctttccttctcttttttttactatttaaagatctggtatttcggatcacccaccaaaccatcctagaccctcatctgtccagattctcaatcaattcatatgacttcttcttcccacaatccaccaaacactctccaactcactcacgaggaaaacctaattcatgattttgaccatgtttctctgcactcgggagacaccaacacctcctattgcctcgtcttcaagattctcactactaaatctcccaaatcgctttggattgaaaaagctatgcgtgaagcctggacgctccgtttccctgtggaaatcacagattaccactcaaggcttttccttgccactttccaatgcgaaggtgacagacgacgtgtccttaaagatcaaccatggcattttgacaaatgccttatgatcttcacaaaccttgagggtctgaacactctgtcaatagaccagcttcgttatgtcccaatctgggtccaagccaacaacacccctttcagccagaaatttcttcagcttgctcagttcatcgctgatgagcttggtgaccttatagagatccatcctttatcccttctggaaagcttcgacccataccttcgtctttgcgtccttctagacgttactaaacccctctgtagaggtatgaatatctgcttccgaataattaccaaaaccaaatggattgctttcaaatatgagggattgcaaaacatttgctatttctgtggtactcttgaccatacttacaacaagtgtggatgttacctaatgagatgcgacaatttcgccatccccctgaacttggctacacagaagacctttgtgctatgtcaaaaaatttgttaaaaaaatccctttgacatgtccaactccaccctcatagatgagtatataagccatggcagcaactctaaacagggtctgcaacaagttgttgatcaatttctaaaccttggctcgaactttgtcattcctactcttgcccaagatcatgaatcagttttatcccaaatcttaattgctaataccaactcgactatggctttttctactattccttccccctatcagggtcacttcggtgattactcatactaacaaggggaaatgtatagcccaaccagatgactctagtttgcccacttccaagattgtcaggtcccacaacaaaggcatcattatccaagagccttccagtacccctattgccaccacgacgggggtcaagaggcctttcacacgccaacatgctcaagtgggtggctcgatcagttaagagggcccgtgcagtaaatgatgaagatgttgttgttccttcactctcaaacttggatgaaacgacgggtgttgctttgcaacctcaccgaggaaaatgaatttcattagctagaattcccaaggattggggagccctcgtgcatttcgtaatctctccctgttggtgaggcaacaccaacctattttgctttttgtgatggaaaccaagctccttccaggccacggaatgcgtatcaagactagtctaggttttgataatgtttttgaagtgtctcggagtggttttaggggaggccttttactcttttagaacaatattatcaatgttaatgttttaactttctcccttaatcatatagactatactgttaatattagtaatgatattatatggaattttactggtttctatggttctccttattctgtttctaaagactgtacttggactctcctggttgcatttttgactctgctcctactctgctttggtgtattagtggtgatttaaacgactatctttccattaacgatcagaacactaccaatagatcccttaattatgctatgaacaatttcaagtctttttgaacaagtacaatttgctgcctcttcctcacactggcagtaagtacacttggaaacgtggtagtctttttcaacgtctggactggtgtgttgttagtagctcttggtagacacattttccttttgcctccttattccacttaggtttctttggttctgatcatcgtgctatcaaaaccatccttgaggataataccactagtcttagaaatcatggtcagttctttattgaaaatcactagttttctgataaagattttttcaaagtggttgcgtcctcttggaaaacttttaatcagcacaacgttacaaaatctttgattgattttttaaaaaatcaaaataactgcgtggccaatatcaaagagtggaaatctggtcaaaaatctcttaatcatcaaatttcttgcactcagaatactcttgagcaactttatcaaaagagagtccccattagagatgacctttctcaagccagagctctcgagtcatctcttgagaaccttttgcataaaaatgagatttactgaaagcaaagatcccgtattgactggcttaaatctggggacaaaacaactaagcttttccatcataaagctttggccagaaagaaaaacaacaacatccattctatcactctcgaggattgctccattgttaaaggcacctcctctatcatccctcttttcactgaatttttattcctatttgttttctactcagggcaaggaccaagcctctatcaatgatattttattaggaatcactaatcacttttccccaagccaatcctctgaccttgccagtccattcactgctgatgaaatccataaggccctttgggctctctctagtgacaaagcacccgactcttgtaacgcctgtatttaaaacttactaatctcaaatagttaatcttaaatatattataaatattaaaccttatattcgggatcccgagtctttaaaacacagttgaaaattacatttactataaataaagttgcaaactatcattagtatatattttttttacaacacgcaactacaaaatacaactaaaaaatgttaaaagatcgaaaccctccaggctgcactgccgcaatatgtataatcactgccaagctccaactcactgttcctccagcttagattttcccttacctacacaaggtagcaaactgatgagtcgacagacttagtaagatgcgcataataaatataaaggtaatgctgcatcggctttatgttaagccgttctgagctcaataaccgagctcaccagatggttaagaacgttctcaacagaagtatgaccactgtaccatatgcactaaagtaccaactctatactcgtgttagtagggtcttaactgtactttcaggagttactaagtgttgtaccacatgcacgacgtaccccctggtactcgtctcggtaacactgtaactattctaaaatcctacactgtactaacacccttaaaatcacatttccgttaatattagtagtgtaaacaactaatacaagcatacattcaaatatatattatttatgctatcttacctcattccagattcaagcgtgccggtcgacttgaatggaaaatcctcgagctgaacggaggtcctaagtcacatttcataattaggtaaataactcgaataacccttccgaaaccctagctcataaccaagggtaaacttaatgacatatacaatatactattaccctaaatactaagggaacccaaactatgctcggaaaataacacagattcgaaaaagttgcaatttcgggggccctggcatgtaaaccggttaaccggttttacagaccctgtaaaaccggtccacctatttgcaccaacaaactccaaaaattgcacaacttgtccaaatctttcccaactacaaccaaactctcaagaacacctgaacacatattccagaacaattcccacacaatagcaacaagaaaaacacaataaaaattaacataccattgttgagtcaagtttagctccatgaactcaaacttgctcaacctcaaaattaaacaccaattgcagtacaaataaccttagaacattatttgggacctacaaaaactaaccctaaacgaaatttaccaacacacaaccaaattcatcaaaatccaccctaaacctaacaaaacccttccaataacatcataaatccataatagataaagtttagggttttaacacagattaagccttcaaatttacacctaataacctctgacattgaaagaaaactccaccctaagttggtggtttttgctggccgaacaagaagaagaggaataataaaggggcaatttcttctatttactcatttcacaacattataagataaaaggttaattaattaacctctattcctcttaagtggcagctgtcaaactatggtgaagacacccaatcaaaaaaagggtaaattactaaactaccccacctctaaacctagttcaaaaatcggcttaggggtaaaatggtccaataccacaaccccgccaacaccaactatttgagcttacatgacatattctctatcactacaaagctctatatttccccaagtgacgaaaataaccttcgttgcattttccatcgtcgccgaactaaaatcacagagataacatattttgcatttaacataattattcacataaaacatcaatattaattataataataaaattagcacttataatctcactaattaatatctaaatatttcagtcgctacaactctgatggactgaatgctcatttctgccagaagaactgggatgtcatgggcaaggatctttgctctgccatccttgatgtcataaacaatcattctgatttatctcctatcaacgaaaccactttggttttaattcctaagaaaaagaatgcctccactctttgtgattttagaccgattagcctctattccacactgtacaaagttatctctaaggttcttgccaatcaactcaaacctgttcttcattctatcatctctagtaatcaaagtacttttctctccgataggctcatcttcgataatatctttattgccaatgagcttattaatgctatccattacaggaagaatgacaaacttggttgggctgcccttaaactggacatggagaaagctttcgacaaagtagaatggagcttttcaaggccattctcattcatgtgggcttccctctcaattttgtttctcttattatgagatccatctccattgttcactatcgtatttttatcaatcagtccctttctaagatcatcacccctactagaggcataagacaaggtgaccctctttccccttacatattctttttgatggttgctgaaggtctctctgctgccattcaggtcaaagaacagagaaatcactttgctgggcttaggatctatcataatgcccctatcatttcacatctcctttttgctgatgacaatattcttttttctaccgtgtctaagaactccactgctaccatcactgatatctttgatctctacaagaaggcgactgggcaaacggttaacctgaccaaatcttccataatgctccccctaacactaatactgatgccaaaatccactttaagaattctttgggcatttttagtgagggctttatgagtaaatatcttggggttcctcacgacactggtagactcagtgagcaatttcattacttggtccaaaaagttgcttctaaaatgaacatttggaatgcaaagtttttctcaaaagctggtaaggaaactcttactaaggcggtcgtccaggctattccttcttttgccatgtcatatcaaactccctaaaaccacttgtcactctatccagcgcctcatctctaaattttggtggggttcttgcatcagcaacagtaaaattcattggaagagctggtctactatctgcacttccaaatattttggaggccttggttttagatcctacattcaccataactaagctcttatttccaagcaggcctggagaatctagactcacccttcctccctccttcactcccttctcaaagccaaatatttcaaaaacactgatttcatcaatgctcctactggccattgtccttctcagacctggaaaagccttctctaggggcgtgagctccttaagcgtggtctcatttggaaggtgggggatgggaaatctatttctttaacccacaataagtggataccttggctccattccctctctttccttaacaacattgatccctcaaacctgagagttcccttctttctggatagcagtggcaattggcatatccctaccctcaagcaataccttcctttttcccaggtctaggaaattcttaaagttcctatcgatcctacttagagtgacagcctcatttggggtcatcagcactcagggattttcacagtcaattcagcctatcaccttgctaactccaccccactcctttctctggccacctcttctaaccccgtgggtcaaacctcttggtggaaatctgtttggaatggcaaaattttaccaaaaatgaagcacttcacttagaaagcctacaaccatatcctcccatgctctcctaacctccaccataaaaaaaccctccctcacccctactgccctctgtgcaaatcctaaattgagaccatttcccataccctgcttcaatgcccccttgctaagtctgtttgtaagaaatcttcactcaaagagttctctgcaaattacatatatgatataaagaatttttaccttataggctgggagacacttagcaaagatcaattttggttactattgggtttagcctgatatatttggaacatgagaaataataagcttttcaattgcatatctaacaatcttcttgatgcagaaagttttgtgaggaatcttttacaggattatcaagaagcccagctgcttacttcccaatcaaccacccgtgaaaactcgaccaaaataagtatttcagcccctgtagtgatccaatgattttcttctcaacaacaaacctgtttcaagttaaaagtagatgcaacctttaactccaaacttttaaaatctggttttggtgcttcaattatcaacggtcataactagaggataacatgtctgtcaagttgcaaatggggagcctcaacttcaatttttgcttaagcgcaggccctcttttctactcttgaatgttgttcagcaatctgtgtccctcttggcaacattgaatcagattgtctgcagctagtttctaaagtctaaagttcttggaaggacaactctgcactttccagtctcgtccaacagattcgggagtccttatctcttttctctaatgctaccctttagcatatttcccgtagtggaaaccaagatgtgctctttatgtaagggaagcattaaggctagatttggattcggtttggagaatttaattctctttctctgtagctttcgtgtattgttacttcaaaaaaaataaaataaaataataaaggcagtaaaaatatttctcgcaaccccctatgataatttctggattgatcataaggattacaagcagttagttatggatagttggaataggcctattaggagccatggattgaaaggagtc

SEQ ID NO: 20320 - DNA, 1157 bp, Cannabis sativa
tgctcttaatcaaaaatataagactgaaggtcattgaacaatttttctgatattgagcatggctcaattgaacctgagttatagctaacatccacttagctatactatgagcaatataattaaagtttccgaaaattcttacaaaaattacaaacaagcatagaattagctaaatttttacacttgaaaatataattattaatttctcacttaggagagtgtcatccttgagaacttgaatcactttcttagaactactctcaatgataataaagaatagcatcttagcaacaaccacttctaaggcaaactgacaagttgcggcttcccccacaaaaggcaacattctcgttccagcccacaaaattgctcctagtttgtttttcgctacaacaactattgtcatcgagttatctccaccgcaactattgtcatgccacatcaaaattaatcttcatctagtccaatagtggtagggaccgaccaatgtccacaacaatagtgtccataataatagatgcatacaagaaaactttattaatatttaccacctcataagaatttcacctatgtgagtcccaaaattattgataggaattaagccctaattaaggggaggctcgacaaaagtggtaggtaatatgacaatgaagaaacaaatgttccattgattcctcttcacatccacacatggacaagaattattatcaaaataggtaagccagggaaaacctacaatgttaaacctaatgagcttaattaaatgtttaatcatattttatgtttgattgatagcttaatcgtcatttttttaagtatgtatgctatgtattatatttggtgtataatatatttgtttgggataattttattttatttaaaactgactatttttttagttactagttggatgctaatttaagataaatatattgttttattattataaataaatgcttaaattatgaattcattcagcacacaatctgagtgattaagtagccccacattatcccttcagcttttatatttatatataatataagttggcactcttttcaaatagtgattgatacacaatttttttactgaaatcacagttattataataaagttttaatttcaaaaaaattatggaactcacattaattaatttt

SEQ ID NO: 20321 - DNA, 3649 bp, Cannabis sativa
  modified_base (791)..(793): a, c, t, g, unknown or other
cccccattttttaaggccatttttttttttttttttttttttttttaagactgaagtataaggcgattcaagttgactctaactgtgatcagggtgtgtcaagcgcttaataatgatatttcctatgtttcttagttttgttatgttttgcatgagattcatgtgttgtgtgaatttgatgctatttcttttactcattgcagttggaccactaatactattgctcactctttagccaaagccccaaaactcatgctcatcttggctataggctaaggaaaggtttagtggccggagttaccttcatgtgttttggcatgactgactaggccttttgtttcccgttgtatatccttggtttattaactttgattaatataagtttaatcttcttcttctcaaaaaaaccaaagtattaaattaaaaataatacaaataagaaactaaatctacctcttgtatttaacaattgattggattggacctatttttttttttgttaaataacaaattagaatttatatttttaaaatgacacaaaatagtaacgggagcttaataattacctaatagagaggtgatatcataagtctaattacattttttatattttttcgtgtaataaattatcttcaagtcagaatattattttgtattatttaaaaaaatacaaaatttaattattatttattaaattagagggtctaatcaataatttttataaaatatgaagtccaaattagtattattcctattaagaataatattaatattttatttatatatatatnnntatatatatatattatagtgtttggttgacattatgattatgttaagttgtaggtttaataagaatcccgttggtaacattatgtaaagtggaaaaaaattgttgatatatggatcgaaaatattttcacaacacaacattatttactagatcctggacttattaatctttaacaaatgagcattaagtatctaataccataccaatgttatgtacatatctcataattaattgataattttctacattatttattaaattaaaatgtgtaaaacacattattaaaataaactaacaaaaatatactactttttttggttatgaccctcttatcatttttcttaacaaatatttaatagccatttaatatcctatgtttccctatgtacatatttatttaatttttgtttgtagatgtagtcgaatatcttaaacatacataaattactcgattgttatttattgaaggataatttaagcaaatcatcaagaaactaatatattgaagaatatcacttagttgagcaaaacaaaaactaaataaaaatttaataagaagaaagaaaaaagaaagttggacataccaatttgagaatcggaaaggagaagggaatcatgaaaaacaatgagtgttttggttgggacgatgacagagatgtgtttgactccattaagagccctaacaattttctcaatcagtgaaacttctgatgcacaacacagccccaacacttcaaagtagcttttctttatcatcacacttcgatcatcataatcattcatcttattttatctctttgattatgaaaattatgagatgaacaatatttatcaactttataaatcttttaaatactggttgaccacctatgttatgtatgctgctgtcattgtatttctaataagagttgactttatacttattttttgttgttttattttacttgttccttcatttcactaaacatatgtaaaatgacaaacactaaaaattagttaggtagatgattcaccttaataaaaatatattcatgaatatgatatcttaacttcctcgacaatttaattgtcaaaaaatatatatatattttttaatttagatgacgctattggttacacttttattttttaattttaaaaaaaatagaagtagagtttttgtttttaaaattttattttttaaaaataaaaatgtgttatgtaaccacttttgtttttaaattttaaaggaaaaaaacaaaggtatcttatgtaatcacttttgttttataattttaaaaacaaaaaataaaaatgtgtttggtaactattctaattttttaattttaaaaataaaaaacatgaattttgattttttttttttcaattaaaaaaactaagactgtcatttatttttaaataaatatataaaaattataataaaaataaaaaatttgtatcttaaaaaaattcaagtaatttgaaatcacgatactcattatctataacacaaaatcgacaaagtcgtaataaaatacgaactagtgcttgtccaatcttgaagaaaaatttaaaaaagtcctaacagttaatagacttcaaatatcttcatcgtcgatttgctcttcatatatgattatcaatttcatcacagacattagccattttaagaatttgatgtcttgaaatgctaaacttaacactatcattcaaagttttgtgtgtgctttgtacagtagtatcttgcacttcaagaatctcttcatttccatcaaaatatatgtatttttttgcattcgtcctaataaaagtatgaatcccacaacaggaaatcacaatgtacatctgtattttcaaattatatgaagatatttgctttaaaatagaaaaacaagccttcaatatgtcaaaacatcgctcaatgacatttctcaaaggtaaatttcgataattgaacaactctttttttcctgaaggattacgatctgcatattgattcaaataatatgaaaaccaggcatgtttgtgtatctagaatcaatctgataatattttcctaaacaatgtaattcatattagttaaatattaatgtataataatgtcaataaacataataagtttgataacacttaccatggggtggagctggaaattcataatttgggtttttgtggcacattctaaaaaaattcgtgcatcattagccgctccttcccatctagcaaaaacatatgtgaacttcatgtcaaatgaacatatacacatggtgtttcatgttgtatccacctttcgacctcgatagggtatttgttcattaatgggttcatgagcttgcagagatatgagttccatctatagctcctgcacaattttaaaaataaaaattaaattattggctttggttccttatttattcattaaatattaatataatagtaaaagagatagtataaatttttttaccttgaaaaatggataatattttggattgaatcgaatttctgaaggagctacatcaaacgaaggtggagcaattaacgctttgaataaatgacatgccacattcaaaacattcctaaagtatttagatgtagttgaggtgagtgttgaaatcactcagccactacacaatatcattcattatgtccaatgacaaataagaacataggaagtttctcctcaattgaaagatagcgagagttcttcaataattttaccacaaaatagtttaatgatatccttatcgattctgaataaatcataaccctctccccagcctctcccttgccctagtgcaatcttgtttttgtgatatcttttgattgaaaaattatttttcattgaaacaaaagtcaaattttgttagaattttgtgt

SEQ ID NO: 20322 - DNA, 2954 bp, Cannabis sativa
tgtttagaaaaagagattgaacgagagagaaagaatgaagagaaaacagagcaatttcattgaatgaggaagaagaagataatcttcttatatacaggaaaggcaccacttgcaaaccaaagaaagcaacagaaaagtttgttacaatcaaaactaacccctgtaacagaaataacaaacttaactaactgttattagcactatgacccttaacagtaaatacaagcataaggacaactctaatggtgaaacccaaaatttagtgttaatcaacacagaatcaacaccgaaagattactattttagcactaaattttttttttaattttaaccacaacaccacaaattatactaaaaagtattttttttatattcatattattttatttaattattttagcactaaaaagttttccaatcccaacccaaaaagtattatttaattagtggaacatcgtatactcccataaaaataagataggtttgcagttcgattgaaaagttttgtgggaaaatcacattatatataggattttgctgctcggttggagatggcctaagtagataaaaatagcatgaatatcatgtggtttttgattgaagagctctgtactgaggtttggattcgtttgtgcatgcttggttgcagttttgtacttagattttgactatctatagttctagttttatgcttttcagtaagatacaatacctcaagtacacttaaattaattctttaatatatactacctcaaaataaggaatgcaaatccagaattcaagtatacgtataagcagaaattaaagataaaagtataaccatcaatttccaagcaagaagcaacagccatttagaactaccaacaataatccatcacagagatactgttaagctgtcaatttaatactaaagctttgaacattttacacttgtaatttagcttcggttatgggggatatcagggtatgaaatattgaaatataattcaacctgatatgcacagttttcagcttttatcatcaaacaataatgaaagaactttttatatttaattcttattaagttaccttcattccttcctcaacaagcacggaggtttcaaatgatgaggaagactcaattgagatcactccatcagggccaattttttctatagcgtcagcaattaagttcccgatgaactcatcgtttccagcagagattgaggccacggctgcagaacaaagccacttttaatacataacactaattaagttataagctataatataatatgagcaagtagaagtcatgacctttaacatcactccttcctttcacagggaaacttctatccttcaagactttgaccaattcccttacagtcttttccattccctttttcaaagaaattggattagcgccaaaagcaacagccaacaacccacatttgatcatttcccgggtcattataatcgcagtggtggtaccgtcaccagccaaatcattcattttacttgcaacctacaagcgaaacgcttaaatgtgatatctctgattataaacctcaaaatgaatcaaaacaaattcagggagagtatcatgtagcaaccatggataacctcttgaattagcattgcccctgcattttcgattccatctgacagctctatagatcgtacaattgtaacaccatcattaattacttttagcttgtcaccctcagaaagaataacatttcgccctgcacggttccacttgtatcagataatcatgaagcacagataagaaaacatacttctagaaaaagacttattttcatttatgagttgtgagggaacatggggtaaccataattcatgcgtataaaaaataataaaattcaaaaacacataaaacataacgaaattcaacatctgatggttgtataacacaaactttttccaatagttgaagaaatcacagtttcaaagctcgcctctacactttgaaacacgttttatttaatatggtaagattagaaaaccagaaatgaactttcatatatgaactaaacaaaattggcgtctacccagattgcatatgaatgattagaatgaaacccaagtatcgaaaaggaaaggtaacctttaggtcctaaggtaagagaaacagcatcggctagcttatcaatcccagcttgtaaggcttccctacattcagagccgaataatatccttttcgggccagctctgagcacaagagttctccttctttgtagatttttccaaaacccaggagatagtctttgctttctgccatggccttgtgcttgtaactgcaaaattactcatcattagtccaaaaacaccattgtacaaatacccaatttacaaactaaaaccgcccgagaggaaaattactaacggagaacaatggtgtctgagggtagagctgagaatatgagaaggcaataggcatttccctttccgttggggctatcagttttcagctatctgaacatgcttacgaggtttttgcttttcaagggtttaagcatgtaaggtaaggtggtgtttggttcagtgggatttaattgtaattgtaaaggtaataggaatagtaatagaatgtcatggtaatattaatgaaattactaaaattatgtttggtttattttgcatgagtattgtaatcaatttttttatttggtttagtataaaaataaaattgaataattagtatattgattaaaatgttcttattttatttattgtcaactatatttggtaaagaggtaagagagagacgggtagaaaagttattttgtagtaaattggtaattataatcctcatttatgagttatactcatgtaatgtaatgagaattcatccaagtaatgtaatactcattacaatgtaaaaggattataaaagttaaaaatcccaaccaaatattataattgtaatctccattctattccaatcttgatta

SEQ ID NO: 20323 - DNA, 3602 bp, Cannabis sativa
tgaataaacaacattttttttttacttcgccctttgcattgaaaaaacagatcaaaaatgatatgattcaacctcaaacccaattgaatgtagcggataacagtggagccagaaagttttaattttctacataataaattataataataatctgaatctaactctacaaaagcaagagaagggcaccccttaattaggatcttgtaacacttttgctttaagtcttttcatagagtgatgattgatcctacaaatcaatatgagtatttctaacgtactctgttctcattcacacgttttctaggaggttttacatcctaagattacttcaaatcaagcacgcttaactttagagttctttggtgatggactactaaaaaataagatgtactttgttgatatagttactacctatcaatccatttaaactattttcaactctaaagtctcatacctacacaatcatataatcatcacactaccttcttcaaataatgtgagattgtataatttacttaatacttctccttacagatcacatgacaactaactgtgacatatcgataaagcgatataaacaaattattcctcatttttgttaaataattaatgagagagttgaaagcattatattgtgttcaaattaagtattattatcttatcaaaggaaaaaagaacacactatttttatagtctaaatcttaaaaataaaattagtatttattaaatagcagagataataatcacaatatactttgaccatcatagtccaaattcttaactcatgacaaatattttttcttaaaaagggaaaagaaaaactatatagtaatttaactaacaacatggtatgtacatgtgtgatcaccatatggatttaaataaaatcacaataaaagccaaaatacttctctgtcacttctataaactttgaatttctttttttccttttatttttaaattgaaacttttagtgaaaacaatatagtaatttatgttatatattgggattctatatttgagtgtaaggtaatcacatggtgaggcatggagaaaagctaagttaatgacaccaccaacctcatcattggacatggttagtttctggctatatatatacatatacatatatttatataaatacttaaatataaatattaatatgactccaaaaagaggatgtcacctaattctaatttcttcttattattattactatattttatttattttgagggacatataataattttatttctttattatcatcataattatacagctttaccaagatatgaaaggatatatgtacatgtacacaatcttttatataagattattattaggttagtttagtaattatattttctatttcttatttcttaagatagctatttaaaaaaaaaaaattaatattatttacaccacatatatattctcaatattggattttggtttgtacaccaatatttacaagaagaaacaaaattggaaatttgagaatcattgttttttaaattatatatttgaatttttcttaataaattaataattaaaaaacataaatgtttgaataaaaatttttataaagagaactaaaatattaaagtgaaataagaaaaatttaagaattaaacattaataagaaaatattttaacataatattatgggttgtaaatataatttcccaatattttaaagtaaaaatatattccacaatctattaattccatgttactaatgatttggaaatatttttgataatggatgaatgatttaagatgatcattaaatgggaaatataatttaatttcccacttagttaaatgaatagaaactcattaattattggtcaatctaggtcatgccaatatgatctctctttatttatttatttatttattttgttttggtaaaataatgaccacaaataaataataataataattaagtgcatcttttgatagatcctaaaagttcataaagttcttccacttaatattatttaaattaaaagccatctaatcaaagagtgggatggatcacctgaatatttggatgttaaatttaatataattaattagacatgttttcatgattttggtgatttattagttctattcaatttttttaagtattattattaaatatccttagtttttaacaatttttataagtggtgttatttgattagttaatgatatttttttaaaaattaattttttaaattatataaaatttaatatttaattatacaataggacaccgaaaaaaatattaaatttttagcatttctcttttcttaatatataaggttttaatttttttaattatttatttgttttgtttttttctattttgtctttttgtgaaattttaatggagttaaaatttaactaaatttatttaagtgggtgtaacagacatggattatattataattacttcttgattttaagagtctttaaattaggacaacctaatgattggcaatcaagaatatctttaatccattagcaaataaaaaaaattaaaattttaagggtaggaaaagtggattctttgaattgaagactttaatttaattttgatagttttttttttttttaattatttattatttaatttaatttcttgtgaaaaagggaatgaaactaataaaagccaaccaagaagctttcacaatacttaattaagtcctttggtttttcagctggcatagcttgctggctgctcaccattctttaatgggtcaagtttgtttctatattgccataactttatagagagattaaattaaaataattagaactattctttctttattttctaacaactttgtgcaatttgattaagtaagaaacatcacatatattgactaccaaattgtggtgttaagggtcatgcccaagttgtttttttggtgtttgaatttttacgacgctatttaaattttatcttaaaagtagcactttcagtgaaagttatgagatttaatagattcttaaataagtgggttgggctatatttttagctgggaaatttgcggcaaaagtcctgagaaagttcagtttgatacaaataagtccccaacctctaaaattagcggcaatagtcatcaaggtcatactttttatttgtccgttagtcctaattttaactgagccgttttctttttttaaattgccacgtgtcaaaatattattagtccaaattattattttaattttaaaaaataaaaataaacataaaatgaataaataaacaccacataacaaaccaagtgttctcactatattgtacatttggttggcgatttaggtttgattaataaacctaaatctaatttgtgttagtgagtttttattgtaattgagttggttagccatcattagaatagttatatgaaatttgattagtaagcaacaccacatactaatactaatagaccactaatgttggtgacacattggcaaaaagtgacctaccaagactcaattcttgactatttagatatcaattctcactagtcatggtgagtagaaatattacatctcatgtggacatgtggaaatatttaaatagattatttttcattcta

SEQ ID NO: 20324 - DNA, 2604 bp, Cannabis sativa
tttgaaccctttgttgaatatcaatggatcgcgttacacataaaaataataataactgcacccactacctatattttaaatcttagattcctcttcttaagatacattcactgcaaatcatgattgtagatttgtagttgatattttgttcaaatacaaattccaactatcaactaaagaactcccaaaaaaacgacaaatgaccaaatagcaatgacataaaggaaccatagcaaccactcgaggagcggtgagaatgtaagaattaaacaatctttgatagaagaaaacaatatcaagagttgtcaatggaaaagaactgaaggaaagcccaggactcaaattttattttgttttattactgcaatgaaaactgtaagtacagaagactaagatcagaacttgatttgattccaaattattagctaccaattcatggcccgcaatacagaatcaacatggtgagaggacaagctttcttcaccttcctcctttctggttactgataagaccacctgagttggccttctcacgtttttggaatggatcctacgtgacaagtgaaaataaagtcaggtctttactttagtcaaaaaaaaaaagtcaggtctttactatttcattaactgaatgtttacacgtggttaacaatctgtttaacatgccatacaaaacccaagtcccaaactaaaattcaaaccaatctttagagcacattccattagaaacagatattgagaattgaaaataaaatagaaatacacaacctagtttagtgagtagcaaatgattcagagacctctattacattataaagcatagcgagttagattctgtgtcacttggggctagctcaagtggttggatgtgtgtatgggaggagagggattcaaactcacaacatttaaaagaaagaaaataacatgtaggatagccagtaggggtatcaaccacaaaattgggttaggattgatggaaagtgtaaattcatcattaatggaagtatctttaacgttcttagttttggtcattgagaaagggtacatgtttacacgtaaatgtagaaaatcaaacaagagtttgttactaaacttataaactgaagcttataaaaaggtttgatttagtttgatcagtaacaaaaggggtattttgtacaccctaatcctcaagacatcattcaactttagaaaaacttccaataccaaagcagagcatatttcagcactatcccatttcatattaagtaatgcttaatcttattaaccaaatatcatattttatcctaccatctttgaaaggaagaaagctctaaaatattttgtattaacccccctgaggaatcaaaccagtacatggaaggaaaccatagtgtgatcactaaacctacccatatagttggtaatgtctgacattgaagtcttacaccccccaaaccaaacgaaatcgaaataagagcattagaaagagcacatgcatttaattacttccacaaatcccaaatataaatctcaactggataattggagctctctagctacatcaattttggttagttaaactaatcaatcacaagaaaaaaaaaaagcatgggtgagtcgcataaaaaatcttaagaatttatgaatacatacattcagaatcaaacaaaacgaaattctctaagcccatctattatccccctactttctgggcatccaaacaggctactcttagactctgataagaaaaaaaaaaacctgcacccgtaaattccgaaaccctaagtaatggtaaaaaagcaagagtatcgcatagcctaaatcagatgattgaatatctactaaaaatctacacagaaaatccgataaaaattactccaggaattgaatctacagagcagagagaagcatcgtctacaaaaaatatagctaataaaagaaaaatacgaaaaaaggaagggattaagggaaatttacgttgtcaaagaagataaagttggccagtacgacggctcccacaacgccaccgacaacggcgaccgggccggttagcaagctccatttcctgtaaatcatcttcgtcgtcttcttcttcttgactccttgatctctctcgttttcctcctgacgagtactggtgtattctatattattagtatcaggccctactttcttacgccattctggggcctgggcttacgattgggcttggatttgggcttgggcttcactaaataaagagagatttttaacgttttttaaaggtaatttgatttttacggaaagtacatttgtttggcaattaattatgaaaatgccaataataatttgtaacaacttcgtgacagttttttttaagaattgtaaacaacagtttcatatgattttaaatttttaaattttaaataaaaaggcctaatttattacaaatttatagattttattttaaaaaaaataaacttttttataatcaagaaaaaaagatcttattactcaccaacaaatttcacacaagcagagctacaaactccttttacatattattaataaattctaaaatagctaattatctcctcttcatccttctattagctatgccaagaactcttcaaaaaacaaaaaa

SEQ ID NO: 20325 - DNA, 5388 bp, Cannabis sativa
ataaatggagagatatatcatctcttttagatttttttttggaagaacaaaagttcattaaagaggaaaatagatggggatcacagggggatcaccctccccatgatacacaaaattagaaaggccaatagatctagcctttttagccaaaccatctactacaacattcaacctacgattaacataataaaacttacaagaattaaacttactcctacaatccaatatagccaaagatgtatcaagagatttccaatccgatgggcaaaggttgctatttaaagccttaactgcccaaaaacagtttgagattacacgaatctcattccatccttcttctatagcccaagtcaaagccaaaagaattgcctttagttcagcctccagagcagaaccggctctacctcttgttagtttataaccccaagcttccgaattatccttcatcatcactgatgctaagccaacatccccttcaacccaagacgcatcggtacacaaaaccctttcttcttgcaccctgctgattttcctctgaacaggaactgtcgccaattgcattctccctccctctcctatgtcttcactgttgaaactgaaactcacatagttcttaaacgctactttaatctttttccttaccaaatcgacatcagttgtgatacctattaaggatctgtcattccttgcctgccagactttatcaatgatacatcccaagtaggttaggacttcttttcttccaactcttatgctagacatttccacaaccaagttctccacaaaactgctcatattattcccaggtattttatcaattctcaacggaaaaacacttgaaaaccacaagagtttggtaaagcaacagtctctgaataagtgcagacaattctccaattcagcatcgcagaaaaaacagcccttctcacttaagaaaggcagcttctccttaactggtagagtgttattgattgatcgccacaagattatggaaattctggggtgtaactcagaatgccataaccatttccaaacaacatggttatcatcaaatctgtgaccttggtccaccacataagcgcttttaaccgagaagcccccatcttgttctccttccacactaacttatctttttgattcgcagggagtctaggaatgtcaagaattttaattcctgactcttccccaaaaatttgatgcaccacttccctattccaagaattttcatttgagaggtccgctaacattctaaccgtatatccccttggtctaatgctctccattagtcttctatgttcagggaaatccaaccaaggaatccaaggttggttccacaaattaatggagtctccctttgctgctaatgccaatgaccctttagctagaatactccgaacatcaaggatgcatttccacaaatacgaatcattgctctttttcttgactctccaaaaattctcatacttacagtatatacctaacagacacttgatccaaggtttttcttgaccctgggcaatactccaagcaagtcttgtaagcaatgctttattcttgtcttcaaaccttctaattcctagcccacccgaagccttgggttgacatatcttgtcccaggatctcaacgctaagtaccgatccttatttaaatttccttgccaccaatacttacgaacaatcgcatccaattccctgcatgttgaaatgggaactttgtttgttgacatcatgtagaccagcatggaagctgctactgattttatcagcgtcaatcttccggcatatgatagaagttgcatcttccacccatcaagtttttttatcatattctcccttagtcttaaataggtttcccttttccttctcttgaagaggaaagggttacctaaatgtttttcatctccttgggtttgtttgatggtaagcaagtccaagagaacttttctcctctctgttgtcatgttatttgagaataaaatactagattttgatttgctgcactcttgacctgaccatagctcatacctatgtatgcaatccatcatccatttagcctcctccttgtttgcacgagagaaaagaataatgtcgtccgcaaacattagatgagagataggaatcatttttcttgcgatctgtatgccatgaatccgtccctttctttcttggctctgaattaatcttgacaacacttcttgacaaagaaggaatatgaagggggataatggatccccttgtcttaaccctctttgaggcttgaatttctttaagggggatccattcaagagtaccgaataagacacccctgttatgcatgacatgacgatattgcagattttgtcttcaaacccattagcttttaaaactcggagaataaaaggccactccgtcttgtcatatgccttgagcatatcaagttttattgccataagacctcccacacctttcttctttcttatcttatgcactaattcttgagttaagatagaagactctcctatccatcgacccggtataaatgccgattgtaaaggtgaaatcagtgcctccatataacttcttagtctattggacaaaatctttgtaataaccttgtaagggaaattacggaaacgtattggctggaactgctccattcttcttgggttattcaccttaggaattaaacatataaaggtatagttcagtctaggatgaatttcccccgatctaaaggcttcttgcactgttgcacaaacattgtctcccaccatatcccagtacttcctgaaaaaaatagcatggaagcccatctggccctggagacttgagaggatgaatactcaaaacagtatcccgtatttcttccaccgaaggaatttttgaaagctgaaagttagcttcctcatccaacttactatcatacaagtcttccaagtcacatggaatgtcagggttagaggaagaaaagagatcaatgaaatagacattcataatttttgctaactctcgaactctatccttcaccctcctctgcttatcttgtaaatgccaaacttggttagtcctccttctaattgttgccgaggcatggaagaatctcgtactccggtccccaagtttcagccaatactccctcgatttctgcagccacattgattcctttttcttccaagcttcttgaagttggaattgaatactttgttcctccagacagaattcttctgtgatttcctgcttttgaatcccttgaagacgcttttccaaagagcatatgatctcatccatatctcccactttttcctacttccacacttgtaacgctcttctagtgttatcaaagtttctgagtaaacttcttgcatcctcttgctcactcttcttccagaccttagaaatttcctcacgacaagtgctttcttttgcccaagcctcaaagaacctaaagggaatgaatcctctccttttgaacatatgagtatcaagtaatacaggcgcatgatctgaaattataattgggaagttcagaatcccagcatatggaagctctgtgatccagtcaaaagaacctaaagtacagtccaatctttcccttattaatcctctgttaaacctcttgttttgccaagtaaattggcacccattgaatctcaagtctatgcctcctgatgcttgcatgaattcctctaaccacttggtatcgttaaaagtaaccttctttccacccatcttctcctcgtcgtttagaatacaattgagatccccaataactaaccacggttcatagcaacagctagttttcagagctaaactcttccaaaaaaacacttttccatgatcataaggaggcccatatactgcgaataatctccgggtaaaattcatttgagggtcatttaccaaagcttcaaagcagttgttgctggcctccatgattgatatatttatgtctttgttccatagtaagcaaaacccacctgctaaacctttagccgatatcacttcaacaccattgaaccccaaacttcttgcaacatccaacatctttcctttatccacctttgtttccataagaaaaacacactccggcttgtgttttcttacccaagccaataaggcttggtttgtcaggtctcttacgaggccccgacaattccacgaaagaatcctcatttggaccgggggggcttgataagggccgcctccttgcccattgataattgtttttcacattcaacacgaacctccactaaattcagtgtttcctccaaattccttattatcttccccttcaattttccatctttagttgtctgcttcgtactctttggagtgacccttgacttggctccttctcttctttttgtatctcatctagatagagatgatgtcgaagctcctgaagccattttgaaaggattttcaatcggtctaggagaaaattctgggagtattggaatttcctgcgagaattctcgcgtattctcctcggtcctttgaacataagggattaaagtccaactagccttcctcttcctttgttgtgggcagtcatgcaccaactttgacacatccactgggtcatggaatagagtaggggttggctcatacttatcaattggagctggacccattaactcttcaacaagcctaatttcctcagcataaatgggccaaggaaagtgagtgggctctggatggttatgtaggtttctatacttgcataactctttatgtggtttatcaatcatttcctcataagtgggcccaatatgggccattatagtagtaattactcttccatccgcttcagttggaattggatgagaggagtatttcttgaggatctcattttcagactccttggaaggtacatttccattgtgatatttactcagggctcgaggagaaactgatcttgttctcctttctcgatatatcttcttgatagagttgatacctcctgatgtacctgctatctccttgcctgctggttccttttgtatgttgtcaacaactttaaattttttccaataatggctctcggaacactttcttttactctgattactttccgttttagcttgcttatttcattggctcttcctgataacattgaatcgtcgcccctgacacgtccctttcctttatcttgaccgtttgaaccattccccgaggtccccggagcacaaatcgacgccgactgaaagctggagttctccctgagcagatttaattgatttatggtgttgaagcagctaatcatggctgattctgctcgtatccagggaccataagctgggactgctttctttccggtggatacgcaaacaaagtttctcttaggcaagagtttttatcatgaccaataaacccacagttgtaaagtactgaaattgaatccattcc

SEQ ID NO: 20326 - DNA, 2921 bp, Cannabis sativa
gcaaaagttggtattacgctggtaaaataaaatttacttgtgatgtgttgacaaaaaggggttggcaaatcaatgttggtattagaacttttgccaatataaaataaaaagcgcttgcaaaaataacttttcccagtgcgtaaatgtgctggtaaaaattaaattttagccactgcaaatgtacgctggtaaaattttgacctctttgccagcgcagtttgcgaaatgagctgttaaaaattatttttaccaacgaagtagcgaactgtggtggtaaaagtgacatttcttgtagtgctatgggagtgagggaggctttgagctggctaaagaggaaagcttggaatcatgtgactattaagatcgattgtcttactatggttcaagctcttcgtagtccattttttatggtttcttactttggaagtgtgatttttgattgtaaggctttgtgggatgatgtcagtggtgtatctattttatttgttaaacggtctactaactgtgttgctcatgttgttgctcgagcttcgtgttgggtcgtgattgtgtcatcaggagtgatgagtgtactcctgatattcttgatgtaatcttgaaagaagattgacaataaaactttcttttcaaaaaaaaaaaaaaaagctatattaattgcattttattaaatctagttgtcttgctaaaatttaaatttgaatttgatatatttttttttttgttgaaaggaagaatttgatattattggagtacttatatgaagtagacatattgaagaagttcaacaaaattaagttatattaatagcgttttataaaagctagttgtatttctaaagtttaaatttgattctgacacatatcgaatgggacaacgttttccgtatttccttttaaaacttacctaaatgtcacgtaaaccaattaataatattaataatataattaataataaccaatcaaacaatgagtttagttgccttgttccataataataataataataataataatggtcaaagtcctctatgtggattttttttacatatatacttaattaactcaaatcaaacatattgctaattaataacaatcctatcaattgaggttgtaaaatagttgaagtaatgaacactaatcttccaaaaagggagatatatagagagacaagaaatatggagaaacaaactaatatgtgcatgttctatatatatgtatgtgatgttaactttgatatggatatatatgattgtattgatgtattggcttcattacaacatagaatataattagtggccaaaaaaagttagctgccaaaagcagaggggttagtagagaagtgactgtgactgatgagagcaaacttttttatatttttatttttgagttatgaaaaataaatatatatgatgatgatgatgtaaagtgttatatatggtttggatatatacgagaatcatatatagttataagaaataataagaaaaatagaagtagggttccacatggaaaagggaaaaacatatagacagctcacatgatgccatcacacactgccattctagtcgtagtaatagtagtagtacctgtacaagataacaagaagtggtcctctcctctctatatcgtttcatctatctagctatatatatctatcaatcatatatatatatatatatatatatatcttcactctttcactcttcaccattaatgatctgattttttttttggtcacgtgctttttgtttgaggtcatttaaaagaagctacaccggtgtctgaggtactaactatatatatagtatatacaatgtcaaaaaaaacacaatctactaattaaacattcacatgccctctttcatatttgttaatattaattttggggccttggcaaaagaatgtaaataggtctttttatataaaactagaaaataatggatgtttaaaattttttaaattatatatgttatacttgatttacgaaaattaaaaagggtcaatattagactttgaccaaaacttataaatattaaataagttaaaatattttttttgagggcctcatgacactatgagactcgaaaatattaagtaactatttggtgtcaggactcatacacccaagtgtgcccacactagtattttcaccctaaagacactcaattcgacaagaaaactaacaatgatttaactcatttggacataaaaagacttagacttgaacataaagtcaaaattgtacaagaatctcatgcaatacagtccatgcgaccaccactgccacccacatgaagatagatggcagtgctctccagttttttggagatcactgccacaagaagatggcagctctcgccactcactaaataccaaaggaaacttgtcaaaatatgttccctcaacactcaaaaatgcaacacaagtgaaagaaatcatttctcactaaggaagaggcctagccgaccactgtcatctttgtggcacaaagagtggcagtggtcggccacatcaaaatgggaacaagattttttgccaaaagtactttatcatcaataacatgtcaaaactaagtgaaaaaagccaccaagtgatataaaaaccacttggccgaccacaaccacctttttggcacaaatggtagcagtggtcggccacaacatagaatgtagagtttctttggccaaagtgtatttccaacatccatatatcaaatacaagtgagaaaagtcacccaagggtccataaccctcactagcaaccactaccatctttttggccaaaaagatggcagtgctctcactactacaaaaatgggtctttccgacgtttttaaatagtcgtttaaagtattcccgtcagtttctataaccgtcgcttatacgaccgtcgtaaaaagggcataataggcgacggttcaaa

SEQ ID NO: 20327 - DNA, 3103 bp, Cannabis sativa
tgtgccacgtgtacactgtgtccagtccaacatggcacttaacacctaaaatggacggaaatattaaattgctaacagaatacgagtattaggagttttaccatccaaatttgagttttgagggttaagtgaaaccaaaataaaagttttgaaagttttgacgctatttacccattataaacaaaaagttaaaattttaattgaagtgaacaaaagcatgtacatattaataagtaaaatgctaagggagacgtcaagcaccaaaagatgtggcgtaccgttattggtgtattttaatatcgggtctcataaattttaatttaataaataatataaaaaaccgctatttatatatataaaatactaataacaattaactataatataccttatcaaacgataacatgatttttttttttatctaaaacagattaatataatggaattactaaaccttttaataaaataaaaaaaaataaaaaaaaaataaactaaagaatcgtatatgtttttgcttttagtagtgtcttgagcaaagttgttaaattacatatcatcattaagtctttaaccgaattggggtaacgactattcttattcactttgattttccttctctctcaagtacctatgtacattatcaattacaacaatacaagaaagacatatcgtctttgtaaacatgcaattatattatcctaaaatcaatctgcaattaaatttaaaaaggtgttgttgtcaaacctctaaaaaatgaaacctaaattaaatatatctagctttcactttcagtatttcctctgcagttctaatctgttaatggaagtatagaattagtctatgtttctctaatttcatatccctacaactgcaatcactttactcaattgttgttagagaattaaccaaatgaattgatgccaagcaaagtcgccacaataaactctgaaatggagaggagtgaatcaaagactggaatgctaacgccagaaggacgaaccagtacccacaaggtacaccacctaacatctaggccttctttaaaatactgatcttttgaagcaaatgaccatttgagagctgctgaaagaaaagagattgatatgtcaaactatatagcataagcttggcccaaaatagcaaatgtttacaatatcaaaaactaatattgcttattggcataacagtctgacctctcttttacgtacagagaccatctatgacgtgtgtgtgtgtgtgtgtgcagaaaggatgaaacgagtcaaatgcaatgatgtgacacaacagaagcagcaatggtaatccaaaatgaacacagaagaacaaacagccagctgtatatacaattataagaatatcttttcacggcaagctataccttctaacatctttgaaggttcagtgtcaccttacgagcgttctcatttagttgattcaccgctgcaaccactgtctcaacttggagtaattgggaagtcaacttgtcacctgctaatgtactccctcctcctatatttctttattgcttgaaactggtcatgcagttgaatattcagaaaaactcggctttgccagcttatctcttagcatagcaaatgatcaataatatgtcctaaacccactgaaaaatccctcctcaaatgtataaagaattcaattgcatgcaacctgcaactatatgtgataggaaaaagattataataaacttaaccaagcagtgagtcatatagttctattgcatccccatggacaaataatacaacttcacggacatcttttaacatataatttgagtattttatgatgcaaaagcagaatccctcgttttgttagattttcttagaagcccaagacaaatccaggctatactcaggcaaataatcagatgctgtggttcattttagtttagtttcctcaaaaaccaaagactcttatttgggataccactcaacctgcctggtagaacacactaatatataatatcagattaaatttagagaaaacttgacaatggtagagtaattaatatctaatgccaaactaattcaagtgtacctcactcaaaggtgggactgcattagatacttcctcagtacactcaactgcagcactattttgcacttttggtaactgagacatatcagtccttgcaagtatcgattgggggcagacaggcggagcactttcccgacatgtatgacacctaaatccaatcactctatcaatgttctctgtcttaagtccaaaaccatctccgtgaaaccactctgcacagtggaaaaaatgtgaagagtacaagaaaggtggcattcagtgtagtaatgaggagataaacagaacaaatctcctatttctcaacattctcaaaacaaagtagaaggtacattgaatgatgatcaaatctaaaaactaattacctccacagatctgacaagcaatataacttgaagtggatgtatgtcctgcttcatcacaaagctggcattttggttgatctggaaggatatgtgactgttcagaagggggcataaaatttttatccctaaatagcagaacccgctcatcatccaggtttctagtcagctgtaaaccattaagccagtaactgtgagaaacatatgttctcttcttcctgtaaggaggggaaactttctttggtttcccatgaacagcctttttcaacttggcttttgactttgcctgtttccctttcctacgcccgcgattttttttgttttgcagcagcacagacttagctctcctagctgaacgacgtaaaggtacagcaggtgtagcttttgttttgcctttcgattgaacttgcagtccaatagacttatttttactgccttttaaccgcgatgatctgccatccttctgaacactcttagacttcagagatttggctttagttcctcttttgccagttttaccttttttggtatcaatgttaacacgaatcccattctggcatcgatgacatgtgtaagtacacttagctatgatggccccagcagacttcctgacatgccttttatggaaaaaccctgcatacataagaaaagtacttatatctcaaacatttaactcctacatgaatgca

SEQ ID NO: 20328 - DNA, 1599 bp, Cannabis sativa
ccgccaaaatcgattacagctaacgagtgttcagttgagagaggaaaatgtaaagtttacagtttagagaggaaaagtttgtttgttgttgctatgtaactgaatgtttgaaacggtaacagcgaaggagaaagacgcaactcgagtactggactcgactccactccactccactccccacgaaagtccttcttatgctttttagaggagaaaaaccaaagtaattttatgtttggtttaaggatagattggacaatttatttattttattttctaaaataaatttaaactaaaataaaaaatatataataataattttcaaaataaaataaaaggaataataaaaataattaaattataaaataaaataaaataatatataataaatataaaataaaataacttatcatatttatttttaataaataattcaaatatgagaatgtccaatgttttgttttatttgtgatattattggtcattctgaacgattttgtccaaagcttttcgatgcaccggaggcgaacattgtcaagccttatggaatcttcatgaaagcaccatatcgaaaacagtccaagttaataggggctcaatggctcaggattggcatcaacgaaggggaacgtagtggtcaatctcaaacaggtttcaacagtggccgatcggaggtggttggaataacggtgaatcaaagaaaatctctggaggttaatgccacgaatttgacattagttttatgaataatgaaagtgggtcgcgggcccaaactgaggtaagattggaacttctaaaggccagtgaaactgtgggacaataaaacttgtaattggcgggttctatgggtcagacccgcctttcccaatgagtttgttgagttggaactgtcggggtctttcttggacttcctcagaatgttcagttcctaaaggatgtggtacataaaaaaaaaacatgtttttgtgtttttgtgtgaaactttctgcaagaagaataagatggaggtatttagaagacaaatgggattcgaaggaatgtttgttgtcgaaccagatggacataatggtgggttagctttattttggaaagaaaaggagcaagcgaaactccttggcttttcaaaaaatcatattggtgttgaagtttcagttgttgactactttggctatggcttcaaacatgccttgctgtgttatgggtgacttaaacaatatagtgtctcaagaagataagagaggaggagctccatatccccaatggttaatctgtgggtttaatcaagctcttcaggaagcacatcttattgatatggaattagttggccatcaatttacttgggaaagaggtcgtggtacatctaattggatggaatgccatattgatagagtgttaactacacactcttggcttcaactcttttctttggctaaactgtacaatttggagggagctccgttggaccatagccctctatttttggagccaaaaaatgcaatcatagtcggggacggacccattaacattgatgtgggggctatagccctcatgaacaaaaatattaccttttaaaaaatcaaatgtaaattttttaatttaata

SEQ ID NO: 20329 - DNA, 2617 bp, Cannabis sativa
atacggcgttccaaacgagtccaataagtccagccgaatacataaagaatacttttctttctctcttcttctcacttctcaccactctagaatatctagatctctcttaaatttacttggacaaaagtaataataataataatgagacagagaaaagaggagagacttaattgtagtagtttcgaatccatgaatccacgtacattcaaaattaaattaataataataataataataaaaaaaacaaaaacagtaagagaaatatatttggggataatattattatgagacaatgtgggtttgtttggattcgtggattgaagcggcggatttcagattatttcagactctttttggctacgcgtccatgcaactctgacgtaacctcttctccatctctattttttcacatctctccaccaataaccgtttcactaattactcacaatacgtttcgataaactcacatccaaccctctaattcttaactcacagacctcttattctttgccacgtgttagtctgatgatgctattggcctttcctttactttacttttactttctcctcctcagtcctctcacttctttttcttggtccgtacgtacaccaagtgtgacacgtggaggctgagagtctgagaccttctaattctgtttttttatttttttttaataataataaaaataatgggagctcacgtgggtgtgggccatgaatgactttttacaaatgaggttgtgacacgtgttggtttcttgtttgaaatcgtagctctttggctattttgtagtttctaatagtagtattttctatttgtttttaaagctaaaatagctaaaaattgaaatgaaaagatattattgtgattgttaatgataaaagtgtttttgattgatatagtattaaaaaaagtttagaaaaaaaataagaagttttctatatttagagagtttagttggaatttttttttttttttttttttcaaattctgtatttaaaagcatgtttgaagatataatgaatcttaagtcttaagtcaaagatcaaaaaaaaaaaaaaacaagagtacgtatggtaagtgagaaaatttatattagggctcatattgtatattttaaaatacgtacatttcattaaagaatataatatataattataatgaaaaagctataggtattttagaaagcttttatgttataattatctacattttttattttgtgtggggtaaagacatagaatgaatatataaaatatggtatttgtttaggtcttatccttatatatatatatatatgatgccaatgacagactcaaatgtaaaaattaaagtaatatatcagatatgtcactacgtacgccgcgcacagaaaataaaagttaacggttttaattagacagctggagaatattatataattttgaatttcttttggtaaattaaaaagtaaagaaaagaaaataactagctttaatgtatgttaattgcttaaataatttaatttacaatataatataaatataaatgtatatatatggaaagtatgatgatatattagtcaaagactgttatcctgaaatgtaaatttcaagacaataattttaattttttaggaaattatatatcatggtctgccattaccatcatcacccacattaagtaattttcttttaatttttttttagacaaagcgtaatggagggttgatcttggccgtctcagaccaatttttttattataaactaactctgtattgtatgtatatataaatagatgcatgtgttggtgtgatcatatatatatatatataattgatgatattataaaaccaagtccaacatgacaaataatgttatccagtagtagtactgctctgctggcatgcacactgatctgatgtcaactatattatgcctctcattacattattagtcaaatttaatacgaactcttcactctcttctactccattctatagtccatacactactctagtactctttcaagattggacaattttcattattataattattattattttgtaaaaatttacaaaaatatgatatattttttttttttgaaaaaaaaacaataaataaataatatggaaaaaatagccaattatcgtactatttttctcatattttaaattattttttaaagttttcccataaagtttatttcttgtaaaaataaacccatattctaacacgcatagtataaaaactaatttttatttgaatattttatatgtactaatataattaagtataacttacttattgttatgtaagaataattatatatgtagtgtatattatatacttattacacaactagaatcataatagaatgatcagtttggagcggctgccgtggctcgagaccatgatggtcggttcattgaagcctttacggtggggttcgtggacccggccatagctgaagttgtgggggttgaggaagctctgagttggataaagcgaaaccaatggggcttggttgaagttgagacggactctttggttgttgttcaagcaatccgaggttcggttatcattccatctccttttggtcaacatgtgtctgcttgtcgtacattgttggctt

SEQ ID NO: 20330 - DNA, 5939 bp, Cannabis sativa
tagaaggacgaaatggggtatgagaaaggagaaagaatcttatctatactattaattaattaatcccaagtccacattttaaaccaagatgttttgtccataaggttctatctttaccctggattggtgaagaaatagactattagtacagatatttttttttatgtggggtttgttcctagttctgtagcgcattggagttaaaaacaataaagctgaatgatcaattaaccagagtcagtcaactggtaggtccaggtttcaaaaaattttattgcaaaaagtgagtaaattttttagttttatttttaagagtagaaaagcatttaaagaaaagaaccccacaccagtagaaaggaagaggcgctgagtttaagtcttaagtaatagtttcaagcttatcatgattactttttttcagaacatatttgtgtaatgagacatttgaacaaactaataattaatgtataaaatcaataggataagagatagatataacaaattaaccaataggatctcagaatgacagtaaatatccgtaacttgtattttacaagagtagctggatctcgtcaaaaaccaaaagaaggaaagtaaaagaaaaaagaagataactttttacatcatttttggaaaaagccacagcactataatacaagattgtgtttcacacagtcaagaaaagaagtctttggtatagtcaaagaagcatcctcaggtgagctttagacagtgtgcacttcaactattaattgttttaagaaaaagaaaataaaaataaaaaatttacaaatatatacattaaaaaaaaaaggaagttttgcttaacatgggtagatgagtgtgacactactaatattggaaataggtgtgttgaaggggtgaaatgaagctaagatgagatatttgatatggattcatgaacataagggtaaagggtgagtgagttagttgaggcacattaaaggagaagggaaggggcatgtgttttggggcagggtatacagaggtccaaacagtcctcacctcagtgcacttgtctgacactttgctgccaattgacatccttcaagaaaaaaataaaggaaaaagaaaaaagtgctttcaagtgcaaccaaacaaatccatacctccttgtaaccaatagtttttcctttgcctcctgtcctgacatcatcacttacacttatcttaatgcctccttactaccacccccttagcccaacccagccaactcccctttcattcaataccattttcttcattggaatatttatttatttataatagaaattaaagggaaagagaaagagaaaatagggatatgttttgttttgttttgtttcatttaatacaaattctttcttccaagaaaaataatgagcttggccctatataaaagtgttgtgtagtaataaagtttgtatcagtaaaaacaatgttcataaatatcaaaacaagtcctaacaatctgtaatacgtgtaagataaccatattacaagctctaaattttattccacctgcgaccaattaatttcaagataaactaaatgttattctaaccttaactactttctattttctaagctaatagtttttgtagagagatttcaagtcggttatatagatttgacagcagactctatatatacctgctgtcaagtgtggtttaaattctctatagtaattgaagaagtggttctataacttcttagtcttgacctccaatggaatcttcaatctgatcaaacaatgatataatatataatatatatatatataagtatctctgtactgctacagttacagtagtcaaatatatttgtctagttagcctattttttttaacagtttcactcaaattgttatattcacaaagtaaaacattttcgatgaattgtgtgatggtaaaaatagcataaaaagtaaggtaaaaaagaaaaagagaagaaaagcatcaatccgtaccacaaaacagtggtgagctgctttcattggcctcttgtgtctctcaataagagcaagacatgtacagactctattactgactcacgttaagcattagtaccctttaaacatcacaaacaaaacagatttgctaaacccactactactactaccacattattattcatattgttaagtgatattttttttcttttctttttttttaactatatatatatatatttgtttttgtttttgtgggactatttgattttgatgtgtatacatcaaaatattaaggggtgcatagaagtacccatatttgagatttaaaatctttattcttgctttccacatttgtttatgaattttcgtaaaattttcagagacaaaggcagcaacacaggcctctgcagaaaagaagcagtagcatcagagatgcagtcataataagagcagtactcagaagaagagagagaaagagaaagagagtgagtgtgagagagaaatagagagaggttgtggcagcggtgtcatcagggctataagtttttatttattcaaagaagaatctgcaaacatttgtttttgcaaaaatacccctcaataacaaaacaatgacccaaaacaataacaaagccgcttactcactctgtcgtctctgagatatttataaagctcatctttcttctttcttctttcttcttacttttcctcttcttctttattagttttttcttttatatttcttttatttgtttgaatattagtatcctgtatcctttgtttcttttcttccacacttcagaaaatgataagtccaaactcaagtgcagcagcaagaaataggtctcctttcacagcaacacagtggcaagagcttgaacaccaagcccttatcttcaagtacatggtttcaggagtacccattccatctgatctcatatactcagtcaaaagaagcttggactccacattctcttcaagacttttctcccaacatcctagtaagcataataataataaacactactacaagtctcattttatgcgactacctatactttaactaattaatgttttattccttggttttcaacaaaagagtaatcttgttttttaaaaacttttaagacaaaaaatcaaaacttgggatctataatatcatgaccttggatttgcagctgggtggggatgttttgaaatgggctttggccgaaaagtagaccctgagcctggaagatgcagaagaacagatgggaaaaaatggagatgctcaaaagaagcatacccagactcaaaatactgtgaaagacatatgcatagaggcagaaatcgttcaagaaagcctgtggaagtttcttcaaatactacaaccatgttatcaccatcatcaacaacacctatgcaaaccccatctccttccatttcatctgtcaaccgaaatcttcccggaacaggtcccacaatctcttcctactctcaactctcttcctcatcaataatgtgtgaacccctctccggtgcccataacaatcctcacaataacccttcagcttatccctttgtgtactctcattcctcctcttctagacctcctgactatggcttgtcaccacagaacaatactagttctccttacttctgcctcaaaccagagcctgataaagattacaggtgttttagaatcaaactggttccctttttttatatatgtagttttccttaattatatttcttgttttagttgtgattgagtaagttttggttttgtttttcgtttttgtgtggttacaaataggtatttccaagggagtaaggaaagcatggacgaactagctttctttcctgaatcatcaggaaacgcaagaagctttcctgactcatgtcattctctattgaattcttacagaggctactctcatcctcagtttcagggtcttacagacgagtccaaagaagccataaaacaatcagctgatcaagaccagcaacattgtttcatattgggtactgatttcaaatcagaaaggggaataaataaaactggtaaagaatcagaaacccaaaagccactccaccatttctttggggaatggccaccaaagaacacagctgcagcagactcttggctagaccttgcatcaaattcaagggtacctaatggtaaacaaaatgaacttgcatcaaatttcaataataacaaaagggtatatcatataattaaaaattaaatacttttttttttcttttttgtgtgcagatggttaaaagtctcaaagtctcaataatggcttttctcgatcaaaggccaaaagagtacttggccttggccccccctcgtgggtcagtatactttttccatgtttgaaattgtggctagggaggcgttcttaggattttgattgaataatgtagggccaccggaggatcttgtccttcttgctattatatatacttaatatcttcttccctcgtaagaaacatgtctgatattttgagacttgcttgtttgaccggagacataatatattctatatgggactatttgctttcggagcctctaggctccatcttaactctgcatattttcattccttttttctttttatatactaatacaacaacaatatatgttaattacaactaattgtctggatcatgctcttcttaaatacacttttttttttgaggaaattaaatagacgaaatagttacacttagataggatggaatcaggaaccttatttcttctgcaaaaggtgttgttagttattttttgttcaccaaatttcaggaccccaggacagttaaggttttgctgttagattttatatgtcagaattcaagagcacatatatatataaacaccagattttattttttttttgtcggaatataagcacactgaatcaccaaactatatgtttcagttatcacatttaatgtccaacaacaatagtgcctgaataataataaatttggaactggggaatcgttgaaacaagtatatacttacatacatatatgccagaatcctaagaacacgtgaatgttgtcaattcctacaaagccaatttaattagttttacttttactttgaacaaatatatatatataatctttttttcaccgtgctttccgctaggaagatttgtacacgttacactaagcttctttactctttgggaaatttttaacagaatctattctacgacgtgagatttagtataggatattattctctccaatggaacgtagatcatttaattattgatcggttcaatgttggaacatatatatatctttcttgttattctagtctttaaggaacggcacctagcatacgtgatccgatgaggtgtagtactgaagattaatacagaagtccaaatggtccaaatcacacaagaattaaagatttcttcagatttattgtcgccaagttacacgtgcttgttatacaaatgtttttctcatgacacaacacatgcatgaacgaacacgaatcttttttctcataacataactactacgtctacgtatacattcatttataggttttctctatatacaactcttgcccaatagtataagccagctcattattcattagttttgttctttttcttaattaattaaaattgataaagggtacatagtatttattggacattgccaccttgtaagcactacaaggtatatggtgttagacccttgagtgtccaataacaacgatcattttctctctacacacttaatttggtcttacagattatatcattacaggtaaaattcaaaccatattcatttataaaatatcaactcattgtggtgttgatgtgggataacttaactttataaggtgctatatatatatcaagggctttataatttgtcgttttaagtatctatatataaccatactacgttattttaatgcaagaaaactgtgaagtagttgccacttactgttggcggttgacagtta

SEQ ID NO: 20331 - DNA, 2344 bp, Cannabis sativa
tcaaggacaaactcgaatatcccctaacctaaaattcgagttaggattcttcagtcctaatgataagtctaaacatcaatacgtgggcatttggtacaagggaatttctccacttgcagtggtatgggtggctaacagagagaatccgctggcagctacagacacttcagcaactctaaacattgccaaaaatggaaacttagagcttttggatgaaaaccacaactctatctggtcaaccaaagttgtcgtcccttcaaatagtagtgctgttgctcttctcttagataatggaaacttagtccttagagatggcatatcaggagaaaatctatgggagagcttaaaacatcctggggacacttttttacccggatcagtactaggctttaatgttaaaacaggggagagttttgtcttgacctcgtggagaagcgacagtgatccatcacctgggaatttctcttatgcgatttcccaccaggctccaccccaagccttcatcttgattaataagttaaccccttattggagaagtgggcctttggataaatctaagtacgttggttctccaaacatggatagatcataccgaagtaagtatcaacttgttgaaaattttaataagggaacaacttatatgtattttatggactggtacaacgggtccgctgctttgaaattctatatttcatcgcatggtgttttgaagtctgaagtgaaacagagtgggagtaatatttgggaaactgaatggcaaaagccagatactcggtgtggtgtttatggggtttgtggaccttttggtgtatgcaacatatcagaatctcctatttgcaagtgtttgaaaggatttgaaccaaaatcatatgaggaatggagcaagggaaattggacaggagggtgcttgaggcgtactgaattactatgccagaaaaacacaaccacttcattgtcacagggcgaaaaaactgacggttttgttaagatgggaatgacaaaacttccagatttgtatgaatatttgaatgttaagggtgccgatgattgccaattatggtgcctgaataattgttcttgcttagcttatgcgtatgcgaatggaataggttgtttggtttggtcgacaaagagtcctctgcttgatattcaggagttttcctctggtggacaagatctttttcttcgccttgccaatgcagaacttggtgagcttgtagatcaatttacaaaataaatttttcaataagataaattgtccttattcatttttttttttatcatacatttcaaatttgtgtatattccttaaaattatcctttcagaaggaggaaagacaagtaggaagaaaactataacccttgcaactatttttgctggtgcaatgttattagccatcatggtactgatctgtttttgcagatggagaactaataaaaatggtaattataaagataactgccttaacttctatcaatttcaatagttctcatatctaggaatgaattttgatttgaaaatacacagtaaacaaaagtaaagacactgcaaagcatttgatcagtttggagaagccaccagacaatccaagaaacattttgcaattttcaactcagctgcaagaaccccagcttcctttttttgactttagtagcattttagctgctactaaccactttagcatattaaacaaactcggggagggaggatttggacctgtatacaaggtcacttcttgtctcttaattttattgtgagagaaacaaatgcatttctacaattgatttcagtgaaaaacaagattcataaacagaaaaatatgtgaaaaacttgcagggaaaattacacgatggaagggaaatcgcagtaaaaagactctcaagtagctcaggacaagggattgaagagtttaagaacgaaactattttattttcaaaactccaacacaggaaccttgtaaggctcatgggttgctgcattgagaatgaggagaaattgctagtctatgagtacatgccgaacaagagcttggatacttttatatttggtttgttacttaaccaaattactctctcaattatactctatgtcatataatgctaaatctaacttaactttcccgacctatatagctctaaaagaattttggatgaaatcaggaagattaatagtcaactaaataacttaaaccactctaaaccaatggattttgattttcatcagatgcaagaaaaaaagaacaactgaagtggggtacacgctttaacatcatacattgtgttgctcgaggtcttatttatcttcatcgggactcttttctaaggataatacaccgtgatctga

SEQ ID NO: 20332 - DNA, 1153 bp, Cannabis sativa
agggcataaaacctaacagtttctgcagaaacagcctgccatttttctgtgcagaaaaataagaaatcgccaatttgacctaaaaccaccccaaactttaccatgagctctaggacacatatactcaacaaaataaaccatttcttagtgatagaaatgaaaatagcacccaaatacacaatccactattgttgagccaagtttgagttcttgaactcaaactttctcaaaatcataaccatccgttaattctaacccaattaaacctaaaacaacttaacttaacttcagaaagcatcccctaactcctagggttcagacagagcctagttctacactttgcatgctcaaaactaaagaaaggtcattaaaatataaagagataggttctagggttcctacctttggattaacttcaagaaatcacagagaaatcaaattatcaagctaggtttgctgctggtgttcttgaccgaaaagagagagaggagcaaaaataattttcttattaaattttatattttttccttaattcacaaatgcaaggataattcagcattatcctaacccattatggctagctcccacaaggtggttaacccacctaatcccccaatgtcaaaatgtccactttccttcccataaaaatagctaaatgaatggcttagaggtaaaatggtccaaaactataactccacctaacttcagtattcaaaatatcaagttatgaatatctcgctaaaaaacggttttaaaccagcccatgcgactaaattggccatgcgttgcattttccatcatcgttgagcaaaaaatataaatattataaattttgcatataacataaataataatcttagagtttaataaaatctccagaattgaaaaattaactctaatgcccatttctaaaaattgaacccacaataaatataaactcatgcataatcattaaatatcaatgattaatgctaatcacctttactaattcataatctagtcatgcgatcgttacaattacccccctttaaaagcattttgtcctcaaaatctaacctgaataactctggatattgagtcctcatgctggactctagttcccaagtggcttcctccaccttgccattccttcagagtactttcaccaaagtta

SEQ ID NO: 20333 - DNA, 2568 bp, Cannabis sativa
aataataaatataaaaaaattatgagtaaattttttttacctgcaataatgtcggccccaccgctgataaacttagaaatactatgcacaacaacatcggctccaagccgagccggagacaaaaccatcggcgcaaaagtattatcaacaaccacagtcacacccatcgcgtgagctacacgactaagctcaggaatatcagcaacagcaagagtgggattagaaacactctcgaaataaagcaccttcgtctttccctcaacgatcgcgtgtctcacactctccacatcactaacatcaacgaaagtggtggtaatattacaaactcgaggtaaaaagtgtgtgagaagagcgtgggtcccaccgtaaagagtcctcgaagcgacgacgttttggccattacttactaattgcatcaaaacagaggaaatcgcagccataccacttgaggtacagtaagcagcatcggtgccttctaaagctgccatctggcgcccaagatttaggaccgttggattaaagtgacggctgtagatgaagaaatctctgtcggcgcctaattctccggcgaacattcgccgcatcgtttcaggttccattaccgtgaaagttgctgatgcttcgattgacatgtttacgccgccgtgttcgccgaattcgtggcgtgctccggctagtgccgccgctggatcttggtcggcctttgtagtggggaacagcattgattttttggtggtgtaatcgaagccgtctacgccgtcgtgtacggcggcggatcgtttcttggttgtgaggaattgagtttcggccattatagagagagagagagagagaattgagattttgggttaatgggaaatgttttgtgcatggaaatttgggtatttatatatgaaatttatgtacgtattttttttttttgaataagatttttatacgtattttaggtgggacaggttcagtgaatgtggtcgtaattttatatatttaattattttttattttattttagaagaaatatttcttaaatatgagttttacttttggttaatttgtatttttggagttctgtctaattacctataattttactaatacgattaattatttaccatgtgttaagttttaatttttaaattttgatatttattaaattgtatcagtcaaattttaatataattttcattcagttaagttttcgttaataaaattattagacttccatgaatgtgaacgtggtcctaattttatatttcttaaacatgagttatatattagagtgaattacggtatatgtatttaaagttttaaatttgtatcgtataattaactcaatggttttttagcagtatcagtaattttttattttttttaacttcgtcaatacaaattctgttattgtcttaaacatgatatatataaggtctgcattctaaattcattgggtctaacaaaaactgtaatgaaaaaactggagaaaaattacaattttataatattggatatttataccactaaaacaaattattcagtttatgttgtttgcaaatttaaatattttagtacttatctcactatttacgttttttttagttaatttagatttttgcatgctaactttgatatgtatcaaatcatgtctttaaatttttcaggtgcgcagtttaaaattctctttgattgttggattcaaagacttatgtccaattacatttaattttacttacacgacaattgtccatatgtattaaattttgtttcttaaactttaatatttattaatttgtatcttaaactttgatatgtactaaattaaatatttttaattttaatatgtactaaattataccgtataaattttattcacgttaaacttttattaataaaattaaataaaaattcataaaagtactttgaatgtggtcgtgattttatatatttaatgtcttgcaaactttttttattaattatatattaaaagaaaaaacaataaaaataaaatgagatatgtaaaaaaaaaaggagaaatagataaggatgagtttttttttcttttttttttttcatttaattattcattcatacaagtactaataatctatgtagattgaaaacaattcttgtatacacttcttgaattgttttttctataggagaattttctattatcttaaaaaagaaaaatctatgtaaataaattaattaataaaggtcaaaatagattttgtgtttattattttgtgagagagcgttattatatgtattttaattaaggtgcaatttaattcatattacataacaattttaattggatataccaagctataaataaataatattttagtatgattaaatctatcgaaaaaattatagtataatatatattattaataataataattcggtcttaataaaaaaaacaatagtaaccccacttcatatctataaattttataataaaaatatgtaaaatgtgataatattatcttattgtatgtatgttggattacaatatatatttttttgtataatatatggaatcttttatgtaataataattgttttttt

SEQ ID NO: 20334 - DNA, 3330 bp, Cannabis sativa
ttttattttatttttttcttgggtggagcattaaaagttatcaaattaattacatatatataggatccattcatatattttctagtggctaatatctgacctgaccaaacacaaattgaccactcaagcaatataagccaaagttatatagttaaaatatacaatagtataatttaccataaatttaatattaaatgattaatactacactgcttatgatggaatttgagcaaagaacctttacacgatttcttttatgatgacaaaaggttttattattataaatttataatcattaattgtacatatccttctccaatgatttagggaaatagagctttggaccaataagattatgccaaatatacatatacaaatagtagcaaattaggcaccttaattattttggaaatgataagtattaaaaaaaaccattaaaaagttaggtgggtatattattaatagacaatatttcagtgccctaataaaaagccaatgggataagactaagagttggattaatatataataatgtattaattaaaccttagtggaagctatatattattgtcctatcttattattagacatgatttttgaaacttttgctagcttgtgtaaatttccatcaaatacaaatacaaatacaaaaatgatatacttgacaagcgtcaatagatatatagtactacaatagacttacctaatctttgtattattaattaattaattttattttatttttgattgaaaatattaaaaattagattagaaatttgccacacacaatctaggatgatgatgccaggaccgattctgagttcgaatggtctttaattagaaaaaaaaaattgacccttattataagaataaataataattttaaatttttttaataatatatatttttaaaagatatttattttatttaggcttctaaaatgtaaatcttaagcacgagcctaattaactttaacctaaaacaattaactttaacctaaaactgaccttgaccttggatggtgctaaggcatgcgacccttttcatgaaatcaaaaagaaaattatgatgatttatacatgtacaacaaattacaaaagttcttgatcatgtaaaagaatcattattatttatttatttatatattgtgtatttggtaatttgagtggtgctaatttattgtttttttttttcaatttaaatagccaagcaaaacccacaatgggaaataaataatacatgttgaccttatttttgttaagatgttaaataaaataacacacacatacaaattaattataatttattaactcccctcctttctaataaagtttgttttactttgttgtgtgtgtcttttcctaacactttaataaaaatactttgagtccaactccactagctagggtttagggttttcttttatggccccacgtaatatacccacttattgaagacctttcaaaatgtcaacaataatactatgtttttatttccatgttccaatgttttaattttctttctcaacagctcttgagtgttacaagtatgccactagtaaaaaattccttgatgaaaatccaaatgaataattatatctaagggttcttgatgaatatgctttcccatttcatttcaattaaagagagagtcatgatgtttgttaagtgttattactattggttttccatcattaatattacgaattactaaaatattatttttagtcaatgtaaaatttgcgactaataaaaagataccattatattatttatatcgtcaccaaaaaaatttataaatatgagaaatactaattaaaagatacttatagtatagtttaatatttttcacaaggtgatatatattattactggtacaatttaatattgagttcgtacttattttactttaataataataatagaaaattactaactatcatagtatctaataaaaatattctatatataagttaatacataaatatattagcaaagttttgactaaataatttctcagtgacaataattttgtaagtaatataactaattggctgtactaacaactaaaactaatttattaatattatataatgttttattattacttaaaagattatttagtcacacaaaaattaggttaattatgtgactaatattttatttatttatatagtaagcaaaaataacaagtacttttcaacaaccggtatacaaaattttctaccaaactataaatttgatgggtatatatatctgcatcaaatcaagagtgagaatgactgacctaattatctcatcaaataaacattggtttttctaatttgactcatctattgacaatttataaaacttgctttggagtggatagtttataaaatatttattaattggttaaagtaattaaataataatgataaataatgagagcttacctaattatatagaagaaatatgtaggtaagtatacatatttaaacttgtggatgtggttaaattaaaaggaaaataaatattaatagagaatatatatatattaagagaaagatatgtatgtcttaattaggtgtatatatatacatggcctggcctataagcaattgacaagcaacaaaagaattaaaaggactgttatatcaaaggatatgtgattagagaatgaatttcaaaatcaaatattgtttgtttgattatgtttgccctatcttctgcctatactagctagtagtgtacccttcttcagtggcaaaacttttggggtggaaaactggtctctaactttattagctactttcttttttcttcttctctcttattattattattattattgaaatattgattatttattgttacattatttaaatttaatttaagattattacttatatactttgttgacacagagattcatcaatattaataaaggagtattaattaagctaattaaatagaaaataaaaaaaaataaatacaagagatttttatgtaatttaagttattaatatatttaattcacaaaagtcaatatttatatttggattacaaattcataatgagttaagcaaattttttgtatattttgaattgtactctttccttttgtcagtacggcctctcttatatagaggatgtaattatttccttattagagtcttacatttaattagaaaagaaaaaaaaaattatttccttattagagtcttacatttaattagaaaagaaaaaaaaaatcatatataaaatgtataagttattcatctcattgtcaataaattttgaaatggaatcctatgcatcttaacctacacatattgtaacaccctaact

SEQ ID NO: 20335 - DNA, 2240 bp, Cannabis sativa
aaatttcctattggaattcctccttggcctgttatgtgctagtagctaaccctcctttgcatgtcatggaaggtattttccatagagtttggaaagataaaggaattgacatagtttcctcaattgctcatggaattttctttgtcagattctatactttggaagataggattaaggccttggtaggtgaatatgttttctttgatagaaaactattaatcatgaaaccgtagaatgcccaagataaattccttaaagaaaacttgagcaaacttcctatgtggattcaaatttctaaccttgatattaagtattgggatttagagaccatgaagaaaattcttcctcaaattgggtgtatcctaaaaaagtatcaagctactagaaattgagatagattagtttatgcacatgttatgatagaagtctctcttaatcaagacatgcctgaataaattgtctttgagaatgaagtcggagaggatgtttatcttaacatctattatgaatggaagcccattaattgaaagggatgcaagagatttggtcactcacaacatatgtaaaaaaggcctaaaacagaaactgaaatagatttccatagtggcttcgaaaaagaaggctacccttgagaaatctaatgagactcttaatgagaagggtcatcctattgataatttaccagttaatgaagtgaatgtgcaacctctaggggctataaaatagaaaaatggcatctggcagaggaaaggtaccaaggaggaaaaaacagaagttaagagtattcccacagtccaattaaggaacaagtactaagccttgaatgtcgaaactttactaagttacaagtgggttagattttgtgtgaaatgatggaaacagatgagggaggaggaattcctcgcagacctaatggataaggtcttgtgctgcaatgttcgagggataaactcaacttggaagcatcaagaggttaggaaactcattaatgataaatgtttactgagattttcagaaactaattagctgaaagctttagaaattaaataaatgttaagtaactaagacaaatgattttaagtggttcgagcattaattatccatagtccacgagtcagtatattggccttatagggttttgaaatatattacaagtggtgtttacaatataaaatcctaactctatttctataggtttctttcgaagaagaagaagaaagcatagaggatatctttgaagagcttcgactatatatttctctttttgatccccctcatgaagaaatgaaagggtttttatagaaaacgacatcctaaactgggtagtcgcgaaccaccaaaatactggggctcaaattcagtttacttcatgtacagattattggtcttacaccaggtgaatgcacacctaatcttcctatgatacacaagatatgataaatatggctctcatcagcgaaaccaatactggcgctaagaacagtaaaagtacatattccgtttattttagaaaatttggcactatacgagctgtaatttgataaaacccaagaattataacctacatagataattgtgcaaaaatatatttaacactcagtgcctccagaacagtccaaaaaacatgcagattaatttttcaatttttcaaacattcataaatcactaaaattggaatatgtcaaatgttaatcatcataataaaatcaagtccaataatcaagttgagttcttacctctctcaagttgttaaactttgtccaaaacgatgatcctaagctctcaagtcccaagctccaaatgtttagtccaatcatatatatcactttcacctataccatcaaatggctaaataatcatcattattgcattctacattcaaaatcaagtccaacaatatataaaatgactatattaaagtttagagttcaaaacctcacctaagcggtgcatactaactatcagtggcagtagaaattggtgtacgtaccgaaaaagtcactgaaaataaaggtagtacatacgagtagatcatgctcatgccaactatttgtcaaaaaaagtacacggtatcactaaaaagtcgttggaaaggggcagagctacaaaaatatcaccaaaaaaactatcgagtcgggcaaaatgatgagattgttctcctcaacgtctgattctagttgttaagacagatcatcaaacggacaccaaaagtgatcgaaaagtgcattcaaagtttgaac

SEQ ID NO: 20336 - DNA, 3957 bp, Cannabis sativa
tgtcaccagctattatcttgattttatttttttaatcgaatttgctaagtaactaattatcatcaaaattagtttaggtttagtccatttttttttgtttaagttttagatttcattcctattagctttacaagttattttggtattaccaccacatcactaaaaagaattattttgataatggttactagatatcaccaaacatgaaaactactttcatatggataattaattactatcacattataaaatggtataaaaaatgaaaagaaaaaggttataacaaaaatatgagagaaaaatctcataatgtggaaaattttcacgaaatattactttggtaaaatttttattgtgttcaattatatttaataatatacaaataacaaaaaactaataataaaataacaaaagtacaatataaaatataacatgaagctaatatttagtacgaacagataacaaaatgtaaataatttgttgattacatctcgagatcacattattattagattttaatttgacgaaaaatctatttcgtactattttgagaaacacagtctaaactatcatttaacaaaacaaaaaatcaaatcgacaatcttaacaaaatagaatctaaaattgtatttaccaaaaaaaaaaaaaatctcctactctcctagccctttgtatcattaacttttcaaccttaacaaatcattgaatactaaattcaacctatgcaattaaaaaaaattaagacttacccaaaatttttatattttatttttcacttcttctgcaaaatggtcaggacaatacgagagatactactgggccggtaatgggcccacatcaaagtgggcccctaacaaaactctctgattcaacctcaaccaataaatttcttcatttgaatatatacaaaaaggtaaccacaaaatgccacgtcatcccattgttgcggactcaataacccattattaaatccaattaattaatcctttttcaaatccgcttctatattttttttagagagagaaagttagagagagaaagtgaggtcaaaatctttctttccctccttttatactctctctctagaaatctcactctctctttctactttctctctctaaaattctctctggtttttggattttcagtgaagaagaaaggtttttgatttcttcaggttgtggccatggacggtggtgcagagccttacaatccaagaacagttgaagaggtttttaaggatttcaaaggtcgaagagctggaatgattaaggctctcactctcggtaactttcttctttcttctctcaatttaagatttttgctttgaatttctaatttctctgtataattttttttatttttgatttttttttgcagatgtggaagagttttatcaacagtgtgatcctggtctgggtttcggtccttttaattttaatttaattgatgaatgagtttgatttgtaatgagaaatttgtagtggtagtagggttctatgggtatatatgataatttggaatttattttattttttaaaaaaattattataatgatgtcatttgtttatactttttcccatctttttgctttcactgttctttgttgtactttttttgtcgtgtttaattctgcttttatacagttttggcatgtgcaaaagtctatttttgtgtataaatttatttctctctctatggttttgattgatttaatttggttttattttttggtaatatgggatttatatatatgttcttcttgagttgtttttttgggcttaaattttcccagatgagtggcttgttgacttgggtttatatgaaaaatctttagtgggatttgatatgacaaatgattctaactacattgcattttgtgcacaaaaatttgatgagtgaggattctgattttggtttctgagatataatcaaagttgaaatgctgtgactatttttgtaaagcttgcaacagtgtgttaaattttaagtttattacagagaaggagaatctttgtctctatggattcccaagtgagcaatgggaagtcaatttaccggctgaagaggttcctccagaacttccagaaccagcattaggtatcaactttgctagagatggaatgcaagagaaagattggctatctttggttgcggttcatagcgatgcgtggttactttctgttgccttttactttggtgctcgatttggattcgataaggctgataggtaaaactctttttttaactttgtatctatggcctggccttgtttgtgtagtgtataccctttatcaatgtcttgttaactggctttgcaggaaacgtcttttcggtctgataaatgaactaccaactatttttgaggttgtaacgggagtagtgaagaaacaagttaaggataaatcatcaaattcaaatcatggcagcaacaaatctaagtcaaactctaaggtacaactgaacctttatcacaatgtgttgaatgtggaatgtacattgaattgattttcattttctttttttgacaaatacagcgaagctctgaatcgtctgcaaaggcaatgctaatgcctaaggatgaagacgaagagggtttggatatggacaacgaagacgaggaaggagagacactctgcgctgcttgcggggagaactatgcaacagatgaattttggattttatgtgatatttgcgagaaatggttccatggaaagtgtgtgaagatcacagcagcaagagctgaacatatcaagcaatacaaatgcccttcttgcagcaacaaaagagcccgaccatgatcataatcgtttcggtattgtctctgtaatccgttatctgtactcgactgctaattggtccagtaggtcaggtttattatgttcagttcagttttgcatttatgcaagtttaggaatttaattcaggttcttcaatgtgttaggttttcaaatctacccttgttactatagtgtttcactttcactaatgctagggtatttatgatcattattttttcccctaggacttatttgatattcatgtatgcatgaattttaactcattgtcgtttcacattataagcattgtcgtttgactcaatgcttgtgtttttattaagccttgttatattatacaaagtcacaacatttggtcaaacgacaataaatgtttggtgtttttttgatgttaaaagggggaccttttgatgtttatttaattgattttagagtgtaagaaaacccttttatattgcttttttttttagtgatttggtaaaggcttgaagttgagtttggggacttaagagtcaactcaattaaagtcaacctaactcaagataaaaagttttgacttggtgatatagtacattcatgtaatggaatatatttttatttcatcaaatggtattagagaaaaataatgacaaaatttgaataaatattgatgtgtttgaggaactagtcttattgtcataatttgtataaaattggccaatattttaggatatatttttgacccaactaattattctcttgaattatgtgcttctagtattgttaagtttttaaacaatgagagaagggtgtttgactttgttttatgttttttaaaattgtgttttttaaaaatggcaatagaaaatatttttgtagaaacatacgtttgattaatattttctaaaaattgcttttagatctttttttattaaaaaaaaaaatctttcaaaaaaaccttcaatattccactgtggatggggtctcgcggggacctacttgcaatagggcggggatttttagtctaaatgagaacagggacgggattaattttaattctcgaatgttaaatgcaatggggatggggatgacactccccgcccctatcagaatccgtttaattcattaattatgttttattaatattttatttatgtgtgtatttttttagtatattgat

SEQ ID NO: 20337 - DNA, 1831 bp, Cannabis sativa
ttttttgaacaattacccttattttaattttacaattacaatttttttcccttccctcttgcacattttaattttaccaaatatgaatgagagatcttttgcattctaatttcctatctctctccctttcaattttctaattactttgaacacaatttaatgaatagaatgtaaaacttagacagttgtttggtgtattttaaatttattaccgaagacttaaatgctagaatgatacatagttgtgccaattagtctatagagtcacacctaccgcttccaccattaatgcaagggaggctccgtttcggtagttaaagcagtttaataaacaaaacaaaatctaaaacttggtggttgaacttgacacagatggagttgacatggatcgtatttcttcaagtacatgctcaaaagatgacattgcaatcttccaagggtcaacagccccacttcctaatgggattccctcctacgcagttcagatcctaaacgcccgcaattcaggctgcagcatctcccacattcatgtcaaatgtggatggtttagctctgtccgtttggtaaatcctacaattttcaggagaatttactatgatgattgcctagtcaacaatggtcagcctcttggccccggcgaaacactctcattccagtatgccaatagtttcccttatgctctctctgtttcatctgtcgtttgttgctgaacttatttgcctttctccttcgtttttgccttttttttttaatgaaatgtataatatatagtgaaatcttaataatagttgtcctatattttcactaaggctatatgtatctaagcaataaaatttaaaggcaaaattgacagctctgatattattaaactttatgtttttgctagtattgaaaattaaaacagaaaacaagataagcctagctaattaataactataatcataagaaaaatcagtgacaccaaccatagcagaaaccacttgggaaactaggtagaatccacccccaagaatggccaaaatgagaattgcagaaatgggatttttcaataactcaaatataggcaagaagatggtgtatagggctccagtactgacagtgagagcataaagtgcatatcttcttacgttgtcccaaaactcttcagccagtggcccttctggacctaaagctaatgccttttggtcatccaatcccatcagaaacagcagaactccaacagaaaccgccccaactattaaagaccttgaatagtctatctcatttgtacaaacatgagccatattttgaccctttgacaaattttggcatctggggtcaacttcttggatcaaaattgtattgttgaagatttcatctgatttgactgtgcattgtggcgcagtgtgtctctgaatggtaatactaacttttgaaagcaaagatgaggcagtgcgtggatttgtgtggtacttttggtgtgagattgggaagagtggtggacgaattgagatagaattggtaagattggtgcacctgagaaggttgaattgggatttcaagctacacattttgaccctcagcagattaatgagctcactgttctgttttggtacaatgcggtgtcataccatcagattagctttttttagtttgtggctgctatttgctgctcttttcatatccttatcttgttttcaattgcctaaatgaggtccaaatgtaggtgaaattcacttttgacttttcagtcatgttaagtatatcacctaatttcactcacaacgcccaacggtatacagtatcagaattgaattcctgtacaaaatatcaaaattagaatttattgtat

SEQ ID NO: 20338 - DNA, 2480 bp, Cannabis sativa
gagttttaatggttttgcagcaaaattgttaccacatgaagtgaaaaaactatcaggtatatatagttaattagttaatagtttttatttttaaataattaaacacattaatttctgaaaatgattatattttattttcagaggaacgtggtgtgatatcagtgtttcctagtacaaagcgcaaacttcacacaacaagatcatgggatttcctaggaatgcccgaaaccacaaccaaacgaaactatcgtactgagagtaatataatagtaggagtgttggattcaggtttgtacctataatataatattaatcatactatatataattgaaaataattagattgattataatataagtaaataaatgggtatatattctgactctcaggaatttggatggattgcccaagttttagtgataaaggttatgggcctgccccagctaaatggagaggccaatgtgtcaagggggctaacttcactggctgcaataagtactataccaatcttctctttatatttttgctatgaaaatcgtttatatcagaaacaaagtacatattagagtatgatctcgaccattcattactaatcagacaatactgtagaatctttaatggtcttgcactattggaagagtactccatcgcccaaggctccccactacacacccaaaaaattttaaaatttttaaatgatactataatttatatctatatttataatttttaccattgtatattataaaacacaattttttacttcaaataagtcttttttgtaagtgttatattttatattctattaagaaaacatgctcaatttacttttcaaaaatattatatttacattattaccactacatattaaaaaatacatctttttttttctactttaaaaaaaatgtccaattgtaaatcttttatcactctattaatctgaatcttgatatccaaagaaaaatatcaatatttcattactttcttttagtttaaggactaataacattttaaaaataatttttttttttactttttttatagaaattcacataacaatctctacttagaaactatcggagcaactacggacgcaacactcaaactgtaaattcaaaaaataaaattaaaaaaatagtatataaaataattctcttatgtgtaatgtttttatgtgaacgtgcatgcagcaaggtgatcggtgccaaatactacaatttggaggatgcagccggggaggaaactccgagccccgtagacaatgacggccacggcacacatacttcttccactattgctggtgtctcggtcaaggatgccagcttgtacggcctcgccagaggcactgcgcgaggaggtgtgccatcctcgcgcattgccatgtacaaggtgtgctggagcgttgcctgcgctgatagtgacatcttggcaggctttgacgacgccattgctgatggcgtcgacgtcatatccatctccataggtggagctagcagagactatttcaatgaccccattgctattggatctttccacgctgctaagagagggattctcacttcttgctcggctgggaatgatggccctgataccttgactgttcaaaacgttgctccttggatcatgactgtggctgctagtggcattgataggcagtttaagactgttgtcaagcttggcaatgggaggagaattcccgtatgtctttttctctcttacaattattttttgctaaagataaatggtgtcaaataccacaaaactgtgtagtttgacattaggggttgttatatgtaaattcatggtttattttgatggtttttaggggcttgcggttaataccttttctcccaagaaacatatgtatccattaacggatggagctcattcagtcaatactagtgcagacttttttggaaatggcaggtaaagcattaggatgtaaatttattgcattttcacaaaagtgacggtgttgcaattcaatcatattgcttttaaatttctatacagtgcttgtgattatgggacattaagtcgggacaaggtgaagggaaagatagtgtattgccaagggaacaacggccaggatttcacaataggggaattaggtggcgttggaacaatcatgactcttgattcatttgtagacacagccttcaccccttatattcctgggacctatgctctgcctaaggatggtaacaagattagtcaatacataaactccaccaagtatgattttgcttcacactattattacatcatgaatattaattatttttgaaattgagactaactaatcaaccctttttttctttttgggaattaaagaaagcccatggcagtcatacaaaagacaaggacagtcagtattgctgccccattcgttgcttctttctcctcaagaggacctcagttagttagccgaaacattctcaaggtatgaaaagaatcaaattatttctttccttcttct

SEQ ID NO: 20339 - DNA, 4352 bp, Cannabis sativa
gcggcttttggaccaagtgaaagggtcaccttcataaggagattcatgcaatcgacatctatccacaacacttcgaaatgcctccatttggctttcatttcgtaaggcaccaccagacttattggaattggataaaatctcattgaagtcgccaataactaaccatggtaatagaggagctacatcagaaagacgttgaaggagggtccatgaggctgctctattgcaagtttctggtgcaccatagaagcaggtgaagtgaaaagtcgagctgtcttcaaacttcaaatagcaatcaaaaaaggaagagcccatatgtaatagagaaatgtccacacactctttccaaagaagcaaaatacctccgcttaggccaatgcggggagattccaagccatgatgaaagtgcaaagattgtcgtatccgagtaatagaattttccggtagtttagtttccataagaaacaaaacttggggcgattgttgttgaacaagcaatcggagatgtctaaacgcactcgggctccccaaaccccgtgcattccaacttaggattttcatgatgagttgcggggttgccttgcaacctccgcacttaagtcattggagaagcttgaatcctcaagatcagaaactaacttctcaatatcatcctcccttgacaatgaagaagatgatgatccttcaatattacgacatcgtttcagcatttttctcatggaaagagagtcattatgtcgcttaaaagttgtatttggtagctgattttcttttgagttcgacactttcgcagccgtgtatgtgaagagaggtgatttgggttgtggttgggaaaatgaagggttattagaattaatggggatagatgctagaactggaggataagtagcgaaggtgttgttatcaatggcgggcatataaatgtggctgagatcagtgacagcagaagaagttgaagatatagtcacggagttgggtgtggtagaaactggtggaatggcagtgttggtataggattgatgcttggattgtacatgcgcctgttctggttttttgctgtctaatttgatggtaggctgctggtgtggaacaaatggagatgatggttgtttgttgaagtggcggctggagtgctgagtttgtggtgaagtgggcatggcgttggtgattgaaggagtggagaagtggtcatgattgggtaggagatgagagtgatccattggtgatgtgtgaacattggcctgagaagggttagttgggttgagatagccagggggaatagatggaggggggacactattacacgggtgatggtgtgagtgattgtgaggagtgaagtctgattgggaagtggaaataacaccagaaatgggagtactggtttgagtaacagtcacgggtgggtgagaattcatagactgtggagtgtgatttatagtatggttgtttgttgagtgatgcatcaggttagtggatgattccccatgaagcaaaacccgtggatgaggttggtgatgagcgtttaatgctggtagtgtagatgttaaagttgttctagccagcctagtcaataacggccaagcattgcctttggcaaaatcagtccgataacgatcgtatccattggtcggaagtttagagcctttcatccatggcccatattggaagtcatcatcgttgccaccatccattcgctccataaaagcaatacagcgttcacaggggtggcctaaacgaccacattcgaagcagaactcgggcagcctttcatatcgaaaatcaacccaaaattcatctttaattctgggtaaacggatcatttggcctctcgacaaaggcttagttgtgtcaagtttgactcgaacccgaaggaaaggtccccaaccctcgtttgtagaatcatcaaaaacttcaataaactcaccaattatattgcctagtgcttcagccagcactttcgatttgctcaggaagggaaggcgataaatttgtacccaaaacggagtgtagatgaaatcttcctttgtgacattttgcagaacacctggtgcccgaaatacaatgagatgattctgaaagtgccatggttctttgttaagaacccttcttttatccccctcacaaccaaacttaacatgaaacaatccctcatcacctttgtattcagaaatcaaaacagagaaacgcccttgccagtgtccggacatttggtcgataaagaactgtttatatacagtttgatgagtaagaactcttgccagaagagttggagcatttctttcaattgaagtgggacagtactcggggatagttagtatggagctttcttcctcagtgagagaaagagtgttgcggatgtcattcaacaaaggatccatggaaatgaaatagtggaaatggaggtagtaagaagagtgaagtcgccggcggtggaggaagatggtggaaggaaaaaggggggaacggtttctgctgtaaaatttaaagaaattgaaagaaatagcagttaagatgaaagaagaacagttaaaaggatataacggctacagacccaaacagggcactttaccatgtatatttagtactcctcaacaatctcagtctatataatgtaaaagtgagatatttttctaattaggtaaaaaaattaaacataaaaacttatttttttctaattttacccgggtattcatgggtaaactaaatgtttacataccttagttttgtaaacatttgactatttgagataataggcattcctactgtatattgagaagcaagagagtgtttccctctctatcataatcaatcacgcgtaagtagaattataatggcacttggatgaatactatcaaactaacattaacaaatatatatatatatatatatatatatatatattaagaccatatccaggaattaaaagtaattaattaacattattagagtccatatgcaaaatcaacaattggttttcattcttagctagtactcttctctttcaattatatccaaaagataatgatataatgtaggccaaaatttaggggagacggtagaagaatgaatatctcggaatcatcaagtttcaatctaccccaagtgtatgcttatccataacttgtgatgtgtaaccaatagtgtgccataaaaacataaattacaatattacctagcaataactcatctttttagaccacccttcttccaatatttttaaacacatggtaattttttaattttttttgataaaacatgacaacattaagtagaaagaaaatgaaattgaaccaggcaaaatttaaactcaattatgcaacataaaaccataattgaacattttatattcacttaattaataactcttaaacaaacattaaaaataaaaaccaaatctagttagctagataagttaagcaaaaacataatgaaagaagaacaagatagtaatcatgatgagattataagtggattttccaatagctacgggcgccgaagataagtcaccgtccggtgactggtgaagaggttgcttgtagtagaaagggaagtaaggaagtataggatccggcggtggctgagcaccgaaagaaccgccgtcactaccaccataattaggcggagggttgtacgggtagggtgtaggtaagaccccactgcctgttaccggaggtgggtatgagccggtttgggcagacggaggcggtagctgcgtggagggtgtggctggcgtgacggtgccgattggcggcggatagcatgggtactggcatggttcgtcggagaaagttgcaattgggaagttcacgactattgtggctaagaaaagagtggagacaacctgattcaaggtagccatggcgatggcgatgaggaatgacttgggagcgcagcgcttatatttagaagactagggagagagcctttgagggtttttgtcttaacactgagaagtaatgagagacaaatattaattcaggaaagagccaagaaaaaaaggaaataatagtaattcaataaaaaaatttgctgtggaaattttttatttattactaatcaacattcttttttttttttttttcagttagtttcctttttttctcagtagaaatttttattcatgttctctttctttcttctacttttcttcatacatattttatattattttataacactttctcagcacgagtttctgttcaaatcttaatgtaagtattttgttaagttcttaaatttttttaagatcacgatacattaaatatatatttatacatatacttttttcgactgaaacaatttcaagaatttttttttctttttctttttatctatatatctatatattatat

SEQ ID NO: 20340 - DNA, 4205 bp, Cannabis sativa
gtgattcacgaaggcttggattgatgctgaaacgtataagaattcttcttcccttatttttttttatgttaacttgtaatttttatatctattatttttctatgtttaattagatatattaatttgttaacactttgactaattttaaaatatttgtataacatatttagttagaataaataaacttaagtacattgttagtttatttttttagttgtatgaaattaatttaaataaattaaatttgtgaaataatattaagttttaaaattgaaaaaaaaaatgattttctataaaaatcacataccatagggcatcaattttttctaaataaccaactttatagggccttatggcatcagttattatataataattgacgacatagggtccctatggcgttagttattcaataataaccgatgtcatagggtccttctatgtcgttggttgtttttaaccattacaacgtcgcctgaaacagcgtcagtagtaaatttctctaaaactgacgctggaaggctttaaaaactgcctctaaagctcactcaagtgagttaatttgtgaagtagaagacatcattagtgaggtgaaagatacaattgttgatgagattaactcttgtattctcctttgtatttctccattgttgaagatcgaataaagcttggccgaagagcaattcttcttaaggattagtcaacacaaaaagaagtgatgaatctcgttatatcttgtccctgtattatttaattttattttacatttatattccgattttcgttcattgttgaatcaaccattttaatactttagttcttattttgtttgattcttgacgggtgttaatttaaaaaaattaatacatactaaattaatatgtatgtaaatttgttatatatattgatgaaacaatttttgtacgaaaataaaatttgtttatttcaatgatactttacaattgtcaaggaaaaataaaattttttactagtcaattccattctattcaaataatgattcattatttcaaccaaacaatataattatttttccattaccattactatacaattatcatttatattcttataaatcattccatccaacctcttataattcattccatcctaaacaaaaaagagaaaaaaaaattaaataatataaagggaggggtggagcaattaataagactggtgtgtgataaatattgatttggagagaatagttaaagaagcaaggaagggaggggaccacgtacgaaggcagagttgaaataattaggaaccagataatcacatggcttaggttacagcttttactattttgttcgtataaacttttactgaaacaaaaccccttccacagtaatgtcgttccacaatactagtacatactgggatgctcctgtaattgcagctttcctcagaggcatcattttttttttattctttctttcatttatattttcataaaattacaagatatattttatttttaaaaaaaaataaaaaaaataaaataaaataaaaagcttcttaagatgctttatcatcacattattgtcttcattccaattgtgtgaatccatataactttagtgtgttaaatgatttatgcttattaattaataagaaagaagaatgataaattgattagtttgaaaagagggtaggagtggaaaataccaatatgaatatgttagtgacatgtgtgatagagtagaatttattgtagggaaaattcctattttatgatttgtaccctgggaaggaacaacacactcaaacagacagaggtaagaggcccctcacctctctactgcctaatgaaccattctttcatgttatctagtcacgtccattcagaatctctaataatgaaccaggtcaaaattaataattttatcataaatgaccaaccaaccatttacaattaacatgcaataaaacataattttttcacttaaaatatattttagtgtatattttcgaattgagacatgaacaaaggagcctagacacaaaattttccaaaaaaaggttacatgttttttttttcttttccgtccttgtttcaaattttaagatagtttttgtcagttttatttttgtagactgcatgacccatctattctaaaagtattaacgtataacacgtatggatcattgaacttatttgtattgaaagatgtgtatttcataaataaactattttataagttttgttttatagtaaatgatttttgacaacactaataattgcactatagacctttattttgtatcttttccaaagtgctctcttacgataaatgggcccgaatctagattttggccagttcctctctcagtgttgtaccttcctacacatttggagggcccattaatcatcactgaaattttgctattattctggtaataaaaaatgaaatttattttattatcaaacgcataatttggtaattttgttttccttttaattaaagagagatcagttggcttgtccagctaaaaacaaataataatctttttgttaagaataatagtgctcattattgaaagaaacataaattccaaagttccaaacagattctgaagtggcatttatacttctcatcaaataattaagctttcgttcctccaacacatctttttattttgttagagaaaattgagacataattcagttccagtacaatgaagggtacattaatttgtttataaagtttgatcgtttgatatatattttttttgggtaccaccaatcaaatattaataatcactctaagttcaaaagttttaatccacattccccatgactaacaagtagttgtagaccattattttgtctcagtttcaaattttcaattatttgctatttttcagccgctgggcttctcctttttgcactttcttgtctttaactcaataccattatcagcgtgaatcgtccgggattaaaaggacttttgcactttttgtcctctatttacactttgatcctttcatttttcctttcttccacttaaccccaaaatacatgtgggacccgcgcactgcccttctcttttcatttatttattttatctaattattaccaaaaacaaaaataaaattgctaaaatgtaagaataatgattagtactatttgtgaagcaccatttataaaaagctcagtaataatgcttgaaaaaattcaacaaatactctaaatctttggctaaattagctcatctcaaactcttaaaaatctttagctaaatgtagctgaatgttaaagcttctatatttatattttaaaatattttattttgtacttaattatctttatttcttccatttgtatttgattattatattttaattttttaactttaattaatataatattatattaaaatgatgtgaaagaaaatataaagtagttgatatatgataatgtaaatgtgtgaagtaaaataaaaaaataaaactttgatgaattattttaaaaaattgagtaaataataaggtattgagagtgctctaatataatgatatttcatctaagcttattaaattatcacttcatctacgctttattaagttattatttggcttaaggatatgtatggtctatttttatgtgctatctttttcagccatctatttattccttgaataatgttgagttgttgaaacgatcgtggatgagatcaagacagttatatttcatatgcttttcgacaagtttctagggcctaatgacccgactccaactttctatcaaaaattctgatcagttgtgggaggtgacgcagttcaaactgttcgtgactatttttttagagtctgatactgggtaatcttaatgatatgaatctagttcttattcctaagaaacgcaatcctacggtgataggagatttgaggccaatagctctttgtaatgtgcttagttaggctatcatgaaggtcttagctaaccatattaaaaaatttcttgatcttgttatttttgaggctaaaagtgcattaattttggggaggttaataactgataacgttctaggttcatttgaggtgttgcattatctaaaaggaaacaataagggcgtgatggttttatgtcactgaaactatatatgagtaaggcttatgatcggatagagtggagttttttaaggctattatgtagatgggtttccattagtcgtttagtgggg

SEQ ID NO: 20341 - DNA, 3987 bp, Cannabis sativa
acccctttaggtacattttagaagtatccacaatatattctcacctaaacattattcacattagactaacaatatctcatctatttcaaaaataccacttcttaattaatttggttacttttaccttgactttacaaacctatattggtacaaacaagtatcccattcccatgtctctattattacggacgtataacgcaatttacacgttgattaagagatatgcctaattactactagttcatgtgatcacatatcaaacctaattaaattaattattaaatattaatattgaatttgttttatcattacatgtctttatggtatttttcacgtgtcattaaaatatcatatttcactcgataagatttctttctgtttcaactgcttcagcgtttaattattataatttatgaatgatgacaagtcaaataaaataaataaataaacaagtacataagatgaggccagtgcttacgtaatgaaggaaacaaattttttgttttgtattttttgctcaaaattggaaactgcaatgatttattgttttgtatatatattattatatattatatcacacatccacaaatcgatatcacaataatgtgtgcgttcatcaaggcatggacaatttggatggatggatcattgacccaaaaaaggatataggttccacatccacccagtcataacattttcacattcagaaatgcctcactcaaagccaatattgtccatggagagctttggacttggcaattggtctgcaactagaatataaaatagccccatcacaccagtatgtgattggctgctactataactggactcatgtgtaagagtctcaccatcaacaatcttcacagaccctggtttaggataacaagtggacatgcccacaatgtaacccgtctcattccctacctcctttccagttccataaattggaattgaagagcatataacccttccatcctgaaaatcaaagattacaataaataccccatcaaactatggaatgaagttttattttatgacaaatagttatcttgttgttgagcaaagcaaaatctcacctctccatataatgttgaaccaactccaccagtatgctgatgagcaacaccgtaaacaacatatccggtggtcggagctctaatcccttttcttctggtgtcaatgcaactctgttttgtccctctaatgcccttgcatgattttgcaacattatgctcaacctgccacacaaggtcagagagagagttcaatatagtttgagcacttaatagtcaattccaagagaacaagataaataataaattatggggtcaagtggaaaacaaggggaaatgaattttatctggaagatttttcaaggagtttagtaagcttctgatacatagcatcagtaagccatatgtttttccaaaaattcaccaaaataagggtatcaaagattcaatatgccaactataatttatgtaagacattagtatgtttcagtataacatctctcaaagcttcactaaattaagtaaaattaaccccaccagtcaacagcttccacaacttttgtccaatcctatcagattccaatccactagtctatgtttaattcagtaatcccaagtgtataattcaatagtgacaataaaagactagcagccaattaaattacaatgttagaaagggaataagagtcacttactaggcaattatgttgagagttcaaaccactccaagtatcagtgatatcaaaaatataaatcttaacaggcaagatagaatcagtccaatcaacccacttcacagtatatctaaggtagaggcttctcttaacaccttgaaagccctttctcactctgcaatgtgtttgatcatagcaacaatgtagtcctccaatgtaatctggtttcagtggtttgccatatctgtccttggtaacattatacagatcacacctacactcagtgcatcccaacctatcttccgcgcctcgagtatcgatcgcgtgcacattgagcaaccatttctcctcaaacccatcaggaatttcagcagggttaccaacttcaattccataaggatcaggaataaatgttggtgttttccttgtttctgagccaagcccaaaatactgcccaagttgattttcttggcacactccctggttccttgcgcccttaaagttggattgatttcgttgatttaccccatcttgctctacaatttctacacctttgcgctgataatatctgaaaaccacccaatggtgcagataagtttcatgaagaggtattgggttccctgcctcatcaactacttcagcattaaagctcttaatagcaatatgacctcttggaaagtccatatcgaagtagactttgtccgccactgatcccggttccagctcaaactttggggattgataaaccatagatttcatcttatttaatcgtagagaatttgaacatggtgtgctcaatgtcaatactagtatccctatgagaattgctgttaggcataaggaactgcctccataaaggtgtcccatttctgttctgccaataatgaaaccaaaaaaacttctcagtgggtaaccgaatcaaaaaacaaatgaagactcgtcaaggaaaatttaaatttttatgagaaaaaataataggaattttttagaccaaaaaaaaaaaaaataataataatcttaatttgatgatttaatcccaacaaacatgataaaatgaaaacgcttttgttttcgtcgcaaattcaaaatccaaacaagatcttacaatatgaatatcaaactttaactttgtcagaccaaacaattttgcactatactttgttgttttttgttttttgtgagtggtctcgttgaactgagctttaaaagtgaaaagtttgaagaacttagctacacactagatgacacaaatcccagataaaaaaaggaagagcagaaatggaagctaatcaacaaacaataatttaatagaaaatgagttatggtttaaaagaaaattacttttagagaagaagaggaggaacataccaaaggtaaagtggtaaactgggccaaatgttttgaagcggtggaatggaatggaagtagttttatgttatatataaggtgtgagagtgtgagagtgtgagagaggcgtaacgtaagagatcaggagacttgtgctgtttttgtctggttatatataaaagcgagatcagatcagtcatcagtgtgaatagaaaaaattattgtgtgttccaaatcaatattgctatgaaatatcggattcggatttgtcacaacacacaataattaaatatttttatttattctttatcttataaaaccaaatattttatttagtttattcttttttatttagtttatttagttagtaagaagatagaaagccattggacaggacagttctagtggaaatatgtgaatacgtgtacattcctcaaaaatcaattgactaacatttgtggtggattagatttttacctaatataatgagttgtaaacaaaacaataaaaatagaagatttcaaaagaaaaaaagatataaaaatagaactagatgtgtacacctttgttttttcttttgaattattattaactagatatctaaccatgtgtattaattgctcacgatggaccatatagattattgtggtgcggtttaaagtctattggtgtgaatgtactagtatttatttattttaacaaattccctccaaaaattaaaagcttaaattaatagtatggcaagttattaaatttaaattatcatcatatatattatttttaataataagatgagaatgagaatgagatgacatcagtgcttacgtagtgaaggagtgagattttttttcttcacccagaaattggaaagggaaatttgattttttatgcttacatttggttaaaattttttttctaaacaaataataactaatatttgtaaaatatgacaa

SEQ ID NO: 20342 - DNA, 2479 bp, Cannabis sativa
taaaaatgctccaaacacgattgaaactcaattaaaaatatactaaaattaatctaaaattaatactgaaaataacctaacaagtacagtaccagtatcattatttcgcatttaattaatcacttaattaaataattaaactaggaatattaaaatacgaaatttcacaactaattcaatcatttttttcggaaatgaatcaataaaacgacgaaaaagtcaaaaaaatttacacaatgaacaccaagatctcccgaaagaaaactcacaacttcttacactgaagtagagatcgctgcaatcccaaagagcgtgaagagtaattctttaattgaatgtcaagataaccgtctattagagatgggttttgttgattttttactttaaaatattaaggaaaagaggatttagagcttatgattagagattgtccatgtcctaaactatttttccacatattttcactttgtttttctttttccatatatatttttttaatttataaaataaaaccatacttttgtaaacttttccaaaaaaaaattaaaagtgaaatttttccctttttttgtttttaaaagttaatataaatatttataatttaggccattttgtgtaaaaaaaattatttacacaattctttagtgtaatttcttgtgatgctttttactattttccaaaagtgccgcttataatacttttcttcgccacatcttgatttggttttggttttctgctgtgcaatttagtgtcttaaatttgtgtatatgtttctgaattttggtcatgcaaaatatttaatcaaagttaagacagctcaccaagtaagtagtatttagatgtatatatacgtggtgttcaaataagtttgtttctcttgatgttctacatctgtaatgaactaatttattctatcgaaaaaaaaacatataaaataaaaattatgatacatttgtatttgaaaaagataatgtacaatgaaactaatgataaagatcgttcatatgatttggagataaagatgatgatgatcacaatccacacaaagtgaattgttgattaatttagatgtatgatgatgatcaaactgatgatggtatatttagatggatgagccacccacatggaaattacaggctcacctcaggtctgtacatgtgctttgaaataatatccaagatcgagagaaacaaacctatgacactacttacaaaaaacttgagaaaaggtttatctatatatatagtcatacttccactattatttagtactcttctacttactattattaattactactatactactatactactactgcaactgtatacttacatttccaaagtctctcctttagtttctctaaatattcattcactttccccaacccacttttgaatttatccctttaattctaaactaaaaaaaaatatgctcattttgattcccatgcagccaataatattccactacgttgtaattatatatcacaataataataacacttggagttttggacacgtttaaataatggaactttttccccttctagaaaaaagaagaagaagatttgcctaattaaaaatgacaattgtatcatccttaactatgggcccagcccaaaatggagtttgagtccattcatttttggactctctttctcgttaagctatcttaacgggctttataatttaaaatgggctttaaattgatacttatggatgattgagagaatgatgttaaatgtatgcttcatgtttttgaaagaaaaaaaatgtttttgtcaatgatgttgattgttgagcttcttacttcttagccaatcattatttttggaaaatctgattttacataggattttatttattttatatttttaaatttaaatgagttttttttacttttaaaaaaaaaattgaatatattttttaaagttaaaaaaaatatatattttaaagaactatttaagagcgattaatagaatgttggtatttgagtttagtatatgaagtttgttactacttgtaaagtttatggtttgtgaatcaaatttagtagttaactattaaaatacgaaactaatctaacattttttttttagactaattgaaatttttactttcgaattttaacatgtactaaattatgttctctgaatttttaatatcactaaaatcttatcacaggtagtgaatagtatagtatcaaaataaaatataaataccttaagaaattcacacacaatatcaatgctggattcctaaagtaaataccattctattttttttatataaattacaattgtattgtatagtaacttggattagatccaaaaatataaattccagagtaaaaattaattatgacaaaaaagtacgtgatcattacctacctacccaaaaatcggtgaagaaaataaaccgacaaaccaaagtagagttttctgatcaaaattaaacaattatactttgtgcttaaa

SEQ ID NO: 20343 - DNA, 1533 bp, Cannabis sativa
ccctggactctgactactttcctcatcggtttgccctgccggaggtccactctcggtggctgtggctgcaaagggcgtttgcctttcccatcttgctccgccgtgttctcctccctcctcagattccttgaaccagtcgaatttgccatattcctaaaccagttcaattggtttcttgtattaaaacaacttataacggcagattcgactttgatccaaggtccaaaagcacgaacagccttgccttcaggtggatagacgtagacagtatcgcctgcacagttctttgcctcgtgaccaattcttccacaattgtagcagaatcttggtagcttataatatttgaattgtatccactccttccttcctcgcattatatccagataaaagccatatgataattgattatggacatctatctctacctgaaatttgaagaatcccctccttgtgattaacttctgatcccctgtatcactacccttaaaggacccggcttttgaacccacagttctaatgttagcccagtgcaaatagggagtcggcagacctattgcttgcacccaaaatagagctttactcatatcaacgttaaaccaagcaccatcttccggccattccttcacaatcaagagtttgccattaataatccaaggtctgttatgtaatatttccacacaatcttcctccaagtcaaagaaaatcccccataacccttgtctaagagtcttgaacttccacagcccttgaagtttaggcttccaaatgtgattcaaaatctctttcagcctgtttcgagagactccaactccgtcaaagaagcatgccacaatgccagttctagtcacttcttcactcaactcaaagtccggctccagttctaaagtcatggaatgaagaaactcttgtcgaaccgcttccatttcatccatttcatccacatcatttcccttttcctgtgacttatctcctccctgaaagggttgaacattgtcttcattgcctgtctccctctccatcgttctgacctcatttatcacatttgatacattaggaatgttagttggctcattaatatcgttctcagaggtgttattaatatcactaccaacatccatcatatctccaacttgctgattccccatgactccatcattaactatattttccactgttcccacgttttccatagggatattatgattcgagtccatgtttaccacgcagaaaaaaacaccaaagagcttttgagaaaaagagaatcttgtgaatacccacaacaaacttttaaggaaaaaacaaaaggcaggattgaatttctatatatgttaggctaattaatttctagctagacaatgccaaattttagtaaagacatgtgccctattataatgaccacatatttgtgactaaaattaaaaaataataataaaaaaaaattaaggtaggaggaaggacctcttgaaatcttaggatagtaaaaagatcataaaataaatcatgacaatattaaaaataacgtctgtttgtctt

SEQ ID NO: 20344 - DNA, 3659 bp, Cannabis sativa
atgaaactaccaattccaaacaaagtattgaaactatgggatgcatggcatctaaggggttgtatcatcttaagccttttaacacaagctttcttagtgtcattcgcatcgcgccgacgacattccaaatccacatttttgctcttcttaatttggtcagcatacttacttgcagattggattgcagccgtagccattggtgcaatcatcaaaagccaaggtgatctatgtgatccactcaaagaagataacaaagatgatatcttgtccttctgggcttcctttcttttgcttcatctcggcggtcctgacaccattacctcgtttgccctcgaggacaacgagttctggctcagacacattttcggccttgctttacaaggccttgcagctgcttacagcatctttttaactctcccaacaaccaagctttggctcccagcaaccttagtcttggttgttgggattgtcaagtattgcgagagagtttacgctctttatctcgcaagcttagaccgtgtagcgagcattaaagacaaaattagtacacaaaacacaaggacaacactaactaccacctcttcaagccacattgaaatgttagagctagcttacaaaacctaccaaatcttcaaaggaccactccttggtagattctacattcgaaatcctcccccgtctttgggatcagtaaaccacattaaggcttttaagtttatagagtacgagctgagcatcatgtatgaggttcttcacacaaagttagttgttgttagtcgaaaaatcgggtacatctttcgattcattggcttctgcttcattctcaccgctttcattttgttcattcttgttgagaacaaaggattggagttgcccaagttcgatatagttcttacttatgctttgcttactggagccattgttcttgattcgatctcagccttacagctggtgtgttcggattggagtctcggcggtttggaagggaagtggaagagttacatccctttggtaattgtaaaaagacagaggtggtccaattctgtttcacaatataatttgataagttactgccttgatgggaatacaatgtgtccactcaataagtttgatcataatattttggacaagatcaaaatcatgaggttttcctcatcgcataaggtccatcaagatacattggcttatatttttaatcatgcaaaatccaaatctgacagtgcatacaattcagacactgcaatttttggtgcacttttgtttagaggtcaccaaacaacttgggattatcccaagctcgaatggagcattgagaattttgaatttgctgaaagtcttcttttgtggcatttagccactgagctaatatgttgctcttcaagagaaagtgtcaaaatttgcaagattatttcagattacatgttttatcttatgataatgcaacctttgatgctgtcttcagttttggggagcaattggaaagtggggtttcaggatactgtggcagccaccaagagatttttggccaagaacaagatgatttcagtggaaactaaattgataaggagaagtgatgttgatgatgagagtaaatctgtgttgtttgatgcatataagttggctacagagttgagagaaatggatgaccatatgtgggaagctatggatcaaatgtgggtggaaattatgtgttacacagctgctaagtgtaaaccaattgtacatgcacaacaacttggcaagggtggtgagcttttgactctcacttggttacttctcaatcattttggcttgggatttcagtttttcttgtaagaggagggcatgttattgttgtttcaatgtcactgtaactttgaaattatttctagttttatttaagaagtattcaaaataataaagaaagaatttcatggtgtttaggcttatcaaataaataaaagtaatgtagtcaatatcaaggattttttgttccacaatgtaagccctgcagtagacatgaaatggtctttcaagctcttgacaaaatatgggttgtgtgtttcctttagtcccatatcatttatgtatgtggattttcgtggtgtttagaaaataaaaacaactctcatcaaataaataaaactaatgtagtgaatattaaatattttatgcataaaagtaaatttaattttgataattatcacaactatgatttttaaaaaaataaattacaattcagttctacttcacatcccacacatgtagtagtctataaaagacattgttaaatttatttttttattttatttcaagacattgttaaatttattttttttattttatttcaaatgtttacattgcacctaattcatgttgttagccgtacgaaatttactaaatgtatttatttcatacttttaaatattcagtataagagcaagtataagccgtacgaaatttactaaatgtatttatttcatacttttaaatattcagtataagagcaagtataagtcaatcttacgaaaattatgtttactttattattcaatgtgaaacaataattgaaataggggattatttttaaagaacaaaattaaataactcaactgaagaaagtgaataaagtatgatactacgattttaaatgatagttaaagataatcttcactctcaacaatcatcctcaattactaataaaaaataatattttaattttttaatcaaattattaaccccatagataacgttaaagcagacaattattccaatcctcttattgcaagttgttatctgcgtttctgggattggacacatggcctccaggttgacatttaagacttatcagtaaaactctcatcatggatatagtgggccaagcccacctgtataggacctttcgggtgttgtcttagtttcgtcctcacagtaccttccgccctcggcagatccaacttggaagatagctccggtatcatgagcctggagggaaaaagagttgcgttctcagaagactcttccggtttccctatttattttcccctataaataaggaaattctagctgtcagattgggctagaatattatatcgcgattaaaggagaaacttcccataacaagcgtagggtagttatttcagaatattctcccattaaaatgggatgctgttttgacatgatcaactcaagcccgattagcctagtcaacaattgtattcttcatgggttggacttcatgagtaagcccaaagacattattcaattgtaagctctttagtagagggaaaatgagaaaccctaatgtaattctctaactactataaatacccaactagtctcatggattaagggttgaattctctcatgtacttttactcaggcaaacatacaaagatacatcatgtatacctttgagaatatttacaagtaaacatattactgaataaaactgacatgtggactaaggctagttaattcctcaactacgcaaaaaattgtttgtctcttattatactttctctttcaattattgtttcttcagttcttattattttattccattttttaaaatctagcattccaacggagattaattttttttttttttgagatttggtaccaatttgacgtcctttagtaccctttccatgccatcatgaactttcaatcttacagtt

SEQ ID NO: 20345 - DNA, 4520 bp, Cannabis sativa
aaaaaaaaaaaaactcttccaccatgagataacactaaaattcatatactcttaacatggtgcccctcccctgtcaatgttactggggattaagtatcacctttgctaaagaagagctacaagaaacaaggccatacatcatcatggcttacaaataaacaagttagccagcaagatgaccaattcctcgacaaatgtaaagttacacaaccagacagcagtgacccagggagaacaaagtaaggtctaaattctcaactgtgtacagccaagaatagttccacgacactgtgtcattggagccgccttgcgccaagttggtcgttcaccacacatcatcaggacatcaacatcagacattggcctaatatcacagttccactggtcaggaccaatgacgcctccgatcacataaatctcatcccgcaggccagtcattgcacaactgatcctccggcgaaaatcagacactgacaccactaccttgctaacatttccatcctgtttggatattgatccatgactcataacgtagagtgaatcctggataactgccattggaccctggagccaatgatagtcctcaacagtccactcaagccccttactatccaagacttgaactgttgataaacccttgtgtaaaacatgaagctttcccccaatcactattcccgagcatgctgaattgtgagtgcgatgaagatcaggaattgaaacccaaacatccttgtcagggtcatacatttctgcctgagatattgatttcctacaactagtgaaaccacctacaacaacaatcttcccatccaaaacgcagcaagcaaacatggcccgtggaacaagcattgacgcacgtggagaccactctcgaattatggggtcatatgaccaaacctcattagttgcaaatatcccatcttgatcaccagtctgtggatcaacagcatcactaccaccaccaagtacaaacagctttccagcagtagagacagcaccaaagtgagaaaggtgcctgatttttgaggggaggatagggagtgtaatccaaaggtctcgaagagggtcaaaaagctgccataaattttctgggtaaaaagcacacacacatagaagatcttcagttgaaccaacttcctgtcgagctttaaacagttcaggactacgaatgacagctttccaggaacgagaaacaagctccaacttgggatggagaaagaaggggacccgtgcaagacacctgagagcaaccgcgtcagggagaccttcaattagttcagacataataatcacagttacatctgtttctaatgattcttcactagagagttgttgctaccctggatgcagcatttggcaaatgcagaaaacagaaaagcagtcagtaacacttagaataattattcaatggaaatactacagaacatctagaagctaaaattccagtacaaagatagcaaactgaatggtttagtgctattgcatgtccaaagagatctaaaagattaatagtcatcactatacaaactgcaaagtaccaaacagatatgccaaataatgcaatacattcttcaccatcataggcaacatattcacttctatactaactatagtattgtgcaatttagcttataaagagaggtagactcctaatataatgcaagttctatcaacagattgtgtaattgttgaagaaaattaatgatcgaatgtggactacatttccaaatgtcttctattcaaaatatcttattttgattattatgctacttatgaataaaaaagagcttgcaaagatccatttaagcacataagggaagcaattcaaaagaaactacagtgaaaataaataaaaattccaactgagaatgttatattagctcaatgggactgttactgttagcataagaatccatacttttcatcaacttcaaaaacataaacaaataataccacccctctttgcaataaattcaataccaagggatagcagcacgacatataaatttgaagaggatggcatagcactgactttgcctgcttctgatgctctaaagcatcatgctattctcactagaaatcaagaacttcatattttccgtccatctcaatctaacaggtccacaaaccttctcattcaagaccacttaaagtccaatacagaagctcatatataatactaaagttaccctaatggttgtcccaaaattctgaagaagtaactaaactagaggcagctaataactgccaattttccagacaaagcataaaatccttaatcaacattcaaaacaccctctaagtataatccaataacggatctgtgataactcaatttcatgtctcagaagtcagaacttaaattataattccataataaagaattaaacaagtcattggagacaaagaccaccaccattaacgcatgatccacttcccaagtttccaatttggttccacctaaacgcatttgtaccatgtgacacaaatatgaacagaaacatttccaaaacaccaaccaaaaaggaaagaatcaaaataaagattgtttatcaatttgattgcagacccagaaataaacaaaaaaaaaaggcaaggttgaaatttgagaaacccccgcagcattcagcccactaaagaaatgttccctcacatgtgaaaaaaccagccataccacaaaaattcaaagactattaagaaacaatcgacgtatgattcaacaaaatgaaccatgggtttttcaaagatttaaaattacattcaaatttcaagcaactttttccaaaccgcgctcaaatacaagtgggtataacaagaaattaaaatatagtatacataaataaataaaaaattataagagtttgccttggaaccaagaaacagtagatgtacctcagaggaaagaccctgttgaggacacaagatttggattctgtcgctgaaaattgagaaaagagaaagagtcgtagagggttaggattgtccagagttggggaagagaggtaatgcctgaagaaaacgccgagttacaaaatcaatgtgtttgtttatgttataatgttaatgtgtgtgtggtgtcaacctcttctccttacaattccactttcacaattccaagcgtcttgaggccctcttttgcgtgttttacttgccttaactcggttttaccctaaaaaggacttcaaatgtcgaaattgaacaatacccaaaaacccatttttttttgggagggaattttggatattccaatatttttttttttcttttcctaatattccttatttaatgtatacattttaattatatttgtccaaatctaatggcatgcgtagatcacgtggttgaaattttcaatattaaaaatattactaattctaaataatttccttggcgcatggatattaatatattattattgaatatggactaaccaaattccttgcctatgacatggtgtttccataattgttttttccttagagaaaagaaaaacgtgctcaggctcagcttatttatggtttcaatggagtaaagttgttaatatttatttaaaccacaatctctccctattacccaatatttttcattcttgtagcaatcgcttttaggattaaaaactcgaaaacaaggatgtttggattgtatcatcatgtattaaaaaaaacaagttcaagtactttgttttgtctttgtgtctccatagtttagatcaaacaggtgggtttcgatttatagttatgccaagaatatacttatgattttaatattttatatgaaactcataccaaaatataatgtgtgtatttgagaaaggtttggtcttttacttagagagtacgcaattgactaatggaataggatagaatcaccctatgaacacagctgagctggagattgagagattgaggtattaagataggtaaattttaccgaacatgcatatatttccacaccttttctctcactgaaatgggcaatttctatattgttaggttggtatacattctatttaataattttggacaatgatgtttcatattttctgtcattaaaaatatggtaataatagtctgtaggtaatgatattgatatgtatttagagatttcagcgggagaaaaaaaattagagggatcattttaataatcatagattaagggttcgtttgttacgcacaatttactcacaatctaattcttttacatggagatccgctaacctaaattagaaaaatcccacatcattttctaaagatttttcactatttcttcaattttatatgttatattctttcttatttctttatcgaaatagcaatttaaataatataaatatagagaaattgtaatagaattagaaataaattatcaaaacaatataatataaatatttatctattgataatatcaaaagaaaaataaaaatggtggttacacaattcacaatatatgtatttctttttctgttattcaaactttctctgcttaaacagtggcttatcaataccatgtcaacgccacat

SEQ ID NO: 20346 - DNA, 4322 bp, Cannabis sativa
ctttttttaaatattgaattttgcttcggttattgagggcgtgattgtatttttatattccttattttgaaaatatttaaaattagggtttgttgaatattatattttgggaaaagaaagaaggagatagattggaattgttcatgccgaaatttataacgtatttgattgggagtgactgaaaagtcatagcttataatagtttttttgttttttttttttttatgagaagccaccatatacacaccaattaatctgaatttatgcagaagaggggagcataacttagaaaatcaaattaattcgattaagaaaaagcttttcatatccttctttaagtttatacactaactaacctattaaaatttgttatgttgaaattatttatacatacaatttgattttgttcttatgcagtttatggatttatcatttatgtcttcaccctcactaatttagggaggaatagaatagaagtctcttgtcccaaatttcttaatggataaaaaaaaacagtctggcttgacaatttggtaggacacctaggagacaaaaaattggatgtttatatatgtatgagacaatctctcaagactgtgagattgcaactactgtgcgattctgtttgataatgagacaatttctcaagactaatggcaccgtctttatttgaaaatcaggctggccatctagtttcatgttgggagtgagagtagggagggtgaattgtggggaagtatgttagtggatttctttttcctttatatcaatatctgtttaacatagtctcgaaagaataccaggacttctgatagatgctaaaactgttaatcagatattttttttcgggtacaagcatgagttagtgttcaataccagtcagtcaggattgagtgttgctagcttgcatttctatatagatggttaaatctaatttgatatgcagtatgaaatcattttattggtttttcatattttagttggttaatgtctgctatccttaattctgcagtggaatgattgtccaagatccctcaaaggataatgatgtggatgcaatctttgaccaagctaggcaattgggagctgtagaagggcctgttgttccgccttcaagctcaaggagctttactggcactggtagattgctctcaggggaaaccgttcaatctactcctcagcttgtacacaacattgttttctggagcaatgggttcactgtgaatgatggccctttgaggagtatggatgatcccgaaaatgcaaacttcctggaggtaattttaaaattatgtaggctcggtattaatgtatagaccaaaatgtcatttgccaaaagaatagtgtttgttgttactatgcataataatgcctctaattttctggaattgataagtgttgttcattaggaatcattctgtataataattttggtggatattttagcaatgtgcaatgtatactttatgaaggtgtaaatgctcactctctctctctctctctctctcttgattacaattaaatgcagagtatcaagaagtctgaatgtccaaaagagctagaaccggcagataggaagtcctcaattcatgtcaatctgataaagatgaatgaaaactgccccgtgagtactttctttgttctctctctctccctttcttttttttcccttctatttttcttgaatgagatgagaaggatgaaattgaatttctattcataactttaaaggtaattgtcagcatttaaatgaatttgttctgcatcccgggtattgacaagcgaggctgtaaaagttctggtttgaaattatattgcaaatataagatgcatttatttagttataagtgcattcaattcttgttttaccattcatcgcttcgtttcctcccattgcaggagccagagaagagaaaagtaccatttcagggcgtgggaagaactctaggcagtacctctgcttcagctgagccaactattgcttctccagctgcaccaaccactccagcggcagtcattgtggatgaaacacttccctcaacttcagttcagcttaggttggctgatggaacccgcacgattggacgttttaactaccaccataccgttaatgatattcgttccttcatcgatggatctaggcccggggaatccagaaattatcagttgcaggtgatggggtttcctcccaagcttcttaacgacccacagcaaacaatagagcaggcgggtcttgccaattcggttgttatccagaaattctagccagcttcttgttgctctggcttggcttatgtgaattgagaattatatagaaagaatgtgaagctgttatgtcaactgaagacactggatgtgtttttaaaggcagttgatttatgaaaatgagatacatttaacaaaaaaatgtatttcttacatattgaaagactgaagctttttttttccctaaaaaagattattgtaaagtggtggtaggaggatttttgtttgtatgttttttttttttttaaattctttttatatattttacttacatataaaaagttattatgcattttcttttacttgttgtatgccacttttaaagcagaaaacaatgtcaacataaatcgctatccagagtggtcaattgcatgccactcaggattgaaggtcaagactcagtattgtctcactttaatgtgcttgtctccaatagtaaatgttttttttttctttttttttttgtttttttttttgctgagtttgtcgttatactaacttttcatatattatataagacatttttgggacattttttttcccagtgaattttgttattatttattgggataagtttctcctaactttggtggcaaaatttcgtataaaaataattttaattaaggaatgattacaaagatcaatcaaaatatattttaaatattttaaaagtaaactaataaatcattacaaatataaaaattgaacccaaaaaaaaagttgtaaatgtaacgaaaaagatttaatatatctaaaataaaagtttttttttttttttttaactaaaatataagtttaaaaattatgtatgcagccatttcaaaagaaaaaaatatacataaatgattttcaaaaaaaaaatctattttttttagttttgaaatatattttaattaatttttataataattaaaggaatttgcaacataagtttttagttgtatagttttatttttgacgataataataataaattatattttaagaacttctaaaaatataatttaaatattattaccgttaaaaattaaatttatatattaatctgtaatcgagaattaaatttaaaatatttatgctgtaaattattgaattaaattattttgaactgatatggtgttgatgaggtgtattattttatattttagatttttagtcaaataaccattgtacttgtatttggttttttcttctatcttttttctaaattcaagccttaatgtccacaccaaataagtcatatcaatattttccttacaataattaagagtttccataattaatcagataattatgaaccaaacaaaattctttatatagttgaagtctttactaggtaggctcaagccaattcaaaatgagacttccaataattatagatattatttatatataaaataaaataaatcttatatctaaaaaaaaaaaatctttaattttttattattttaaaattataattaaaaaaaattatattaaacttggaaaaaacattaattatattggttttttaacactgtccaaaaatattgataaataaattaaagagaagtcacattaatataaatttcttgtatctaatttacaataatgacgatactatttttattaatgtgcgacattggctgaatttgacgttttttgacgtttttcgtctttttttttttttttaaaagtaattttttggttattaatagtgttgaatagaaactaattagttgcctttacataaaaaaattcatttttatattatataatttgagatatattttaattacctctaaaacttattgatatacatcttaataattagttatttttaagttatattattatagcttataatttaaaatacatttaggtaatcttaaaattattttcgaaactaatgaatttttatttaatattacaacctaccatttttatataccaattattttatatacttttttgtaattttaaaagctaattagttatcacataatattatataattcattaaaataaaattctaaaataaatgttaattaagctttaaaaaaattataaaattgtaa

SEQ ID NO: 20347 - DNA, 2340 bp, Cannabis sativa
tcaaatgtccgttatcaaaaagaaaaaaaacagttgtcaaactcaaatgtagtaatctcgatcgtgaaacttaacggatatcaagcctaagcaacactaaagcatccataattaaaagttgagcattgttacgagttatttatggagcttagtactacggtgaattatcgccttataattgattagcgattttttataatttttattaaaataaaataagtgaaacctaatattaagttacaccaataaagatattatacctgttctaggcaccatgagtgtcctttagcatttctcttaaaaattggacactacctgttatacaagaagagctgtacaaaaaaagacaggattatgcaaaatataatttgcatcacttggtcttcgcacctactgaaataatttgtatagaaagaaccaaaacaagttcaaatcggattctatcatagaaactaataggaattgaattatggcaattaaaagttaacaaaaaaatatattaatatctggagttggtttggagcctggcaaatccagaaacggcagttgtacgcctttttctgaagtatacagctgaaccactgaggagcatcaagcaaaacataattccctgtccacaattgttttaaaacatatttatcaattcacagtaaagatgagctaccattccatctacaaaatcatgtgactatgtaattaaagcgcctcttgtgttcagcaacagtatcacaatacataaaaacacaccagttgaaacttctattgggctcaatacataagtcacataagacaagcggataagcattaactaactagctatacatagcaagtgaaagagaaccattgacaataaaagagatcaggccttcctgataattagcaagatcctagtaaaataaatctcatatatatatattttcaatttttgatataattctatttccaaaagagagtgatttttgtgaaaggaaagtgcactaaatagccaatcaactctgacagtgaaaaaaaaaagcatacctcaaaaccaagcatagacaacttctcttcactaacggatggtatacagcttctgtaagtaatgtaaacttggtttctactctctttcgttgatgaatcagccatcaaccttctatgttttaaattggtacttagatcttccttagtattcaagactgtgcgcaactctagatttttggggaaaatctccaaagtcgatcgaatcttcctagaagttttctcattgggaactttcgagccatctcttgtttccatacattttagagggatacgataaccagtctcactgcacctatatttttcgtcattctaccgaacaaagagaacatcaaaatatgaggtaaagtagtgaattcaatgcatagcaagtgaaggaggaagtgcaattcagcaaagaaacaaaggaggggtttaatattgaagatgctgagcataaaacaagcaatattacggttcaaaagggcaataaggttgcataaatttataggttcattgggtaagtatggtttcaagaaaagttcttgctgaactttgatgcaatgttaactcctgactttgataattggagcgtggacaggagatggaatcgaaactgtctaaagttagaaaggaagaaaaaaaaaaaaaactacctaatcaatttcccaaaatctcaacaaacctaaacaaaaatgcctattatataatcaggaagttcattctagaaaagtgaaactagcaataaatataaagctgggtatcgcgagtatcaataatcaacaacagaaagctttgataccttttcggagtagaggcaaggaacgcaaggaccagaaggagaacattcgaaagtagcgttacttcctcgaggagtttctttgaaactaagcaaaactctacgcccaattcctcggtgttcatcatttctaagccaatccaatcaccaaattgttaaaggttcgatcgcactcgattagacaaatccaaaccctaaaaccacagcataaatatataaccattgatataagaagactgagaattcgagagtttacatgccctgggcgtgaagtgaaggtgctaatagcaaagcgagggttgcgaaagagagagcgactagaaccattgatgaatctgaagccatagttgatcctcctctgctttctcctctacacttggtcgaatttaacaaatgaattgaccgatttgtaagacccttccccaaagaaagtaatcaagaagagaattgatctcggatttctctcaaattaccgtcatccgtcgaataataaaaacgacaccaactgttccaaactcgatggctaatttcataatcgcccaata

SEQ ID NO: 20348 - DNA, 3547 bp, Cannabis sativa
tgaatattattgaatgtgattttaagattagccctattgtgtataagctcaaaatttgtgactaggaatactagtacttgctcgtgattatctgtgaattaggaattctcctcatacattggaattcaggttagacaacaaaataagcacatagaatatattgcagtggcgtggttatatgttatataattaattgaataaaaacatgagttagggttaatatcgaaagttttatatgattaagcatgtattagcaatatatgtgagtaaacaataagagttatgcaataaggcataactgggttagactcagtgactaaaactaagataaacactattaaggccttatatatgtaaagtacacgtgtgagcgtgacacgtgatgtcaatgctaaatagataatagatgcggaggcatcaatataaataagatagtatgatacttaagtgttgtggcacatttacatatgcatgagcgtattgtatgttacatgtatactgtatgctcatgttttattatttactatcttgttaggtcttagctcacgagtgctctattgtccaggcaaaggtaaatcagtgtcgggtcaaccatgagttagagggttttaaagataaattgtacatatttcggccaagccagaccacgaggattgggtccaataggggaatggtataaaaatcctattttgccgcttaggtcggcttgcatgtaaatgacttgtaatatttcaaaaagattttaacaagatcccaaatatgtaattacgttattttgattttaaataaagatatattttataattgcaagtttttttttttatttaattaagttattttatttaatgtaatcatggcacttggcatttctccaagtagaacattacaaaaattgtcgttagtgatttgggtaggggatattgttcgcatcagtgaagatgcatagatcttgaaagatcgtgtaggtcatgcatattcttttcagggtagtaatgatctttagttggtgagtgacatcaaactggaatctatattggaatactttatttttcaaggatgtgtttgatgatgttgaggtcaaacctattttgtctatccccacatcttcttttgatagacaagatagactcacttggcattttactgatattggttcctatactattaaaagtaggtattggcataccatgtctaggctggatttgggttaagtgtcgacttctgctaagaattcttgttagtagaaattattttggggcctctctcttccatttatgattattaagaattttgtttggaaaaggagtatgaatttttgccttcctatgcgactctgactcgtcgtggcattaatgcctctaaggtgtatcccatttattattaaaataattagacgaaaatttatgccttatggctttgttctgctctcaaagctatttgatcagagtgacttgtgagaagtcttgatgatttaatagtcatatcaagtttttatgaacttttattgggttgtatgactatcttaactaaatagaaagttgaagaattttttgttttatgtcgacaaatatggcataggtgcaagtgcaacacttttgtgcatgatcagaaaattctctctaatgagatggtaagtttttgggcattgagttatctttgacgatatcaggatgctcaaaaacccaattgcttgaatggtttgttgagtcctgtgatagagggatctattgttattactgctacatattttgatttgaaattgggggatgttaacttgtttgaagatgttggtattagtgtggaaaatttaaaagtggggatggggttgtggcaaccgattgagatgggtaggctctattttctaccacttttttggtagttgttgtgttcgaacctcatattgcagaggcatcacccttgctggaaggattattgctctttctctaactaggctacacaagaatttcaaatttctcaaattatctctaataggtacaagctattgatcgtaaggaaataccttatactgaatttggtattgttctcactaatattttcaaggtttgaaattcattttacaatatttcaatttatgattgtaagaggacccataacaccattggcaattctcttgttaagttggcattatccttagataataatcgtgtatggtggtcagggctccctttctttttaagctgtaagttcgtgattgtattgttgtgactcttttcgcttttttatccttttctcaagagagagagaattcgtagcacgcgtgtatgttaccaattttagaatagatgtgattatagaaccccataagtatcacttataatggggcgaggattcccttcttatatggggaatgagatagggaaggagacaattttctattctcgaatatcaaatagggtggggatgggatagtacccccgtccaacgggaacccatttaactttttaatttattctataatattacttttaattattatacatatattttgatgtatttttgtaatttattagtacatttttttttaaatatttttattttaatttacataacattttatatttgaaaaattattaacaaaaataaaatattttaatttttatataatttatttataactttatttgtttctaaataaataggtcccctacccacaatagggggaatggggaatatacaagtataaaggcgtgagtgtgtagttaataggatgggaatagaggagtactcccccgcctattactcgtcttattttcacccctagtcaaatgagccaatgccataggctactatgcacaagcattatacacgtgggttttgaatcaaatcaatttgattatgaatgacaaatttgcacagactactggtgtgtttaagctgggtaattgggtctctatgtttaaaaatttgatacaatatagggtctaatattctaacattggactatttctatccgttgtctatgttatgtgggtctagaataaagatgaaaaagaaattatatatatataaataaaaataaaaataagataaaaataagaaattatatggcctttaataaaaataagataaatttaaaaaggtgtaaactgtaagtttttttagaggtccaaagtcaatttaaaattaaaggtccgtataatatatagacccttatttatttatttttattttattttattttttgaaacagttataatccattaattaatttagacggtgagaattggattaaaagagttgtgaaaagtaataacatgtactctaaaattatcgttcataacaaatgagttttctaactattaaattattaagtgaaaacttaaatccgaaaagtaaacaatgacaactacaataataataataataagataataacatagtttatgatgagttaatagttttgttgctgttacttcatctcgtagaattatacttgacaatcctctattgcaccttataaaattataaatacaccatattattaaaaaaaatataaatttaaataatttttaaaaattactattaa

SEQ ID NO: 20349 - DNA, 5264 bp, Cannabis sativa
  modified_base (855)..(875): a, c, t, g, unknown or other
  modified_base (3078)..(3084): a, c, t, g, unknown or other
  modified_base (4669)..(4676): a, c, t, g, unknown or other
  modified_base (4724)..(4746): a, c, t, g, unknown or other
  modified_base (5224)..(5234): a, c, t, g, unknown or other
aaaatttgaaagatacatttatcagttatttttattattttgatttaatatttattcaagccctcactcaactaaatttctggcttcgtcactgaatacacatacctcccaatccacccatatgagccatttttctagcttcaatgtctccaacaagaatcaccaacaagatctcaagattagacccaagcttagagccacaatgtggaactatcctctcttttcttattaccatacaccttaaaactactcaatcaccaaataacacatatatatacatcccatacccttataactttaaggggttattcactaatagggcttaagtggtccttttatggtatactataatttaatgggccaattataatataaaaggtactctcatgtgcctctaatacataattaatttatcaatcatcctattatggttataaacaaatattagacacatagttaatgattctgtttatgttattaagcttatgattatattagtcctgaataataattctaacactaataactaataatatttttttttaattattaattatatcacttttaaataaaataaaaaatacctaacttaaaatttagtataagttttttgcaggtaactttttactaatatgtatatatatatgtcaccacttgagaaggcaggtacgtacctagtagtagtatactacttttaataataaatatttagttttagataactttaatttgcatatattctaatgacgaaaaaagaaaattaataataaattaaggccgggcgttatttgggcatgctgtgcatctaaaatacattaaccagtttaaacgcaatttattattattattattatnnnnnnnnnnnnnnnnnnnnntattattattattattatattaacagctttcattgcttaaaacaaacaaagaaacaaatataatgatgttgtgcgaaaatcatatcttctcaagaatatttcatatgatctttaactattaaagtagtcaataagtttgccttaatagatatttgtatatattatcttttcttttttattaattttttatggatggaagagatatttgtattatcacttatgattatcgtctttgttcaactaattaatgtagtaaacgcaatttcattaaggcagatcaattaaaaatagagcagcaaatttttacttatatacaaataaatttattatatattaccaaaaatatatagataaaaaaataaaaatataattatataattctatacaattttataaaataatatttaataaacatatatatatttacaattttaaattattttcaattaatttttttttttaaaaaaaaacataaagttaaatatataaatacataaatcaatatttatattttaatatattactaaaataatttattttctaaaatttaaaatttgaaactaaaagaaatatacaaacatatttacaaattaaaaatttatttcaatagcgatcttagaaaagcaaaagagaggtctacaagattttctccgtaaccctttgccagccaccactgctattttccttagactagggctcgcaaactaatattgaccttgggtgtgactctggtcgggaatcttcatgagtgtcatggtttttttaatatgggtttctccttttccaccaattggatttctggattttggggtttgtttctctgacggtggtctgttttgtgtggtgggcatctgtggtgcttggttcaggttcgtgggtgtggatttggtggcctctggcactgggtgggatctggtctccatctcttaggtctggtttaggtgttttgtttgtcaagttattttaagcagggtctggttttggggctatcctagggtttgggtatgtacaaggtgtcatgggggtcgtggtcagcaacaaattggtgggttgcggtggtcgaaagttgcggttttatttttgccaaggtgaaagttgatggatgggataggggtttgtttccaaaaattgaagtcgaggataagttttcatgggggactttagattggcatgtggcatatgttgtttttaggatgtttttactttataattgtcttcttgttttgttgttagttttaataatagtattgatataccaccttgctattattatgatagtagggctttgtttatctatggaagaaaattttagtcttgtttcttttgggatgttggaggaatctcaattggctcaaagcacgtatgtgttagtagcatgactatcctttttcatgctcatatttgggggtatttcatattcttattagccccatagtttatggtgtgattgtttattattatggttggctgtttgattatttttttttatatattctgattgaataatagggttgtttattaccaaatttttattagaagatctttggctaataatcattgataggtgtgatttgtcacatgttcatatttggtttgaagatctagcattcatcacgttttattgatgcttctacactggcaacttattggtcctttaattgaaggtgctgttaggattttcattccttttattgtaatgaaatagttttcatatcttattgattatgctctttgagcgatgtatcatcatgtaatggactactgtctgatttgcctattaataaaaattttcattttcttttaagaaaaaatagatatatttacaaaatttgtttatattttataaacaacgtgtgtgtgtatatatgttattaaatatttgattagtattattaatatttgtaatgtcattattaatttagtacgtttattatgataatattttactattacaaaaaagacttttaaaggcagttttttttcaatcactaaaagaaatgtttccatagcttaaaaggtaaaaaaaatatcttgaaacccctttatagccgattacttggaaataactgtctctaaagaggttacgaacttctacatggactttattagcccataagaaaaccctaacaaaaatccagcagcctcagccacaaaaaaccctaaaaatcctaaagaagaaccacatctctctctctctctctcnnnnnnnctctctatctctctctctctctcactgtttggctcaccaaccaccacatcggccgccatgaaggtatattctttcgcttctttttctctgcctctcttcctatgtgtctcttacctgagccactgtcgagtctagcatcaacaacaccttaaccacgaagaacccaccatcgttggcaaaaaactctctctatagcaccgatggcgcctcaaccatgaagaaccgtaccctgacgacccaaccactaccgaaggtcccatctcttctcttttctttcctgccatatttttctttttgtgttttctcttaccattttatttttgttattttcaggtaatgatctcgtggctaactctgattcgtggtgtattttttttttgaaaagaagtgttattttggattgttacgtttagatctatgattttttagttacaatcaatttttttgcgatataatcaaatgccaacggttacaaattttaccaaaactacctctaagggccaaaaaaaccacctctaaaggccctttttgtagtagtatttcaatataatcaatatataatttgtttattaaaaattcataaataatttcaaaaataaaatactcatatttatttagttattaaaaaatatgcttaaaagaataaataaaactgtaattaaatattacattatgtatattcattatgaaaaaatcggtgataatattgttgatataatatgtttagggaaatttgaattaatattcatgcatttgttagtaaacttaagctaagtataccaaaataattagttagataggccactttttttattattaaacccaaaaatacccctctcaaaactcacccctcctctctctcttcctctattctctctgcctctctcgctctcttcttgtcacacacacgaagaccctagcaacccatggctaccaaccaccacgcctccaatcgaagaccaccaacccaccgacaactaccaacccaagaccccaaggtctctgaaccacgaccaccgcgccatgaatgtaagttttccatttcattttattgtattttgtatgatttagagtcaaaatgtatgattttatttatagttttattggtttagaaaaaaaaaattatgattaatgtctgttatctgtgagttgatgttagatttatggttgaaaatggtcgaatctgagttttgggtagaaaactggtttttttgccaggcccgatggtcgtctgatgtcttcatattgttaaaatgagtaaaggtaaggaatggagcttaacgtctataaatgtagaatatggtccagtggtggcctggtgctatcattttttttttgtacaaaaaaaaaaaagaaatgggttgaattgagccactattagaccaccatcagacccaatcggaccactatctgtatgaataagagaatggagaatatggatggtaaagttagaagagaatagaagggagaagggtatcatgtgtattaatataaaatgtgaccattttttttaaggggagttctatttgcaccacataaaatgataagtatacctcattataaaaaaaaataaacttaaataatnnnnnnnnattactcttaatatttttttaaattttttttcctcacattattttatnnnnnnnnnnnnnnnnnnnnnnnttttattttcataattttttttcaatcatgtatattttttttatttttttaagaagaattcatataattttttattttaaattttttgtcataatatttaaaatataatttattttatttgataggtatatttttaaaaaatataaattggaagaaaaaaattaaaaaaaaaaacttagtttaattaaatatataaaatttatataaaataaaaattattgaaatagagtgtctttaaaaatttttgaggtgtaaataaatttttttttttatatatataattagtatgtaaaattaaaaatatatttatattaattaataaaaatatatgataaattataaataaatttgtatgcagatataatataataattaattaatataaagtatataatttataaatgggtaaatactattttggaccctctgttttacaaaagttattaattggactatgtgttttgttaaatgacaaaannnnnnnnnnnttttctaaaatagtacaaataagaccctga

SEQ ID NO: 20350 - DNA, 5104 bp, Cannabis sativa
tctctctctctgtatatatatgtacatatgtttgtgacacagcatgctgttttctcttttttagtaagctcatatagactaattctgatgacaggtgattttgtaattgacacccctcagaagttgaaaaacaagatagaaatggtaaattatttccttttatttttattggtttcattggttttctttttccttagaggagctgcctcattcaactttatatatgcgacattattgcacttattttggctacttttattttttaagaggtgttcctaactttatccaattgaaggttgaagcactaagtgaaattgaggtggcaacaaaattgttgaaggatgacatcggttgtcaggtaaatcttctatggtctttattcacaaattatagcttgttctgttccaacaatttttttgaaccattcagaagttccactaattatttatggtcctgttgttcttataggaagatccactgtactctcagtatcaaagccttcgttgtgaactgactccgcttgattgtgattgtgatgaattcaatatggtatttaatattttaaatcgtcctatattcataaaaagttgagaaaattagagaaaaatttatattgcttgctctatttctaaatgtttagttccctaatcttgtttccaatggcttcagattgcaaagtatatgcagaacactcatgcaaaaacacattcaaattatacagtagatattgtccacttgttcagggtatcaagagatgacgaagttgaccgtttcagtaaggtaatttgtttatcttgcacaatttaagtgatataaaattacctgtattgtccttactatttttaaatttaagctgatttaagtgttctctctttttccctcttgcacacagtttgcaagtaccaaaaatagaatgttattatggcatggttccaggctcacaaattggactggaattttatcccaaggtgatcctttattttatttactgttactcttatactcttaaatatactctgttttgttgtctcttgtgtttgtataactatgcatggtgtattttcattacctgctgaaaagtttctaattaaaacatgaattttgacattctaggtttgcgcattgctccacccgaagcacctgtaactggttacatgttcggaaagggggtttactttgctgacatgttctcaaaaagtgcgaattattgctacgcttcccacagtacatcatctggtgtgctgcttttgtgtgaggttgcctttctacgtatatcataagattagactacaatatatcataaatctaccatatttaagttttttaagtgggagcaaacaaattttacatcacattatatattacataattttcctatgtttttagttcctgtttgaccatcatatttgtccatcttttccattttctcatggttgtggactgtgaaattttcaaggttgcacttggtgacatggccgagcttagaactgctaaatatgatgctgataagctgccagagggaaagctaaggtttgtttatcaatttttttttcttggattgcttacatattctgtctcatgcttattttacagttattacggattatattacgagaacatctcttcttcgcactttgacggattatatattctgcttgatatggcagcacaaaaggcgttgggcgaactgctccagatctctcaaaagctcggcgtctagacaatggtgttttagttcctgaaggaaagccaaaagacaatccacaccatgaggtactaagcatcattattttttcatcattcttcacatgatactgtatttttaagagttggaattggtcaattgccgataaatgtgtagatctttcaagagctttcttctcttggattgaactgatctgatttatattcttattgcagggtgctttattgtataacgagtacatagtttacaatgtggagcagattagaatgcggtatgttgttcatgtgaactttgattttaagaaatgaaactttgtccatcagttagtggacctctgcattttatgtactgttatcttgtaaatggcatggtagttctaatgcttagctttttgtcttcattttgggtcaaaatgagtatatgggactttttaatgcaagttaaattttcctaatcaggttatattttatttatgttatttcattgtactattgatggcaagtttactgagtagtaatgagaatcaaaataaatgaggaaaaactgaaattgatatttgtaatattttgtttactcaaattgtttggaaacattataatgattttatcttgtttcatcaaaggaattttggttaaaaataaaagggattgttgacactctacataactatgaaagttgtaattatggatattttcaacaatactttctaaataaatttattagttttttttttttttttttgaagaaataacaacttcattgaatttagtatttgaaatacagaatgtccaacatagttgctggagtgttaaacacacaaatgctacgttcagaaaaagatcgagacatcctaacaacatgtgctaggtggtttgctgaacgtttaacaaaatgaatttcaacaaaaggcagagataacaataaaaattgatagtcttaaactaagttcccaaataaagaagaaagagaaatgtgactacgaatagcttgaatagagactaaactgttggattctagttcaacattttgtcatccatgtcttttgacctagcttaatgcttctgtaatacccataatctcggcaactaacaacttcgggagaaaaagtctcggtacagcaatcggctttggcatcgataagtattcctgagtcgtttcttgcaaccataccgtatccaaacttgttgtcactagcaaacgtagtagcatcaatatttatcttaattgtatttgcaccaagtgtagtccatagctcagcctattatcactattgcaaaaatgaatggatgatagaaatctattatcttgagctttaatctaatgatcaagagttatacgtgctgatgttaagacgtttgctgtagtgagaactttgttcttccaaacaatagagtttcttgatttttacaaggcctaacacaccataaattctttagttataatagggagatagactttaaaaaaataaactttaaccatacaaaaaatgactctataatagagaatggatatggagttatgtaaatgtaaggagttttttacatttttgctaaactcttttaataatattttaataaaaaatattattattttttattattttataaaattaatttatatttgataaattcaaaaatattattaaaacaattaaatattaactaataaaggtgcaaaaataataagaatagttttttattttaacttagctaaaaaaataaaaagtaccattggagatattaggtacaccttaattgaaataggaaaagaatttaaaattgagttgcaacatataaaaagtggctctctaaaatattttctaaactttataatattatttttataaaaaaatactattatttttttttttattgttttatcaaatcaatttatatttaataaattcaaattataaaaaattattaaactaaaatcaatcttaactaaagtagcatgatcggaggaatttactcgtctcattgtataattcaaagataaaggttaccgaaaataaatataaaaatgtatttataagtcacaaataaaaatatgtgttgcctaaatttctatattttaaagaaaatgttatgaaatttgacgaatgtttattggaagcttcaattgacacaacttgttttttccttacacatatttttgttatgttttttcttactttatcattttctatttaattaattttaggttttatttttctaaaattattttcagtaagctttatttacaacttaattttaaaatacataataaaagctcaataacaacaataacaaaaaatataagtaataatgctattaataataacaacgaagtattgttcattgtgattaggtaattcaattaacttcttccacacattaacatcttaaattctctatattaactaatatttgttttttcttcatctgttatatttgttattattaataagatattacagctattaattctatatataatctcctatataatctaagtttcatagcataattattatcatcatcaacatcaacatcaaattaagaatataatattattgaagatgaataccattctttccaagtttcttgtctttgcattgcttgcaactttgggtatgactatgatgatttgcagtgttgaagcaaggagaattttgacttttaattctcctgtgcttgatcctaatactcaagcacctccaactccaagttcaaactattgtaagggttattctaacattattccatggtgttggaacaaaagagcataagtgaatcaattatgaaaatatgttgttgttgttgatgatgatcatcatgattagtactactcacattattatatatttatagatgtgattaaaagaaaattcactatttgtaatttgtatttttttaaaccatcaataaactactaaatatttcttcttatacgggaagaaaaggtacattttgaaaatgattattgcattgcaattaagagttcgataaattttccaacgaaaaaagaaaaaaaaaaagttggatataaatttaagaaaaatttgtagtacactatcataaagaaatgctttcggtacatattttatttgtttcgatattaaggagtatttttattatattttttttttttttatagttgtgaacgttgtagttatttaagtttgcctgtaaaattttagaaaattataaataatttacagtatcaaaaataagttataaataattgtttaccactcgtataaaaagaaataatcacgcgtgtaataaaatatttaaacatcattttcagcattgtaatctatttataattttttttgaaaatttataagtgtaaatcaatagtataacgtacacgatcataacaaaaattaattaaaaaactcttatgaatgctgaa

SEQ ID NO: 20351 - DNA, 1945 bp, Cannabis sativa
atttttaaattaaacttaaaaatggttgaattaacattacaaaaaatgtcacttttgccagcacaatttgttactgtgctggtaaaaataacttttaccagcgcatctcacaaattgcgctagcaaaaaggttaaagttttaccatcacacattttgtagtggcaaaagtttaacttttaccagtgcatttacgtgctgggaaaagttttgccagtactttttattttgcaccgacaaaagttccaataccaatgttaatttgtcaaccccttttgtcaacacatcaaaagtaaatttgttttgtgagcgcaatatcaaacttttgtctgtacaaaattgtactagaaaaaaataacattttttgtagtgtaattacacatgcatcatatagtttgtaatattatttagtagtgttatagtttaattatgaggagctcacgttttgtgttgaagaaaagaatgaccaaaataggaagagtggagatgaaagaatacatagcaaataaagcccaacaaatacacattttacgcacaaagagaagtgagacacaataagcatataatcccaaattttgatattgaattgtccaaaccaaaccaaattgatcatgaaatatatattatatatgtgattgtacaaagagatagaaagactatatgctccaactccaagtcaataaataataataataataatgatccatattctcaatattataatatcccaatcaaattgatgttattgcaaatatataccaggataatattatatgagatgatgagaactaacctaatctcttaagaacaaaagtcaagtctccataagggttttagatgccctcaatataagatttttgaatgtcttcctcataaagaaaatgtatttatttaattataaggtataataataataataataataataataataataagattatgggttaatattatttgatgttgcctagcctaggatacatgggggcttgtttggtactataaagtgatgtttatgtataaataggcagagatcttgttcaaagttgagatatatttatatattcgatacttaattatggaatctttacgtatataagagatcgatatggcaatatgaatattatcaatgttcctaaacttagtactctctctttgtattattgtatatatattctcagtattaatttcatagtgacatgactaaggtatatatattgacacgtgtcgcattttaattcgcccccatccaacaatactacataaaaaaattattaagcaaaaaaatgtataattaattatttaatatgatcacccttaaataaatattttataatgaattattggtaataattttttttttaattatgtcaatgtttatctgtagaggatggtaatagaagtatagatacatgcataaatagcaacttaactagtgaagaattttaagattatgtaatcacattcttatagagttaatatttatatatttataagtaacaataaattaaatatgtgttaacttcagttaattaaatagatcgtacaaaaactatatttgtagcctatatagccatatatataattaagaaacccttttaagaaaatgaaataaatgtacatgaaagagatatttgtaataatttttataattagattgtttttttaataaaaaaaaataaaaagttcaaaaacaaaactctacatgagtcatagttcgagagagaaaaatcatatttaattggaaactgatgaaaaattataatgagtggtttctagaaatcacaagtccacaatacaaagagctatacatcaatttgccaacaaaaattagttttgttgagaaaatatattttttgtgttgaattcttatcgatttttcaacataaaagtgcgcaatgccaaagaagttttgatattcattagtgcgtttttggtattttttat

SEQ ID NO: 20352 - DNA, 5478 bp, Cannabis sativa
ttgagtctttgtaactcatgggtactttgtggtgcaggtaagggcaagagaaaactaggatagccacgagatatcttctctagaaaatgtacatatcgacttattcagcttgtacggttgagttgtcaggagatgttttatgctgcacctgatgtgtattttgatttacttttgtatatagcccttttgtaaaacttttgtaacaaaagatccccgaaacaaatttttagcgatgtaaagccataatttattttagtgaaatttttactattatcacggattttattaaattgtaaatctactattacaaaattatgttttaaaagcacacacatggcgtccctaggagctaggacattacagatgggctctggattggctcaaaaaattctatgtgagggccctccaaacaacaaaagaagtagtgtgattatcaacgaaagcaagaataccttcagaaatttacgagcaaagctaagatataagaggcttatcacatttcttccattgagcatagttgggattgatctcaccaatgagaagagcttgtagaggaggaacaccattaaacaaattttcttctagttcatggccgattacgatgggaacaacctgcggtttccaaacaagaaagttcacatgatcgagttttaatgtaagagaggaggtaagagaactagaaaagggattccatatcgatgtaacaggggtagaaaccagaggatttgttgaagcatgagtgttgctattaaggcctacgagatcaaaagtggaggtgtgaatctaggactccattagaggaatctggtaccacgtataagcttgtctgaggcaaaaatggtaagaaataaaaatagtaagaacatgaaacagagggaattgcaaggagagcttagcttctcaatgagatagctcaatattatttatagagttagtttccttacaagttgataacaaaaatagaaaaaactaataactaatcttgaaaaccaacttaattaccaaacaaaataacagaaatgtttattggttaataaacggtaatagaaaatattacatctgttttttctaatatacttcaaatcctagcagtttaggtatatattgttctaacttaacttttaaattattttgtgtataaaaatgttattgtaatgttagattgtaagaaccagtattttctgttgtgacaaattaggtccagttgcatttggagttcgtggtgttatgtctagagtttatcctattagtgatagtccacgttagcaacatattttgggtatttaattttccagctgtttactttaagtttttttatttagctgggtataaatacattttattgttactgttttgactaatcttttttattggagattagggatttgttttcttaggtttttattagtactatttttaggttgattttagtgtattttttaaataagtttcactcttattttgtgcaattgtacggtttgggtagttgttattttgcaggtctagaatagaagaaaaatggagaaatattgaaaaaatatgagaaaatggtcaaataaattaactcttgaggcaagagcaccagaaaattaattcaagaaaaaatttagaagttttagtgcaattggagctcttgaagcgaagaaattacaaaatgtggaggagtgcctcgacactaaagcccatgtcagggcattaaaaggccaaaaactgacaaacatggtcgattttgatcaaggcatgggcgcgcctcaacactggaccttagttttcagggagaactcgtaaagagctcactagccaaaataagggggttaatgccttgacagtgaaagttagtgtcgaggcccgtgtttaaaaaaaaatatctaggaatatctactcgcacacacgagccacgacattaaggccctagtgtcgcggtgcgccccctgaatttcaaattgggatattcttttcgatcttttttggctataaaaaaagtggactttcatgtttttcatcaagcaattagacagtacgaattggagagaaataaagtgaccaagaaggttttccaaccgagtttttcaataatttcttcttctttattttctttttatgttcttagtcaatgtgtgtcgaattgtttcgatgaatgagagtagctaaacagttattagagtattgatggatattatttgacatttatttataattttaatatgatttgattcttctccaattttttatgtgttctatttcattcgtatttatttcttttgattgtctggccatcaattaattgtttatgattttgatacgaaatttgagaagcgagtgtcaattatgctatagtgaaataggaacaaattttgatatagtacgagaatacctatgtggtttggatagctaatagagtttcatgtgtttaatgccttttacatgagttaatttatcacaaaagtaaaaaatttataggtaattgagatttatatatctgagaatactataaattacttaagtaaacatgttatttcatagaaattggtataggaattgaattatattaggccataatagatagatacaattgaaatcaataaccctagtactaatcattgtttattcacacattaattacttgctttctgtttttattatttttttagttttaattttctgttaaatttgaaatagcatgagtaaaagtttaattttaacatacttaattacaatccttgtgggatcgacctcattcatgtgagtctattacttgttaacaatatgtatacgtgcatgttgaaaataacacaacacatttctttcttttttgtttcgtctgtgtgtttcattgcaggtactagcaagaaactctattattgtgggttggagttttagagcaagtcttgaagttaagtagtgagagctgaagggatttaagctaagacttggtgttacatatttgaaggtgttcagatctagagctctgttgaagggatttcaacgaacaagaagcaaagggatcttgcattcataaccaagagattttgttatttaaaagttcactactgtaaatgttggtttgtttttctattgtaatttggattggttactgtacaaacattgtttgatatagtgaagattattaccctagttcagggaacccaagcactagtcagatcgtaactttcatgtttaaatcaactgaaaatcaaccttaatagagaaagataggttattgaaaacttgcggcatacaattggtatcaaagtggactttttctatttagaaatattgatccttaggttcttgcaagctatgttgtacttaaattcattgttactacaattcttgatttttgtgcattttgtttcctctttgcaaaacccagttggaactaaccccttctccagacacgactctgggggtatacttctctctatctttgttttgttttttccttgtttgtacaggaatggagatgttcagagaaggagggtccacatcttgacccccaatgtcagaaggttctagttacccatactggaaaaccaaaatgcgagcattcttaagggtagtgaatgaaagagtttggatggccacagaagatggttgaacatgctcaacaatgatggataatagtgttacaaaaccaaaacgtatgagtttgtggactgcagatgagatggagaaggccaattttaattcaaaggtcatgcattctctattcaatgcagcgtccacaaatcaattgaaggtcattgcaaactgtgagatggccaaagagcgttgggaaaaactgcaaatcaaaaatgaaggaacggatgcagtaaagaaatcctgtctttgtgctttggcaaaagcgtttgagaatttatcaatggaagaagaagaaacggtggctgagttccatgctaaattgtgtgacatatcaaatgagtcttatgatttgggaaagacttattcaaatgcaaagttgatacgtaaagttcttagagttttgcctaggatatttatgtcttgagtaacctccattataatgaactaattggatccttgtagacttacgaaatgtccttaacaaggtggaagaaagaaaaaagcagaaggatgtgaacaaagaaaaaggggacaacagtcttgtgtacattcacaaagaagaaaagaagtttgtcccaaatatgtttgttggtttctcatatgaaactgtagatttgctaacaaggaactatgcaaaattcttgaaaaagaagtgcaagaaaaaaaaattaggggtaaggaaaattttcgcaaaagaaatcctactgggaacttcggacatgatcagcaaccaagtgacaataagagcgtgggaattcaatatagtgaatgtgatggttttagacacatttaggctgagtgtgacaacactctcaaaaataagaaagtccttgttgccacctagagcgatagtgacgaagaaaaagattctgttgcaagtaaaagttctgatgaggataaacaggtagtggctttcatggctcaaagttatcattctgttgtatctaaggatgatgggttttctacttcattataagttgacagtaatggaagacaaaatgcatatgaagagatgtttgcgcagttggaatatatgactaagcatattagaggtctgaatagtgccaaggagcagatagagtctaaaaaagtcaagctggaggacactgctaagaatctcaaaaaacttcttgatgagaaggacaatgagatctataagctttcagttgaactcgtaagagctaaacatagagtccatccctccaggaacggctgccatatcaatcaaactctttttaacttcaagaagatcgaacctctattggatacaagatgttgtatgagaaaggagataacttgggggtagaagagtccactacaccagtgatccacctggataaaaaggctaacaagaaatcatcacttcgctcgacatttgagttctcaaaccccattggaaaattccatgttccatctggacctaccaagataaagtttgaagaaagaagaattgccccagagaatatatctcagattgagagattcatcccagtgtgtcacttttgtaacaggaggggtcatatcgacccaaatgctataagctgcataactacttggaagatatgatcaattgacctaatattttttaacaacccaatagaacttcacgggaaggatctcgaagtgagtggagatcgaggtctgatcatgaatcgaatgttaagttggtagctcaagtttcattgtttgcatttctagaaggacagtggtactttgatagtggttactctcaacacatgactgacaacaagaaattgttagtcaattacaaagaagcaatggagagagttgtcacttttggtgatggagacaaggacctgattattgggaaaggagacttggtgctaagtggagttgcacctcttaccgaagtactgtatgtgaaagggctcaagg

SEQ ID NO: 20353 - DNA, 4919 bp, Cannabis sativa
ttcagtctctatatctgcttgcctctctaagtcattatattagctattaggaatccatagactctcatcaaagtgggagggtcctttctgaagctaataatgttgtataattggccatctaccaagggtgtttcagttgagtttttatagatttttttttatcatcatcaaactatgaggaagaaaaattattttgctgtttatcagatacatggctcaatcatgttctattttatccatattcatattttagaatgcaaactcaattattatttgattgattgtgtgtttgcgttttaattcagtatgttcttaattgatttttgttgatttactttttgttttgaaatacagggtaaggacaagacaactgaagagagacggattgccatatgcatttttgatgatgttgcagagcagtgtcgtgaagcagctctaaagtaaactcgtctaacttgaaaatcttttccttaagtagtatcatactcgtatagtcatatgatgtttactcaattaatctggttttattttgatgtggtcagatattatgataccttcctcccatttgtattggaggcttgcaatgatgaaaattcggatgttagacaggtttgattttctgaccattgctttgttgatatttgttatagagcttttcatttaatttatttgatgtctttttcaggctgctgtatatgggcttggtgtgtgtgcagagtttggtgcatctgcattcaaacctttggttggaggtattattttttttgctgtctaatcagaagtattttgttttatattgttatctcggaataacatttttaggtgatttgtacagaggcactttcaagattgaatgttgttctccagcatcctaatgctcttcaagctgaaaatctgatggcatatgacaatgctgtctcggctttgggaaaaattcttgcttttcatcgtgaaagtattgatgcagctcaggtacttcaacacttgcgtatatttgttcaaaaaggattagagtattcgattcctcccaagatatttgcattttgcttatcatgtcattattgtgactccatgttattttatggattcatctgttaatgttattacgagttatcttccaaacataccttactgctcatgtttgtgataagcttcttgtggtcgtggtaactgaatgatatgttgttggcaggttgttccagcttggttgaattgcttacctataaaaggtgacttaattgaagctaaagttgttcacgaccagctatgttcaatggttgagaggtaagttcatcaagtcgattctttgtaaacgtttatgctcaattttgtttcatcttgccttattttttttactaagatttacgaatactatgcagttttatcaaacaattgttcttcttacccatttacaggtcagatcaggaagttttgggtcccaacaaccaatatcttccaaaaatagttgcaatttttgccgaggttagtggtttttaacaatttcataaatgcacggttttatcacaaagtatgctgtcttcaatgaagtttacacacacacacacacacacttcttcctttgaatattcaggaatatccaatgcccagattccaactgattattcttcatattgtagtaataaacaatatttgacttgtaacatgatgttgttataaaagtaaatgccatgaatatatcaaatttggttaaagtttagcactaattcagagaaattttttgcaaagcccaagtcaaattgcatagattgaaccttttctcatttgtgattgcacaaccaaatatttggtagaagtttggcttgaaccaattttttttaagggggttatgattactctttgtaggtcttgtgtgcgggtaaagagctagcgaccgagcaaaccacaggcagaatgatcaatttactaaggcagctccagcagactttaccgccatcgaccttggcctcaacttggtcctctttacaaccacagcaacaacttgcactacaatccattctctcctcataatatcttctatctgcagtggtggcattttttttagctgttggcttattcatccctttggctcttgttattgtgtgtcaaaattattttgtcaccgtttcgtttcgataaggtggttcccaacattcgttattgcataatgttcttttgttattacagcaagcaagcaagcaagccggcgtcacgtcattgcttggaagtcatcgatgcgattggaaatgatcttttttgtagaatgtgtatactacaagtgttcattttatagtgcggttttgagtacaaaaaagaaaaaacaaaagttgggttagttcatggtggtttgcagagtggttttaatttttggtcggtcagtccatcgtcgttccccccgtccgttcggtctcggttggttggtgcttgagttgtgagggttgtcactacatgtcaatgcgaggcaatgatttgtagcagttttgttttcattgttgttttcagctatacaacattaaattatgggaatttgttgactatattatttatggtgattctctctcattattagattttctcaaaattttgattctcataagcaataataataaaaaaaaagaccatatatttatttttttgttgtgtaactcttcttttggattacatttcaaatattcaaaaaatttcattttattattgttggaactttaagttaccattatgttatttcttttttggtactaaattcaacatgttgatttcttttatttattgtctccaattttaggtggaatatatgttgttaggttttgggtgtgacaaagagagataacaacacttaacacaaagcatagagaaaaagattcccattagaaccctaattaatattcttagattcccattggaaccctaacaaatttgcttagatcatttgtttttttccctaatttttgtaaggatttaacattgtttattgctcttaacttccaaggttggaagtacaaatgtcacactttcatgctctcaacattatataaataattgtttcgttgaccaaaaatttaaggtgaggacaactacttagttctaccaaaaaccacttataaaatatgattaaactaaatggttcccatgtcttagaattgacatgtcaaaaggatttggtcataatcataacattgtaaagtcagaacaacttcaaaatttacaaaaaaagaaaaaaagatgatgaaaacgagcttcccactaaagaggacaatcttcttcttcttgtctatctttatataaacaagacctttttctctcattctattcattcaaacacttttttagttgttgttgctaaaaatgttatctaaacaagccaaacaaaagggtgtctcaaccaacaaacaaagcaagttcaaagaaagagtaacaacaacaaccactaacaaagtaatgaagaacaaatttgttggggtgagacaaaggccatcaggaaaatgggtagcggaaatcaaagacacaacaaagaagattaggatgtggttaggaacctttgacacagccgaagaagctgctcgagcctacgatgaggctgcgtgtcttcttcgtggttcaaacactcgaaccaacttcgctaatcgtggtccaacgaattctcaactctctttgaagattagaaaccttcttaatcaaaaaaagagcttgaaacaaagcaaccccaccatcatcaccaccccaattagtcctactagtgttgttagtgttagttcaaatactattaaggattgttttcatcacaataaccaaaattctaactcaactactctatatggtagtaatctagtgtttgatggtgcatataaacctgatatgagcaattgcattgtggaacctcatcagagtatcatgactcatttcgattacacgtggccgtttcctattgggtttgatcatcaaattccattaacacatcaaggaatggagttgacaaatgggattgattccatatcttcatcaccaacaacatcacaatcatcaacagaagtggagtttagtgatgaatttggaagaatgaaattagaaaggcaaatttcagcttcattgtatgcaatgaatggagtgaatgaacatattgactatgcatatgatccaactagtgatgctcattgggatctttctgctttttatcaattgttttgtcaaagttaagtaatgtattatctctttctctttatgttatatgttttcatcaaatatttttggatgagtaaagtgaagatatacaagagattaccaataattgaacattgagcatggttgtcatttgttggaatttatgactatgatttaaattgattgattacattgaaatatgaaaatagctaacaacattaaccttagaagacatagcaaagatatcaataagaatagagccaaactcagagactaagggcgttttgttggacaaagcttccgccattgaggctgtcgaaacagcttcaagaaggaccgcggtagacacgagacaggactgtcatgatcgagccccgaatctacattgagcttcaccttccacgttgagattcaacttccacaaatagagacccttatgagtttctttagcctccaaaaaacaactattagaaaaatagagacccttcaatacccttggaccaagagaatagggacaattgtacgccttgcaagcttgtttggcaagaagagctttatccaacacaaagaggttcctaaatcccataccactatcggagttaggctaacaaagtctgatccaagtacaccaatgcatatttcttaaatcatcatctccaccccactagaattgagcacaaagacaatgtaattcattgaccaagttcgcaggcaagcgaaaaacattcatggcataggacggattgcttgaataactgatttca

SEQ ID NO: 20354 - DNA, 2243 bp, Cannabis sativa
ttggcgggtcttctcaaatccaacttctctgcttagtcgcattctaaaggcgagatactattccatttcttcattcctggaatctagcaaaggctcctacccttctcttacttggcaaggattgtctggggtatggaactgctcttaaagggattacgatggaaagttggaaatggacatagcatcttgtgtgcttctgatccttggattccaggtataaccaactttcagcctttacgatcgactgggattgcaatgaaccagaaagtgtcttcacttatcacaccagcaagacaatgggatttggacttattaaatgcaacttttcttgcttcagatgtagataaaatacttcagattccttgaacaatctttccagctggtgaccaactcatttggcactttgaaactaatggggcatacatggttaaatctagttatgcattagccacaaaccttgaagaacagcagcctgctatatcgggtcttcaaacccaaaattggtggaaaaagttctggtccttcactctaccttctaaagtgagaatctccttatggcgtgctataaacgaatgtcttcctactactgcaactcttcaccacagacacattgctgattcaccaatgtgccctctctgtcaaaatgctagtgagacaactctacatgctttgtttttctgtaaaagaccaaagaagatctggaaggactctaccttctctctttcccatttgatttctgaacatatgacccttaaagaagtactgcttcatgtttcggaatcatggtcagaccttcaacttaaacaattcataacagttccttggcatatttggaatgagagaaataaggaaaaacatggcagtagaactaaaccgtatgacatgcttttgtattttgctctatcatatttggaagagttccaagcggctcagaaaacaaccagtgcaacaacaactattgtatctctcaacaatatgcagcagaaacatgaggcttcttagctaaatcctcctacgggtaggcttaaattaaacaccgatgttgctatcaacaaggagactcaaataacaggctgtggagcaattcttcgcaactctactggtgacattgttgcagctttttcaaagcctgttataggctcttttcggcctaaggtgatggaagctttagctttgatgtatggattgcaatggttaatagacaatggtctgaatgttcactatattgagactgactctcttatagtggccaaaggtttgcaatcaccttctgcttcagtttctgatttccattgtcttttctcagacattatgaacctagtgtcctacctccctagagtacagatcggtcatgtatacagatctgccaattcggcagctcatttacttgccaaatatgttgtttcgatggactctacttgttcttggttggagaaaatgtctcccccgttaaatgcttttgtattatgactgcttatttaatataaaatgcattttcatctaaagaaaaaccttttaaaatttttaaaagctttcgttcattttctatgtcattattttgattttttttcttttgattatacaaatttttattttgtttttaaattcctccactcttactattaattaggcagttttgaatatatattttaattttaaagtaaattatttcagtttaattgctgtatttatttctcattcaatttttttttatcatcactcagttattttatttatttatttttttaaatcatcgttaaattattgttataattttattgtttcatatatagttatttctctatttattaatatatatataatacaaatgggttttggttgattttattagttattatttttttaaaaaatagactttattgttttttctttgagcgtctaccctccttagtgctctgcggcagtttattgagtttaacggttttttggcagttttttctatggtttttctctggttttctcccttctcttcaacatcaccacaccattaactactcatccttcacactgtgttcgatctcaattacttattcttgatttgtccatggatccctacaagcaaaagatgaaacaacccttgaaactaacagaggatgaagagtttgtatttgatcttactgatatggcaatttctgagcaacaagtcgcatctgactatgtgctatttgctaaggtgcttacgaacaaaaagtctggctttcaacctttaaaaaccagatggc

SEQ ID NO: 20355 - DNA, 2770 bp, Cannabis sativa
  modified_base (2396)..(2396): a, c, t, g, unknown or other
aataacataaaaaataatatacaaataacaaaaaattaacaacaaaataacaagagtacaacataaaaatacataaaagaccgtatttaatgaatataaaatctgacaatctataaaagtattgaaaatttcgtacatgccgcatttttatatattttttttgttgtttttgtattttttgaaattatcctaagaagaaattatatttttttcctaagaagaaattatattttttaaaaattattaaaaaaatatgtatatttttgaaagatatattttttttattttggtccctaagataggtggaccctaggcacgggcctagcccatcttagcctaagccgactctgattatgataattgataatatgtaacactatgttaatatatatttgtaacttattgagaaagtaaattaaaaatataacataccaagaaagaatagtatagagaaaataatattttaccgatttatacaattttgcattctacgtttcgattcattatttgtttagatcttgtgtttaaaaaaaattaactttcaattttgtattttgtaaaatgttaaaattattaggttctgtaatcgagtttggtcgaaatatttttgaatataattaaatttaaaaaatatctcccaaaaaaaaaaaaagaatctaggaactccaaatctctaaatctaattacctcatttttaatacacaaatttacatatacatttctttgttagatttgaattagaatagaaacatattatatgattattttgataaatcatttggtgtttagaaatatattttattaattaggtttcaattattaatgagcaatttgcatattaatattataagattaaacatatttattcacaaaataattaactcatataatgtaaatcaaattcacaaagtttaacttcttctttgaacttttgaagagaaaaagttataattttaattatttttttactataatttaaattaccacaaaacaatttgtatactattaagtacaaaataaaaagtaaaaaaaaaaaaaacaattaaacataccttgcaactcagcacattgttccaaagtcaaatcccctaaaacaacaacatgcctatcatccatatgagccttaatagtaaactttctttgcaaaatcgaacccttgtcttgcacaacacgcgtctgcaacttcaaaatatcttgacctcttcttaccttcagtgacagattcagaatttttatttaaaattagatcattaaaaatttaaaacaattatattaaatatacaaatatatgtttttataaattgagctagtcacaaactagctaggacttcaccttaatccaaaccacatcatgaccatgttggctaataatctttcccaattgggagctcaactcggacttggctttgatagctaagaacatctcatcctcgacattctctatctcagagaatccctcgatgatgtcaccaggcaatggcatgctctcgtcccactcctcgggggcttggtcttgcttcacttgcttcacgcagactactgtctctatactagtttggctcattttgttgttgttgtgatcgtctattctaagagtattagaagaagaagtagaagttaagtgtttgttccccatttagagatgaattagggttaactagaaatctttctattttaattgaatatggaaagctttgggttttttttaaccatgtttgactttgagatcttctaagaggaactcttttaggttttcacgtccagaacatagtaataatacacactcttgtcatgttttgttcttatatataaggccaagagaaccgtgcctacttattttttaattattacataaataattaattatttgtaattaagctatgcttttatttttcatatatattatgttggtataatatatattgattagattataaggatgaacaaaaatagatggttggcttacacatatatttgctagtctaattaataattaatggaaccattttgagatgcccctgaaatttagagggtcttaggaaaaaaaaattagtcctttatttagagtaaaatatagtattttttaaaattaataaaaaaatttataattttaaaagaaaataactttttttggactcttagtctaagtggaccatagtcacaggcttagtctccctatgtccaaagccaaacttattttcagcatataacaaattttataatatttctaataaaaacaaaatgaaaaaatatccaatccaaaagtagtgcaaagagagggaaaccaccatattagactttgaaactcaattagtcattattttctctataatacatcaccatttttttttttaaaaaaataaatgtctaaatttaatttttagcggtaataatanttaagttatatttctaaaactttccgagataccgttaaatgtcaagtcattatccacatgttatagaagtttcataatgtcaagtcattatcagtatatttaaaataattttttaaaaaaaacaaaattcaatgacctaaaccaatcagtaattgtcacgtgacaatttacttaacacttaacagttagatacctatagaagtttcataattataacttaaatgaccttgtttgacttagtttatatatttttttttagcttttagaattataaaagtcattccagatgtgtttggataaaaaataaaaaacattctttttaatttaaaagttcttttggaaaaaagtaagatttgtagcttctttcaaaatga

SEQ ID NO: 20356 - DNA, 3791 bp, Cannabis sativa
ttccgtctatcaggatgatttgcaggcaagtaccgtctgtgacccatataacacatcttgtgtccatttgccaagccactatttggtccttaatatatatatacttataatttgtgtgtatatatatatatatttttagaaggattttttttttcttctgagggaatccaaagccactatttggtccttaatatttggccaatagtgtagagtaggttcattttaaaaccaattgattctagcacctctactctttttagctagctgtgttataaaaaaaaataaaaattagacacagtcgtaaatactttgtgaagaaatgaagtcagctcatcctaattagaagtgcattgttttcataaagatgttgtggtcccaaactgttatggagcaatcataaaaaaaattatttcctttgtactaaattcagtatgttttctttttctgttgtaatcaattttctagttaatgagctaatggctcatgttattttgtgtgttatcatatttgtctataaaagggaagggctctcaacattttttgagctcaaagaattataaatcaattatactctaaaaatttgacttggtatcagagctctcatgtcaaaaagtagccaactaaacactttcagcagattaaccctactactcaatagactgctacagttgtgacctccacaaatgttggagtaaggtccatatcagctctcagctccataacttcatccctcgtcactttagcacactcaactagcctttttcattgaaattagatatgaaaaactatatttatggaagacagtggtttctaccattataagaggatataggcttgatgtttaaatagttttaacatctgaccacctaaatttatttttaccggtactggagaaactaaatctaaagttgcaaatatactcaacctcaagtatgagaaatggatcatcaatgaccaattggttatgggtggttgtacagctttatggcagagactattgctattgaagtgatggaatcatcaactgctgctggaatatggtctgtgttggaacagttgtatagtgctcattcaaagtctaaaatgaatgacacacgcaccctaaaaccacaaaaaaagggagtacctccatgcagagtactcattaaggtagaagaaaaattagacaatttctcttgctctagcaggcgaaccttatcaagaatctcagttggtaactaatgtgctttttggccttacatgtcactgatctaatcattgttctatagattgaagctcattctaaaaccacatggcaagagcttcttctcagcttcgacaacaatgttgaaaggttgcaaacaggcattaatgtatctaaaattctcaataatatgatagatctacaagcaagcattactaaagaggaatttttgcgtcagtcaatgcatttggtcaaacttgttgactgatacaaaagtcaataatctacacttttttacttcagttggtcaccgtcacaaataatgatttattagtgtcggcatgtatctccgactaaaataaaaactgaagaaaacactacaagaaaaaacaattttactggcaaattttctcactagtaaaagtatacgtatctcgtcggtatagttttgccagtgacattttgcaccggcaaaggatgtcgacaatgattcatcggcataacaagttttatcggtgaatcaacttaactcgcaaagtatttataccgacaaatttagttgttgtaataagttcatcgctagcaatttgttgtcggctaaggggtccatgacgacattttgtcagcgagacatggcgtcgacaaaatgttggcaccaaattatcatctactctacatttaactgcgaaagttttgtcggtgcattaatgtgccgggaaaacttgggcaataaaaaattattttagtttggcggcgctacatagtttgctggtaaaactatttttttttttaatatttatagttataataaaattaaaattagaattatgataataattaataaatataatccaaaatatattataaaactgaaatttatattgtaattacaaaattatataaattgtctaaaactaaataaaagtatatttagtttataaacattaatattatttatactgcaaactaaaaaaactacaagtctatagcatcgtattcgtcatcatcacggggatgggtagtttgtgaagaagacccaacaccaggaggccaaaatagtggaatcggtggaattagaggtattgggggcatctaaaattctagaacagtgttggccaattgcatcatttgttgctgagatatgctcatgatttgattttgagtctgcatcatttgttgttgtcactcgttctgttcttcctgctctttcacccttcgcatcagggcctcatattcctcccgggtgacaatgggttgcccagagggacctgccctctttgtccccatcctatgtcttggcaactggcccatcccttcaagtggcgtgactgcttacccagcacatgtgtcataacaggcatgtatgcgggaaattgcgtggggtcgacattgtatattgtcgcgggaaattgggtggggtcgatattgtactgtcgcgggacattggtcagctctggttgaatttcacgaatctcaaccattttggcctaagaaaatttgaacaaactattaaagttaaatagaaattaaaatatagaacgaggttattaaagatataaaattacttacatgcagttgctgtgtgtgttcatcgcgcaatttattgttcttacagtggaactttgtaaaagtgttcacaacactagaaagttcccccgtctagggatcaacctatttgtatacaatatgaaaaattagaaaaatattattcaaaaaatataaatttttagacaaattagtatgttaaaaacatcataccccgctcacgatgtggccaactatggtcttaaacccccattcaccttgaatcttcatctatcctcagtttttcgtatttttttggctcttgcctatactttaaagtaaatttattgttagcaaaatgagcaaaaaatcacaagttaatagatattcaatttttacttactcttttagttttttccagtatgcaataacctctgcctacacctctggtgtcaccatatctagacgtgatcccctactcacttccacctctctatatttctgaatattctccttccacgcctttttcgtatccgctctcgagtcacatataaccctttagacattaatttaacagcataatcctcgaacataggattattagttgggaagtctgaaaaaaataaacattaaagtcatatatattttttgtataatagtttagtttgatctattgcaataaaaatttgaatgttacagctaatttgtcccacatagtctaaatgattgtctctttcacgtcctcaaactcaaacttgttcaaaagaatagtattgtgaacaagaaacttgatataattgttaaatatgttgccatataatcgtctactagggcctctgttcccatatgaaatctacacttattttagggtaaaattttaaatgggtacaaaagggaaagtgtgaaaccctaattttaacaatcatatttatctctcatctttgtgcagcttcccctctcttcctcgtgcggcgccgaaggctaaatcttcatcttcggcgatcgaatccccaaccccaagaaacccaaccctgagaacccaaataacctttctcccttcctcgcctctctctctctctctctc

SEQ ID NO: 20357 - DNA, 4721 bp, Cannabis sativa
atttttttaaataatcttttacgtggaccaataaaattgtgtcatgtatacactgtgtccagtccaacatgacacttaacacctaaaatagacggaaagggtaaattgctaacagaatccgagtattgggaattttaccgctcaaatttaggttttagaggttaaatgaaaccaaaatgaaatttttggaaattttgccgctatttaacttatatataaatatgaatatgaacatgagtaccctaaaaaaaatataaatatgagttgtaaaattaattcaacatcctaacatggtgcccaacatccttagagaattaagtaatagcgagattcacataatttaaatattgatatgtgaggcctgatatttcatttagactaacagccatatagggtgttaacatgttggtgtgaaattgagactttgtttgtgtactctaaactaaaattttgcgtgaaggttgttcctaaactaaagatgattgatcattcattcaataatattatatatttatatataggtgtttcattcttgcaacaatgaagatttcagtttgagctatgcttgattatccaaaattgggatttcccacaagtttaagatgatgtccctcgccttaaaaccattcctagtaagatattgcaatcctagagactaaagagcatatataatcttttgtttgaattattgtttactattataataccatatatctactctgagaactgtgacttgttacattagaataaatgacattcatataacacttagaaagcaagatcaaactttataaataaagcatgtcacttgagagtttttaagtgatcattgcctagtacaaaactaaaacccaagtgaaaacaaaggaaactcataataccacaactctctaagaaaacaaaacaaataagaaaaaataccacaaaaaagaaagtaaaaacaagcaaaacttcatggtcttttaaccttctgctagattctaagtcaaattattcttgaaacaacagcaaagaggctgcaataatggcattgtcttcaacagaatcatactctctgaagccaacatttcatccaattacaattgcatttatataagataaatttattcccacaaaagaaaaacacatcagtttaacttccgtacatactcatgtagcaaaagaaataacatagagacaaacttccccttacacacaactatgcagatactcactcagtttctgatcatcatctcccttagtcttgttctagagatgtaaacaaaccatgccaaacgcgtccttgggatcaacatttccccaacagagactccaataacaagcccactcataagtcctgccaaaatgaatttccaatctacttcaatcccagaatcagaatcatcatcttcattggaagttgatggtgggagcagtgagtctccacatttctttgacagtggttctccgcacaatccttcattaccctcaaaagagttgttctcaaatgtatggaattggttctctcgcggtataagacctgtgagattattgtaagacacgtcaaacttttggaggaattttagatcagttagttgctgaggaatctctcccgacaactggttttgagaaagatctaacgattccagctctgttagtgtccccaatgatggtggaatgcgtccgttgagcgcattgtttgagaggttgagtgagtaaagagccttgaggtttccaatgatttcaggaatttgaccactgaaattattgcttgatagatcaatcacagctaggttcatcgggatctttccgtagtgtgttgcaacacttttcaacacaaatgttgttgaataatcatactcatgaaatccactaccaaagacatccgtgtagggcataaattctagtgcattcatatatgtcaaattggtcatcctaaaatctttcatggcattccaagataacatatattcaaaaggaattgcccctgtgaaataattgtgagacagatcaataatttgtaacattgcaaactcactcgtagtattttgaggattccctataactccgtgaaatttgttttccctcatcaaaacaactcttaattgaggaaaactccccaaccaagtggggaacacatcactgagttgattgaaagagaaatcaagatactcaagattcatacaaattgtgaatggttgatgaagtttcccttgaaaatgattgtcactgaaatctaccattcttaacttactgtccagcttacattgaagaggaatggtgccgtgaaaagagttgtttctcaaattcaaaactaacatggagtcactaatcccactgcccgaacaaagtggaaattgtccactcaagttattatttgacaagtcaagaaccgaaatagaactcaaattgcatatcggtgagggaatttgaccgcttagaatattgttagagacatcataatgtataatagatgatggtggaatcagaagttgtccttgcaacaagttagattgcatgtcgaaagcacgcaaattagaccaaggtagaatagttgtgtagttttgaaaccctgttatccagttgtacgctaaagtcatcacttccaagctttgaagacttgagttcatcagatctttaggaatttggccatgtatatggttattagaaaggtccatatatacaagattattttgatgaacaataaaatcaggaaatctgctcaagttacaagaagccaatgatagatactcaagctttggaagtgtggtgttaagctctctttttctttcttcattgagtaataatgaaatcatattgtcgcctagacctagagtaatgagatttttcagtttgaggaaagaatcaaacttcaatgtgccacttaaactattctctatgagaatgagatcttcaagatttttgatattggacaatgatggtggaactgaaccagtcaaattgtttgaagttaaaaaaattgatgttaattcagtaagatttccaaaccacgaaggaatgtgcccagagatatgatttttttgtaatgacatagtggaaagtagggtgagattttgaaaagaagatgggatgtaaccggcaaaactattatagtcgagactaataaagttaagttggcttaatttacctattgaagatggaataggcccatacaaaccacaatgcagtagttgaagctgtgtcaaagaagaagacaagtttgctaaagaatcccctagttcatacctcatatccacataatttagtacaagagtactcaatgtagttaagtttttggccagtcttccaagattcattttttgaagtttcaagctcgaaagtagttgaccgttaccatcaacgttacctgacaagtaaaggtaagacaacttagacaaaagtgaaagttcagatggaatctcaccttggaagaaagaataacccaagtgaagaaatgttaactctgaaaatactgctatggttgtgggaattggagagaaagtgaagttattataaccaagatgaagaatttgaagatgaacaaggtgaaagagagtgttgttggagtggatagagccgtagagacaagaacgagtgaggttaagaccagtgacatgaccagtcacaacgtcgcagtcaacaccatcccacgtgcagcaattagtactatttgatccccaagttgatgtctttggatacacaagaatagggtaatgtattgtatcgactctaggttggcaatgtattttaaagctttggttgaagtggatcaaagcattcctctcttgatcatggcaaaaaggttgcacagaattaacaaaaggatgatgattagagagtagtaggagaggatgaaacaacaaaacaagtttgaaaagcatcacaactaatgatgaaataagagccatatatagttaattatatatgtgtgatatatttgaacgtagagatatgttatctccattttataggcagaaatgtatagatgatgttatctccatttattcaatttgatgtgtacatttgtggcatacctcaaatacttgactattattaataatgtctctatgtattattcaattatttgatgtgtaaaagtagctggaagtcaagtagttgaatatgtggtccaaactagctagggagaaaatatcaaactattatgataaatacatagatctctttgaaatctcttctagtgtcataacctctttaaatatcatttgcgattaacttattgaaattatatgttaagatgatcaccaaaatcaaacttagatatttggtaaaaaaaatgtcattaaaacactacatttggtaagaaaaaatgttacaattaataggtaccatttcatttagtaacattttcttaaaaatatcattattatatatatatatataaattttaatgacatttgactaaaaatgtcactaatttattttaaatatttatttaatattatttaaaaatattcctagtctatcacatttggagagttcagactaatgtgttttgaaataaaaactatacataaataattaacagtgagatttttaaaagcatcacaactccatagcccatatagaaaaggatgaagatgagacagtacaataagttactttgattattttatttcaagctatatatatacagtagaacttctatctaagaatacattttggaccaaaaaaataatattttaattgagattataactaaatagagttgcacttaaaaaaaa

SEQ ID NO: 20358 - DNA, 1955 bp, Cannabis sativa
tattatttttctctacaattccagcttcaataatagcaaaacgggtcacagtgggtcgacacgaacacgatatgagtttttacaggtcgggttagagttgagataattagacacgagtcaaaaaacggatcgacatgcttgacacgaaatataaaagcgggtcacataaaatataacatgaacacgatacggtgacacattttgccacccctattcttttctctcccaccaaatgtagatattttttcttattatctcactttctctccaaatttttctttccttccacttttcttctttaccaatcaaagggttacttgggcttggcttgctttacaaaacaaaattaatttttaatcaattaatcaaaagttcaagaatggctactttactactagctactagtgactgacttggtcaattcaattgcaatttagtcaacaatggataaaatgttgaaaacacgtgtcatcaaataatgtagagggagagagagagagagagagagtaagagaaggggtcaatggaaaaataagaaagaaagtgaatgacaaagatgaggacaagagggtagcagtactataaagttgtttaaattaaatatcaaaactcgtaatggtgtgtgagtgtgagtgtacggtaaaatggatacgaaaccctatcttcttccatggttcaaaaaaatatgtgcagtgtgagttgtacgtaggtagatgcagagatcaacagtactgtattgagtgttgagtactgtaccatacacgcatgccttccacggccatactctaacccattttacccttttttttttttttcctttttggaattttcagcccaaatgctcttcaaattttattctccttttagaatcatatctatgattttaaattagagaataattagtatttctcatcccaagtataatttttgaatataaagacgtttcattagatcaaagattattacaaaataaatttgttggaattgactttatgggtaaagactcactttaccatgagcaacaaaattacaaaaacgagaaatataagagaaaacacaacctacaaaattagtggaaagcttaaggcaaaaagatgaatagttttcaaactcccaatacatttccttgcgattgagagagttgattactatcctagaattgttctccacaatgatgaacttgtaacttttgagctttgccaaatcaattgccaagaaacaagttgttgcctctccacaaagggcatctgaaaaatccaagtccgttgttctcacccagatgacctcacccaagtgatttctagaaacaactgctatacacgagcgttgtgatcccactttgacatcacagttcaatttgatccaataaggaagagaaggatgccaatcctccacccggataggagaaggattggggattatagagtagctcataattcagcataagaacattgaatagagtcaaagcactaattcaagttaaccatcttatgattatgcaccttttcatttcgagctcgtcatatagtgtcaacaacaacagaagcatagataaagacctcatcaacgtttatgcccctgttattgagactccaaataaatttgacccagtcccacatacggattcctaaattgaccactggaaagataccccacagcgaagacttccatgaatggaaagctagatcgcatttaagaaataagtgctttagagattcttcttccaccccataaaaagggcaggtaacatcttcaacctttaatctcttaccaagaatagccatgatcggaaggaccttggacaaaatacaccaccaaaggagcttatgcctctctaagattttactatcttagagcttattccacatagaaggagcaacctcacactgtggagctctatgtaatgcttgagtaagataggctgactgttggcaatattttaccaggatctagat

SEQ ID NO: 20359 - DNA, 5012 bp, Cannabis sativa
gcaggtgaatatcaagtcttgtattttatacttgggatttgaaatcctcgtgtacatttttgtggaaaaggaattagaataattaatttctactaatttattgattgctgtatacaagctcatttataggcagatttacaactaatcctataaataaggaaccacatattagcaaaatacatatatttctgtctatttacatataataaaatacatatatttcaacagccactcaagtttgtgcatactggttccacatgcccaactcccaaattgtcccttcataacaattatggggcttttggttatgtgggttaaacttgatgggaatgggaatgtcaaactcagcccatgtttggttaattaaatttattgaccaagtgggtctttcttttttaagtttaattgatggtaatgttaactctctccaacgcttgagtttcatagtctcttaatctatgctcctctaatagacaagcacttagtgagaatatctgtagtttgctaactgctttgtacatagaccacatacaactctcctgattttttcttgttgtcattgcttaatgaagtgatgatctacctccacgtgcttgttctataattattattatttgaatttttggtcaaaaaaagccccgaggtttttttgagcttgtggagattcgaacctttaaacaaatgcctcccagcactttccaagactccttaccagttaccactagacaaccctttatggctgatttattatcatagtataacctcatttgatttagtcttttaagttaagttatgatcattgacttttcattatcccatttggaataagctgtatagctggaatcaagagctttaatttttccaatgaggtatcccaggtttttcgcggaggtagaaggtcaccaattgtgaccactgtagaaaactgagaccattcaaatattatgaggtaaaagaaaagagctatcagctcctttgttgggtcactagttttggccattatttaggaagaagagttatatgataccatgtggagaaagagagttagaataattaatctctaatgatccattgactgccatttacaagcgtatttataggcagtttcaaatttgtataataactaatcagattccgatttaacatattaattaaagtcatgtatttgaccaattttctttcttgtatctttgtgttgcttcattttcctcttccacacttaacttcattcatctacattatgcttatgatgtcagtaatctataatttgatagaagttgctgatattttttcgctaatatgcagataataagattcgtctttggaacaagggtgtggattctgaaagcttccatccacgtttccgctctcatgaaatgcggataagattgaggtaagagctttagtgagcttatcaaacttttttatctaattctagaggccgaataaatccacatctcaaacctaatcacgaggttagagactggtaatcagcttgtcaatttgatatcattttttgagggttggactggaccttccatgaatttttacatccaatgttgtcttaaacagcaatggcgaacctgagaagccattgatagttcatgtcggacggattggagttgagaaaagtttggatttcctcaagaggtaatgctaatttaatctttcaatatgaaaatagattaataatgtaaataagaagagatttttgaacaaaatggcaaatcacaaaatttaatctccaatctttcttaaacataatgatacaaatgaaagtcatcagcatggttctgattaccagctcagtgtgctgccattatgagcttttatacatttgtgttttaatctgatatcagtttacagattttgacattagtaacatttttcttcacagtgtcatggatagtcttcccgaagcacgaattgcttttatcggagatggaccttacaggtataattttcttacagctgtttgactgtgaaactctcgtggcccgaggtttaagatgttggaagagagcatttgcatcttaaaaccgtaaatgttggatatctgcaattcatttgactaattaatctgtctttggcagagaggagcttgagaaattgttctcaggcatgccagcagtattcactggaatgctaggtggtgaagagctctcccaggcatacgccagcggagatgtatttgtgatgccctcggaatcagaaacactggggctcgttgttctagaggctatgtcttctgggattcccgtggtgggtgctcgggcaggtggagtgccagatataattcccccagatcaggaaggaaagattgggtatctctacaatcccggagacctcgaagattgcttatcaaaattgaagcctctgttgtacaaccatgaactgagggaaaccatgggcatagctgcacgtcaagaaatggagaagtatgactggaaagcagcaactcgaattatacgtaacgaacaatacaacgccgccatttggttttggcgcaagaagagggcgcaaatgttgagacctgtacagtggttgatcaaactcatctccccatcatcctcacaagttagctacaggtgaaaaagaaaagtgataattttttaggtgtttggttggattggtttgctagtgttcttgctttctatacttagttttttcagacatgtaaagtccttgtgggattaaagcttgtgatgattatttatttgttgtatatataattgaccatgttattacaacattgtatttccaatttaatagatttagtaagccatcagtcttcagattctctaatgggaaggaaaaaaaattgtaatttatattttgcttttttttttttattttattttaaagtttaataaatattaaagggtgttctcacaattgaacatcattattattagaaatttgaacagatgtcccttttttttaattcttcttttacaaggagcccaataattttgaagtgataatcggtcacacttaaaatatagacatctaggcttcccttaaaaatgaataaatatgcttttttgcatgatgattcttgtaatttttttttcttaaaatttattcttttttttaaaaaaaatacctttcaataataaaaattgttacaattgttttccttcagctttattttgtttattaccattggtgttggtgcagttcttcgtgatgcttcaggttccgtcactggtgctcttgctatgccgataattggaaattttaaatcccatgagatggaagccaaagctctttttcatagtttcaattgggctctacaacaacaattaccaattacacatattgagacagatgctcttatggtggtccatgctttgaaagctcccttcaattcaaattcagaattctcagatttaattagtgatgttcttagtcttttatcctttttccctaatgtaagtgtttctcatgtctatcgtactgctaacaatgcagcacatggactagctaaatttgcattagggctggatgaggcttgtacttggttggagtttattcctccgcctatttactcggttattgtaaacgaatcttgattgtttaataataactaagtattttccctcaaaaaaaaaagtatagttacaaaatgagtatctatttaattaatttaagttagttttagtttattgatactaaatatacaaatattaactttaaaaatatagatacataattttaaaattattattagactattatttatatatgtattttattattattattatttaaaaattacaccaaaaataaacaaaattatcagttagctggataagagaccaagccaacacctcaactattttgcactttcaactagtccaaaccacttgcacttggctgtttttcactgaagactaagccatcgtaatctctttaaacaattaaataagccaattaatttaaaaagtggttatgatctattgtatgcataaaaattgacaaatgaaaatgtaataaaatttgtttgactaggccagaacctagctatataatatctaataggcatagtgatgagtcatgagccatgtatctacaaatattcttggtgcattccccctacctatcattcatttcatatagctggatttggtctttctcacagggtcaatcatggggtgcatgtaggctaaccttgcctatgggactccatggatgaggcaccttatagcttagtgttattcacccgtgaattcatccaagtgggacttaccatagatcttcttatacaagtgaatctaaataaataattccataaagctccttgttctaagacatagtttaatatgaagtagaagatttttcatttgttgggccacataagtctccctaatatacaatgaattcaataaataattcgataaaactacttgtttaaattgtagatatgatttttgccgaattctcagatagttggataagagaccaatccaacaacctcaactattttgcacaccaaatcacttccacttggctgtttttgactaatgctaacaattgacacaattcgaaaacaacacgaaataaatgtatttgagtgacacatttaatttatgtgaataatcatgctaacacatttaatatatttattaaacttgtcattttcgaattgaacacacttaacttaaaaatggcacgatcataacacattaaaaagttatgaattttttttttttatattattttaagtaaaactaatactctaaaaatatctaactatatatattgaaagaaatctgtgtatagttcctctaaatgaaaaaatttccataatcgtcatttctgggaagttgattcatgcacggttgctggtcccggaagaagtcttgtgggatgatagtcgaatccgaaaaggaattcccggatgactgttgtaatacccggaattaagaaatggattagcaaaaccctaagtagataattatgtataattgaggaaattatattattatataatttaatatatgtgattt

SEQ ID NO: 20360 - DNA, 2792 bp, Cannabis sativa
  modified_base (2528)..(2530): a, c, t, g, unknown or other
tttataatgtacataactatatatattttgtacaattttcctatttgatggctgaagcctctaattatgtttctgttagatataatcctctttctggattccacgggatcctttcgggattcttagttggcatcaagcagatcataccagaccaagagattcctttactaaaattgaaagctaaggtatgagccttttatcctggcatattcttgactgaaaagtttctgcaagttgatgatttctctgtaatactctctgggaacgatccaattatacacagtggttgccatctctctcggttttgctatcaattgtcatatgcttcttggcatcagagtcttcaacagctcttccaactctgatatttggcacatacatgagctggatttacctcagatactggcagaagaaaccagaaacaaaactcaagggtgatccaagtgatgattttgcattctcaactttcttccctgactttttaaggtaattaatgatttttaacgagtttttttttcctatgcttatgaaacgatgtaaatatgtcttgacgtgcttttgttgcttattattcagacccgtgatcgatcccattgctactatattccatcggatgctctgtggaagatctgaagctgctgataatgcccagggttatactgtgggaggaaatccattgcctggttctgatcctatcgaagcatcaaggagaaggtaagtttcttgattctattcagctatgtagtacattagtcaattgtcttggtggaagaagagagaatgaacatattgtaatgaacgcttcactttcagggaaagaggagctcgtgcactagaagaaagattggcaactgaaagactggccggtgcacgaggttctgaagaatcaggcgatgctgtagaaaatgtttgattgcacctaaaccgaagtctggtacttactcaaccaacaccaatgtgtaattttagtgactatttagaagttcaaaaggtgtctaggaagagcatatatatgttttttttttctcaattctggaggatggatttattttgcagtttttcttccctttgaaatagatcaatccttattatacaaaatcttttttttttttttcctttttagcacgagtattcatcaatataagagtagtttctaaaagagcttttgcgaggaattactctattgtatcgtccgggcctctggccttgctcacttttatgaaacgtatattttgacaattaacattctccaaggataaatcagagtacatgcattttaaaaatattaccatattatctacttattgtttattatgtttttgaacattgggtatgcccattgccatacttcttccttgggagttgtgtgaaaccatagactatgcccattgccataacacagtattttttttctttctattttttttttgttttgtttggatgcaatccatttccgcatatttttattgggatattcactctctacttgattatcattttctcctataaataggaggttaatgcagttcattttctttacaatcacagtcattctcttcagagcttctctctgtaagctctgaagctcagactctctctaagctcttttgctctttgacttcatacttaagctctaagtcaattttgtaatgctcttggctgacaacaatgctttcagtgttttttgattaataaaagctcaagtagacataagcaaaaagaaaattcttaataacagttgcttatcaaacgacactgttgttggccatattgtagtgtcaatagttagtatgttcactagtattatgtatacatgtgatgtggaatctgatgtagtacaatattttgataaatgtgttataagatgtgttattaatgttttaataaatattgttataataagagtaataccatttgaatcttgtgttaaagttactgatcagatcatctattttattaaatgacaatcaaattttgtattttctaaactagtaaaaaataatatcttaatcttaattttcgtaattttttttatattaccaacctaaatttagtttctaacacaaaaaaatgcaaaaatatataaataatcaatctagtcataacacttgagatttggttattgttaaattttattttcactaaaatagagtattattttgtaccatttaaaaaaatatagaatttgaattaacgaaattgaatgtgtaattagtaacttttactatccaaaatagtatttactattataataatgaaacatttaattaaaaatatcaaccaataataatgtacaccaattaaacaaaggttttgaattttttgaactctgttattataaacagatgttgtaaactcgtaatttgatgttatatgaattgtttgattcactcgttaagatttgtgggataacttgtgatgcttttggtaatattttttttaattaattttttatttttaaaattaaaatagtagaaatattttccaaatgttttataaaattatttttacttttcaattttttaatnnngaatctaaattttaaaaacaaaaagaaaatcacttttaatttttttttttaaaacagtttatttttaattaatattttgaactccgactccaacttaaaccttagaaaccgaacccgaacttggctgcagacttgaaactactccaacctcaaatccgacttaataaaatcaactaaataaaataaaaataaaatttacaacacacttttattttttatttttaaaattaaaaaaataattataattaagatcggaagagcg

SEQ ID NO: 20361 - DNA, 5826 bp, Cannabis sativa
cttctcttcctctctttgagaattttccactccaagaccagtaatatttttttcccataacaacttaatttagcaaccacttcatagaccacaaagctcaatgttccttatttatttataagaaagagagtttaggcttgagaaggtcaagagctttgtgtctcaacacataaatataaaaaagacaattaatcaatatggttttttcaaaaaacaatgataactcttgacttgatcaccaaatccaaaatgcgccaaagaaaattacaattggccaattgaaatgcccactaaaaagaaaaaattcaaaatatatccacaaaaattaaagaatagacaaataaaaaaaacaatccaactgagcaaacaactaaatataaaaattatacctctagatatcttgtgcaacccatcacgtccacaaactaattaacatacgaataatggaacaaaagcctacaattctcaactccacacacaatcgttgcactccaaaatctttgagcaactaatgatctcaaatacaaagaaggaagcgaaattgaaagagaataattggtgagcaaagaagatatcaagatgaaggaaataaaaatcaatgagccaagaggataccacaacagaagaaaggtgggaagggcaaaggatcggtgcccttaactttctgcatgtatttttttgttggttcctacggttagaggaaataagaaagaatcattcggttcattcaccaggttgagatgaatatgaaagttgaaagggaagggttttctccttaacttcaattaatattaattaaaaaataaataaaacgtatatgaaaatttttagagctgctaagatgagaataataagaaagttgataggttagaggtttctctttagttttaattagtattaatgaatattgattggaaaaaaaacattaattgtaaaaatataaaacaattgtaattttttttagaacaggctagtattagattattctgctattatagagagccacgtaacaggatttaaactctcttttatttatatatagatagatatttttatatataagttttgctttaatatttaatatacatgtacacatgcaacttttaaaaaaaaaaaatatgtacttcacaaattttgactacttgttcttatgtggaagcttctcatatgcggatgttattttttgtaaattatttgttaagagaaatggtaaaatggtacctagtatatttataaggtataatattgctattggtataatattggatcttacatattttactttaataaaaattataaaaaaaaattactaattgatcataagacgtgttaacacctctgctattacttagttagcatgattaggtgttagttaaaggtgttacagttagttaaatcttctgttataactgtttctttaacagtttgatcttgtaataattgtgtatataaactgtggttcacatcaataatatgcaagtcagcttcatttctttcttttttcaattctgtgcactgcacctttattgctttacatggtattagaagtctctgactcacgtccatgtcgtcttcaacctcgaatcctagccatgccacagctccaatggcttttgccactgctccaatggctactgctgccaacaccgctactcctcaaccttcttagaaccctttctctcattctcttacatcatgtcttactatcaaattagatcaacaaaatttcctttcttagaaatctcaagttgtgcctactatcattggccatgatctcgatgagatccttttcactggtattccacgtccagagcgattagtcacaggtgctctcaacccaaaatttcagcaatggagaaagaaagatgatcaactccttcttacttggattcgttcatccatgtttgagagtgttcttgcttctgtggctaactatcatacctcgtctgctatgtggcgtgctcttgaacaaaaatatgcatctcagacgaaagctcgacgattacagctaaaaggacaattctcaaatgttcaaaaagggagtctcattatctctggatacattgataaagttctttccattgtcgattctcttgctgttataggatctcctctcaatgatcaagatcttatgtttcaacttctaaatggccttggccttgagtttgaccctattgtctcaggaatcacattaagaagtgatgttctctcaatttaggaagttcaagctctgcttctctctcatgaaagtagaatcgaacatcacagcaccatggctaatcttgctgtcaagatgcaagccaatcttgctcttgggtcaggccgtggaaatggttctcgaccctttctcaatcaaagaactggttcaactgagtatccaaatcaaccctttggccatggcaggggtcttccttgtttcaattcaacaaagatcatatgccaagtatgcatgaaaactgatcacacagctacagtgtgtcaccatcgatttgacaaaaattaggttcctccaaagttaaactagacccagaatcgtgcctttctcactgagcttgagttcgattatgatccacaggcctatacctccactatggtgcaggactttagagatgatcattcttggtttgttgatacaggtgttattgcacatgtcacctctgccaataccaatcttgatgtctttcaaccttacaatggatctgacacactagctgttggggatggtaagaagcttcttatttcatataggctcctctactttaccttcctcaaataatctacattctttacatctcaaatctattttacatgttccagctactactaaaaatcttgtaagtgtgtctaagctaacaaaggacaatgatgtcttccttgagtttcacaagcattgttgttttgtcaaggacaaggagataggtgatgtgctactcaaaaggaaagttagagatagactttatcttcttggtgattcatccagtcgaacaaagtctgccttgcactgtcatcatgctactgtttccaatttatctcttaattcatgtacccctaattgtattcccaatactgagaatgccttatctcagatcaattgtaacaatcttgcaattaataaaagtaatttctctagttaacatgagtcctctgttttccacactactatagctcttgatgtcaacttatggcactataaattgggtcatccagcccattccacacttgttaaactccttccacagttaccacacactggctccataagcacacttcaattttgtaatgcctgacaacaaggtaaaagtcacaaatttcccttccccctattatctagtcatgctaggcagccactttaactggtgcatactgagctatggggcccttatcatgtcccatccaaagatgaatacaaatactacatccattttcttgatgactatagcaggttcacctggatttacccccttactttaaaatctcagacaattgaaatgttcattaaattcaaaagtatggcaaaataataatttggcttgccaataaaattcattcatgcagatggtggaggtgaatacaaactatatgccaaattcctaacagatcaaggcatcccattctctcatccttgtccccacacccatgaaaaaaatggaagggcaaaaagaaagcacagacatatagctaaaatgggattaacattgctaagtttgtctcacatattggtggcatgcttttcaaagtgctacctttaaataaacagattacccacccatgtcctaaacaatcttactcccaatgaatgtctatttggtaaaaagcctgactacaccatcctaagatcatttggttgctcatgcttcccacaccttagaccttacaactctcataaaatagagttcaaatcacagcaatgtatatttcttggttattcaccttttcacaagggttacatatgtgaaaatgacagagggagaattttcatagcaagaaatgtcatcttcaatgaaaatgactatcctggccacaaacaaacaagcactacaaaggtacaaactcaacttaatcctatgtgtgttcctactataactttttttactaatactaatattcattctcctgtttcaaccactactgatgttgttgagactaaccatcaaccaaacactattctcccaattgtccatacccagcatatctcacctgattctaatataccaaatagaatcccctcacttgaacccaatacaactactgtcgcccttatattacctactgcacctgaaccaactataccttcctcacctattactatacctcaacaccaaaatgttgcacctcattctccatctcccataccaaatcaacctcccccccacccaccacatatccacctcccccacaaaaaactaccaacactccctctctatccatacatgctcttgtcttaagcagcatcccttaggaaaatgcagcaagaacacatcacatgcaaacacgatccaggagtgggattgtcaaaacaaaggcatatcttgccaccaaacaccccttacacgagtctcttcttccatctgaacctacttaacttaaaaaggcactgtaacatcccaaatggctacaattaatggatggagagataatagctcttaagactgctagaacttggagtctagtcccatataaacctggaatgcatataatcagcaacaaatgggttcacagattgaaattaaatgttgatggctccctcatcaagtttaagtcaagactagttgcaaaagaatttctacaacaacctgggattgactatgaagagaacttttcacctattgtaaaactagtaatagttcaaattgttctcggtcttcatgtctcctttgactggtcagtcaagcaactagatgttagcaatgctttcttaaatggcatgctaacagagactgtctatatgcaacagcccccaggctttgtagatcagtcaaaaccaaaccatgtctgcctcttgcataaggctatctatggactaaaacaagctcctcgtgcttgtatgacacactgaaggattgcctactttattggggttttcatgtctctaaatctgatacatcattgtttgtgtatggaagtggaccaacactgataattctacttgtatatgacgatgacatattagtaactgatccaaacaaagctctaatctctcagctaatcaaagatttaaacaaatccttctcattgaaggatcttggagaagtgcattattttttgggagtagaggttaatagagactccacgtgtatgtatttaactcaaactaaatacatcacggatctattggtaaaattacacatggaaagggccaagtcatgttccaatccaatcaatgcttccacaaaactttcccttcatgaaggagagttgtttaaggatcctacactctataaaagcacaattggtgctcggcagtacttacagctcactcgacctgagattgcctttgttataaacaagttaagtcaatttctcaaagctcctattgtgcttcattcggaggcttgcaaacaacttcttcgatatctcaaaggcaccattagagaaggactagtactcaaacttgttgctgaattcacctgaaacagttattctgatgtagattgggcatcatgtgttgatgacagacgatccacgagtggctatgtcatattccttggcagcaatcttatctcatggtctgtaaaaaaaataataggtggttgcttgctcaagtactgaaagtgagtttcgctcacttgcaaacagtattgtagaacttagaaggatcactttcct

SEQ ID NO: 20362 - DNA, 4371 bp, Cannabis sativa
  modified_base (4339)..(4340): a, c, t, g, unknown or other
ataatgttgaacttattactctggaggaaggtagcctggtgttccaaccaatcgagtcgcgattagatcatcttcattggctcctccaacaagctttgccaatccaaaatcagctatctgttcaaaactaattggaaatgagtggaagattccttctcaaaactaattgacaatgagtgaagtagcccgtgttcttatatatgactcaattctctactatttattctatgggggacaatgtccacaacattctctctcaagatgatggctaggatcacttgccaataaggaatatggctctaataccatgttgagaatcatgaagttccatctcaaaattaattttgacaataaaaatgtggatgttcttatatatgactcaattctctattatttattctatgtgagacaatatccacaataactaacattatcataagtgttatggaaaagtgttatgtaagaacatgttttaggtaccttagctctgagactctcatctagtaagatgttagttgtctttatgtcgcggtgcacataccgttcttttgtatgatcatgaatgtactcgataccctttgcagccccaagtgcaatctgtgctcttgcagaccaagacagtggttggtgaccttttttcaatagcacaactccaaactcaatcaacaatatcattataacaagttggaatagaacacaaatactgattttgagtttgaattgaacaaaatgttacttgaaatacctttcagtaatggatcatgaagatgctcacttagtgatccattcctaacatactcataagctaagtaaagatggtcatctccactagcatatcccaaaagctccacctaaaaaaaaaaccacaaactcctcaatgtttttcattcaaatcttttgttttagatagctaatttgtttactcacaacgtttatgtgatggactctgcataagaccttcagctcagcaaagaactccttcgatttattcgatctcatcttttttatggcaacctcctgaagttgaaacatttaagaaaaccaattccattgactaaccaaaaaaacaaaagtttccataccttatttctcaagatgccaaaatacacactaccatatccaccctctcctacttttctactctcatcaaagtttccggtcgcctcttctatctcttcaagactaaatactacaggtttttctgaatcaaaatctgtcacacatgtacaattttgcatgatttacaaaaccataatgaaaagtttgtttttcttgtcataactaaattttatctgaccttctaaattttctttaggaatgaaagggttctgcaaggaaaaggatttcttagcactgagaattttggctagaccttttggatcttccacattcttttgttggattcttttttttctgacaagaattacaatcattgtagctattgaaagaaatgtaacacttgctaatatcccagttataattttccacttctctctcatacctgatgaagaaaggtcaaaagaaaccgaaattgcatcaagaattatgtatacaaaaaaatatgaaaatatcttctagtgtcgagaggattgctaagatatagattaaaaaaaatccacttgattcaagtcataatctctataggattcccaaaattattgtatattggtaactagtatagaaaaagaggtcacctgtcttagatattttgattccatttttctccatggggacaaacaagacccaaccttctttaatgaaatctgggttttgagtcaaatttccattcaatcccaccaagtaatcaaatttggctgacaaaagagttgcaatacttgataatgtatcatgatcctgaactgtgtatgtcaccacaatttgtgaatcactttctaaacacccacaaagaagatgcatggtataatcattatcaggtttgaaagatttatcctcttcctcaaatctccaaccttgcccactataatacttagttgaaacattctgaaaagtgtctcctaccttcactttataggttgtgttgtaaaaatagctgttatttccatacatggatgagcaagaacaaggtacacttatgaggtaatcttctttattattaccatgaattatagactttatttgagatgatgcattgacatggtaaaaagtagcaacttcttcctttgttataccttcattgttgtaatacaataaagcattacaggtcttaattttggcagagcaattaaaagggttcataatagaagttgtgacattcactggttgtggaaaaactccatgaaaattagtaaacataaggaaaaaataaggaaggagaatatggtatgaggccattattgccatgatgacaatattgaatgaagaacacaatgaagtaaatggcaatgttggagttagttacacaacatattttgttctctttgtcatagctgttttgtttgtttgtttttgctggattttagtataaatatcctttgagttttcaccatttgtttatttagtccttgaagaaagaaaatggtaataaatctaaagtgcatttggtaacatttttttaattaattttctgtttttaattagaaaaataaaaaatattttctaataaggtgtttttattttttaatttttttaattaagaatcaaaattttaaaaattataaaaacaaaaaaaaaaaaattactttcaatttttttaagcagatttttttcttaattaatattttggactccgacctcaatttgtaccttgggatccggactccgaccccagtcctagtcctggactcgaactacagccccgactccagactcggaactggacccgacttaaataaaatcaaaaaataaaaattatagaacacacttttactttttgtttttaaaattaaataacaaaaatagttatagaatgcattttattttttaaaaacacaaattttacttatgattaaaaaattaaaaaataaatttctttaaaaaaaataaaagtgttagcaaacagtatcaaaatgatgttatcatcctatgatttaccttttaatgaatatttatattttctctcaaaaaaaaaatatattttgtcaaacaattttttttaaatgtatatgagtagttttcaaatgatttatatatatatatatatatatattaattttatccttcaaaaatttatattactgtcattgttttaaaattcaatgatttgattgcaaagttttatttaaaaaaaaacttaactgtctaagagcaacaattttagagggtgattataaatacatatacatataagtattgttaagtggtgagctttcatacaagtgaaaagaaaagagagatatacaactaattaatttattatattgaaggaagagcttaacaaggttttgtaattttatacaaaatatattttccatatttcatgtgtaggatcatatattaataaagaacattatatcgatgattacaactcattattatttttattttataaaaatatttttgtctttgtttgcaaagcatctaattaatattggccgatcagacaagaagctaaagccaaattgcccgtagagttttccaatcttgatcaaacaaaaccttcaacattttgcatgaataaggcactattttcatatgtttgtattgtatttgcaattttgtaaaatgaatgtttttatggagaattttattttttatcccagaaatttataaatatactctatattttaataatcttaattttacataaaatagatatttttaatttttttaatttttttttatctaattcatatctctcatatattaaatatagttatttaattaattttaaatatctaaattaaatttatttattaaaatatgactaagataattatttaaaagtactaataaaatttgataattatttttcataataaaatatcttaaattaaatgttaattcaattaattaatcatactttataacaaatttattagttatattgcttaaaatatgtaaaattatttacttattgaattaatttgagttgttttgtttctgaaaatctatccaatatcaattgatgtacttgaggatttgtaatgaatgttgtttccaagtttgtatcctctgccttctcaattgtttcaattttgatagtttgtcaatatattgagcagtgtatttcatgtatggtttaatgtaacattatgtttgtttagagttgatatcaatgcaagtttcaagcaatgtgtcccagttcagtgtatggtgttcattcactgtagcttgttctttctactcatagtttaccattaaggtgacgtttggttggagnnaatgaaatggaatggaatggaaagaaaacaa

SEQ ID NO: 20363 - DNA, 2881 bp, Cannabis sativa
gagggccttcttgtgtagcttggtatcattctcttgcatatttgtaagaagatttacttatttttattatgtgagagatcattttgtaaagaaacaaacttgtctttgctctcatgaaatgagcttcatgttgtaaaacgtttgtcaaattaaccttcatcagttagaagtgggtgtgagtctgactgtctgagtatgactttctttctttcattaactctcatgactaatgtccttaatttactacttttcaggttgcattgaaggaaactatcatggatgatagaagatcagactttgagcttgttagatgcaggctgactttgttctatgactactggcagatggatgaggtattgcaccaagggacttatcataattgtttgttattgtcatgttttgttttgctatctttggtgtaccaacttgtaagaatttgactaatttgaatcatgtgacctggatagagaaaaacaacaataaaaccagaacagctcatgagtatcaccatttgaagtatttcctaattatacataataaagaaggttccacttataagtttgccttgcgaaatacaaaagttgtgccttttgatgcaaatacattgtcatgattttattgtggttgaataatgtcattgtaggggaatactgaaacagtcagttcattgatttgattaagattaaatgaatttccgtatgaggaaattaaactatattcagttgtgtcacttctaattggtaagagcattgctatataggcttgttgaacttttttttcctttataagtaaacaatatatcattgattcttgtacaagtctgttttcttaaaataccaggacattcatgtcctataaattatgtggttggtattgcatattattcgctttctctttctgggtaactagacttgaaaatatgctgcctgaaactgcatttgattgagaggctgttttatggagggtgtgatgagcaggggcagagaacttaacagaaccattcttgcagattttggaggctatgctgcccaatgatattattattccttccgcatttgaaacagttggacatgttgcacaccttaacctgagagacgagcttctaccctacaaaaagcttataggaaaggtgctcattatgtacataagtttaccatttctatactttatcaactactgttaataatcaattgcctgacagaagatgtatcctctctcctacaggtaattttggataaaaataagccaaagattcaaacagttgtcaataagattgattccattcagaatgactacagaacaatgcagcttgaggttttagctggaaaccactccctggtgactacagtagtagagaatggattgcagtttcaagttgatttatcaacagtgtgtgttctcttttactcaaccttctggggaaattggctgcttatatatatttatgtttatccacaattcatacatatattgtgacttcaaatgctgttttctcatgtagtgcagctggtcctagttatttatgagttgcatacactccacatttctgtccgcagacagaattgcactttagtcgctcttttttcaccataattatcacttattcacttttgttttatatgttctgtgtggtgctaaatttcttttcataaacacatgaaaagatagctcacatccttgtaatggacactaggctgcaagctttgattggggcttttcaagtacttacctgtgaaataagggtgcaaccagtgatctgtaattatggatcacagattatatttagcagcctgctctaggagtgcgtgtgtgtgtagtctgattgttcaccttagaccttagagttcgataggttagggcagaggatcttattcttatttacattttatgcaggtattggaactcaaggcttgcaactgaacgacaaaggcttttaaatggatttacacgaaaagatgttgtttgtaggttacatatcttgttgttattctgcgtagctttcaaattacattttgctctcaaggcaatgggcatgcatgtctttattttcatggccaccaaaattctcgttgtgtcgctttttccattcacgacgatcagcttgattcatatgctcttgccatttgcaggtgatgttttctctggggttggtccaatagccatatcagcagccaagattgtaaaaagagtatatgctaatgatttgaatccccaagcgatcgagtatttggaaagaaattgtgtgctcaacaaacttgaaaagaagataagagtatgaaataactgcttatcacccttttattcttcttcttcatatttggttttttaaactggcgtgtttacctttgtaaaggttttcaacatggatggaaggaggttcatagtctctttgtttacaagtgagaaggctccttcaataacacaagtagtaatgaacttgcctaatgacgctgtggagtttctaggtttgttatttttgccttgacaataataatctcctttctactaagtaaacttatttaatcgataattgcccactcacaatttgactatctaaacttggctgtgatattattctgctaaaaatgtacacgagggactttctctcttttgtttataaattagattattcattcatcattgacatgaaacttgtctcaaatgtggtcaagagtgcttattgtcatgtaatgtactttctaattacttcccttcgaacagatgcatttcggggaatcttaagaggtagaaccaaagaggaagaatatcccctgccgttaattcatgtttacggattctctaaagctcgagatcctgagtttgactttcatgaggtaggcctttgaccttcaagaatatattcaactgcctctattgtttt

SEQ ID NO: 20364 - DNA, 6196 bp, Cannabis sativa
  modified_base (3840)..(3874): a, c, t, g, unknown or other
  modified_base (3921)..(3924): a, c, t, g, unknown or other
aaatatgtggagcatcttgcccgttgttcgccggaggaaggtttgttagcagctgcgcacgaaggagaagaagaaggacaaaggggaagaagaagaacgaccccttatttaatatgtataaattgatatgatagggtttttttttttttttgaaaggggatatgatagggtttttatgtacccaatatattatactttttatttaattataattacagctctttcaaaccaaaaaaaaaaaaatcaattacagctctttcaaaaaaatattattaattacagctgtctgttttttttttattttttttttaaaaaaatatgatatagtgacgtgctatgagagtcgggacacatttatccagtcacgcctggtgtgtcactataggctaatattttttaaattaataaaaaaaatataaaattttggttttactctttagtgacactccatatttctagtgacacacattacatgagactaacaacgaacatttagagtctaattgtggatgtcactaaaaatcactcataactctttagtgacccacacaaaaatgcttgtcactaaatagtgtcactaaaaggctaaattgtagtagtgagctttgtccccacacatgattaccgtagaaaccttcatggacttctttcattagtctttgggcttactctcgatgtacacatcgtagtaggggcattgagaattacccttgccgatacatgacaccatcgatgattaggtaccgtgcaacctttcttctcatcttatttgctttgtttttgttggtaggcagtgtaccttgttctaagtaagtttctatggagttcatccatgattaagtcgtatcaagtaggagtacttcttctttggtgttgatgctgggttcgaatatgtattctattggcacgaggttggccttataaatcttttcattcatcgccaagtcgctcttgaaatctttgggcgagcaccattttttccggtgaaaaactttaagattttggctaaagttctcaatgaaagcaccaaaatgttgactaaatttttagccaaccgacgtgaagtcataataaatgagatttaaacaaaaatcacaataataaatacaattaataacacaaaaatttgcaataaatgtaaataaaagacacaagaatttaaagaggttcggtcccagatgtcgaaatagcttactcctcttgtattttattaatccgagttgaaaaggtcaataacatgcccttgattacaaaagaatgataattgtttattttttaaaatgttcaagattggggatctccctcccaggtcatggatgaccccttatataggggagggggtcggtgcttctcgcttcaagagatgcgaacaacgtgaagccacctcaaccatctccttgaattttggaggtagttgaagtctaattttcatgataatatctcgctattttcgtgggttgacaactatctttgagcctttcgtgagatttgaacatttgaaagagttactgacgacgagggtctcttataggtgtgacatggtcgtcaaccatcttcagggatgaagcccatacttggggataacacccccgagatccaacttaaggggggtgacaactgtcatcgttgggtgaccccccgagacccaacttgaggggggtgacaaccgtcatcgttgggtgaccccctgagacccaacttgaaggtggtcacaaccgccatcattgggtgacccccctcaagacccaacttgaggggggcaacaactggtcatcattgggtgaccccccgtgacgggcgacaaccgtcatcgttgggtgaccccctgagacccaacttgaggggggcgtcaaccgtcattgttgggtgaccccccgagacccaacttgagggggatgacaatcgtcatctcggggtgaccccccagacccttgtctgttgtcagtaattatggtgtaatgtggatgtcccatatacctttgagaaggtcattatatctatgataaaatgcatgacttgtaccatgaaggtgtagggggtaggggtatatacccctagactaacccttcattgttgacggtcatcccaacggtcatgactctacatatgaacgacataagaatcatgatagaaatgttatttaaaaatgagtgaacttaaaaatgacttcatgttaatgttttaaatatttggaatagaatttgaagaaagtagagataaggtgaaataatattttgttgttgttgttaattgatttatgaatgacgtgcaacgtcattgggtttggtcgtacgacaggacagttgagaaccagagaaataggaaaaaacgtgatacaattggtggattataggaataagtttgtggcagagatgtaggagattgcatcgaaatggaaaatccacaccatattaggttgggacatactgaaaacttaatttttgaatttgtagacttttttatttaataaggaataggtcaagcgattctgcaaaaaaatggtcatctttaaaattaattaattatttaaaaatttatttccgaaggggtgaaagttacttttgaaaaaaaaaaaggttttattatgaatattataattaaatggtttaattgttgaaaaaattataataaagatttaaatataaaagaaattataaatattaattgttaaaaaagattttgttaaataataaattaaaaaattaaatatgttaagaaaataataatttttattgatctattaaagaaaattttactcattagtaaaaatataattattaaatagttacctatattagttaatgtatagaggattgttttgagagtgcatgcaaactaactctttgagttcaaatatatttttatgtgatccaactagcgcgtttccattaattgtggggtgagaatggcaacataaattaaaattacaagaagttagatatgtcatgtgataaaaatgacaaattaaaattacaagaagttagatatgtcatgtgataaaaatgacaaattaaaataagtgcatgacaaagaagttaggtaaggaatttgataaaaataacagaaagtagttcaacttaaaaaagacaaagaactttattttgtcaaaaatcgttaagtcttagatcttaaggaagtgtttttgttgttaattaaagagattatttgggtattagtactattattgaaactgattgtttggtgttggtacaagctgttcgaaatttaaatttattgcagtccacttttagttttttaatttttgtcaaatgatctattaattgggttgctcacattgtggctagagcatgctgattgtattattttggaatataatctcccttctgatgttgttatcattgttaaggctgagttggtttttagtcactacaataaatagctacctttagtgacaactttttagtcataacataatgtttttgtgagattgtgacttttagtcacaataaaagttactaatgactaaaatataaaatttaaatacaagttgtcattaatttagttttagccacaacaaatttgggattaaaaaatacatttaatcacaacaaattgtgatttttgtaactaatacatttagccagaaacattttagtcacaacatataggatcaataatttataattaatcatagctttttttacttttagttacatgttttgttgtaactaaaatgaagatttttttatagtgagttgaatgaaatttctagtaaaaaggaataaagttatagattttcatttatctttctaatagagtattttactaattaaagtttagcataattacataattaaggcactattttttgtaaaaaannnnnnnnnnnnnnnnnnnnnnnnnnnnnnnnnnnatttttacggtttttcatagaatcaacatgaaaacaacaagaaaacnnnntaaaagtaacatgaaaataaaatctaaataacattaaaatagcaacaaaaagtacaaataacaaaaaatcaaaaacaaattatcaatattagtacaacgtaaaaaaatcgtattttctataaataaaatcataaaaatatttaaaatttcgtgaagccgtatttttgtaattttgttttttgatttttgcatatttgtgaaataatcccttaaaggttcttatatttaaaagtaattaattatgaatattataatttaatatttatatatactaataaatattaaattataatctttaaatatataaatattcacatttttacttttaagaatatttatatatttataaggacattatataactacaaaaaatcttacttttaatcacaacaaaactcgtaactaattataaatcatgatttctatgttgtgactaaaaagttcgtgactaaaagtattagtcacaaaaattataattggttgtgactaaatgtatttttagtcacaatacttgttgtgactaaaactaaattagtgacaacgttgtaactaaatacgatgtcttagtcacaagtaatattttgctgtgactaaaagttacatttagtcacaaaaaaattatattataattaaaaaattatcactaaaagtacccgttttttgtaatgatatttccactttataaatataagattataattaattatatgggaatataaattttgaaagtgcaagtataatgtccttataaatatataaatattttattattttaatttagcttaattaataagtaattaaattataccaaaggtcaactttgtctatcactaaagtaacatatagagtcccaacatttgcctataaatacatatagagaagagtcatatccgaaagctacttgaagaagagaaaactttcaaaaatgtcaccattaccaaactctatcgcaatcaaatccacatacaatggaaaatacctaagaaaggtacctgaagaagtgagttcacaaaccgagcttccagatacatttctcaatttcaccgccgaagaaaacaccgcaagccccttggcaaaattcgagttagagacagccgagacagaccccgaatgcgtgcacattcgttgctgttacaacaacaaatacttaacacgcctaagcccgagccatctgtggattgtcgcggggtctaactgtcgtgtggaggacaccgaatcattctcatgtaccatgttcaagtttgtcccggctgatgatttcagccaggacaatgactatttccgcctcgtccacgtccaaaccggaaactacggttgtctgtggagggcggaacagccttacacagatggggtgtatgctggatatgctgagttcgatcaggaccattgtgaggtgtaccaagtactcgattgggaccaaaatttttgctaaattaactataataataataataatcctagctagctttgatggtgttgcactgcaataaattataaataaatgaactcattatgagtttatatatataatgcctttgttgcatatttcctttgatcagctgatctttttattgtgtatcgcagtcgtttggggttttcattaattatgcttctttttttattagtggagttgatcagtttaagcaatcttgtttattaatattgaattgaatgaatcgattaatacaagtaaagggtttgtgtagagcttgtgtagttctcttatatacaccataacttttaacaactaaaaatggttacacagaacaactatcaacaatctgtatacacttatgtggttaagtattttcaatcaattatttttatttaagataggtcttacttatcaaaaggtagtttgccacatgggtgtatgtaatgtttgtgtttaaattatgtgtgtaaatataattatttataaaataaaataaaataaaataaaaactgtatttaaaaaatattaaccaaacatgatttatgttttaaaaataaaaactaatttagatttttgttctctaaactttgacatattccaaatcatgttttctgaactttttaagttattaaaaatttccctcaaacttaagattgttagatttaagaacttttgtttaattttaccaaaagaagtctgacatagataaaatttttgggagcaaaatttgatatatgttaaaatttaggagacatgatttagtagatatcagagttaatagataaaatttagtatatgtaacgtccccgcttcaagcctccattgggtccttacacc

SEQ ID NO: 20365 - DNA, 1658 bp, Cannabis sativa
aaaatgtaaattgttttgtcataatacttttagatcagattattattaaactatattttgacaaaaaatcagttcagggtcctatatgtactattttggaaaatagagggtccatattatcatttaacaaaacagaaggtctaattagtaacttttacaaaataaaaggttcaaaatagtgtttaccctatataattatgaaaaaactttattattaacaaattatatgttaatttaaattaatattattaataataaataattatctttattacgattaagatatttttaatttgtgtctagcatatatgtaaatttaaattcaaacactatttaactaattttatagctacgatataagatattatgtgtatattgatatttttaattaattattaattttataatatcaattaatatatcattaattttttattatattttgataattagttatcaataaatattttattttttatttaaatttaaatgaagatatttttattttaaatttaaaatagtggaacaacaaaaataaaaagatgaataatatgagatttaaaaaataaaataataaataaataatattttatctatgatttatttattgtcatttttttttatttaagtatttatatattacaatcatctgttatttggaactcgaactcagaacctccaacacacacccacctataatcatttttactagcctcaagtggttatgatttatttattgtcatgatttatttattgtcataatagtggaaacttacatcaaattttgatgttaatacgatgcaaagagcaagtagaaagtacaaaaataaaaatatatattacatgcattactataatatatttatattagttatacatagagaaaccacggacaatagtgcatcattcaaaaccgcagtcatacacgcaaaactaatagtactcattgtgctctaattttttttttttttttttttaaaaaaaagagtcaaatttattttctcttttattaagggtggtttcagtgtaattataaacttttaattttatcctaaacattaaacaaataaacgagcaatatttttgtttttggtaatttcttctatgtacactatctaacttatattattatttatatgtcaaagtatcattttttatgaagggttttatatctcatatgtagtcgtatatttcactggattaaatattacacttaaaaaaagttaactaatcaactaatcatacaaaaaaaaaaaaaagttactcaaagtgtataggggacactttgttaggctaaaaaaactgatcagaaggctcataaaaagagttagttgaagtctatttttttggtgtctcctctagacactttcctttcataaaaataaaaatgaacaaaaaaaataatctcataaatttatcgtactctaaaagttgtcaattttttttataatacaactttgtaactatcaattaatgtaaaaatattacattatatatataaatctaaatcagtataacatgtaaaaattaaaataatgttaaggtagggcaagagaataaaggtttacatgagagaatgaaaataaaagttggcataagttaatctaatttttacattgaatactgtaaaaaactataaaaataaggatatttgttta

SEQ ID NO: 20366 - DNA, 3570 bp, Cannabis sativa
atttcttaatcgctagagccgaagaccatatttgtgtccttataaaaaagatcatatgcatgtacatttgtaatgcatatcttcgattaagctatttaataatcttcattttgacttaatggaaactcaaatgaacgagaaaatcaatatagtggacacttaattgattatgcaaattaatttcattaaaattttaacacatacattaatggttggatttggagggatttgaggaataatctggttgatcattattatttacagccaataataactccgtctgctgctgcttttcattgtatctttctatttcatcaactagcaatcctcgagtatcctcttcactactgttgctattaatttctttattatttgatgacccaccattctttcccttcctgaatttgtatccccaattaaggcacatcgatctctctttaattttatatttttcttaatcctttcaggtcaattacagacatatataatatgagctcttgctttcttgcatgtctacattcgatatatatcttaagcaactttgtttacttcgtaaactttggtttgttattggtttaatgtcgaagaaaactaggaattaatcgattctattttattttgttttcacatatttttgtaaacctgtattccttcgcttacttcgcacttaccaaaaaaacaaacagaatacaaagatactattaactgtgttagcgtgattagcaaaagggtataattgtaataaaataaagcaaggggagatcttaattaattgttgttatatatgttcgaagcattaatgatcattatctacataagaaagaatagagcaagaaaaaaaatgtttctagtacttctgtatgataactctgtgttagaaatgcattatactgtggaataatgaaatacatttgtcttgttaaacactttatcatacaataaaaatcatttcctgcttatataaataataattcgccaataagaataacacaaattttctttgatgtgattttgtacctaatatttccttggctgcaactggagatctcctacttgaatctttaaggacagcgttctttgaagaaagggtacatatatacaggagtttctattttgcgtttattttttattatgatctatttatgattaggacttattgaaatgagccaaagggttatttggacatatgtttcaaacatgccttgttattaaggctagctagtatataaattaattagttaattggttagtattagtttcttcaattactctttctttattattgttttcttctcattattacgtgtattcttatttttccctctataaatacattctgctctggcacacatggttgctgtgcttttctttacttcccattcattctgttgttccatgcctatataatcaacgttgcaaacatgcttttgtgtaataggataatgcagagaagagtttgagttgaggtgagacaacgatttgtttatattgagttactttaggtgcgctagtcatgagcttagaaatgcatatatacatatcgttatgaacgatggggcaacataattatttgaaaatgcagtatacttataatttaagacagcccatacttatgggaaaccctatatacaaaataggataatctattaattaatatgacaataagtttggatatcgatggtttaaaagcagtcgttcccttttagcagccctttaatatattgtgtactcttaactccagctttttttaagaaaaataataacaataaaatatataagacgttaatccaaagccggcttcgcgtttaattaatcaagtaatgcccagtgtcaacgcgttaattaaacatacaacttcaaaaccaaagtaaagtaaaacatccaatcaacaaaaaaaatgttaattaaaacaactataagctttgtccaatatatattatgtttgtacgtacgaatatgtacacactacacaatacgggcaatagctatacaaacaatccacatctgatatatgatattcttacccttttacaggatcacaattcatatgtattaattccaatgcagaaacttaatatatttgatcagttggtatatgctcaaaatttcaaacaacttaatgtttaagagaattataatttattgagtcacgcatatttataagcgttattatatttattagaaacgaatagagtgatcaattatcattagaattaagaaaagtatcataataatatttatgaacttcgatgaatacaaagaatactgtggcataattaaatatcatatactataaatttataagcatatgtatttaattatcaattatcaattatcaaattaataataataataaattagtcaaaataattaacactttctcttcttcatccgaatttgagactttctcttcagtccacgcagttggttttcccaaacttgcttagtaaacatagacgagggtgacgatcttctcattccttctactccaaacccaaaccctaagtcattatgatcatgagacagagctaaactcaactcgtgatcatacactcgacgcaaaacagggtcagaaagtgtctcgtaggctttctgaagctcaacaaatcgtgtggtggccgaggggtcagggcaaacatcagggtggtactgaagtgccatactcctgtaagcctttttaatgtctcccaactccacattcttagtctctagagaaagcaactcataaaagtttacctttttattattctcttgcattgtctcataatactgattagatctgcatgaaatggtattatttttcttcaccttcaaatttagtacactagccactttctttggcatcatgatcatgggtgctcttattgttactgtcttcagattcgtgtaactcaaggatatatccattttttaatttaatatatatatatttttttggtatataatcttgatcaagaaaagggtaaaagaagagaaaaggattaggagaagaatatggtatgtagtgatgatcagagggtttgggtcctatttatacataaaaggggttcgtgtggatgattaatattaaaaaatgatttacaggtacgcggtatcgattagattagaataatttatcttttagacctgagacaccgttgaataaaaactttatatcaagtcttaatttgacttagtaattatatattttgctcgatcgctaatggcagctacttttcaaaaatatataatacattatttaaaaatgtagttttttctccacttgtggacatattcttattaattatatctcacacactaactttaaactttccttttatttacttattgggtaggtggtacttactgagaaatctcccggtattttacatttttattgtttttatttttaagcttttttattccctattgttttcttctttttttaatcgtgtggaaatgatacattttatggacttttatacatgcaaaatatgcatggttcttttcttgaaaaaaaaattatttaatgaccaaaattaaaaaatataaaaatagtataagttaattgattacttttttttttttttt

SEQ ID NO: 20367 - DNA, 1264 bp, Cannabis sativa
cataagtgttgcttaacccaacaatttccgctttcaaatccttttattgtaggttccctaatgtttcgttgggtttgccttgtggtgaaaccaattggttaatgtctccgtacaatctacatacccagatagcaaaacaaggtatgcacactcattacacttgtattcgtatttgccattttgtagctagaaatttgcctttttcttgactaagaaaagtgttaatgggtgtgtgcttttcccttcaaccaagtgttagccataaaagaatcaatacgtatcttctacgtggctactcctaatattttaaactttggttataagcattccatgcaaaacaattatgaaattgagagaaacataaaattaaattcttaaattttgtttctttgatgattatgtttgccaatcaagttatgtagatagagattacaaaagcgatttttatttttagtttattaaaagagatagaaataattaaagatatgatgaatatgactggatcaggatggtgaggtagctgtttaggctgcaaaatgttatgttattatcgaagcggaaccaaaatagagtaaataagtgtgggacttttccttgtcttttttgaatctcaaatcaagggtgtttccagaaatgctcttctcaacatgatttaataggcagtttctgttgtttcccttacaaaaccaacgagccattaaccgcatggcccttaaacttctttcgtataaaagtaattatgagaaactaggtgttaacccatgcagagtaattgattttaaattaacaatattttgcatctgatagtacatgtatgtgtgtgtgtctgtactgggtattgttcttcttgcagctagtaagaaacataagggttttcgactgaaggctggattttgggattccattaaatctgggtaatttgatattttgtttagtttcttatgtggaactttaatgttagcaagtttattctttgttatgaaagaagttgtgattttatgtattactcataatttacttgcaaatagctgtataaataaatgcatattgtttcaggtttcttaagaatagtactacacaagttgtggaacctccctccacacttgaagaagaggaagaacctttgcccgaagaatttgttcttgttgaaaagactgaaccagatggtgcaattgaacagatcatattttcttctggtggagaaattgatatttatgatctccaatctttatgtgataaggtaatttttgttctctgtacaaag

SEQ ID NO: 20368 - DNA, 3124 bp, Cannabis sativa
atgtatattcaattaatgtaataaatagtgttgataattaaaaataattattgaatgcaatatatcatattagtgtttaagaaatcttaataatctaactgtaatttgttcttaagttaatctaaaaataaatcaaaaattaatgttcaaataataaaacaaacacaacttaaatttgtgtaaaataaaatacatattattagtcattgttatctgtctaggtgaatgttatgtgtcgagccacgtattgtaaattttatttaaggttttgttttttttttttaagattttggtaactaaagtagtataattatttgaacaatttttttttataaaaataaactatatatatgtcaatatatttagtaagtaagacatagttcgttttgaacaagtttataccttgattcttactaactaatgaagattacttatcaaaaaaaaaaaaactaatgaagattttaaaaaatagaataagaaaggctaaaataaataaatcaatgaaattttctacatagttagttttgaaaatttgtgtcatagattcaaaatttatggtttatctcacaaaatagccaaaaaaaaaaaactcaagtttttagaggcttaaattaaggccactatgtatatcattcaaaactccaaaccacttctcacatgaccaaatcttgttggttgccagcagttgtcatggatgtgagaaaccttctttcaacttctcatttatccaattgtattgaaaaaattcacttactttgtaggattgttgggtgtaaggggtacctaaaatgatgcaccatcaaaagtaacagtaagcattgattttgtttaataacaaaacacatcatacagaaacagataaacaatatcggttctcgattcaaatttatacaatattaactcattccctttctcaagcaaaaagtaataatccactctctgagtttgattctttgatatgtttaaataaattacattatttttcataatatcactattataagtatgttgacaggtattgtttctataccaggatggccatagaaataaaataaataatttagcctgattcgaacattcaagaccagacaatgaaacaaaaagctcacattcatgctcctataggctatagctaataatcataggtgcaagcacactattctacaaacagtaatagtatttttgatattgatttatatgtagccaaaaaaaaattaatgttacctttggacataaggacacactattctaccaatattaatggcactttcgatattgattcaaatgcagccaaaataattgatgttacctttggacataatgactaaagaactaccgttagttgcaccagctattgaactgatgtagtaattcttttcccattcttctattatccaatcctgagaaataaaatgagcaacactcactatgaaaagcctagcaacatgatttaataatgacagaatatcactatagttaataatctacaatagatcatagtaggtcctttatacaataccttatgcaagaaaaatattgacagctcatagccctgcaaagaaagagcagttctagcatagtgattaaagtgatacaccttcattggagagtatcttgagaaaagagcatgatcatgagcaagctctatgtttttctacacaacgtcacttggaaaatcacaaaatctcactaatgaattatcaaagtaaacttttaatcagtttataatcaaaactaaagtactaaacttgtttcttcatacaacaaaatatatagaagtggagtcagtagctgacttgaatttttgtataatgaagctcttcctcttcttccttttcaacctggttttttacacttacaaattgaaataatgcataaaataaacaaaaagtatgaaattaagttagattttgaaagcacaaaataaaagattggtttgaaaaaagagtaatataaataaaatttacaattagcccaaaaaaagaagaaaacaacacaaataaataaaaagggattttccctcagatgagaaaaaaaatcttcaaccattttatatagtaaatgttcataacttctttcatccgcaactaaaaattctcgttctccaaaatctacataagtagatatggatttgacttttgcattcaaaaacacttaacccaacatgaattttctcattttctcttaattacatcattaaaattaaaataaaaacactgacttgctatctcaaagtcgtgtaagataaaatcaatagcattgagacacatacgaaggccgctcagttgcattggaaaggtcgctaccacaaaattctgtctcatgtattctaagttggtgaatagctgagttgagtcgaccgctttttttgtacgagttgacaacgagtccactcgaaaaaatcttgccgctgtaacaataaataataaattatatatttaaatcgattaattatctaatagaataaattaccagagattcagaagaaccattaatatgaaaaattccaaaaatcattaaaacctacatttaattcatgcctcatcacatgagcaatttgctcagatggaaccagattagttaatgaaataagagggaaaaaaggaaaaacaaactgagaaaaactcaccattgattgaaagaaatactcaccattgagaaatgctataaagagagatagcgagaaggaagccaaaaattcgacagtcgctgaacaaaatcagttaagttaagattttaaaggtttaatttatatttaagttttatttatattttttaagagttaacgatagagttaacaatagacttaaatttaacaaaaacttaaaaacgaaaagttacccaataatttctcataaataatttaacaatagatgtataaatattaatttttttcctagatatattaatattagcttcatatattatttttaatataataaaactataatatgttcatatttttattaaaatattaaacaatatacaaagataataaataatataattattgttttggagaaatataattattcattactaaaaataaacttggtacacaatatttatttctttttattttaggcggtaaatttcgaattttttcctctatattttcaattcc

SEQ ID NO: 20369 - DNA, 4915 bp, Cannabis sativa
  modified_base (2948)..(2954): a, c, t, g, unknown or other
attaatatgattattattggatccttacgcatagaacatgttgtatcgtatgtgggtctaaatatctcttttctttttgtttacagtggcttcactcggattttcaagttcagcagacctagtctcttgtcaaacttgttatttggacgaaaatgggtaaggataaattccatgtccaatgtaaaatctttcaagctgttagctataagagcgccacttcaccttgttgaatgattatattttggtatggacttgcaggtttacttttgggtgttatcaagcaatctgatactgcgttgcacatggacatacaagctgtctgcccatctccggcacaactatcttacattgttcaccatcacagccttggagatattccgccgattccagtgggttttcttccgtgtagagaatgagtggaacaagatgaactccaaatcaaatgcccagctttccttgagtgaattaccatctgaggaagacaaactgctggcctctaataatcacaatgtataggctgttgggcaaattatctttttggtagtaacaatgatatcaaaagttcatgttaaattttttgaccaaaacagtttcaccgattcctttctttcccaattggctttttatacaagcaattgaaaacattcctttgtttataaatagaataggtttatccatgattacattatttacctaataatacaacacattatattgcttcattttgtgaacacaacaatagcctcaacctgcagtcgttttcccaattggccatgactgactgtaaactttgatgatgaatgaaacatagctttcctctttattcaaatctcctatttaaaatatggtgggctcatctccattgcttttcttcttcctttttcctttttgtcatgtattaatcattgttcacaggctttggggaagaaaaagaactgtttcacccttttgactctttccaatgtctaaagttcaagttcattacccagagaaacagtacttctttcacttttaaaacacaaaacataatgatcatgtgttgtccaagaccatatacgaggtatctagcttctgcaatgtaatactatatcattactgattgtcttttaagtatgaaacaatccatcttgatcttttagaaatccgacggctcctgatcactctacaatgccccatatatcctcagtaaaatagcccaatctcaaccttttaaaaagttcacatagatttgacgtgctcagcaggacacgtgtcgaaatcccagttcagaccaccctttaaactggatagataacattaccaggtcaacaaatatgcaaactcactttattaaccacccaaaccaaaccaaaccaaaccaacccaaccaaaaactcttaaatcacccaaattccagaaaaaccatcacaatggcctaaatgttagaagccgcagaatgcaccggtttccagagccggccggagccaaacgaaatcacaccaagggtgctaaccattctgtcctctgttctagaaaggctagtggctcgaaacgaccggcttgttatggaggggttgaacggaaaaagcttgaaagctttccatggagtgagagctccaagcataagcatagccaagtacttggagaggttatacaagtactcgagttgcagcccatcatgctttgtagtgggatacgtttatatagatagactactgcacaagtaccctgactcacttgtggtatcaataaatgttcatagattacttgtcacaaccattatggttgcctctaagatgcttgatgatgtgtaatacttactaattaaaactcttcttcttattcttcccttacttatctgtacttctttcatattttcttttttataattagaagagttttgaatatatgtatatatacatttatgcaggcactacaacaatgcattttatgccagggttggtggagttagcaatgctgaattgaacaaattggaagtagagttgctgtttttgctggactttggagttgtggttagctctggggtttttgagatatattgtgctcatttggagaaggagatgttgatgagtaatgactactcttgtcagaagattgagagagtgttggctgtggatgatatcactgaaatatctgttgaagataatacacacacttcttcaccaactcaaatgggtgactgactcatttcattgttcagttctagtagtgttcttaaacaatgtcatctttttgttttttctcctaaaattcattggatttaatggaatataatacaccaacttgagaccactgtaaaaagatttttttttttttttttttgaaatccactataaatgatagactaatggattatacacttaagttgttttgttggcatttggtatatgagataatggaataataatggtaatgacattttttttttctgataaaatggtaatgagaatggattaaatatttggattgttgttggaatgaagattgtatattatgtttagtttggtatggtaatataattaaataaaatatgtattgtgaaaattatttttactttaatttagttagtaaatttaatgaaagacaatggtaatgagatttgtttttgataaaatggtgatgagaatttggattgtcgttggaatcaacattgtgtattattttagtttggtgtgggaatatattaaaaaaaaatatgcactgtgaaaattatgtacactttaatttacttaataaattagatgaaaattctataatgcacccatttaaaagaaatacactgatacatctctatttattttagtatttgaaataattttttagtcaattttttttatggtcatgtaaattattgttatttaagatatcctgcaaaattataagaaatttgaaaaagtttaatatgccaaaaattgcattcaagtagtgtattgcacgcgtgactattnnnnnnnatacgcgtgtaaaatagattgtttgaacattgtattctatattgtaaagtatttcgaattttttaaaattttgtaggatattataaatatctataacgtacatgaatatgaaaaaaaaaattaaactaaatttttttttctgaatgccaaaacaagtagaggtgcatcaatacatctcttttaagggggtgcattgtagaatcaccctaaattagattatacaagggtattaaaataattttattttaaattatagatttatttttaagttaaattatattattatattgaaaatcgtgagattttttttgaaatggaaaattaactttattaaccatttgaaacattcccaaactgaatagacgaccaaaatataaaatgaaagctctagcaacgtattgagcaaccacatttattgaccatttaataaagaaaacataaacattttgcaaatcaataagtaaagttttacaatcttaaataactagcccaaacacaatcatgttgacattactccttaaagcttgtaggtctccaaaacaacttgctgccacgacttcattttgatccaactgatagcctcccaaaccccgttgcttccaccaacttcagtacgacacacccctgcaagagtctggtgcaaaccttctaacaataaacctctatcatcctaagccaccacctcaaaaccataacattggtcttccataattatcgatgcatctacattcactatggtggtattaaactgaggcaaacaccaatgctcacccccatcactcacctataaaactgattgtgatgactctctattagagttttgagtatttctccattgatcaaagtaccctatgcagaagcaataatacattaaattcttattacttttttcttccaaactgtctcattacgagcccctcaaatagctcaacagattgtcgacaccaaacacctcttctcgttgtccaatcgcataaaagtaaccaccacctaataaaaaaaaaccctaatctagccatgactatagtaccaatgcccaccctattccaacattgttgtaccactcagaaagtcaccaaggtatttaaaatagattcatcctccacaccacagataggacacaaagcactcgcctccacccttttagttaagagttgaactattgtaggaaagcacttcataccagtacgcaaaattaaaatttttactttagaatgaatcttaagtttccaaagacacctcgtaagaagtcgctatctttgtctacccaaaaaagcaaggttaaaatcccaatgattatgaaatctcatgcctcccacacttttatggcgacaaaaagatcctaagacatcaaatggattctttttcttctagaatattcaatgatttcccccataatctagccattttttgctccatatcctgactactttccagcatgagcaaaaagacaatgcgtgataaagattgggctactattttgacaagtatctctttgctcactcttatgaattcacttcttcaaataactgaaaaacaattattttattgacccttaaagtactaggaagacccaagtatatactcccactatctgccattctcatttgccatttataacagagatcgaccgtcaaattttttcactatattattgctgaaaaaaaaaggaagacttttctaaaatttaactttggcttgaagcctcttcaaacttgtgtaaaaactcttaaattttaaatacttccttttcaatttctttacaataaaggtagctaccatcagcaaatatcatgaaatacactcttagggccccatttgcaaccttacaaccacaaatcaaacctctgtcttcatactttcaaatcaatcgcaagagacctttcacacacaaaataaatagataaggagataaatgatcgtcttggcaaatatcctgtgttggaattataggccttatc

SEQ ID NO: 20370 - DNA, 4275 bp, Cannabis sativa
gaatcttaaagtacatcccttagaagttcttacacttacccaacatccagattgacgtcatatgtcaacttgggcactggaatgtcaacatgggcgctagatgtcaacttggatgttgggtcatgaattcttttcactaaaatagccataactcactcaatattgatctaattgacgtgattcaacttgcgtatagaagctaattcaattatctatcaagtcatataccatacttaaattgcaattctaaagctatcaacaccaaaattcactcccaagggagttacaaaaataagctctgagtgacccgcagcgggtcccgtcgggctctgaaaaatggtcatcaccaccaagagctaattttcactgttagatcatcatctacggtcaaaaatatctaatttgtatttttctctatttttatgggccttcttcacctataaaaggagagctccccaagttcatttcttactttcagaaaactgcccacaaggtcagagcttctctctctagaaattggagtttctgacacttagtctttttctgtaataccatcttgtgagaaataaaaactcgaagtaggcgtaactccattattgtcacgatacagagagtgaaatactataagtttgttgtctctcttataattacttaactacttttgtattcttgctaaactagcgagcgggtgtggcttaaaaatctagtccaaattttcagtctatagatttttaatcaatattccctaaactaaaagacatatttaacaaaaagaaaaataaaacaaaacaagcagaaaaaaatataaactcacagaaaatggtaggaataaaccttaaattgaaaaatgatgaaatatttaaaatgcaaatgagttgaaaataataatgaaaaaaaatacctgaatcgtcggctgggtgtgatttgagttgaaagatggagcatattggggtaaaggatttgagaagagaagagtaggggttgagagtattgatcgtaaatgagacattatagctgggtaaaaggattttaagtgaaaccctttatttcgggttcttacaaaaaataaagataaaagggtttcactaaaaccttgagggctgtttcgctaacccatataaattgagtcttgaacttattttttacttttgatattttttttaacattctaacaaacagagcccttgtctaaaaaaaaattcatatttgatgcactaaatttaaaagtaagataaaatgtctcaatatatcatttatttatttatttttttttgttaaacttaaaaagttaaaaagtctcatttctcgtggtgagtgcttatggaatcgaccttactcttatgatagtttgttacttgtaaatgatacttatacttgcctgttaatatttccataataataccctaccgagcctttacagtaaaatggagagacttaatactctgtgaggcactaatactaaactgttaaatatttctctttctcaaactttgtgcaaaaacatccatcatcacatcaaggctgaggctcacattcagacttattttatgggtacaacaacaatggaaatttttccaactgtgatgtagggcgaataagaggaagaggaggtggtcattaatggagggcatgtggtaatggagggtattttaacattcaaccgtggtggagggtgtgaacaagaggaagaggaggtggtatatggagggcgttttgaatttcctacatatctcatcctgattttatgtatttcatcatttatttggtatatcttgagtttgtgtactttattgtaatagtcttttttttttttttttttgaaagattatgtaagagtctcttttaataattgtgtaatccctctacaagaagaacacgggtagacatggtttttccagtacacaacaatctgctttgaaatgagtcatgatgactcaccatttatttaaactttttttatttgaaccatttatttacttttgtccatgttcttattagttctgctcctttcaattttaatttttttttttttttgaaaagaattgcctggtacatctgaggcctggtaaatttgacccaaaaattgggctttaattacctgtttaaaagcatacacacaaaattcagttccaacaagtgttaaaactttttaaaggggcaccaaaaaaaaaacacaaaccaatcatttgtactgacaccatgttttgaatggtgccacatatatattagctgatcaaacacagggaaagaaaaaaagccaaagcaagacttaatagatactaattaggctgcttgaaaacgataattcatgttccatacataactcgataaaccacatgcattcttttcaacaatatacatatatatagctaattaccttagtgcgtacctatgtgtacagttatcctaggttggccaaattatttttgtttttgtttttgtttttttttttgtcttttttctttgatgtccatcactttcatccacaaatacgacacatatatacatacaatttatataaaaatttgtataatatatgtataaataactcaatatgtaaagatttggatatgtatttttttagccatatgtgattcatgggcatggtcaagaacaagttcttattccccagcaggtactagcatgcacgccattccaaagcaacaaaaaagtagtgtcgccaaatctctttttggttacaatgtctcctcttttatgtagtcacttttcattatcctaatctcttctcctaatgtactctattagtggaaattattaattaaaaagcatttagatccataatcactattacattttactttacaaattatgtatagtagttttcaatatatatctcaataatccatatatattcatagatttaattatctgacatacttgcagtttaggattaattagttaacaacatgcatgcatgcacggaatttttagagattcaatattttacaggagaaaattccttttgagaaaaatagaactaatttttaaagtaattaataattttagattaattatacgatcattgaataataaaagttaaaactaaagtcagaatttgtaattagaccataggacggcattaaagcaaaagtacttagctaggtcgttcaattttaaaattcctatagttttggcttgaaaactttaagtatttctcgaatctcttaatagttttaaactttagaaagaattagtaaactaacaaaaacgtaggattaagtaggttgggatataagaagaaacatcttccacaaatgaggttataattagcttatcttatatacaataaacatgttacacaagaaggcctactctcaaagtactatcttttgcatattaattatttcaattgtttttctatcttcttttctctttaatttgctaatctaactgtgaatagtatatagtggtcgtgggctgctttgccgttaaggaacttaaccgaagaatattcagccaataaactatacattaatacattaaaaaaagaacaaagctgtaacattttgtacgatatggaatttggatcgtgaactagacaatataaaccattaaaaaaatgtggggtttttcttttgcccatgtactctaaattctggttcatgtctagagcttgaatactttttcaagtgtcggcctcatgctatccatctttggcttaagttattttctgcttttgcctctaatttcactattttttttttttaatttctatttccttccttgacagctttctctctttctctctctctcttttctatgtagcccatgatggttctatagcgagctacatagattccctagtgctatagaaattttgaggttggggattttcatgggaaagtatgtatattattactttggatcaccaaaaaacagtcttatgataatcactttctttgttatattatattaattatctctctaaaattgaggggtataaattgcctatttggatactagaattttttaccacgaaaaagatctgattagcaaataattaaacaaaagccacccaagacgtcatctgtagagtaactcagaattttcacagctatattaattgagaatcaatccatattagtactaacctattagttaatcccacatcggtcaatcacgaacctagttggtgctggtcgctggcaatgacttttgtcatgtctacgggctaaacggctcggctaaagctacactgtattagccgagccatacacgtggttccacgtcatcatgcgcccatactattggcta

SEQ ID NO: 20371 - DNA, 3582 bp, Cannabis sativa
ccgctaaaaataaacattgtgattataccacttataaacttaaaactttaagtacttttacgtgaaaataaaattaaaatttacaatttattaataataaaaattaataaaggcatctccaatgcaatttctacagaatcctttcgagcgataaaagattatgacttttcaatagaaaaatattatcacggtcctgctcagcacaatgctttcttttttttttttttaatttttattatctttaattttattgaatactttattattaaattaatttaaaataaaaaaggggtcatagcaggcaacgctagtcgttgtctgcattgtagatgacgttaagagacctaaaatccaacaactacgtactaggataatcataacatggacccttgtttttcctcttcacagaaatagttgtcgttttaactaaactccgacagaaatagttgtcgtttaaactaaacgacacaaaaacaatccttacagctgagtagtcttctcaatagaataataaagtgagattttctgagaagtttacaaagtcaaccaagtcaaaccataataatcacactcttgttgttccttctttctccaaaatccatataaatatatatatatatatataaatccaaacactccgattcttcgttaccaccattaacccaaacactcttagtcttacaatcaccattaatccatggctgattcttcttcttcttcctcatccgaaactaacctcacaacggccaagacatttctgtccacggcggcctcagtggccgcgacggcaatgcttgtacggacactagtcaacgatttcatgcccgatgaattccaagacctattgttctctggcataaggaatttcttcaatcggttttcgtcgcagatgactatggtgctcgacgagttcgatggtctggtcaacaatcaaatctacgaagcagcggaggtttatttaggtgggaaagtctcaccatcgacgcagagactcaaagtgagtaaaccagagaaggagaagaacttcactatcgccatggaaagaggcgaaaccattgttgatttctttaatggcgttaaatttacttggattttggtctgtagacaagtcgaatcgaaaaatttccataaccctcgagatctgaattctactctcagatcggaagttcgatcgtttgaattgagctttcataagagaaatcttgatttggttcttaattcttacttgcctcacattttggctgaatcgaaatcagccaaacaggagaagaaaaccctcaagatcttcaccgttgactacgagaatatctactgtaacatcgccgatgcttggatgccgacgaatctcgatcatccggcgacgtttgagactctggctcttgattcggagatcaagaacttcattcttgatgatcttgagaaattcgtgagaagaaaggattattacagaaaagttgggaaagcttggaagagaggctacctattgtacggaccgcctgggactgtggaaaatcgagcttgattgcggccatggctaactatttgaattttgatgtttatgatttggaactttctgagcttcaggttaattcggatcttaggaaattgcttattgcaatggcgaacaggtccatattggtggttgaagatatcgattgctctgtcaattttgaagatcggaacaagactgtggcagagtcttcaagtacttctccaactgggtctactgagaaaaaggttacatttctgtttctgccattaatgatctttaatgacatttcattcatgataactttaatgctttatgtttggatgttattttggtgggaaatgaaaaaaataaagtaaaaaaaggaatagaaactgtggaaaatagaaaaagattgaacttttgtcttccttttttataccaaacattaaaattgattttattttatttttcttttcccactaaaatttaacttagtttaggaaaagattttcatttagtatttattttcattctaattaattagtttaatgctctgttattgtgtgagtcaataaaattgtagttttatatttttctaagctgaattgattgaaagtgtaggcacagcacaaccccattcattaatcactagtaacatttaaatcagcttccactatcaagattctatttggccttttcacgttttctttttttctcttatcattggttctttcacctttcctatatgatcacatttttcatgccctttcaacttgatgtgctctattcaattttggctccattgagtgaccaatgaatttgtactttttgtgacaatttatgtatcacgagaaatagttaacaacagacagggccatgtcccacttgtcctttttcctttccttaatcaacttcttttaatgatgttactaatctccacaggtgactctgtctggcttgttgaatttcatagacggtttgtggtcaagctgcggcgacgagcgcatcataatattcactaccaaccacaaagagcgacttgacccggccctgctgaggccaggtcgaatggacgttcatgtccacatgtcttactgcaccccaggcgggttcaaattgcttgcctcgaactacctcgggatcaaacaccattttttgtttgaggagattgagcagcaacttgaatccgctgaagttacacctgcagaagtggctgaggagctcataaaaagtgacgaccctgaagttgccttgaaaggtcttgttgggtttctcaaagtgaagaagaaggaaagtgaagaagctaagctgaagaaggaaaaagatgaagaggaaaaaaaaggtattagtggtaagaaagattctgaagctaaggaattagagaatggtaaagtagttaagggtgaagaaggagatttaagtgaagagcttgtaaagggtggccaacttgaagttgccttgcaaggtattgttgatttgctcaaagtgagaaagaaagtagtgaagaaggaaaaactaagagaagacgcttgtaaggagaatgggaaagccaatgatgttgaaagtgatgaagaagtgtgaagagttgttgatataggactatggtataaggtgatgatgataatgtcgaaaaaagtaagaattttacataaagtaagaatcttttttcataactacctaggaaataaacacattgatctgcaatgatgctctttaatatagtatgtattagagcccccaatactatataagcatatgtatgtactatattagtcgacattttatgtttgaatattaatgatgcctaacacaaattactctaaaatcttctttgcatcacaattaacatgttggaaatgtgtagattttgatgaataagtttgtatataaacttaaatttgtatggagacttctatagtagaaaacaaatataaggcacatatggcatattcagttaggacatctacaatgggagaccacatttattgttgtgcaaatttttaaatattatattttaattaaaagtaaccaatcacaaataagatagataaaaaaaataaagcatcaattgtaagatttgttaatgatattttggttgaaaaatcaaatgt

SEQ ID NO: 20372 - DNA, 8081 bp, Cannabis sativa
tggtatttttaaaaattactaaaatatattaatacttttaaaagaaaaatatttcttttgagtctttggactggtagttagacgcaaaactagcccgtcttaacccaagcctgactgatgatgttaaaaactatttatgcgtaataacaatactctaaaattgaacaacagaaatcttcttacttggattcgaagataattcttctcagagtgaagagcctgaaatacagtagaaaggaaaaaatcgaccaaatcactacttgcttgagtgaacatgtcgacaagaggagtagaatggtggctggtcagccatcccacaacaccccatttagcagcttcacttgcattgtacttgtcattagcttttagggcaccagttcctattgacacaaccaaaaatcttccgtactccgttggcttaatggggaaaaactcagggtttccttggtggatttcctttgacacttcatttatagccaccaaagcctgaaaatagatgtatataaatatatattcagaaaattttacaatgaaccacctgtctctttctcagtatctcagacatgtatagttatttaaaatatcttacaaaataacagcaatagagttcaagatgaaaataattagactataaaaaattattctaaatactgaaacaaataaatagtatatcagtaaatcctttttaggagggtgcattgtagaacacgcttttacaatgagaatctatttagttaccggattgttagcgacgacaccaccatcaatgaggttaaactctctgacttggccgtttgagtgcgtggtttcaaaattatgagccggaagataggtcggtgcagccgaagttccagtgcatatatcagatagcaacgcatctaagctaggattctttttcgcctattatataataattaacaaaaatataaccaatgaattaggtcaatagaaagaaagaaaagaaaattaaaagtaattagcattttggtattattaatttaaattaaaataaaatacctcatagctagagaagatagttggttggagacgcttgatgtcaaatgttggaataacaacgttagtcaatgtgttgtgtaacctcagatctcctaatttttccttaagtaactcacgtaaatatttgccatcatattttggacctgtgagagctcgaattgtctccgccgccccacctagtaccggaatacttctgctgcaattcgtcaacacatatataattcgtgattttgagtactactgttttggaagtaactgtataattactatacgctagtaattacactgtttgaaaaaacaagttgtgtttaaatataagatggtaattacatatgaattgaacgtaatacacagtattacactgagactttctaaacgcgctgttagtaaaaaaaatgaatgtaacgattgactaattaattagagtaggtagaatgttgggtgtccctattgggcattgttttgacataaatacctttcttgagggaaaatcttaggacagtgttgaaggtagaattggttgatatccttggcagcgaaaataggtcgattgttttcatcaggagcagtaagcatggctgtaacaagtccacctgtactagttccagctatcacatcaaagtaatcagctattcttgcttcctcaccatctagtctctgcatatatatatatatatatatatatatatgcatgttattataatatatgcatgaattaataaatatgttatatttatgtatctggtacgacgtcgttttgtacgtacctggagctcagattctagataactgagaatggtaccaggaataatacccctaatcccaccaccatcgatgctaaggacagttatcacatttccataagttggagattgtaagaacgaccttgctctctccataaaagattaaagattttgttaaaagaggagaataaaagaaatatagagctccttttataggtaataatattattaatgttgtgttaattgggaatgtgtaagaaatgtaacccatgagtgctccttttataggtaaattttttagggttagcattggacttttcttaatcttaagctctagaaaattgggatattcgtattttattattatatatggaactgttgatatattatgctgagtcaaaattattgtattattatcacctaacttgtgatttaggttgaaattggacccacatgtaaatacatccaaagtttgaatttgactctctttttcaactctccaattacttggcgaattatataatgtattttaatgagtccaaaatatatatagttggataaatattatttttggctttgtttttgtaaaaattattaaatagattatttattttgttaaatgataaaataaattttttattttttaaaatgatacaaataagattcttgactgatttttgtcaaaataaaattacttaataataattcattaataataattagatctagaaatgttatgacaaaattggttattttttctgtatctattggtattaggaattgtcttcaagtcggttttataatgaaaaattatcgaaaattaagctcaatatcttatttttatcattttagaaaatacaaagtctatttgatcatttgatcacaaaataggggatccaatcagtaatttttataaaacacaaattctaaaatagtatttacctaatacacttttaacaataactatattttatatcagaaaaaatgaaaaactattttatgagcttgaatcagtaccaattagaaaatttaaatactgggttcttccatacagtaccatattattaataaataatattggaaatttttatggtgaatcatctaaacatacaaataatattgtacttttgttttgtttttcaatattcagataatgtttaggataatattatgtgtgattgaaatttattaaaaaaaattaattttaattttttatatgtcagttatataaaatagttatttaagacattctgtaaatttttaaaaaattcagaaaaaattcaaacgtacagtttgttacatacgtatttcttttattttaggcatcatttgaactagattgtttgaattttaatatttatattgtaattattttgaattttataaaattttataaaatatcttaaataactataatatatatcattatatatataaaaaattaaaactataattatttagaaaagaaaaacacgaagcagtttacggcaagggtgcccgttatcgccatatttgttcttgttttgtgctaaagcgctttaactcttctccgacaagatgaattgagtggagaattgatgggttttcagtgttctcagtatgggcctagggtgtctcatttattttttactgatgatagttttctttttggtggagctaatggattggatttagctacaatccgaagagttcttcatttttatgagtgtggttttggacaataagtcaatttggaattcagcccgaatgttcaacaagcggagcgcaccagtgtattgggtatattaggcttgacttcattggaaactcatgataagtatttggggcttccgatggttttaagaaaaacaagaagaggacctttaatttgatagtatttgtgagaaggttcaaaagcgggttcgtgggtggaagcgaagatctttttggcaggaggacacgatattctcattaagtcaattctgcaggctgttccaaactatcttataatttttttaattgcataagttacgctcaattatactatagttcaggtggggtgctaagagtaacaaaaggaaaatttaatgggtgaaatgggatactatttataaacccaaatcaaagggaggattaggatttaaggatttggagttatttaatcaagtgatggtagctaagacaatgcgaaaattactttaggatcctaactcattaccaagtcgtgttttgaagcataagtattttcagcattcgtcaatcttggaggctaaggatcgaaatgggtcttcccatttgtgatcaagcttggtttggggtttggagaatttgcgtaagggaccaaggatgacagtgggggatggaagacaaattgacacttttagagatccttagttgtcgcgactaataatgttttttcctataacgtctaagccaagggtgaatttgttggttaaggggtttattgatgtaaatggctcttggaatatacaggctttatgtcaagtcttcttgccgatggatgtagaagtgattcttagaatccctttggtgagtggagcttgtgaggatcgttggtgttggcattatcattataatggatgttacacggtaaaaaatggatattcactgtctttagagttggtgagtgaggataagggttgttctacgatgaatttgagtacttggtggaatgacctttggaatttacgagtgttgtagagagttaaaaaaaaattttgtggcggatgttttatcaagttatcccaacgaattatcaactaattaagagaaaagtacctgttcaaccagtttttgagaggtgcggtgatgaggttgaaacccctaagcacgctttggtgtgttttttcttcattgatttaagttttgcatcgattagttgtttggggtcagctttgtccccatagaaatggccctttctctaagctgctagtgtggctgttcgaagagctgtgtcgagataatttcgtattggttgctttggtgtggagtggatatggtacgattggagctaggtgttgtttgagaaaaagaagtcaagattggaggtgcttgttgaccttgcagcagtggctttagaggagttttaagctattgatttttctggtgtgcatcagcagttggatttgaggggaaggggagtcgagaaggggagttagagggtgtttgcaagggttcgaggcagagtttttctgctggttttagcaagtgggttcctcctgaacctggtgtttttgtgctatcgactgatgtagcagtgacccggggagaggttttgctggttttgaaggggtgataagtgatgccaaaaagagttgtgtgggcggcttcgtcgatgggctgtgttggcgagtttctagtggtggtggcggagcttttggtgcttcgtatgggtttactctgagcttataattttggattcaaagtcgggaagacggtgacggatgcttcaattgtttgtaattgggttaattttcctgattttaatagtgttcaaatctattgttgataaaattatctcttttagctgcagttggtggtagtttttattgtgctatttcgcgtgttgcgaatggtgtaatccacacactagctaagtttgttactatagttcaataggagttcatgtttagactgatgcttactctagattcttaagtactcttataacaattgatttaatttaatatattatcacgttttttagaaaaaagaaaaaaaaagaaacgaaactcttattttagagcaagctagttatagaaacactcaataatatatttgtaaatatatagaattatgaattaattatttgaacaagtaatttatgtagagagtgataatattttctacatagattattagtgataatattaaaaaaaaaattaaaaaaaaaaagtaatttatgtagtgataatattttccaatgaaaattcaaagcatgacttgatatttgaatggctgctgcgaaaacaaacaaataaagaaagtgatgagaaattaagtaataagtatatcatgacctacgtgttgtaatagtaacaggtaataacataaataactaattaattaattaattaaatggaaaatcatagcagggatccaagtcctattaatctgaccaattccaaaaccccaccttcaaattagttaggtctttactttttgtcattatattataaaatcatggatttatatgataattagctagcataaatttttggctttgtttataggtttacatatatatataattttaataatttaataactgtaacagaatgatacacgtattacgtatacaagttagactcagtagtactcagccacgaaaagtataaatatgtcaagtagtagtttaaaagtccatagatatatacatggtcaactagtcaatgtcttcttgtaggggaaacgacaaagatgaatcctccaagaaactaatacactagaagaaaatttgttattcataaaagtataatatatatcttattataatacttttcaaattttgatccttaaaatgggtggaccttaaatacttgctagccacactacaagaaatatcacttttacactacaacatattattactctattagtggcagaccactccgccgctaatagccttccattcggccgcaatatagattatttgcggcggaagtctcccgctaaaagtccggcgctaatactatatattattagcggggaaattgggcttcgctgctaataatagtattagcgacagactattagcggtgggatcccaccgctaatgcaccttgtcagttttgtatttcaaaatattagcggtgggatcccgtcgctaatggtccaccacaaatatcattttaaaaaaaaaaaataattttaaaaatgataattttgtatataatattatataaatatataaataaataattaataattatataaataattaattataaatatataaataataatttaaatataataaatcaaattacaaataatataatttaaatccaataaaatttattaataatttaaaatgtctaaaaataaactactttaacgttaattctattacaatattgtctcaaaattaaattaaattattaaaaaacataaacaaattattccataaaatctttattaaggtctcgatcgagttataaagttttgatccgcattattatcatgacgagttcctgatggccgtggcggagaaggaacatatgcttgatctgatgattataaacccagtgttagattccctagctcagcttggttaagaataggagttgaaaaaaattgttgctcctgggacgaactcccaaataatccaaaatcagcaaaatttgagccgagcggtattctcatgatctctgtttgttgttcgaatgccagattcacatcaggtattctcctgatcatggtgaagagtgttgatatgagcttgcatccaccctaagacatctcgtagattatgcaactcagtatcatcaccaatatttgctcaaggctctcgagttggtggatcttcggtacccagcccagtttctccattaagcgtactagtgatcccagcttcctatgtgccaagagtgaaccctgtcagaggggtcgttatcccccatcctcctgttagtggagctcgtggaggcagatgagtggttggatcaggattcacccttactggatctcctcgattagcaggagtttacacattaggatctgtggccattggatcagttagactagtggtttgggtccttgtattaacaatcattctcttgacgacttgtggagaattagaattatagaattgtgttatttttctctcaaaagtatagaaatgttgacatctgttttagccaacgacgctaagtcaattaatgcgataagataatagaaaataaacaatacaattatgcaaataaaaatataagatttatagaggttcgatcccgtgattatgataatagcctactctcatttttcttgtattacttcgaagaattaataagatcacaagaaactaccgaatgaagtttcttaataattcttacgaaaaacttataattgacagcgtacataaatatgatcttagaaacttataggaaaaaaatacaataatttggtttcccaaatagataaaattaaaaagaaaaactagaaaggtttcttattatttattgttggagcaagtcaatcacactaaattaaaaatgaaagttttccatgttgatatataatcgataattcttttctaatttttaatctattatgtaaaatatcgatcttttagggcgcttttggaagtaactgtgtaattac

SEQ ID NO: 20373 - DNA, 3883 bp, Cannabis sativa
aagtagcaagctacaatccaacattacatattaagagaattcaagaacatttgttcttgattacagagagataaatataaagtggaaaaatgaagaggaataaaattgaatgaaataaactcctcaatcaacaatgagcaagctaagctttatttatacgcagaaagatacaagcgagaatagaagcttaatgagttgttacaaaattgaaactgtcacaagttagttaaatagctaactactattctaactaaatttctgtttgactcaagtcctcatttccaatagcccccctcaagtgacacgtgtgaatacaagtgtcaacttgtgtctgaaataagtaaaagcagaaaatggtaacagtttggtgaagatagctgccacttgataagttgattccacataacgcacatccaattgttaagctaatacgtgatcatgaacaaaaggaaggcctatttccatacgctttgtacgagcatggaaaactggattggaggctaaggaaccaactcctagattgtcacaccaaagaataagacaacttggaaattttatgtacaatttagtgagtaaggattggatctatatcaactcagaagtagctaaggcaagagcacgatatttagattctgtgctagattgagcaacgacattttgcttttttgagccccaactgactaggttgccaccaagaaaaatattgtagcttgaagtggacttgcggtcattaaaagttctagccaatctgagtctgtgtgcccctgcagatcaacacgagttgctggagtgaaagtgagcctgagatgcattgtcccacccaagtattgaaggacccttttacaagcaccccaatgatcggaggtaggatatttcatgaactgactaagtctgtttacagcaaaggaaatagcaagtctactataacaaagatattgtagagtatcgataacacttctgtagtcagttgggttagcccaaggtgtttcggattgagaggacaattttgagttgaaacacatgattgaggctttcagtccagcatgttggttccaataagcaagtcttttgtgtacgtctgttgattcaaatatatagttgattgttctctcaaaacttcaaatcctaggaagtaagtgaccagacgaagattcttgagagcaaactgttggtgcaatttgttaatggtgtggctaacttcagttggatttgcaccaataataagtatgtcattaacatacacaagaaggagaagcattttaccatttttgttggtgaaaactaatttgtatctgacttggagttggtaaactcccactgcagtaaggaagttttgagcttgtcaaaccaggccctaagtgcttgcttgagtccatataatgcgttgtttagtttacacttataatgtggaaagtttggatccacaaacccatggggttgttgcatgtagactatttctttgagttcaccatttaaaagaggcattgtcgatgtctacttgttgtgtttcccaattataagaggttgcaagtgtaacttgattctatacacccatttgttagtgactatttgcatatcaagtgatggtggaaccaagtctcatgttttgtttttcacaagagcaataacctcaacattcatagccttgttttacacaggattgtcaaaagctgctttaagagatgtttgttcagcatggaaaacagtggtggcaaggtaagacttgggtttgtaaatcccaagctttgatcgagtgaccatagggtggatgttttctgtgatttgagtggttgtaatgtgtgaatccgtgcttgagctttgagaagttgtgtcattatttggagttgaattactatttgagcttggagaaattgtactaggaggagtaaagttttggctaaatgactcagagggggatgaagtggagagagaatgggtggggaaggaggtggtaagggtgttggagtgtgagtgagaagaacaattggaataacataatttctagcaacaactaatataatagtagaactataggaagctggagagttagctgggaacaaacatttatatgagaattcaaactcattgaatataacactgcaagccacataaaccctgccactaggatgcaagcacctatagcctttggaattcaagcagtagccaaaaaaacaagcattttgtggacttaaatgatactctgtgattttcataaagtcttagtaaaaggaaacaggtgaaactaaacactttaagtatgttataattaggggcttggtgaaacaaattttcaaaaagagagacaaatttagtaagggagatggaagtctattaattaaataagttgtagatgtgaaagattgccaccagaatgtgaaaggcattttagccttggcaagaaaagtgagactattatcaacaacatgcatgtgtcttctttcaacatgaccttgttgttgatgagtgtgagtaaaagagtttcttctaacaatgccaagatgttgaaacattttgtaaaggggttcaaattctttaccaaaatcagtttgaacaacttttattttaagataaaattgtctctcaacataggaattaatataaattaagagatcagatgctttagattttgttttcgtatgaaataaccacacaaagcatgtaaaatcatctacaaagctcaagtaacatcagtaaatattagtgggagtataaattgaagggccccatacatcaccaatgattaattaaggtgtagaaattttatttataaaacttttgaaactaaactggtgtaactttccaatttgataggcatcatagagaccatgtttactacaacttgtattaggagaaatactaaacaaaaattagctaagatggcatgataggggtgtcatatagaggtgaacttggacttgtcatagattgcattgctggtaatagtgaaattataggtagtaggattggaattctttgagagattcttggagagattagaagactttgagtaagggcttgaagtttgtatagtccatcacaaacattatcccaaagaagtacttgcttggttctcttgtcctttataagacaacagagattgtcaaactcaagagtaacattattatcattggtaaattgagaaatactaagcaaattcttggtaacactgagaacatgaagaataccttgcaaaattaaagccttatgagtatagtttgaataaaagacatttgaaccaatattaagaatgggaagagtattacgattgccaacaacaactttaaatttgcctttgtagtctgtagtgtttgtgaggtttgttggatctagagttatgtgataacttgctcctgtgttcagataccatgctcttatgagatcagatgaggttgtggcttcaaaaagaagagcttatcgtggatttggggaggaggtggctgaagtaacatcactggtatcttgttgtccattgaaagttatgtcaaacatgtgataacattttaagctactatgaccagttcttccacataattgatagattggcttattttctctgccacctcttccaccgcgataagaaccataatttcttctgccagattatccaccacgagtgcaattgctatccatgttcaaatttgtaagattagcttgcacatttatgagagattcagttgtgtgttgactaatcctcatctcttgattgtgaagcatgagttgaacttcttagagagaaagaaagttagatctagaggtgagattaatgacaacaacttcatattctggtctgagaccttcaagaatgcacaagatcagttccccatttgagataggttatcctgctgcagattgatcatctaagaaatattcattaatctacatc

SEQ ID NO: 20374 - DNA, 4417 bp, Cannabis sativa
agagagagagagagagaagagtaagaaagtaaaagactcgagctttacaatgttgtcattgttgggtgacaatagaaggaatacgtgagtgttggggtaaaatcaatggggtccattgagagtgctttatgtggaagaaaagtcaggtgtgtctcctctgaatttcccaccctcaaccatcatcaaacacaccactccgcttctctctcctctttctaactttgcaggtattaccggtagaaaaaagcgtatttagattgacgtgtgggtgtgtactatagttatagttagagaaatttcctgagcttatcagatttttttaaaaaaaaaaaatggatcacgacatgagtattaattcgtatccaatctaaagaaaaggaaaaataggttttaagacgaaaaagaaggacgaatatgatacttcgactttttttttttattatttttatttttataattatcactttaaaatctaattccttcctttcattctattgtgtttaatattcttttccatttttagataacaaagataacaaccaaatataaattatttatttttaaaagatacaagacaaaaaaaatatatatttccacttttccaactaattaatttcaacatcttttatacagtgacaccctaaaaaaaggtgtttatctaaaaataaaaaactacctaacattgaagaagaaaaaataaacacactcagctgccatgtcttttttttcttttcctttctttgggatggtgagatcaatggataattattaactcattaggtcagttcagtataataaaatatacatttctgaccatatatctatataggattctcttccataacatatacttccaagtattggtaacacatcaagtaataatagtctctttcacaaaatataatagatatatgtatataatttttaacaatgttcttctccattggtagattatcattcaaaaaaaaaaatgtgggctatcttttggatttaattaaaaaaaaaatacaacaaacaaatctcatatgtgtacatctttacatatatagatatatattcgtatttgtgtacacgtttatgattattatagtaatatagagtaggggacgcgttacactgaaggagatatgatttgggtactttcttttttacaaaatagaaattaattaatagaaaagcatagaggttaattttaaggcactttgccattattcttttgacctttttttttctttcctttcttttcaaaaccattataatgtataatgatggctaatgttttgaatacaaacccgcttcttggcttaatataggctctaaagaaaagaaattaagcattgcaaaagtgttagtgggaaggctcaacttattacttgttgcctttttttttttagcttgtacaggtttgcatcctttctctgacaaactcaaagatgtatataaaatatttgtgttgtatatatgcatatatccatatatgctggttattagatgaaaattatgggctgtcattatatcaacttcaactttagaataatttggattttgacaagtaagaacaaatgtaccgccatcatgtttcatgaataaaagtatggttgagtcttggacttagataggaaaaaaataaataaagaataattaaaatacaatataatttgtaccagaactgacatttaaaaaatgtaatcaactttaaaaaaaaaaatattcaaataatatgattataataatatattttataaataataatcataaaattcaacactcgaataattttattttttgattcatctatccaaacctatgtagtgttaacaacccccgtaatgttacttacaaaagaaattaaaaaaaaaaaaaagtatatatttgattcccttttactgattaaattagggaatatattcttgatattttaaacataaaagcttaaaacaattcctgtattttaatatttacaactagaaaatccaaagatccctttatattgaccgatttactagtaccatccattttctcatattacaattagtgcagaaattggcactgaattcttcatattcccatattaaaacaaaaagggtcatttttttgtatgggaaatgtatgaaatttacaattaaaaaagaaaataagaaaaagttaaaagaatttgcatgcatatttttaggtagtaaatgtttttgtccatattgcatgtgagaggagtagttgggcctaaatgcagtttagttggggtgatgctacaccaaagcagtgggcccacataccacaacccctttttaccatctccatacgattaaatggtctaatcttaaggcccatatataacacaaccacctaataatgtccctccatatgtttttggttactattatcaatgtagggaaaccagctatactatcaagtatcaataataataaatcttaagtgatgattattaaaatccaatatgaaaaaatagacagagcaggtattaattgttttttttttctccataaactgtctaagtatatattcatgtacttgataaaaagagactcaactaatttttccgatttgtacatgaattaataattttaaagtggataaatgagattggacttcatgaagaagacatttgttttaataattgagctaaaaaagagaagacatattctttataattaaaaaataatagtattttagtaagggtgataccaacagggtaacagtgaatgagatcgatggtatggtatatccaagttttgtagtatgctaaaggagtcaatatattgtttttgtttgtagtgaacaacgttcttaatgcttataatataatgggaccacaggaccacttatatacgaataattaatcactatgtctctttgttttagcagcaatacacgtatttgactatgatattttcaaagaaatgtgtggaaaaagacttgaaggggcatcataaaatatttatacaatttatttctttggcatggtttccaaaagcatgcaattccagattttatatgttttttctttaaatgcttattttttttaggaaccatcattgaaaaaataagataaatgatttcaagttttaatggaattttcaaaagataaaacataaaaaaatctagtttgtaacaatagattctacatttttatgatttaaatggctctttaaaactaaattatcaaatggcaaatagtaagtataactttatttcttcatttctaagtaaaagtaaaagttgtaccgaagaagtaaatgtcatttttcaaccattatataaataaatgtgtccgagaagttcctcacaatattttttttaggaagattggctgtcaagactagagctaactataaataggtactgtgcatggcacaaaatcaattgagtacgagctgctacgaaaaaatatgtatttggtatgacatgaaaaaaataaacttaagcatgacacaacaagtctatatataatacatataagcacaaataaattagtccaaaaatacacgttaaacttttattataatttgatgataataatattagtaatagatatgtatttactaataaatattcaaattttaatcattctaattaattttttattatataattatgtgtaaaattttataaaaaaataatataaaaataattaaaactgtaaaatatataatttaataattaactgattaattgtaaaataaataatagaaaagtgggagtctgtataaaaaaaatgaactgacccatttatgagaaacggaccagaagtatagcatgagttcgagaacgacacgaaaatataagtttacggactgtgttgaccttacccttggagcatatccaatgatacactaaatttagtgttacactatcactaccacaacactaaaaattacactaaaaaattattctttattattaaattaatttttttaataaaattaatatcatattaattagcaaaaattaacacaattattatatttaactaataatttaaataaacttactaattagattaaagataataatgttgtaaaattggctaaattcgataaattaaaatatttacaataatataaatattataaggttaatttacaatgcatccatctaaataaaagagtcacgcgacagaaagtttgaattttattttcggcgttttaaattttttaaaattttcgatattctgcaaagatgtcttaaataactataatgtacacgaccataaaaaaaagactaaataaatctctcgaatgccaaaacagataggagtatatcagtgtgccacttttaaagaagtgcattgttttctgcgtgttaaatttttttaatgtcttaaataactataatatatacgactatataaaaaatagactaaaaaaatctgactggtgactaaacaaataggaataaa

SEQ ID NO: 20375 - DNA, 6231 bp, Cannabis sativa
  modified_base (4154)..(4166): a, c, t, g, unknown or other
gagagagagagagagagagcggggtgtttccttagggttttttgtggttgaggcggctgaattttcattagggttttataaggggttgataggttttcttatgggctgaagctcctttagaagtttgcaacccctttagaggcgattatttggaaataaccgcctctaaaagggtttctatatatttttttttcttttacctatggcaacacttttttttaagtgaatgagaaaaacaacctctgaaaatcatttttgtagttgtgtgggaatacatgcttcaagcggctacttacattcttaatgaagcaccttcaaagagcataagcaaactctaatagaattatagaatggaacaaaacctagtttgaaacatttctgtatttgacactatccttctcatgttctaagaccgaagataaggaaacttgctcctaggtcggaagcgtgtataattatgagatattcacaggagacttgaggtgcatacttctatagtcatgtggaccagaagatatttgtttctataaatgcaatctttctagaacatgattatctgaaggatcacaatgcgtgcaacgaattggttattgaggaaataaaaatgagcagatttttgaattgtcaactttagtaccatcagttgaacgaccaaccatggttgccacagttcctgaaaaggaaacccctgtacatcttcgtagtgagagggttgtgagacaagttgtttgctatgaatatgaggcactcgttcttgtcttacacaaacaaggttgatccattgactttaaagcaatcaatggatgaccctgactcagacaagtagaacaattttaaggatcatgaaatagattccatgcggacaaaaaaagtctaggagtatgtaatcctacacgatggggtaaaacctataaggtgtaaatggatttacaagaagaagagaaatgttgaagggaaggtttaaacctataaagcaaggcttgtagccaaaggctacacattgctagaaggtgcagattatgacgaaaccttctctcttgtggccatgcttaagtccttttatatttccttctccatagttatcacatatgattatgagatattgcggatggacgtcgagactgtttttttaaatgacaatcttgatgaaaatatttgtgtgtactaaccaaaaaggtatgtgtaagacggggaagataaaaaagtttataaatttcttaaatctatttatggattgtagcaagcctctagatcttggaatatcgcttttaatgaaataattaaaacatacagctttgagcaaaatgtggatgaagtatgtgtatacaaatacattaaaggtaatatagtggcattccttgttctttgtgttgatgacattctacttattgaaaacaatgtagaaaagttgtaagacgtaaagaagtggttagccaaaaagttccaaatgaaggattttggagaagttacctatgttctcagcattcgtatatatagagatagaaagagaagagcattagtactttcttaagaaacttatattgataaatttctggatagattctcaatagagaattctaagaaaggatagttatcgtccagacatggaattcatctatgcaagaatcaatgtccaaagactctgcaaaagatgaatgacataagaaagtatcctaatgcatcaactattgggagcttaatgtatgcagtgttgtgtacaagacctggcatatgctatgtagttgggattgttagacgttatcaattaaatcaaggtttggaacactagatagttatgaagcacattctcaagtatcttcgaagaatgagagatctcatgcttatggagcagagttgaatactactggatatactaattctcattttcaatcagataaagatagtcctaaatcaacatgaagaacaatattcatacttggtggtggatctgtagtctagacaagcaatgagcaaaccaatattgcaaattcaaccatggatgtcgaatatatagcagcttgtggggcatctaaagaagcaattcggttgaagaagttctacactgatcttgaattagttctaaagatataaaatctattgttgctctattgtgacaatagtggagtgatggataactctaacgaaccaagaagctataagagaggcaagaatattgagaagaagtaccatttactcaagagatatagtagacaaaggttatgtgacggtcttaaagattgcatcgaaatgtaacctagcaagtccattcaataaagacgctactagcaaaatcttttacgagtcatataaccaacacgagattttggggaaatgctcaattttgtttaagggcaagtgggagattgatatggtttatgccctgaaaatcctacaaagacatttatgattataaatattactcgaacttttgaagatatgcttgcacattaaattattaatattttatattgaataatttatatgaaaaaaattggaaaatttcttatccatatatagagttgtgacttgtattgtacaaagaattaagataactggccatgaataaaatagttagcaacatatcaaaattatagaatttttaatcaacagttactagtacaattcattgatgctcgttatccaatgcaagcattctcgatttgaattattgtagtatgatatctaagtgaaggtgttgtatacaataaatattataaatgacctggaccgatatgtaattatgctatttttaccaaatatgtcgttcactataaattaattcatatcaaaattatcatcaattagtagatgggtctaaattttgagtaatcatgaactcatgttcttgttattagtatctttgattcactcactaaagtttctcgaagaagatgattctcaaaactactattttgggaagctaataatgtggatggttgggaacttgatttagaatcatggaatcctgactttccaaacatatcgaatgttggttcccattaagtgtgaattctagaactaaaaagttgtgcacaaatttaaattggatcaaaattatactttatctagtgaattaatggtactaatggctaaagaaataattagacggataaaataataatttgaccaaaactaattatgaatcgatacaaagaggctaatcactagtatttattgattaatatatatggatactgtagtaaaactcagtgaatataattttattattactaagagttcaattctatatttatagtggagtaatcatgaaattaataaataaaattatttggttgatgatcagattcaataaagtatctaatttattgaagcttggtattataagtccatggtcctcagatgatgttcaaaaaaatctattcttaattagaaaaatattaattatttattttgtaatatataatttattttaaatttattaaataaataaattggggagacaaagtatttttaagataaagacatcactattgtttggttaagataatggtagcgcttagcactgtgtaataacaaaatgataggcacttatggataatgatggtcctcgttagatttgtttttagattaattaattaatttaaaggtaaatatttatttaaatttgaatttagttacagataattgatatggttgagatattccctcaagttgttgagatattctttccaagttgtttgaaatattttcaagtggttgaggtattccctcattcggttattagatatttagtttaatctaaatatttaaattcaaaataaatatctataacaaaatcagtcatatatatttattcaaacatttaaaatattattattttttagttgatatcttatttacttcaacctttattattattttattagtttaaattataatactagtataacctaattattatatacatataatttaggatacctaaaaggatgaagccataaaattattttcactctagagagagttcttgctcatttgttgagacaaaaccaagaacttcattatttagtgtatcctaattatcccacactgattctcatatgtggtgagaaatttagaagatcaaagtgtgagtttttttatcgacgttcttggatacaactgttggaatttatgccctaaaagcaagtaannnnnnnnnnnnntattagagaatatatgaaatataattataagataaattatatattaattataatagtataattattaaatatatgaaaattccttattcatatggagaaggtataataattttataagaatgtacaagagaattaaaattgtacgatatgagtaagctaagtcgatagtgtattgaagtattgagaatctttaatatggtactgctatatacggtttactatacactatgcttgtagagtgtgtgatttgattcggatcacatatgtagatggacatgtagtaaagataatgtatataattagaatatacatgactggaccgatatgtaataaacatatttcattaacttgccaatttatcatatcacaatgatgataattagtagatcaacctgaatcttgagtatacataaactcatgtttgtgttcattgagttctttgatttactcgttaaagtttctcagagaagatgaatcttccaacttccactactacaaaacaaccctttagaggctatttttttctacaagtttcataataagggaagctaaagggtgtataaataattgcctattaaaaattgacatttagaggcaatttttctataaaaaccgtagaaatagaattggactataccatttagagtcagttgggggagttatatttctaaggattatttaataatcttatgtcgtcggtcattaggaaataaccaacaacatagtgtacacacgataaattgacacgtgtatcttatgccgtcggttatttcctaataaccgacgagataggattatataaaaaccatatcagcttcgtcttctccatcttcttcttcctcacgaatccaaaataccagcagcaaagaaaaccccaaaccctcgccaccttcgccaaccacccatattacagcccatatctccctcatttttgcatcatttgagcccattttttttcaatcatcttattttcaatacctaaacacatacacaaaaaatgttttgatttttcccccttttcacagtaaactgaacccatacaaagaaagtagtggttataactccgaccaccaattttagtacataaaatattgatatttaacatccattaaggtataaatatgatttttattaatttaagtaatgtacattgctttattttttgtttttgtaaatttttttagaattttttcatattattaacattattgttgtatatgtgtatagtggctggactttttgcaaaattgatcgctggattgtggttataaggtaaaaatatcaaccgtaatatatagtatatatatgtattttatattttattaaatatgtgtttatgggtgcactcttaatgggtattacccatgaatgggtaatattagaaaattttgagtttttatgattaatttttctatttaattagaaaaatttctcttttttacattatatgggctgggattggtccattagctgaaaaaaaataataaaattttttttgtcattgaacaaaacagaggatccaattggtaacttttgcaaaatacagggtccaaaatagtatttattcttatttttatgataatttcacattatttagaaggattgtgagtcttcacatatgcattataaataaattacttcttttgttatttttatttgtctagttaattagttctagttattaaaatgcatccattctatagtctataaaggaaagtgcaaatgagtttagctgatttttgtatagttttttattcttttctaaaaaaaaatgtaaaattttatattttgttccaataaaaaaaaggttatttgatttcttaatcactttacttttgaaaaaaaaaattcacatggtttataaagtgtgtgagtcttctacataaatacttaaaataaaaataaaaatcttttgttcattgtatttgtttaaaaagtagtattatatttttttttcttaattgtgtgattgatttattcgcttgaaatgattttgaagtaagagttgtaagatactatttatttaaatgtagggatgtaaacggggcgggacgggtgcggggat

SEQ ID NO: 20376 - DNA, 3451 bp, Cannabis sativa
aaaatccacttttaaaattgttaccgaatagagcctaaaagtatactatatgaaggtagtcatagtgatgtttgtcacgggatagtttctaatgtgagcggtaatttaattttactacagggagcattgttggctcacctgaaactatacatgagttgcttgcatgctttggatcgcatagggagtaacccactcttttcagggtctgttttgattagaacagttggtgatgcttgattatcaaccatcacctttgtcgtcatgatgtttaaattttgttgacattgtttgagcttggctgctttttcctcccagcattcatctcttagtgattggcgtgaaaaactttgaaggttgtatgttgaaggtatctgctgtgagtgacatagatcactattgaggtgtagtgggttattgcttgtgtgcttggggcacaagcatgagctcattttatgatcataagtgagatgactcactgtcaatgagtagtgcagaaaaacctgctagatcttttgtatagggacaaaatcacaagtttttgaagaacctggtttgatgattttgactcataaaaccttgttaaaaaaacctccaatggaggaaaacgaataaaaaaagattggattaaactcatgctaggtattgcatcccatacttaggaagagtttagccagtggaagaatacaacaactggggtagcatcccactcctagagggttttgtttaatcaattaggaaatctcttgtggatgcagtgtcgtgcttctagagagatttttataattaatgatgcttctcttttctttttgatttttctgatttgaggaggaaaactgacactttcactttagattgataaacttggtttttgtattcttatgagaaaccaagcgcttatatcatagtagtgcttaactctggtgtgcgaaattctcgaatatcactgcagcccctggctcctgtataccagggtaacacctggctcccgtataccaaagtgtatgtgacatacatgactcttgcgtaccataatttttatgaatgatcatgtaccgtgcatagatcccgtatactatgtcttattttccccccgagtgactgaagaaatatcttcattggtcacttgccatatcgaatcccattgggctttcttgatcacgagtctcagggaattgttacatgtgtgagcactcatccacttatctagagattcgtgggttggcagtgtttaactcactaaagaaataatcatagttaccttaagaccaaatctacaagctttctttagtgcttgagagtgttgtgtggtccgtgagctgcaattgattaataataataaagtaccaacaagctttactcaacatttttttcattagatattaaattcaattacatcacaatgagctaagttgaaagaaaaagaagtagtagttgtagacttttgttttccatcaaagcttagttgaagtaatccccactacactaatcccatgttcaactaatattgtaggggccataccttagtggtggacctcctaaagatgattttctcgcatcttgttagattaggaggcaatcaaattacttgcacaaggttaagtgaatcttactgtgaagcgagctgtttagagaacagatgctgtattgatgatattgtcttagatgctccccgttccagtaccttggtatcggcactagattcaagtggcagtcatagaaaactccaaccaatttgtcccgagttctaacgcttctatgagaatataaggtccctccgtctcttaatgggagtctttagtgttgctttcttggtcaatatctttagaagactcataggacacatcttcaatactactcccttatgactgataattgttggaaacaaagggagaatcttcgtcactaccgctctctcttgagtcttcttgggaagtaaggggagattcttcatcattgatttcttgttcgagatattcttaacaaatagcaggggactcgtcattaatatctccctactcgagttcatctagggaaatagacgaggagtccatttcagtggaggtaataggtgttgattcttcttaactttctagtcaatgttttttttgagactcaggaaatagataggtggtgtaatcagttacttttggttgagcaactcttttgaccttcttgacgacttcttcaagcttaatgaaaccgtcagctctgtctaaaagctcttgaatggtgtatacttatttgagctttaagtctttccacaatggactcattattattagtcaagctatcatttccatgaccttggcatctttattgagcatcttcgtctgcatggtgacctctacgaatcgttgaaagtaatcctttagaggttcgtcttcttgttgcttgatgtagaccaaatcgttgggcttgattggtctgtgccttgatggagagaatttgttataaaatgctttcttaagcgtcttctaggaattgatagatcccgaggagagcttgagatacaactgttgtgctacttttgatggtgtggctggaaagactcgacaatgagaatcatttcaaattcctaacagtttagttttgtacttcaaagttgtggatgtgagagagagggtcttccttttccaatgtatggatgccacactggatttttgaactatgaaaggatctccaaagccttaatttgatttgagagaggagaacaccgctctcgatctaatccgtactctattggctttggagtagtgatacccttaactagagcgacaagggtgtcaaattcaaccctacacactatggtgatgtgtgtatcagctggccatttctttctaatgttgttatgctggctctttttccttctaagttgatcaaaggcatttattgacttaggccttgtgattgttgtcaggtcatgtggccttgctgaaaactgtgggaatctatcctgtatgaagatggaattatatctcgggtgtttgcttcgtgagtagctgcttgtagtactataccgactattcctttagaaatagtcttcctcaaagttacatgtgtagagggagttgaattgattgcttaagttaaacatgtctccatgcacccatgggaattattcatactgtttactgttaggacctcaggcgaagtacctacaccaagcacctcattcatcatgaaagtatttttgagtgtggagtagttcattgaccttcaccctccgaatctcatactcttcactttcatggtagagcttttgaggtcttcccctaagtttaactatatgtccctttccctttgcagggtcacggggtagtcgagtcattatacttgtgaacaaaatcccatataggaaattgttttcccgcattgttcgaattactttgaacaaattgcggttggtcctatcaattgcgtgtggtagacttatatgttgggttttatgccc

SEQ ID NO: 20377 - DNA, 4468 bp, Cannabis sativa
acttctgaaattcccagaatcagtaaataaaaaatagaaatatataaaatattgaattttctagtctaaaatattttgaattttctagtctaaaccctaaacctttataaatagaaagtaaacaatcctgggataacaagggttttcacaaataaacaaaggcatatgcttgctaatatcttttcatgtatttttctcaacaaactactgtacctttataaatagaaagtaaacaatcctgggataacaagggttttcacaaataaacaaaggcattatataacataaaaagcgttgttgtcatgaaagttcaggctctttaggttaactttggttttccaaaatgtcttttgtttacttttgactcagggttataattccaaagatcaaagaaataatctatttgatgattgggatctttcagaggctaggagcactgaattatctgaggtatgtttccgaagagagttctgacatttgtaatccttatattccatgttgagccattttttgttcacaatggaaaatatttaggagacagtactgcatggatgacttctctctaccatcctgtgttttttaaatctctaccccattattttctcttattattcttcaagtgtcttcttttttcttacaatatatatatatatttatagatatatatggtatttaaataactctattattcttcataattctttccaaaacagagcacagatcaaaaacatgtttcctcagatcaagatcaaagctcaatgcttaaggtgatatgtaatcaacgagatcgattcaggacccgcttgcgtgagacggaggaggtttgatatcttttgcaagaatttaattcaacctttgtgaatattccttttgtttttttttttaatttttgtatcttgttctatttggaatattctgttcactgttgcaatttttcttagctctatttaatgctttaggaaacaagacagttgaaggagaagatagggcagctcacagcagagctggaaaggtctaaagctgataatgtcaaactttatggaaagattcgctatgttcaagattacaatcttgagaaagtagtttctagaggatcaaagaaggtgcttactcaatgttgcctttgaatcttgagatgatgctttaaggtcattgaagctagggtcgggctgtttttgatttatttattgtttttgataagcagaatgtggaggatctagaaagtggattcagttcagaagttgaatcgaagtacaagaaaatctatgaagacgacataaatccttttgcagctttctctaaaaaggttttttttttttttaaactttttatctttatttttatccttgtgacaatatgtggtgttttatcatattgaagtatgaacatgcatgatgttttcctttccgtggctttcttatctccaaattctccaaatggaatacgcggtctgcttttcattttatttgattatttctgtccaaattgtcttttttaacgtattattgactgacatcagcatcgaaactgatgcttatagactagaggctcaatttcagaataaattacttgaccaggctaaggatctattaattatttctgtttattttcttccttcaagtccagtttcacggatatgcacttctttttatgtgcttagtaaaggagactagtttaagtccaaactcgtgtttcttttttgtccattctaggaaagggatcagaggtacaaggagttgggtttcagggatcggatcacacttagcagtggacgttttcttcttggcaacaagtaagatcatacagtattactttcagaattttgttatttaattccatgtgaaatattgacttattctatgtattaagatatccaacgtctaaacttgacccctgtatctaaatttcaaggtaaaagattctggcctttgcgtccagaagtggaagtgtttaaatatagctttaaataaatgtttggggtctcatttctttatccattagcaagtgtttagacacgaccattttcttccaccatgcatgctcattgttctttttttttgcttaaaacttcatgatgttcctgtaccatatggagtggaaaaaacaatacattaaaaatgccaattcaactaactcttactaaatctactctaacttcagtttatctcttaagtcagcatttgtttgtttttttccctttgcttttccttatcgtatctcaatacaagagatccaggttcaaacccctcagtaattataccggtttagtttggaacttctccattttctcttaactatttttctcttcttttatgtgcatcctaaaagttctctacttcattttaaaataaaataaaaagcctcaaaaccaaaaggaaacaaaacattaaagtctgtataaagattgtcttttatttatgtaaatattgttttacttttactttaatgttttataaagatctcttgagaaaagactaatactataagacacttaagatggcccaatgtatgacactctatgtgtcctccacccttttaagagaaaaggaaaaatgtgtccttgaatttaaaattagtttcattaagttttattaaattttaataggtgatgtccaaacataaaaggttacctcatgtaacaccttaaagtgtcttagggcaatgctccttaagaaataaaagaaagtgaaaatagagtttaagagtttagctgagattttataagtagcaggacataattcaattgggaacattgttgaaattaattgtgtgggggttaatacattaatcgagtaattatgttgcaggtatgcgcggacatttgcatttttctacaccattggtttgcatatactagttttcacctgtctctacaggatgtcagctctgagctacctaaggtatttttctttgattttatataaactttgaagagcctcctccattgctccttgatatgatccgctcatctcttttgatttccaatgattttgcagtaatggtgccgaggatgtcggtgataaacccctgaccctgaatcttcgacatgctttctaagattaatggatgaaacattaaacatcatgtacaatgtacatatgtgataaatttaccttttctgggctctttgctagtttcaactctgtaatgcatgtagtgttacctttaaccttcttcatgctataacacgtgtcaaggcgttcaattcaaatttactgttccattattataaattttttaaagtaaaagaaaaaatatataaaatttggtttatattcccagtgaaaaaatatttaaaaacttcaagtccaagttttttcatgtttgggaggaatttggcttatatcactggttctcttgattgcttttaaaatggggagttttcataaatattgaaaaaatttatagagtttatttttatatggtataaataaataatgcaaaaaagatatgagattaaaaaataattaaagtttaaaatataagaaactaaacaaaaaaaaccataaataaatttgataaaattctaataataagaatcagaaagtcgttggagaagttgctggcactagaaaaatcatcaaaaaagttattattttcgataaagtctccaaaaaagttatcgaaagtagatgtttcaggtataaattaaaatagaactagtcaatttctaaaataatgaaatataaattaataaaattaatttcacaataaaatgattaaaaacgaataatacataatatcacataaatcagtataattttttgtttttttaaaaaaggtaagaatcaattctaaaaatactgagacgtaaatctaaacgaaaccggttacataacaaaataaattaaacaaataacacataataactcaaaatataatataaagagaccagttatatttatcaccttgttagaaatttgagacaaaaaaattagttcagtaaagcaaagaagataaaaacttacacacaaaaacttgctaaatagaataaataaataaaaaccggttctttgaattaactaaatcaaaaattagtttttaaaataactaaattaaaaatcagttccttgaattaattaaatcaaaaaattagtttttgatataaataattcaagaaccgctttctaaaatgacttaaacaaaaaaacagttgcgacataaattaaaatagaactggttctacaataaaatgactaaaaataaataatacataataactcagaaatcggttataattaaaaataaaaataaaagagtgaataaattccaaaaatgttgatacatcaattaaaacataaacggtaccataataaaatgagtaaaaataaataacaaacaattactcaaaaattgattcttattaaaaagaaaaaagggttaagatgcaaaatgaccctaaatttggtaaccaagttagtaaatgtccacttttaaaaaaaactaagaaaatggccaaatctaataa

SEQ ID NO: 20378 - DNA, 3731 bp, Cannabis sativa
  modified_base (1114)..(1144): a, c, t, g, unknown or other
caaattcccactaaactaacatacttttaataatgtgggtattatttttttattttattactaattattttttatttttattttaaaatgggagccttaagtagtggagaggcctaaaccggtcgcatatagtaagactaaattagaaaacaatatttgaggcttatggtttctttgttagtttttaatatattcactctataataaataacacaaacatgttatccatttattttttaaaatttatttctttatttatttttaatatattatctatgtaagaaaaatatataaaaaaaaataaataaaatttggccaggttggcgagcaggttcgggttcaactcgaaacccggtggccataaaaaaccagccagtgaacccgcccgatggggtactgggctgaacccgacccgcccgaacagaatgggtttttttaaaaaaatttcaggttgagcgagtcgggtccaggtcaaacccagtcaaaatatttagtcctatctggtcggatgttatcggaacatcaaatatgaccttcaatatagattttcaccttacacaattaattaggtgtataattttgcatcagttgtgcttcaatgcaatatttgtgtcggttggaagcaccattgcgtcagttgtgcgctgacgctaagttgtgtcggtacagaactaacgcaagacatactcattttaaaagaaaatacagaaaacctaatgggcttcaggcccatttaaaaaacctaaggaaaaccctaatttattatctctctctctctctctctctctctctctctcccccaacgcaccaccacgcctggcgcaccccatctccatctccgtctccatacacttctccctctctcactactagccacattgcaccactccatctggactgatccccctacccccatcgtcgtcagagccacactaggtggagccatctaccccatcgacttcgtcagcccctgattctctcttctttttctctcccctaaccacgcaaaagctgctctctccctctctaaaatcatgcagaccaagtcgcacccacaacttattggacctgctagttttctctctttccctgtctctctttctctctctctctnnnnnnnnnnnnnnnnnnnnnnnnnnnnnnnacacacacacacacacacatgtggcgctgtagccctctcgtcgtcggccagcaatctcagatcttgacggagctgtgtttcatatgtgtatcatttagatgttttaataaagcttgcttagacttgtatagactgatagagagatataacgttaatctatatagtcagaatcaacctcactacttttcctaacattggcttttttctcttagtctttgtaggttgtactattgagattgattcttactataaagactttgcttgacatatcttttaattggtaatattgagctaatggtaatattctttctgtctatcatagtagagaaagatctcagaagggaattttagaaagacaatattttattttctgaacttcttttatgatgttcagttgccaaaaaccgaattttagattaaactttgaaaatatctttgctttggagatgctagaaaaaagagaattttagtttgtagaggaaatttattatctgccaaaaaatagttcagtggttaataattaattaccaatctttgtttttctgtagcttgctctgtcctgttgttgacataaaaggcgtgacatgcccacggcgattcagtgtcattaatcagcccttgtgatttaagttgctgacattctttgctcgccattcgttgatgttcaggattcattctggggtggtttgctttggttggattgatatcctcgttctgtttgaattgtagagagatgtagaattctttatttttccataatgggtgattgcacttcgttgagaatttggagtgagaatcacgcataacctctgtattagcttttctttgattgatgaaaatacgtcttgcgtcatgtgaaagtaattcgaaatttgctcccattgggtgaagaaattcttgtaggtcaacccttgtgggagtattctaagccttttcatttttgtgtaaaggtcaaatcccactatgagttcctttcttaggagttttgatccaatgactttttggacaacggaacatccggggaataattgtagctttattgacttgctaatttattcggtgcagagtacttggttatttgcaacttagaaatactactttttcttcttccacagtgttgggagcaagatgtcggggttcatgattgtgtattatgctcctatatcaaaaaatgcaactactttgattggccttgagtattttattaggatgacatgcatttttcctatctggattggtcgactagtggtgattgtatctatgttgaaaattctaacacagcttttgacgtcgaagtcgaaacctggctgtaatgcacacatagtatgtggagatattttgtcttcgattgaaaagactgattcaatgtcattatcggagagagagataccccaatggcgttctatatgtgtgttattattttgacatgtcagttttacttttaggacattgttttgcaaagtagcccttctttcctcataagaaacactaatttgaggattttaaggatgtttcttttttttttgaaaaaatttccaaggagtcctattctttggagatctatacttaaaactcttacaatattatcaagaggagatgaatcgctaaaaattcaatcatagctcatgaaattgtgcatgatatgaaaagaaagcaggggagtatggcttatgttggtatcaaatgtgatatgtcaaaagcatatgacaaaatggaatggtgttttcttgatcaagttcttatggatattgaatttgatgattggttcagggggcttatttctcaatgcatttctatagtgagtttccagattttagtgaatcgcagtttgatacaaaaaaaatgagcctcaaagaggcctaaggcaaggggatcccctctccccttatcttttcattttatgcttagaagttttgtctcagctaattcttgctaaagaaaaccaagggctgattcaatgatacaaattcaaatgctccagtccttcgatttctcaccttatgtgtgttgacgatactatattttttacataagttaattcctctaatatggtgcatattaatgatgttttggcaaaatacagttattgtcaggccaatagattaatttccataaatccataatctttttcttaaagaatcgtggagagcacatccatttgagaattgcagaggaggtgggctttgaagtgttgtccgaggaagaaaagttccttggaaatcctttgtttgttaaggggaatagttcgagagattttaattttataattgagaaagttcggtctccgttggaagggtggaaagctaaactcttttcacaagcggctagaactgttttgattaaaaatgtgatctcagctattcctatttactctatggccattttttctctcccagtcacaattatcaattctcttgatgctcttatcaaaaaaatttggtggaccggaagtagcaaagaagctaggttgatatcactactacaaaaatgaggttcaatgactcgttttgagtgactctatagagttttagtgacacttcactgcgtgtcactaatgtgggtgactggaaaggtaatatttagtgac

SEQ ID NO: 20379 - DNA, 10275 bp, Cannabis sativa
  modified_base (1046)..(1047): a, c, t, g, unknown or other
  modified_base (3573)..(3577): a, c, t, g, unknown or other
atctaagatcctggtaacataattccaacattttctacaatagaaacccagaaattaaagatacaaagctaaaagagaaaaagattgaagactttctaactgtttgaagcctagacatagtccagacaaagctgttcggatagctatgttagaaatctcacgactgatttgaagaaaattcctttttgctcagaatttgtttagtggagaaaatggtgaaagtagattatgaagaagttccagccttatttataggcaatttggtgaaaggagataatcatttcgaaatccttcagacgtttcgatttccccctacaaataaatattgggaaataaaaaagcaatcaagtgtaaccgtcaaagcgtgtaatggaaaccgtgtttcgaggcataaattaagtgagagcattaattagctgaaaactaaagagacgcatggtcagactcacatcgaatcacgaacagacgcacccaacacgtgtcacccattcaaatgtaaaggcagctcggatgaagtctctacgcaacttcagatgcctcgtgcaaatttaaggggctaatgttatcctaatttttgcactctgacgtggcatcacatgctggtgatacgtggaagcgattccccatattttcccgaaggagatgctccgagcagaaccccaaatatacttgcacagacaaagtcctcctagttgagcagtggacaatccgaacagcgtatcaacacttagcaacttcagcatttgcatcctgaagcacaaaaccaatccctataaatctgggatcgtatcatagagatatggcaagttgtcgaaatccctcaattagtgtactcattatatgtaatgtgtaatcttaccaattatagacattgtaaacaaaagagaaaccttccctctggcacatagccctgtaaatagtaatctattctcaatgggcaaagggtcaaaaaattatctaagattatacttagagatttcattgtaagagctctaagagaagaatcactgtattctttgttcttaagtcaatacaaatcaaggggnntaggctattaccgaactgctcagggccgaacctctttaaaaactttgtgttctttatttgtcttttcatattatatctaaattatatcacttatcacttaatattaagactcagtgtcgttggctaaaagcgaggtcaacatctaatattcgctaatcttagtagcatttcgaatgaatgttaccttttaattcaaattcctatttctacaggaatttcaaaaattacgtttaaaggtgaagggaaaagatacatttttatctttttcttatcatttacctcttcctttaaagctttaatttcaaaagactactaattgctcaaggattaggagattgaactcatttataaataagagaactttcaatcaatcaactcttccacgcctaagcctttgaaaagctcattggagtttcatcttcgccaatctttcaagtgttctttatcttccaaggtagaattcttttttttttttttttttttcggagtcacccttttcttaaatttttttcttcttatcctcctttgttgatcctacttcaaggatcctcaaactcccaaaaacccttgaattctttatctaagaccttataagttccaaaacacttatccttgtgaattgaaaatttcctctgaaattgcttggccttttcacaacccaataagacttctcttgagttgtatgcaacttgaaatcatggataggatgatgagaagtagaaggaatatgatccccatgtagctcaattcattagagcgaagttaactatgcctaattctaaaaacttagacaaggggtgtggtgggaaggtagtggcaaatgagcttcttaaagctaccattgaaaatgatgatccaagagattgggcattcaggctaggacctcttgtgtttagcactcttacagaacgtcaagctcaattaatctgggatgattacactcttcctaaaactgccaactagaagccatgatatggtggtcccaatggctcctagaacacttgcagtactgcttggttgagatggacatgaatgtgggtgcttacttgcccttgaatccatggttcatataaatagaagaattctttagagtctgtccctaccaaataaattataatggctttagaatcattgctacctttttcatcttttactgcttgagaagttggcctgtcctaactccccacaaaataaacttcctttgtgacttgaaaagaaatcctactagaaaagaagaatgcttctataactttacaagttcagcccatacatagtaaacattaccaaaagtaactgcaccttttaccaccaggaatacttctatactcgaatacatccatcaagacacataactttcgaaaagaatggtcctttcaaaagacttgctccactaattgacgtgaagaggagagatgatgccatgcttattgagattgatgtatgggagaaagatggaagaactctattcaatactgagaatctttaaaagattggactggtaatgtcctgccagcgagtgtatgttggtactatcttccctaatgaatcctggactatgccactcaagcaatgtgatgagaatgctcaaagtgcaactgccatcttatctcaaaaagtgtcgaaagacctgatctcagttcaaaatgacacaaagtatttagggagaatatctttgctcttagaccaggaagatggagaagttacctccactcgaattgctccatagaaggattgggaatcagttgctagctgatgctccatgctgtaaagtttaactttgctattttgcttctcttatgttgtactaaccacttgtatatttactttgtagacaatatgagcttcttggctggtatgtcatcttcttctaactcgaagcaaaaagttccagcactgaaggaatctgaacctccagttagggaagttgttcaaggtatacctactgcttgtgttgctttaaagaagaaagtaagaaagaggagtatacctattgatgtttctcctcttgcctaagactctagttgttatacccaaaatttagctggcattccagaggatgacacgtgtcaaccttggagaataagaatcaacaaatatcacggtaattaaattaaaagatattaaatggaataactcattaaatgcggagttaataaaacatatctataactcgctgactgtatagtcttaagcgagacaaagatgtacgaactattaattcacacattgatgagaaactatttcgcgtcagaagacacgatcataaggatgacatcaatagtgcatagcaaggcatcaacctcgctacgtataaaagagtgttgacgggatgagttggtagtcaaaacacttagcgtataatatgcattgtactaactaagtataacagttggaaaaatatgagtgacggatagtgaggcatccaccttgctattggaaggcatactcctggtaccttcattaatcagctcaagaaatctttcaataagatccactactccgtcaagtcagctctctcagatagannnnnacattcaaatgatgttggctactggagtttaccttgtcaccaagaactgcgattgatagatgaagcgttatgtatttaatcacagaagtgacgagatttacattatcaaccacagaaagacatgggaaaagctccagctcgctaccgggattatcgttgctattcatgttcccagcgagatgccccagctagatacactttgcagcatatctaaatccacgtcagcattgaccttgtaaaagtggataaatcacagatgtattattttcaaataataactgcatttatttatgtggtgcgtaattaaggcccacgatttcatggaaatattgttgtgggattcatatcaaattgtaattaattgcaaccctatgtcactataaataggggcagaatgtaccgaaaaatggacggaaaatccttgagagaaaagaaccctagtttgtattagaataatctaaataagattgactcgtggactatgcacaattttaactgcaaaacaacataaaaagctttgtactatattttcttcttttactttctattatttctgtgcaaaacttatcacgaaaataggcttattatcgttaatgaaaatctgcattaacagtttggtgctttcattgagagcctatgtgaaaaaatctaaaaaaaaaaccctcctaacaaaaagaaaaatctttctccatggctgataacggggcaaaggatgatactcatcctaaagagactactcaccgtcttggaaaagagccaatgggctcacggaggcctcctaattcacggacaacacgatctacacggtccacacattcaaaaaggacccaacatgcaggtggccaaaacccagaatcatggaatgaagtacccaacagaagcgttagtggtgctcaacccagaatcatctcaggcaatgtttagaggaggaaaactgacaaaatgctgagttggaacgggaggtagccgcagctagggtggcacaggaaaacaacgcacaaaaccaatctgatcatggagtgaggagaccacgaggtagacctcatgagcgagggtgcaggagacggctcaagaggaccctcagaacgctcaggaagaacaaactggggaaactaaggatctccctgaaaatgaacaaccaaatgaccaaccagagccttctccctgaaatgagaacagaaggcgactagggactaaggaacaagaaatccctcgagagaacgagggaaatcatgggacttaacctaggacatgtgggttgccaccgaggcatcgccaacatccttctcaaaccaacagggaaggggcacatacaaagcccagtagggggcatgcaaaaacccgtacccaaaggagaaggccggtacgtgaaaaggcgagtgctagctcgggatgcacaagaacctgtagtcgatcaacgtgaggaggggatggaactcgccgcagtactgattaagagagtacatgctcaagtagaactgaaagttactccagaatgaggtccatgagtaggacgaggttagtgtgtaactatgaccagcaacagccggatcttcgtaatcacttaaaccagaaaaaacctaaccttcaccaccaactcaatcaaaagcaagaggatcctgtccaattgcgaattaatgagttggaggataaattcaggaggttccgagatgggaatatggaaaacagtctacatatgactcggacgaggaactcgagcctttccatccagacattatgaatactgaatttccccagggattcaagaatcctcacgtctcgtcatacgatgggactaaaaattaaatcgcacactcgaataattttaatactatcatgcaagccaataatgttccaaataattttattccccactttgctagttggagcaacgagcagctggttcaacaaatttatccatcattcaatcacctcttgggaatagctgtctaaggatttcaagatgcagttctaggcagcaagggacaggcgacctgaggcatcctccgtcactaacataaagtagcagcgaggcgagatgcttacggcttacttaagtctttttagcacagctactccgagggttagaaacctggacgacagtatccagcttacttctcttcaggcacggatcacgactgatcttcccacttctagaggcgagctatgggatgacttgcagggtcgcccaatgaaaaacatcagcgagttcaataaaagagctcaagtgtttgtttgaaaaaagaagcaagaaaagagatgaagttattaaagactggcttggaaagtaaacccaacacagtcttaacaagtaccctctcaaccaaggctgacaatccaggggcctctagttcagagaggaaggataactctaaggagacagccaaggataagcaaaagcaatagaagcacgataaatacgtgctaatatgcaccgtttacaccgagcttaatgaaactcaagaaaacatttatcccgcacatgagcacagagtcgcattccgtaaacttgagcccatgaggcatgcgagacataataaagatgcaaccaaattttttaagtaccataaggacattgggcatatgacagaggaatgtcgtcagttgaaagacgagatagagagtctcatcgcgcgagatcactttcagaagtatgtgaagcaacaaggcgatggaaaaaactagcctaatccacccaataacccaggcaaccagagattacaacctcctcctcttgaaggagaggatattctggttatctcgggagggccccatatttttggggaaagtaacaatgcccaaaagagatatgtaaaagaaattaagagcgagcagtctccttttgctccgaaaccttctaaaaaagctaagactgaggaacctccaattgtgttcgtggtggaagatgcaaaacacgtgaggtatcctcacgtcgacccactggtaattaccatccagcttgccaacaaaaggataaaaagggtgctggtggacaacggatgttcaataaatatcctttataaggatacactaatgaaaatgggcttgaaaaagccaaattaaaaccttgcatggtaaatctatctgaatttacaggaaacagcatcgccagccaaggaataattgagctcccattaaccgtgggtgaggcacctttatccaccactgttatgcaaaactttctagttgtcgacctgccatcagcctataacatactactgggtcgaccagcgttaattggagcacttatgcctaaagtttcagaaaccgacaggtgtcggagtagtgcgaggtgatcaaatgttggctcgcgaatgctaccgcatagggctgcagaatagaaaggtcggtcactagctaatggcagtcatgactggggaagacgagaagcgggatgaggatcttgatcctcagattcaagatgaacgaaatttattgaaaccgattgagaaattggaagaggttgttctagatccaagaaatcccacaaagtgtgtattcactgggaagaacctggatgaacaattcaaatagcaactaataatttttttcatggcaaatcaggatcagtttgcctggagccattcagatatgatagggattgaccctaagattatctgtcaccacttgaatgttgaactaaattacccagccaagagacagaagagacgacccatggatttcgagagaccaggggcactcaagcaagaagtggacaagttgttggctaacgactttatacgtgaggcattttatccctcgtggatatccaatcctcttctcctcccaaaacctaattgaacttggacaacttgtatcgacttttcagacttgaataaggcatgtccaaaggattgctttccactaccaaggattgaccagttagtgtatgcaattgctggacacgagcttatgtgttcgtggacgcatattctgaatataactatataaaaatgcatgtccctgacaaagagcatacaagcttcgtaaccaacatgggactttattgttataaattcatgttgtttcctctttaaaatttggtgttcttttactttactatttttggtttctattatttatcttatttattcctttattttgagtcactatcattggctagaagcgaggtcaacaatagtttttatccaatatgaaccataagcccaatgatttcaaaattatatatatagaaacttagaataatgaaaagaagataatatctcttgtaccgtatcaaacaatacaacatactattaattatgcaattcataattgtcataattattcaaaacaataatttcacaaattactcttttgcccttaagaatttatttcccatagaaattagttctcactcaaattcattcatcaaatatatctttccctgtataatgttgtatagaggtgactcagggatcatggacctatattttaaagctccaataaacacttcattattatgtatctcatcaatagaataatctggtttattaattctattattacttcaatataatatggaattgcactctttgaaaatatagaattatatttacaaacttattacttgcagtctattaatataatcaatataagtaatttgtcctccaattattagttcataaatagaggttgtcaaaattatcgttttaccctacaaattatctcttgactctttatgtaccattaattcaatgtggacagttaatttataccttattatagatttatatccaactactattaccactcccataattaatactataaaggactaatattggatccattaagaaagcttcgattccactattgtataacatgttcccagtcactcatgttattaacctcccaaagaaaaagttgtaataattatcttctccgagaaattttaaaaagtggccttccaaccaatgaaaccaccttgtgttgctgttatcaacttatcaccaatagaacttgcctccaaactattaattttgtgaggaagactttcgacagaggtctttgtaatatcccaaaaaataaattgatatttaattagacatattttattaaatatataattattttggtaatgaagtaagattatgatcttacttggatcaattagtggaaatctattaaatgaatatataaagcgtactttattaattacgtagattatattgagatatgggggtatcatggataccatttttgaaataaaaatatttttcaggccaggcgactgtggaaacttgacgatgtggtgagaaatataacgacactaatggatggattattttgaaaggtattccagactagtttagaattttggaatattgttttaatggattagtaaaattaccataatgcgctaggttatttttaaagcttaggctattctttgaggggtagattagtctttttgcaattaagtactttgtcccttttaatgttgtgggctgattataaaattaaaaaaaagaagaagaaaaagaaaacctatatatgagataacttaaaagctaaggcaccaaaaagcttcaacttcttcttctccttcgtgcaagcttagaactagccagccttggggaattttcttcagcaaatccttcttttcaagttgccttttaactccaagttaacctagaggtgtttgaggtcagttccttactcattggactgaaaacgctaggttttgagacgattttcatgtagggttttgcatttttgtggctgtagagattagactaagattggggaatgtttagggtaggtttttgagtatgttggagatggttttaagtggtttttatggatgtttgaattgagtttggtttgatgaatccaaagttgagttttcttcacttcaatgtgtgattttgattcaatgattgaattgttgtgtttagaagcttgagatatgttgtattatagttattatactattttggaaagattggttaggtttggaggagttttgggtcaaaatcgaaagagagaacccaagaaattctggtttgccaaaacgggtcgaccggttgccctgcagggagaattctcgggttttcttgaggttcattttttggcctgaggagttgcgtagcatccattttaggttgtttatgggatgcttgacctatttttgagttgttgagagttaggttattattgattttgagttagggttttattttggaattttggattaaggtattcattaagtttcaattgtcgtgacataggaccgggattgcccagcttattttccactcaggtcggcccacacgcttgagttttgaattgaggtaagaaaagtgttaagcaccgtatgtggctaaatgttagcggttgaattgttatagtcttgattattatcaagattctaattaaatgtttgttgagcctcggttatgacctagggttggaaacggtcattaccgttacgagtaattactcttgaaatcgcagatatgtttcttacttattatttgcttcatcgggcaatgatagttacatattcagctcatggttaacgagtggtaagggggtactttgggtactttataaagtaccaggattgtgtgtttgtgatattgtgtaaatgtgtatgcatgttaatttgagattaaattgtagaatattgcttcttattgttttattcacttttcttgctgagtctctgtcactcacgggtgctttatggtgca

SEQ ID NO: 20380 - DNA, 6833 bp, Cannabis sativa
ttgatactcatcttggaaacctaaaagtatgaaaatgagtgggaagcagaggtttagtgaagatgtctgcgatgttggttttggaggacacatggtttgttttgatcttgccactgttgatcttatctctgatgagatgacaatcgatctcaacatgttttgtacgctcgtgaaacactggattttctgatatgtgaagtgctgcactgttgtcgcaaaaaagagttgagggaagcttgatgctgatagtgagttcatgtaggatggaatgaagccaagtgagctcacaagtggcattgtccatggctctatattcggcttcagctgatgagcgagagacagtgtgctgcttctttgatttccaggaaataagggaattgccaagaaatatacaataacctgaaatggagcgtcgagtgtcgagacaggcgccccagtccgcatctgcaaaagcctgaagatgaagtggtgttgttgcagaagcatggaagaacaacccttggccgggggtacctttgaggtactgtaaaattctgttggcagcatgaagatgtggttctcggggtgtttgaagaaattgactaagtttattgacggcgaaggaaatatctggccttgtaattgttaaatagatcaacttgccaatgagacttcggtaaggagtaggatttgggagttctttacctgtctcattgttgagtttgatgtttgtttccataggagtggaaacaggttttgcaccaaggttaccagtgtctgtcaatagttgaaccgtaaaaggtctttgagagacagaaattccttctggggaatgtacaatttcaagcccgagaaaaaatcgtagtgagcctaaatcttttaatttgaattgctgatcgagagaagctataaaatctgataaggctgtggtattgttggttgccactattatgtcgtcgacataaaccagcaatgccataaagaaccctgctttgtgtttgataaacagtgaattatcatttttggactgtttgaaaccatggttaatgagggtggtgctgagtttagcataccattggcgggatgcttgtttcaacccgtataggctttttctttaatttgcatacagcattaggaggaatgatgcctttaggagtgtatccttgaggcaaggtcatatatatatcttcattaagatccccatgtaaaaaagcattattgatgtccatatgatgcaaatgccattgtttgattgcagcaagggcaaaaagtaatttgagagtgttaaacttggcaacaggagcataggtgtcaaaataatcaacaccttgttgctgtgaataaccttttgcaaccaaacaggctttgcatcgttcaactgatccatccgaattatacttaattttataaacccatttattaccaattgtgtgttggccagggggcaatgacaaaacaatccatgtttcatttgcttctctagagcatctatttcattatccatggcattgttccatatcttatatttgcatgcttgtgcaaaggttttaggttcaatgagttgtgtagtagcaaggattgctgctcgaaaagaggcagacaatcgatgataggaaaggtatttcgagattggataatgagaattggtgggattagttgtcatgttgcaagtataatcttgcaaatatgcaggcttttgaagtggtttgccagattttgtggtggcaggggtagaaccattactggtatggggttgtgattgtgtttgaatatcaataatggtagggggtcctgacagtctgtaggaattggatttgtagattggtcagggggtgaagaaggtatgggaacattattttgggtatgttgctgctcaggaaaaaatcgattgatatcattgttgattttttgattgagaaacggatatatgttctcatagaagatgacatctctggattggaagatatgtttagtttctaaatcaagaagggtgtaagccttcatgtggtcagggtatcctatgaatacacatgctctagctcgaggagcaaatttattttgatggtgtatgtgagaggcataagctaggcatccataatttcgaaggtgctgatattgtggaggtttattatgcagtagttcataggaagttttgtcgtgtaataacacggaaggagtacggtttagaagatacacagccgtatgaaccatgtgactccagtattgtaaagggagattggattgaaatgcaagggctcttgctatgttcaatatgtgttggtgctttcgttccactacagcattttgctgaggcctaccaacacaggaattgtggtttagtgtgccttgattggcataaaatgtggtaagttttaattcttttgcattgtcagtcctaacagccttgatattggctttgaagtgaacattgacataagtgaagaagttctgaatgatgagaggagcctcagatttggcttttaataaatgtaaccatgtgtgccgagaatggtcatccacaatggttagaaagtatcgatatccttcaattgaaggaatggggtaaggtccccaaatgtctaaatgaatgaggtcaaaggctgcctcagagaaattattattggaaaaaatggtaatttcttttgtttagaaagatgacaagttggacaattgtgagaaatagtgtgatcaataggaaaattcagttgtttatttaatttgtttgtaatggttacagagggatgaccaaggcgtgtatgctattggtttttgattacatttgcattacaagcaactgaagtaaaagattcctgtttgatgtagtatagttgtccaattcgcctagctgtcccaatcttcaagatctgaagggggtcctgaatggaacacatgttagaagagaatgatactacagaattggaattatctaaatatgcactaacagataataggttgtattgaaattgaggcacaaatagaacattatgcagtaaaattgtagcagtaagttggacagtgtcgattttagcaatgtggacattagttccatttgggagagttacagattgtttttgggagttgctgtaaaagaagaaaaacaagaaatatgacagcaaacgtggtgtgtagcaccactatcaatgatccaaacattgggagatagagggttgaaattacctgtgaagttgttgattgcaggaacatccgatgttgaagcatcaggagtaggatgcaattgttgagtgagtaaagatattaattgttgacattgtgctggggtaaattgtgactgttgagattcaatttgagagcaagatgattgcatagtgtgaggaggcagtcgagattgagaagcactgtcagagttgcgattttgtgtattggttgtgtcactggttcttggtttgccataaccaggtgggaagccatgcaaaaaatagcacttatctttgtaatgtcctggtttttgacagtgtgtacagtggggtcgaggccttttattttttgtggtttgattagccatgggatcagtaggtggtggattagaggaagtagcagcagctgcaatggtgggaatatgtctatgacctaaagttctctgtctttcttggtgaataaccatagaaaagactttattgagtgaagggcaaggatcaaggagaagtatctggtcacggatagcatgaaaagattcattaagacccttcaagaattggagaacttggtcatgattaaggtgggcatgattctgtgtggcagcttcacaagtacaagggatcttggggcgaagttggtggatttcatcccaaatggttgtaagtttggtgaaataggcagtgaccgaatcatcaccttgggtaagataggtgagattttcattcaattcaaagattctagggccattcccttgattgaatctgttgtttagaactgtccacatctcagaggcagtttcaaggtacattatactgcttttaatttcaggtgacacagagtggagaatccatgacattaccatttggttacatctcatccaagaactgtaaagattatcagtgggagaaggttgaggaagagtaccttcaaggaatggggttttgtttctggcgccaatggagagcttgaagtctctttgccatggctgaaaatttcgatctgtgagcacaggggtcgcgagggccagtcctggatgatcggcgttgctgagataatatggagatctgatatcttcatatgccggtcgatcaggtggtgcacgaggaacctggagagattcagatctaggaggtggatcggcagaagcctgagaaggatcgatttgaggatttgtatgcgcgaaagtgtgggatggtggctgagctatggcggcatcgaccacgggagcagtggtggtagctgacgtagtggctcttgttctcaccattgttgagttcttggaagtgttcaaagaaaatcttgaagctttatttcatctgataccatattagaatatagaagcagagaaaaacagagctttattcattgtaaagtgattgaattaacacaacagtggaaatgaaatagtccagtatttatacaccaaatgaattagacaaaatgaccatttaccctcctaactaactaacagatataacaaacataacggtctaagaattattagcccaaaataacactacttgatatttaaattatattgatgagagggtgtttaagactatgtttggtaggaataggaagaagagatggatggatggagaggaaattaggagggaaagtgatggaaggagaggttgaatctcttgtttggcaagaacaagaaagaggagacatggtatttcgagttagaaatacttgaactaagattgatactattagctgtttttaatattatttatttaattgaaatatataattctccatattaattatatgtttttagattctatattagttatgttaattacatataatctcatacgaattcgtgcatattaattaatctaataaagaaagatcgtaatatttctttaataattatgtgtttttattgtgttcttacattaatatttttaaaatattttataaaatatgagttgatgactatttttttttttgcccctatagcttatatagttaatgagtttagtttatatgtgaatgtgatagagtttaattgaagtgaaagtataattttacccatcattttaattagaattttgcacttaaatttttattctaactttataaatacatattctctctgtatcattgtaccttttttagttaatgtattaatctgcttttgatttgaaaatctatggagatagaggttagtattgcactactaatatttattatttctcaattatatatctcaatataatgactaagtatatcttttttatttaattaaattgctcataatgctctaaatataataaattatatgcaacaaaatattcgagcgatttatgtattctaatattatatgcattgttttttttttgaaaatgaaattcatcatttattaaacgaataattctatcactaaactcgacaactgctcaatcagacagtgtctaagttgaaaaggcaatcaaggtgagatataaagaattaattaacatgtattgacattgtcaaatatttagttttaaaatgaaataagtttacaaaataattattttattgtttagccaaaaataaacacgtgtaaagaagtttcagaaataataataactagaaaccaaaaaattaaaataatatcttggtctcatttgaaagtcttctttttattatttttgaaatccatttgaaactctacgaagaagggaaatttccactagtttatttttcatataaatgatagaaacaagtgtctctccttgagcatcataccaataaagataagaaacttcttctaaaaacacttaaaaagaataaacttagcctaaggcacaagacaagccacactatgataaagacaagttaattaaatagcacaagaagcctaggaaaacacaaattaaggtggttttttttgttctttccaatgtaatatatataataacaaagttatgagaacaatatatgtttgatttctttttagaatgttaataggaattagtcttattgataaaaatatttatactttaaattctattgataaaattataaaattattttatttttatacaaatggtgtaatacttgtaatacttgtttatataaatagtataatagatgtattacaaaaatttaaaatcaaaccaaacaataaaatttaataaaaatttcattacaattatcattataccaacacatacaataccagccattagttttttttttttttttagaaaactaaaaaaaacatgacattagttttaaaaaaacacaagacaagccatatatgtctcaaaactatttggtaaaggctgaaaggacatgtagcacaaaaccaacaaagagaagttatataagtagtgaattattgattatttaaattcaagaaacattaggtttcaaaaaaaaaaaaaaatcaagaaacattccatttattattattatttgaatatcatgaaatactttattaagcatatggtaaacacaagtcaaaacttatataaactgaggtaattctagccaccaaattcttgtcatattcgtggaaataactattttagcaagattatgagcaattaattaaatgtgtgtggggattggaagctgaggacttagcttggaagacactttggaaaatcaaagttccacttaaggttcttcaccttatttggaaggctctctctgggtgcttaccaaccaaaacacagttacaatccaaacatgttttc

SEQ ID NO: 20381 - DNA, 1586 bp, Cannabis sativa
gaattagaaatattcaaaagcaaaacttaattgtcagtataaaacatgttaatgaattaagttattatatctattaattaatgtgattatattatttttgatacattattatttgttttttttaatgaactaattctttgtttatatttaaattcaattcaactggctgggctcatgtactttgaatttgattgctcatttactttacgagaaaataaataagaattattgttgatcctaataatgtgtagttcactatttataattaattattcgatacacaatgatatgcaattttcggctatcatgaacatcacaagatcactaaacatatatactttgcccatatgtacacacacatatatatatatatagatttaataaaataaaagaggataataatccaaaatcaaattcttgtgtgtgtattaattcctttagtaattaatggaagctagtatgcattattattattatgacaagagccgaataatatataaatcttttatacaataatatctttgcttcttctttctggcagcttccttgtgtcaacacaaagtgcataattatcttcataatttcataaacatatatactacaaatataataatattctacacatgtttacattgtatatgttttcctctataaatatttaaaggaaattatttttgtacatatatatcttttactttttgggctgtattctatatatggtttttgaaaaaaaaatgaattatattataatatgtatatataggtatatatgatgagatagagttggattttgggaaataaatatatataaataatttatttatttatttagaaaaagttgaagatgctttgtagttcatgtcgagttggaaagaatgggaagatgatgggagaaaggattctgatcacatgctgcctccaaaaaagagaggaacaagcaatcatccctcccaagtgtcttagattccaaatctaatgcactttccttaaactaatccataattaattaattaattcaaacaaaggttaccacatccaatttttaattaattaaacaaatcctttgacttaacccaaaaagtccaatatatattaattagagatatgtgttcaatttttataattaatatgttaactactagctagtatctcttatattttcagattgatccacacacatattgtttgttgagtcatcttctactatataaaaatttttacttttattcaaaataaaacttgttactaaaagttaaaaaatatgactaattataaattattatttttatattgtgactataaaaatatctgtagctaaaagtataaatcacaaatttataatttattgtgactaaatgtgtctttagtcacaatataaactaaattagtgataagttatacttaaatactatgttttagtcacaaaaaatttattttgtgactaaaaagttgtcactaaaaataacttttttgtagtgttatttcattttgttggggcggtatctcaccttaattcccacatataatatgatattgtccgttttgaggctgaataattctctcgttttttgttgagcaccttccta

SEQ ID NO: 20382 - DNA, 1948 bp, Cannabis sativa
tgagcgtctatcatcgatacagcttgcccaatcagcatcagagtatgcttgtaggcacaatctggttgctggtctgattaatagtccctcattaatggtgcccttgagatatctgaatagccttttgcatgcctcccaatgtgtagttgtgggagcatgaataaattaactcaatttgttcacaataaatgccacatcaggcctggttaaagtcagatattgtaatgctgcgagagtgcttctatagagtgtgtgatctgtaaatggctctccttctgagagggacaacttatgtgtggaacttgttggattgggacatggttttgctccttccatatgtagcttgacaagtaactcaaagatatacttggtttgggaaagatacataccagaagcattggtgcaatttcgaccccaagaaagtaatgtaaaggaccaagattgttgatggagaaggcttgattcagtcgagcaattagactgttaatgagagattcactcggccctgttatgatcatatcatcaacgtgtacaagtagcacgattaactcaaggccagatcctttgatgaagagagaggtgtctgatcttgaagctaataaaaatcctcctgaaaaaggatttgttttaatttttcattccaagcacgtggtgcttgtttgaggccatacaaagctttgtgtaatttacacacatgagttggtttgtcagcatccacaaacccaggaggctgagacatgtaaattgtttcttgtaacgccccattcagaaacgcattagatacgtcgagttgattgatgagccaattattggttactgcaagagtgagaagaacacggaatgtagctggttttacaacgggactaaaggtatctgtgaagtcgattctaggagattgaagatacccttttgctactaatctggatttgagttaattcactgagccatccggattaagtttgattctatgcacccatttgttgtcgacaagtgtcatatttggatcatatggtactaaagtccaagttccattcttttttaaggcaaggcattcatcttgcatggctttgaaccatttggggtctgcaagggcttgtttgagtgtttttggttcagtaggggtgatggattcgggtagagggtgatttgtggaaagataggctttaggtttgtaaaccccattttttgatcgagtggtcatatggtgattattactagtagcagatgtgatcacaccagttgaggatggttgagaggtagttgtgtttgctggtgaaatagaaagatgtggctcagcagcatgacttgtagctgcagaatcagttactagtagagaagcaacttgatttatatcatgagtaggtggaccaactacaggtgctgaagttacaggcacatgctcattctgtgtgggagccatagtaggtgttgtgcttgtgccagcatcatgaacatctgatgttggagaaaaaacattttgcgagtttcttgaattaatttctaaaggaatagtaaagaaactagttgtaggaaaaagagtggatggtgagatgtttacctctttaggagttgttggtgttttggcagggaaatccagctcattaaatgtcacatttcatgcaatgtaaactcttccattactacttctgcatagataccccttgtgttgcagaaaataaccaacaaaaatacatttctctgatcgaatttccagcttgtgagactgatatggtctcaagtgaggaaaacatgagcacccaaagggttttaggaaactgtagtcagggatcttgtgaaagagacactcatatggtgaaacatcatcaagaacaagagtaggcaacctgttaatgacatagacagaatgttgaaaagctaaccaccaataagataagtcaagaccagatgcagccagtaatgtcaacccagtttctgtgatatgtctgtg

SEQ ID NO: 20383 - DNA, 4138 bp, Cannabis sativa
  modified_base (1564)..(1566): a, c, t, g, unknown or other
  modified_base (2747)..(2755): a, c, t, g, unknown or other
  modified_base (4066)..(4079): a, c, t, g, unknown or other
tgacttcatagctctcagttactatgaaaaactagatggatggtcgagacaaaatcagaattggataagcagaacccatcacaccaggccatatgtcaacctggacgatgggtgctctttttagagctttgggaatgtcattttgatacattccaggttcttgaaattgaatacgaggtcttcttccctatttttgacaattttggagagaatatttagagcagaatttgcatttgggtgatcaaaacaagcgcattaagttaattttcatcttgggcgttgggctcaattttgatgcccctgtgattgtcattttccccccaagttagcttgtatctctgttatttctgatgatcgaaaaaaatgcctataacacttttttggaaacaagattggaaacaacccaagttggtaatatgtcaacttgggcgctgggtccagttttagccacttagatagttctattttctccttaaaaatacttgaatcttaatctttgacaaaaacatagaatattcctggaaaactttttagaaaaactccttagaattggcctaggttgacaaaatgtcaactttggcactgggctagcactaagtgtcaacctttgcgctagtgcctttttttagcctctaggttagtctgtttcttccccaaaatacttgtttccccattttgatgaagacaaaaaagatacttgagacagatttttagtatgatgcttggaagttgcccaggttgacaaaatgtcaacctgggcgctgggtgcctggggcacctagtactccgagtgcccaaaaattaaagttctttgaatctgatcttgatgcctcaaatatgttcgtgacatgtctagtttatgtcttagtacaaagtttgacccattagaactaagaaggtctcgaaaattgaaaccctagttgggttgtcaacctaggtgtttggtgaaaccctaggcacccggattgatttccatggtgttctttcatgtatttttcagcttctgggccttgggacttgaatgctccataactttatagtacaaagtactgaaagataatgagttggaaataacttggcgggatccaaatatccattccaaagctcttgaagtcaatctaggcgcaggactaggggcctctctcaggtcgactactatgactcaggactattgaacttcgaaatatttttttcctccccacgggtcaaacattgatgtctatgttaccaggataagttttcaggttaacaatatgtactgtgtttcctgagtgagactttgttgtaggttttttgtcttgttcgcatattacttcatgatcagtaaatttgacctacacttttggtacaagacgagacttataaattctgagtcataagagtattatctgagacataataaacatcttgttaattcttcttaatacgcaagcttactaaacttcgggttccagtacacatgtcacgattatatttattgctcaaaatataggcataacgatttcttactaggctttcatttttaaagttttaatgaggtcaattttttatttatttttttttnnnaaaaaaaaaacttaaaattaaaactaatctttttttttaaaagcaaattaaaagtagatctaattgcatatatggtggaaattttatttaaaagtatatgtatattattattaaaatttcacatgtctttaataagctcacacattgatcacaattactatagtattatatatatagaccatcaaagtctttttttggtggtgtgaagtagtaactctattatgtaacttaattattattttttttttttggaagtagtaattgtaacaatttgaagacaaaaaggaggggacaaaggtacaattacaacttgaaacaagatagtcaacaaaccctcttgacacgatccttatcatagcgtagagcatcccgagcttcgttatgcgccaacgtgttcaaggtccttggaacataatgaagggatgtactagaaaagacagataaggaattgatgatgccattgataatgcctgaaagggctgaccagtctgcactgaagtggttaacctttgtgacaagttaaagacaatctgatgcaatgtgtttcatagagagtcttatcatagaacaccaggtgaggccataaagtagagcttgaccttcaacaaaaatggcagatgaagctcccgtcctcggagaagagagagttgctaccagcttgccagtccaatctcggatcatgtaacttgttagttgttataacttaattgcatggtaaatattttatgtagatattataattatgcgttttagttatttatttatttgatttgttttttataaaatcattatttagtatttattctttattaaaattctatcacatgcttaaagtttggtagttaaatataatataaatattacatattatttacaaataaaaaatgtgaaacaaacacataattttcttttaataaaatcacaccaaatataatatttatcccattattaaaactttatcatgagttaaaagcttgagaattaatatgtatttattattaagggtttttttttttttttacattttaaatcatttttttttttttgtatttttacataattctacataagaactcctataacaacaaatgaaactaaattacaactaatatctacataacaattcacatagaaactatcgaaaaaattactgaaacaacccaaaccataaatttaaaaannnnnnnnnaaataatatataaaataatttcccctcttattattcaacataatctaatgaggctatgatttagagcattgctattaggtaccagttgtgcctagcaccttctcgacatgtcgcgttacgattggttagcgatactctttacaagctattagattaaattatatgggacccgatacttggttagaccaatagtgatattgacacgtaggagagtgctaggcactactggtgccttttagcatttctctagaatttattaataggaggtgcatgctagctcagagttaattctcatgcaccaaataagagcttaacagctgtgtgaattgtggaaggtgctgtccaactgataagatatcatttaattctatttttattattaaatactactatacattttaatgcaaatatattaactgaccaatgcgattcatgtttgaaagagacatctacagttttgaccgacaatttaattaattattttatgtgatgaactatataatgtaattatataagagattttgacgtaaaaatatattgttattatcaaagactcttattttataaaacacatggttaacgattacgatacgaaaaatataattttatgaaatgtcaattacgctcatcaattatcgtgggacttgttttgacaatgaaactatacattagcaatgaccaagtttatataaattagatgtgcggtaaaattactaaaacttttactttactaataattcatatctaaaatttattttttttggggcaaaacttctaaaattcgtgttttgataatattttactatttccatcaatcttttaatgttaagtaacatgttggatagttcacgtgtacacagtatgttgaattgttcacgtgtatatagtatgcacgcgacacaattttattagcacagtaattaaataattgaaaataaaataaattataaaaaataataatttaaaataaaaaaaagtccttttaaaaaatctttttttatctatcatttttggttaacaatttgtgtttgtgtttcttcttcattaagcttaccaccaccaccaccatccacagaaactgctacccactacaactggaaccacacaacctgtcaacatttcaaatcgaaatccaaatacaaataaacccataactaaaacaacaaacttatatctgaaatattccacacatttcagatgaaaaataccaaaaacaataacaaaaattcataatcaatgtcaatctcaacttctaacacaaaaaaataaaattaaaaaataatatggatacactactacaaatatcagaannnnnnnnnnnnnnaaaataatttttttcggggaccgtcgctaaaaaaattaagtaattatttaaaaccgtcg

SEQ ID NO: 20384 - DNA, 2055 bp, Cannabis sativa
  modified_base (27)..(54): a, c, t, g, unknown or other
  modified_base (1981)..(2005): a, c, t, g, unknown or other
atttcttatctatattaataagtaaannnnnnnnnnnnnnnnnnnnnnnnnnnnagggcataaaacccaacaattaaggctgtaatttcttcattcattacattgttccaaccttcatgagaagagcttcagcaacactagttggttctctagtgctggggatccagaccacttggcccatgaacaccttaggcttgaaaatgccagccttggctctggtgatcatgggatgtgtagtaggagcctgatcagttgaagcagcaagctgttcagcaggtgcaacaacaacttctacaggtggatttaagtctagttcaagatcaaaaaatgtagcaatgggtctgggaggatgatgtttaggtgatcccttctcactaccggaagtggagccaacagatgagtgagatgtatgagtagggtcagtgagatttacctgagaattgtgagattgaggtgtggaggattctgcttcctcagtgcttgaggatggactgtctggtgaagaatgatgacctgtgatagatgaaacagaggataaaatagaccaagtggagctttgaataatgactagttttttaggtctatagttgttgacaaaacctgtttgaaaaggaaattcaagctcatcaaaaaccacatcccttgagatatagactctatctgtgagactcaaacatttgtaacctttgtgtgaatcactatagttaaggttcacacatttgatagagtgaaattggaatttgtgtgcttgataaggtctaaggcaaggaaaataagcaactccaatctcttaagaaacttgtaatttggaatcttgtgatgaagcatttcaaataatgttttgttttcaagaatcggcgtggacaacctattcatgaggtaaacagtagtggcaaaggcatctgaccaatatttgagcggcatgctagattgagccaacagtgttagtcccacttcaactatatgtctatgttttcttttcgcccttccattttgggaggaggtgtgaggacataaatggtgaaaattaatgccataagtgacaacaaaatctaataacacttgatactcaccccctccatctgtcctaagtaccttaatttttctttcaaattggttttcagccaatgacttaaatgcaaggaaagcatcacatgcttcagatttgttttacaatggataaatccatgtaaatctagtgcaatcatcaatgaagtgaatgtaatgtttaaagccatgattggatgtgactagaaatggaccccataaattagtatgaacaagatcttaaacttttgaggttatactgttggaacttttaaagggaagagagtgagattttccatattgacatgcatcacaaaaatgatcaacttcgtttttggaaattttaatattgaaagtacttaaaacttgatgtaaaactctagaggatggatgatctaatctcctatgccaaacatcttttgtggaaataacaaacttattagttttggactgatttacatgagacctggttttaacagcaagaccagtaaagagactacaatttgagacagtagacttaggtagtgaaggattgagataggctgacttgttttaaggaattcaaagttgatatagtccatccttaatcatcccttgaagtagaaccctccttgttaccttgtccttcacaagacaaaaattggagtgaaatttaattatcacattattgtcagtggtaagtttagatacactaaggagatttttagcaatagtaggaacaagtaacatttcatttagctttaaacattgtcctgttttagtgtataattttccatttccaaagtgagaaatgataagtttatcaccatttcctactgtcactttcctcttaccaccactcttgcttctgaggtatcacagatgggtcagctgtgatatggttgctatcaccacttgttgggaatattatatcaggatctagatttactaacannnnnnnnnnnnnnnnnnnnnnnnnatgaattctctaaaataatgaaaaaaaaaacacataagggtttaagaaaa

SEQ ID NO: 20385 - DNA, 4208 bp, Cannabis sativa
  modified_base (4104)..(4110): a, c, t, g, unknown or other
ttgcctttaagtttgaaccctgcctccaaactctaagtgtctgataaactctctctcctcctcactctctctctctctctctcacgcctaccctagtgttgtctaacacttgagttttgccaatattgaatcataccttgtaatcctaagggtactacagcagatcccacatatagtgatctggatattagttcccttggtataaatacaactaaaaggagagtatgtcattacccgctatcacaagggggcgaacctctataacaaatcttgttgtctatttattttcattcttaattgtgcaaaaacgtggcaagcatcagatctgtacgatcccgctgtcggttgatcactttttgaggtcaatagtatgtataatgttttaagtgctattgtatgttaagtattttcttatagaatttttagctcactcccttgctttcccctgcatgcaatagacagagaacattgaagaagcatgttgagctaaatcggttctagtatgtattttacgaggggctatggacaaaaaaacggtctaaaacgtcggtgaagccttagttttgtttttagatagtaaaatagtttgaccttagtggaatgttgtaaatttattttaaaaatgcactcaattatttgatttatttttaaatgtgaatgatcatttaatttttgtatatttattgtaaaacctgttgaatatttttaaaaattttgagcctttttaattaatgtacgttaaaataatattttgtaaaataagacaaaaatatgagcagtttttaaaattatcagctctttagaatgatgagaggaggtcagtttttaaaattagctataaatgagcagtttttcaaagtttgacctaaaggctgaggcctagttattttatttcatgatccaactgacccggattgcaggatatgagcgttgaaaggcgattttcaagtagtttattttactaatactaataatatgttatcaaaaataaataaataataataatacactaaattgatgctttggatcaaataaattatttggaaatactttatagtatttttgtgtccaatactcataaatttctttttgattatatatgtgtctttaacataaatatatatataataaaaatgtgagtaaatagcatcagtattttaagttttaaatttataagcggcataaatttaatatttcatgttagcgatataagtattcaaaatttgtaaattgtaatttttttttcagttttgtcagtacacattttgttttaaatttattaaaaaaaaattaatactacatatttataaacccaatgatctacaatttagaacttatatgtgtcttgtttaattagtataaaattacagttttacaaatatgatatttattccactaaaaataaatattaaatttatgttattttcaaatttacatatgaaattatttaccttaaaaataattattgaaagtttatgcttgtcaaaatattattgcgtggagggaaaaaaaaaacggccggtgagaatgtgggcatattgtgacaaggatgtgtcaataatgaccaagtgtacatatttaggttcctatgaatttggtgagggtaactagttttatgtttggggtgcatgctttcccacagcttccttccctccatatcttgagaaatgacccaaaaaaagtggtccacttttggatcacttttatggcttgtatttattcatttttgaaagaggtgaatggttgaattcgatgactaatccaaacaattttccctcatctttttaaaaaataaaattaaatagaccttacgtttgctacttgtaatattttacttttctttccttatgtgggtgacatttttctcacatcatgtaataatcttctccaaaaaaaaaaaaaacatgtaattatcaaatcatataacaggtggtccagtttcttttgtccttttaatctgattgagaccccgccgcgagtatcaataataagtggtccaaagttcttttccatgattaattaatattattattatttttttttctttttttttctggctaaatagaacacattaatttaaaaaatttattattttatctttattaaaaaattaattatcatataaattttaaataattaataataataaattcttttaattaaaaaaaatccttctatttattatatttttttttcaaatatacaattactatttgcgagtaatgtatgttatattaattagcaaatattattatcaatttctttttaaaaatatattattatattaatttattagtacaattagtaatgacaatatttaaataacatagattatatcagcaaattatatttaaagatatcaatctaatacaactattatttacagtacttttgttgttaagaaaaatttgactacgaacgattaacataatcacaattagatataattgttcggggtgaaaatttgatagaggaatactccctaaaattagtagtgaatatttaccaatcctgagtggatcccttataatcttcttctagcatcccttctaccttcgtattcggtggacatccctttggattactggcaacacgaggaattttcctgcaaaatactttgtgatgcttaagacaaaagatcgagattcttcgagggaaacaagaatacgaatttagggtgagagaatccaacccctctctttactctatcccggttttttatagttgtttgggggagaaaatttgtttttttttacaaagtccattgagagagggaaaaacccaatggagtgataaagtgcaggcccatcttaaaaaattgtagaagttagttggaaaaagactataaacacaagattgaataactcagaccataaatcttagcctgaatagggccgagataaggctaaacttggggctaggccgaaaaaggccatgaaccagtctaaatctagataagaattaacttggactcagtctaaactgagataagatttaactcagaccagactaaagaaggctacgattcactctaaacccatataagatttaactcacaccagactaaggaatgctatgattcagtctaaatcgagaaaatatttaactcaaactcagtctaaaccacaagaagatttaacttagaccagactaaggaaggctaggattcagccaaagctgagataagttttaactcggacgcgttaaagaaaattaaactcaaattagatcaagataagatgtcatgcagctcaaacctagataagacctaaccaagccccgaataagacattgaaactttggacatagccatagccaaatcagatctcagatcaagttaagataaatgatatctcacgttaagtcaagatggagcatgtggcataccatagcccggatcatgaaaaagagaagtacatcgaggatccaagataatttgaatcacaaatcaaaatagaagaacggtatagattggaaataacaaacgtagggtaaatgtaagaatcgagataaaacccaccaccattagtaagaggtaaggccaagtcatataaaataaaattattttaaaacaaaagataatcccatagtaaaacaaatcatgcaagatcaacaacacatatgtacatgtgtcttccatagcattaaagaggtgacaactccaccatgcatgcaaagaacgtactataaagactaaagagcaggttaacgtaggagggacgagaaaaaaaaaaggtaacggataaaagaacaaaaataggtgcattttgaactttgagaggaagaactcgagagaaacaaaattctaactgaataatttttataaaaaaaaccaccttccttttttttgtcaaaacagttttgccccgtctgtaggaacatcttttcctctaacaaattgaagatttttgcatctaaaatactagcaattttttaatctgttctacaatttctcgtttttcctttttttttttttttttgtcttttcattcttttttctctttagcttggaagaaagaacaaatttggaaaaagttaagaatggaaaatgaagaagatgttataagtgttggattttctgccataaataaaactcatttcaannnnnnnagatttactaattaataaaagaacagaaattattttatgttgcatgattcacaaaatttatttcatgattatatctaatgtataaattttattaagtc

SEQ ID NO: 20386 - DNA, 8038 bp, Cannabis sativa
aaatgtgaccctagatgaaaatactcatgatgaccttgcttctcaagaaaataatgttgtgaagaaaataaacccaaaagaccttgaaacttttgatcccacaagggacaaaggaaaatgtataatggaagagcctgctaagaagactgttccacggaataactcaaatattcccaaccaacctttgctgaaaaagaaggtggctgatgcttcagggcaaaacacctaattgatccacgaggcaaagttaagcgaaatgataggcttggtgctcggtacaaacgcctaccgtttggggatggagaaactgttctagtaattctgtttaccatacagaaggtagtttctcaaagaggacctcttggaatgcttaaacaccaaaaaagaatgagctacaggcgagaaaacaaggccacgtggaaataatatcagaaatcatataaatgatagagttcatgggcacaaaatctaagttgacactactaaacgtttggaagatcaaatagctagattgaaaaagttcacaaaatatattgcctggaagcaaagtggggtcgtatatgatttgaaagaagaagatatggaaccatgtgtaagaagaataatagaaacacccttaccagaacattttagaatacctcaaatggaactatatgaaggcaggatgaaccccagggcccacctatctaaatatgtttgactaatgcaagtggcaaagacaagcgatgatgcaaaatgtctttatttctcattaacttgatcaaagtctgctgaatattggtggaagatattatctcctagatccatgcactatatataataaataatataatattatttatcattataaaatgtatatagcatacattactattcttatgttattattgttagagtaaagttagtttagttacttgggttcaaattagttaggattagttaagttttccttaattgcttagttatcatttctagcttgtaactgattctgttaaattcatgatgagctgattgagatttattttgtataaatagtcactcttgtaacaatgcaatatagaatctttcattctcattaccaatctttctctctctcaattggtttatttcttcctctatttatctatcttagtttctcattatcttaacatgtcatagaacttaatatggtatcagagctcgattttcttctattgatgaacaatgttattacaaactctaacaatggttttcagactaatttaggaaacatttgtaatcaaaacccatagggtgttcctctaaaaaatgcaagaaatagagatgttgacaatttcgcaccagtcttcatcaatcataatctttcaattcaattgaatgatcacaattatctcatttcgagatagtaggtcctttcagccatccatggctatcgtttacggtcattcattcaagaattatcaattcctctataattcttaactgatgaagatcgtacaactcgaatcatgaatcttgcatactcagattggggtgctcaggataaattgcttgtatcatggttatttttttttatgactttctcaccataatagtaggatgcaacacatcatgttaaatctagatcacacttgaaaagtatttcactcttcaagttcctactaagatcttggagttttgaatcaagataaaaaatttaataaaaggttcactcaatctcaatgaatatcttctcaaggtaaaataaactgtcaatcttctagcttccgtaaaaggggttttcacaattagagattatgttgcaacaatcttcaaaggactgccaagcgagtatgtcacgtttgtaatttaaaccaatacaagaatcaaaagctacgcagtagcataaattcaagccttacttcttgcctcttgaattgagaaagtcgatcaagaatctaaaataagtgctcaagtagttgtcattgaaccaaattttcttgaagcaaatcttccaaatacaaacaaaaaatcaagttaggaggttgtcctcgattcatccacaatggtcaacaacatcctcaatatggtgctcattctcaatacactcaataaggaaacaatccagagcatcctagagagggttttagtcggtatgaagggtctaacttctctctccaaaatcaactggaaattacaacagctgttgagattcaagcaactctagaggagggagatcctatagcacaattaatcaacctcattgtcaagtgttcttcatgcttggacatactgcattgggttatttctataggtttgacaaaacttttagttgttcagctcaaaccaacacaggtaactcgggatctccagttcaaacacagcctaacattgctacctcaaactttggatgggatccaaagtggtattcagcctcaggaaccaccaataactgcacattagattctcaaaacatcatgatagaaaccaaattcaatggccctgacaaattttacgctggagatggaacaagttggcaactctttattatcttcccctcatcttgatcatccttttttacttaacaaaatgttacatgtttcatctatatccaaaaatctattaagtgtgtcaaaattttctagagataaaaaaatttacttcaagtttcatgctgatgtgtgttttgttgaggatcaggagaccagacatattttttttttttgaaggagaaccatgtgaatggtatgtatttgtttgattcttatcaagtttagctccttccatcttattcatgtcctagtcctgctcaatcagagttctctctctccagtcaaaataatggtcactattctatcaacaacaacattgagtcccggtgtcaacaatgcttttattgtaacacttttaatacaaacttgttttatgattttgacttggatacccttttaaaaatgttgtcaaagctatactcaaatcttgtaatcaatccattcaattcaataaagattctaaatctctttgttcaacctgctacttagggaaaattcacaactttcctttcccatagttatccaatactgaatatactgcccctttacaactttttgttttagatctttgggtccttcctataccttgactttcaatggtgacaaacattacatacatttcatggatgtctactcaaggttcacttggctttatcttattaaaagtaaatccgatgctctaaaaatgttcaaaactttaaaattaaagctaaacttcagttaggggctaaaatcaaggttcttcaaactcacttagagtgagtataaatcctttactaaatatctgaatcaattaggcatcattcataaacacccatgtcccactacacatgaacagaatggccttactgagagaaaatatagacatattgtagaaaacaacctaacccatttagcaaaagcatttatgcctcttaagttttaggatgaagcctatagaacaatcatgtacattcataataggcttcccaaacatgttcttaagaacaaatcacctactggggttctattcaatactcaacatgactacaccaaccttaaaacattttggtgcacttccttccctaatattagaccctataataaacactaattagagtttagatttatcccttgcaccttccttgggtaaaacacaagtcacaaagggtataaatgtcttgatcccacatgtagagtttatatttttagggatgttatttttgatgaacacacctttccttattctaagtctatctccaaatccaacactcctactatttagtcacaatgctttacctttggccataatcctatacttaaaaattcccctttaatagcaacaagttctactctgggtatgtgtttcctaaagacttgtcctcttctcagtcaagtcctccccttttaagacattcacctgaacctctcatatcccatgcacaagttgttactcattcaggtcatgctatatctacttcaaatactttgataatattctgtcacaagatctcaccagcactcctagatctgtttctgctcaaagacctgcacttcttgagtcttttgttgagcccgctcttgagcatgctgttgagaggtcaatcactgttgagccttttattcaaagagatgttgttattgagaatagttctgatcctattcaaggtgctacatctacttctgagttagtttcatcatggccaaacccggtgctcctccaagcttctcctccagagttctccctgcaacattggcatcaccaatagaaaatcagaaaatgaaaactgattctaagtctaagatttataaaccttagaattatatggctacaagagagcttgctactgtcaaagaagccgtgtaataggaacactggaacaatgccatgtctgatgagattctggctcttataagaaatggcccctttaccttactacctctaccagaagggagaacacctgttgagtgtaaatgggtgtatagaattaaggaaaaccctgacaacaccattaataagtataaagcttgacttgttgctaaaggattttaccaacaactaggttttgattttacagaaatcttcaactcctgttgtgaaaccagtaaaaattagagttgcagttgctttgtcaagaaattggatagtgagacaactaaatgtgaataatatttttgtaaatagagatttgcaagaagaagtgtacatgacacaactacttggctttgaggtaacatatcatcctaatctagtctgcgaacaggctcccaaaacctggtttgaaaaactttaacagtgcttactatatctttggtttgtataaccaattctgttaagctcatgacgaccttattgagaaccattttgtataaatagtcactcatgtgacaatgcaatataaaatctttcattctctttactaatctttccctgtttttctatatatatcagtttcttattatgcaaacatgtcaaagaaacttaataattgtctcgagtaaaatgtttatggcagctgaaactattaatcacaaaacttacaacgtattgtcactaaatatttttctttgcaaaatatttgttgcaaaaaaatcaaaattagtgataaaatgtatttaaatactatttttcagccacaaaaattttttgttcagacaaaaagtatgacttagtcaaaaaaaatatgtaatgagtaaaagattatcaccaaaacatggttgttctgttttgcttttttagtaatgatgattatttccttgttctttccatcaatatttgtaaatacatatatttttattcaagtatatgtaaatctaaacaatttccttgttttgggttttacattacagtgatgagtgttaaaaatcctttggatgctttggctgctcttcgtacacaaaaagggttaattgatttagtagttacagatcttcatatgccatacatgaatgggtttcaattgcaagaacttattgagaaagagtttcagcttcctgtcattagtaagtaccacctatgcatatgtaaatacatataatatatatatatggactaattaatattggaacatttttttcttaatttttttttattatattgcagtgatgtcagtggatgataaagacaccgtattactaaaaagtgcacaaagtggagttgtttttttcatttcgaaacctgtgagcctgaatgatttgaagtatgtttggcaacatgtaatcaaatataagagaggaaaatcagttgtgactaaacactcaaagtacaacagtaatcatcatgatgatgttgtcacaaataatcaagaacaagttagtgacattttgaatgatgtgggagagtcaaggaaagatgagaacataccttctgatccaaataataagatcatcaataatcagaatataattgatgaagatgaagatggtgatgatgatatggaaagttatagtaaaaacaaaaataacacatcatcaggtttgctagattatgatcatgaaacggacaatcaagttaatgtcatcaaaagcaagggtcataaaaagaagaaagtagtttggactaattcacttcacaatagctttcttcttgccattggacaccttggcttggaaagtaagtgattctctatcatgtttagatataatttttcttttttttttaactatgaataatatattcaaaatcattaattgttgatatgtgtacacaattttttttctttcaaccagaggctgtgcctaagaaaattcttgagttcatgaatatccctggcttgactagggaaaatgtagctagtcatctacaggtaaattaatttgctcacaagtttataatatacttattctatttaaatattgatgttagttaataacttcaaggcgtgaaacaagtttattataaggttaataaacatatatactaattattagtgtctagttagttatatacattttagaattagtaaatgacaactctgtatattttaataatatgttggcagaagtatcgacttttcttgaagaaagtatctgaaaaaggttcattgaatgagacgaagacaaatatgttggcaagtagaatgtgtagatcaacctttgctatgggatatcaacaagagcttttgttaaacaatcatcatcaaatcccattctcctcattgagccaattctacagtacacacaataattacaacatcaacaatagtaattacaataatcatcatatttggccttactcatcttcatcatcaccaccttggagtacaactagtttgcctaacccaattgatttttctgaaacaaactattgtatggccaccaatccatatgacattgtgaataataattgtaattattccaatggattcagtaatgaggactcatcttctttcaatggaatagttcaaaaccgtcttgattacaattccagaactagttgcatgagaggacatttgttaagttcaaccaatgatgctctatatcacaattatatcaatggcaagaataggtgtgtccctaatagcttgggtggaatatacataccccatattaagaacaatgaaaaccagatcatgatcgatgggggaggtggacaacaatccattgaattcccaaattgtagcgatgaactaatgaaaaacaatattggagtattacttcccaatgagaatcccatgaatgagatgagtaataatatgactaatttagttgtaccatctactcaatatggttttggtagtagtagtgaaataaaccattcacttgtacaaccttctagcaatggtaattacgatctacaccaacaaagtgcttctagttctaactatgatcagccttcttctgtggtagagccgatgcaaccttcgttgcaacaacattgttatgatgtgttaccgaattcggatgaacaatatagcaatgcaattggggatgatgactctaataatcttagtagtgtcataaacaatgagagcacttttactgcttctttagccggtgaactgcctgttcccaacgatgtacttgatgatattattgatggtgatgactctctagaccaatttattgatgaactttttcctcttgattttcaggtaatatatattattcaactctactatctttttaaataatgcataatagagcaatatatatttatttatatatatgtacaaataatatttataggcttcatttttaatttatatctccctgttattaggacattgatgtaatgaatccttcactagaaaacaaagacaacaattgcctgaaccaaaacccaggtgttgatcaattgtctggaaacattgcaacgccatatgttgtccaagaaagcgaagtacctgctattgatactaatggacattcctttggtcaggcatgtatacgtactactttaatccatatcttatttttcttctttagtgtataattaatatttataaaatctatcattgaattttccaattatatatgtaactattaaaacccttttcatatatataacataattattcactttttaaatgtgtgtgcttgcagcaaca

SEQ ID NO: 20387 - DNA, 5012 bp, Cannabis sativa
aaactgtatatttatatgcaaggagagggatcccatgtaaattgaacagttttaagattaaaatgactatattaatttgtttttaacttctaagcaagtttcttaagtagagggttgtatttgaatttggataaatatattagcgtggtgtgtgaaatcactagtctttgtcttgtattaacttgtcaaagctaacatactgataagaaaatgttgcagaatctgcacttttctgttattattacctaattaattatgcttagaaatgtaaaactaagtgatacatcaacacttctactcaactggttttttggtgctgacctttcttcctttccattatatgtaattttttggtgatgactttttttttttcttttttgttcactgcaaacaacgaccaaaatgttcaaccattaaactgcattgcttgttctctgtagtgaatttcatacacatttttgtcttttaatcatgtcaaagagtttttcataagacataggaatactttttgttaactaatttatgaagtagtagtaaaaattaaagaaagagtaataaaacacccaaaaagagtagctcaaaaggccatgcatatagtttgctcccccgcaaggtctgaggttggagaccctaatggacacctacatagcaactgtttgaattttctggttgacaaatattgtaaggttaggcgggaatcctagttttgaaaaagttagttgcggtgagagcaatgcagggtttaacatgtccagggaatgtatgtatgatttatatagattatgttcatttccaagaagccaatatatgactcaaaattttacattatggtgtagacatagctggatttaattcattgttgacacaatatttgctaagcaaactggtgttgatgcatgaccataagccatattttcatgatagttatgtttttttttagctataacctttttagaacaattgcttgaagaaggcactgagtggcacactttcatttactataaacaacaatgaaattttgttcttttatattggttttaggagaagactgggctgggctcatctgctcttgatacaggaaaaggcaaaagcaaaaggtcaaagcatatcacacatggattccacatggtaaagggaaaatcaaagcatgccatggaagactacttagtttctgaattcaagcaacaaaataatgttgagttgggattatttgcaatctttgatggtcatttaggccatgatgttgcaaattacttgcaaaaccacctctttgaaaatattttgaaggaggtaaagatactaatttattcttttctttgttcttcttttgaggttatgctttaatcttttattgttttaggattttcttttatacttttttttgtttcggttttaagcagcctggcatctgggttgatacagaaagctcaattaaaaatgcttatcgtagaacggatgatgagatattggacaaaagtttttcattgggaaaaggagggtcaactgcagtaactgcaatactgaaagatggaaggaagctcatagtagcaaatgtaggagactctcgggctgttatatgcaaaaatggcgtggcgctacaattatctgtggatcatgaaccaagcaaggaaaagaggctgattgagagccgtggtggttttgtatccaaccttccaggtactcaacatttctttattaaaagtctcagtttcaggctttcatcaggctgagcttatcttagttattgatcattgtcttcatttttaagccttcttttaagactaagtggcttatttgaaattttactgttatagattttgactgatatctgtcgctttgtcttttagcaactcatattttgactttctatactctaaggctaacaattagctttttggttaaaagcactccctccacttttttttcattcttaatgttaatgtgagtcttcacttgtcaaaaaaaaatatatatttctacatatcatttctaattaaacactattctaggcctatttttcaatagtgtatttcagatttctctgaatcagtaattctaatttggctgtggcatttttacttttgctactcttgtacggtaaacagaactttttagttgaaaatatttcctgttgagttctaacttgtaaatttttacaggggatgttccacgtgtcgacggacagctggctgtagcaagagcatttggagataagagcttgaagatacacctgagttcagaacctgatgtttctatcctgcctataggcgaagatgtagagttcttaatcttagcaagcgacgggatatggaaggtttgcattttaaattatgttcatacattttcctgttaacattattgtcataaagataattgactattactttatgaaaagaatcggttgctttgccttcttttctcttctttttatgtttatttttttttccttcatgaacatttatcttcatttggtaccttacaagttcaattatgtcgaataggttctgtcgaatcaagaagcagtggactccatcaaacatataaaggatgcccaggcagcagcaaagcatttgattggggaggctgttaataggaaaagcaaggatgatatatcttgcatagttgtaaagttgcaataatttttccttgaattatatgagctttaccttttttttttaactttccctcaagtgaaagaccaaatagctcatctgtgtgaatatgtaacatagatctatttcttttggtggctgtgaagattgtttaaaacatctactccactgtagtgtgtaaaactgattatgagaaggtttaccatttctttctttagaaatataagctcttgaatgttctatattttaattttctcttaaatccgaatgacaacaatttgggccttgtacatttttttcctctttgcaaggtatacctctgtgtttggctaaacacttgagacaacttgttattcctatcctacaacttatcctacacctatacatatatatatgtgtgtgtgtgtgttcactttcattaggataggtagaaatagaagagaaaggcttagttaagataagaaaaatgtttgagagtttggtgggatgttaaagagagactagtgtgtctgatctactcctctcattgtgagatcaagttgtaatgaagcaaggcttcaattgagtgatctagctgcaatcttggacagattggtgtgtgtattctctctctcaaactgttcaataaaattcactagcccttagaggctgttctggccgtggagtagacaggataacacattgttatcttggttgaaccgcataatatgtgttcttttactctttctcatctctgttattgcttgttgataatttacttcatgtttgtcattttcattgctcagcacttgacttgttgaattgtgtttgttttctgttcttgttgagctacatttcataacaacttctatggtgaaagagaataataataataaaaaactttaaacaacattctcactgcactgtctgttttcgcggtcgttgggaggaaaaatatgaagcctggccaggtagatgctgcaatccatgccagcagaagttgggggaaaaagaaaacagaattttgagggcctctttttgcttggtcatttaagcagtgatgctacaacaacacctaccacctaactgaaggtgttagttcaagccctgttgcaagcatgaaaagatgttcaatgtagaatatgcacacttttcttttcttaatctttttcacacaagttaagagattgcactgcagttataaaacaaaattaggtaaagacactgctgttttgtcttagaatcttttataaaaatcttcttttgaccctcaaacagaagttcactgctattattgacattattaacttatttgcatagtattcttttccttcattaatgaaaaatttttgttacttattattcgtcaccaaatactgacttgtgggatctgatagtagtaatgagagcagatgtccttatcaagtatgtgtacaatctttttctggctagactttggttagagtggtcaagacaagtgtcgaggatgaccccaaatttaatttagttttaagctaatgaaaattaatttaagttacttttgtgtttttttttatacctgtttttgattggctcctcatatatattcttaaaggtctttacagaaaacatgaaaaggaatccagtaaggtgattgaagttgactaattaccaatatgtcatatgcatagccttagcctttaaatgtgttaaagccccattcaagtttatcctaatctatcatcaaaatgaacaaattagttgaagttttattggaacatgtcctacttgtgactaatctgaaaacatatttatggttgaatgaactgcaaatgagaaaaagactactaatgaatgatactgttttagttagtagaagctagtaaatgaagaattttgctcacactttaataaacttttaatcaaatcatacagaagcttgtcgtgaaatttagcagcacataaatgatatgtgtcaaattgggcattacactttgattccattttcttgtattcagactacacaagtaccaaaagaaaaactgcacaactaccacatgatcaagaaaatatatattcataaactgtttctaatgagacctttaaaggagattcaaattttcttgtaactacatggaaggtaaactcaatttcaaattcagattagcaacaagaggtatttatatagtagataaattcaatataaaatttaaagaaacatttttcattaaaaaaaaaagataaaataaattaaaagttaacaattagggtatgacttaagtaaacaaaaaagtaactgtttacaccaaaagtagtcttgatgacatgaacatcaatatttggcatgtgacaagaaagatgacatctcggagttgagtagtctcgagtcatagcaagtcgacctgggaggagtgcctagccctacgcccaggttgacttcgg

SEQ ID NO: 20388 - DNA, 3337 bp, Cannabis sativa
aagtaggaaaaagtgtgtataaattagaaaaattaaaattatttttctatgtgcattcataatattaattatatgatactcctaataatagctcatttcctaatctgtagaatcaaatatattacaggttaaaattattgattttctttttttttttttgaatagattattgatttaataaattttttttacaggaaattattataattttttttatgtacccatccaagttacaacaatagaattgttaacatacaatagaagttttttttttcaaaataacttttagctaaatgttgtaaataaaatttacagggaggtccaattatcatagcccagatcgaaaatgagtacggaaacgtaatggagccatacggagaagcaggagagtcatacctaaattggtgcgctgaaatggctgtggctcaaaacgtcggcgttccatggataatgtgtcaacagcccaatgcgcctaagcccatgattaacacttgcaatggttactactgcgaatcgttcgaaccaaacagtcccaacagtcccaaaatgttcacagagaactgggtcgggtggttcaagaaatggggcgagagggacccacataggaccgcggaggacgtggcgttttcggtggctcgttttttccaacgtggcggagcctttaacaattattatatgtatcacggtgggaccaactttggtaggtcggctggtgggccctacattgcgaccacgtacgactacgatgcgccgcttgatgagtatgggaatttgaaccagcctaagtggggccaccttaaacaacttcatcaatctctcaagatcggtcaggacgttattaccgccggaaactggacgggttagttaaatttattattattattataaatatatccaatttttgtaaataagacatataattcaaaaatattttttcttttgcgataattaaacataaataacaactttctctcttcaaactaaatttttaagtattttttaagaatataaaaataaatttgtattcgtaagcctcaataattctttaaaaaaaatgatttatttttatcttgatttattcattgctttttgttaaaactaattcctctttttctgaaaataaaatgtggaattctgttctcactcctaaatcttttttttagtcatagcctgtatcattaattattttttatttgtcaaaatcattaattatttattcaattatagattattaacttttcaatattcctcttttgtcattttttttaatataaaattttaaaaaaaaattataatctatatatctctgtgtatccgttttaatatgtgaactaatttttagtcgatttttttttttattatcatgttaaatttctatattatagattacttaataattatttctaaattattttaaatttcttaatttttttgaataatatctgatgacaaaacaaataaatcagaatatataaaacactaaaattatttttaaattcttttaaggttgtgcactgtagataacccatataaataaaaataaaattattaaaattaattatatataaaaaaaacattattttttcttaaaaaaatattataaatattttattttattttatttttcgaattttacctgaatctcagtgagattaagcttattgagatttttaatggtgcagagaaggaaattgtgccgggtgttaatctaacaacccacactaacggcgctcagaggttttgcttcataagcaacacaaacacagaaggtgacccaatcaacgtcaatcttaacaacgacggcgtttactgggttccctcatggtccgtcactctcctccgtaactgcaacagcgagatttacaacactgccaagatcaatgctcagacatctctgttcgtcaaaaaacaaagcttgcctcacaaccatgaaaatcagaaaggccccggattcaaatgggtttgggcaccagaaaccattagagacacacttcaaggtaaaggaagattcagagcttcacaacttctcgaacagaaactcaccacttccgatgttagtgattatttatggtatatgaccacaatcgaagtcaaccaaactaagagagtgtttttgagggtcaacactactggtcatgttctccatgcttatgtgaacaagagatttgtgggttctcaatcgggtacaccgaatcaacttgggtttatctttgaaacccctgttgtactgacacgtggcaaaaacaacatcactctgctcagcgccaccgttggattggctaattacggttcatttttcgaaaataaaccgactggaatcgctggaggacctgttcagttagtgggaaacgacaactcctctgttctaaacgacttgtcgtttaataattggtcttataaagttggactgaatggagagtggaagagggtgtttgatcccaatgctcatcaacatcatccatggaggactactgacccaccggttaaccggagaatgacttggtacaagacgagtttccaaaccccttcaggcgatgaccctgttgtggttgacttattgggtatgggaaaaggacatgcttgggtgaatgggaatagcttgggtcggttttggccttcggttttggctaactcaactggctgtggcaactgtgattaccgcggcgagtacaaccccgataaatgtgtcaccaactgcggcgaaccgtcgcagcggtggtaccatgttccaaggtcgttcatgaagactgatgggaaatccaacactttgattttgtttgaagaaattggtgggaatcctaaagatgtgagctttagcactgttggtgttgcgattggttgtggtacagcttatgaagggaacacaattgaactttcgtgcaacaatggcaaaattatttctggtattgattttgctagctttggagatccaaagggagagtgtggttcttttactaaaggtgtttgtgaatcgaatgttagtgtttctgaagttgagaaggcttgtgttggaaaagagtcttgctctgttaatgtttctacaaacacatttggctctgttgattgtggaaatggtgttattaaaagattagctgtacaagcttcttgtgcttagaaattgtgaagagtgtgagtgagtggtagcttaataatgttagtaataatggggtttgttttttctttctttgcttgattttattagtaattgtaattgatactttttaagtatgtgaataatgtggtttgtttttcattattgctttggtgtgagtagtgttttttcttttcattattagttcctaacctttttccatcttgataataagtcttttgtttt

SEQ ID NO: 20389 - DNA, 2716 bp, Cannabis sativa
gacatatgtggtgcaccacttaaaatgatcttctatgaaatccctactctttgcaaacccccccttttttttctattttaaaatgactgtctgtgattggtcagcaatatttaataaaaattatattaaaatgtataagactcgatatttcattgcatcaataatgacattataggttgaaggggcgctagacattctcttttagtatttctctatatttaaatggagaaatgataaaacgcaccagtagtgtttaacaccttatgttattggtacaattaaatattaagtctcatataatttaatataataacttaagaagaaaaaaataaccaaaagacatatttagaatgtggtaaatgctcatttaaatgacacctacttttttctcggccaaagtttcaaatgagaaagtacttgacttccattaataaagactactttttccccaaaacattctttacaaaatataaatcttgagaaattatactgttggttaatgcacattcaacaggatattactaactatatactattctattgtgtacaaatgacacttgggacaggaatatctaattctttaaagagaaaaagttaaacaacattattattgcttggcattactcagagatatacatatgatgaaatttacactttttaccattatacgttgacgttgtacatatagatattgtatataaatgggcaatatacaatactgtgggtgggtacgtaattcttactaagataagaaccatgccttagtttcactagctatttattaattatgaatacgtgtgtatgaaatgaaaaaggatacgtactttttatttatttggcaacaaaaacgagtgctaatacacaaattatattattattttgattaaattattgtaatttgcagacaaggttcaggtgaagtgtgatggagctaaagattcaatttttttgaatttcaacgtgtgtggacaacggctactcacttctgtttacacaactttcaaaacactttcaaaagcctgtcttttactattctcataaaatacgggaaaaaccactttactctctctctctctctctctattttcatgcttcaataaaattatcattattgctagcgttggtctcggtggtactccattgtcttatactctctctctctcggtgtggtttactgtgtggtgaccaggttcaaaataaggattttgcaacaagtttagaggataaatgaaaatgggtactttggtttggtttctctcagtcatatcagtggcgatccacttcttccccagctcttctgctctcaccgaagatggtaaggaaggaaaacctttttctcttcttctctcacatgtatttttctcactcactgtttggttgctgagaaaatcaaagtgggggagaaaaaaaatctggaacagagaagtttgaactttttttagttatttattgtaaaaaaagtctctgtgtgttttctgcttatctaaatcaagcatctggggtttaaagttggaatatttgttctaattttcaggtctcactttgctggaaataaaaaccactttaaatgacagtaaaaacttcctcaacaattggtttccaactgatgaatctccttgccaatggactggtatctcttgcaatcctgaggaccagagagtccgtacaatgtaagtttaacccgttcttcatttgtaccattgttatttgattaatattttccattttaagcttaaagatttctacttgggtttttcagtaacttaccatacatgcaacttggagggattatatctccaagcattgggaggctgagtaaactacagagactgtaagctcagatgtccatctctcatttttcccattttttgtttctacagtattattatttttattgatattttgattttcaatatgagacagggcacttcaccagaacagtttgcatggaaacattcctattgaaatcacaaactgtagcgagctccgagccttgtaagtgaaaattattgcctgagttctttacattctcatacgctgaatgttaaaatagaataatatagctatgccatcagaacttagtatgaaacatactttctttgactacttctctatgcaggtatttgagagctaattatctccaaggtggcataccagcaaatattggaaacctttcccatcttaccatcctgtaagtttttcatttttggtgggtttggtggagtaacctttgtagtttcagcttttgattgtagtgatccattgttaatgaactgtactgtactgtgagaagttgcaaattaattttttttaacaagttgctaatatgggtattgattcaatttaggtactaatattgctattaacattcaaaataaagttttgaacaatgaatggtctttgttttcttatagtaaaattttgaatgcagggatttatcaagcaatttgctgaagggagctataccttcatctataggtcgccttagtcgactacgcaatctgtgagttcaaagctatatttatctccagtgtacgctgttgttgataaaaggattatttcttgactgtgctagtatgcgtttgtgtcaggaacctgtctaccaactttttttcgggtgaaatcccggacattggagttttaagcacttttgggagcagttcgtgagtagtctatccttgtgtcaataacttctgcctatgattgttagttggca

SEQ ID NO: 20390 - DNA, 5896 bp, Cannabis sativa
gccagttttagcctcaaaactttgggttcggccgaagctggctccaggcatgattgtagcccttgacaaatactcgtggacattttgcttgccacaatttagaacagaggaaaaacaggggagtaatcccggtagttttggaattggattgagaaaacgatatccaagtttttggagctttttgagataataataagtttaatacaaatggggttaaggacaaaggtttgtaacgaaaactccaagttttggttatagtgaatttaagatggataacgagtttaggggaaaaaataagagtgaattaagaaaaactcgttcaatgaagtgtgaatgaagagaagggaggaagggttgtgaatttatagtaaaatattggaaggagagagaaatagagaattatttatttattgttttttttttctaaaagaataggagaaattttttatgcccacttgaattatacaaagtttactctaccacataaatttaattatgggaaaagagaaaaaaaatatatttgattgaaaatgatgaaaactgtcttttaattgtgtggaataacaaattgctgatctggtttttatttattttattttattttatttggacatatggaaagaaattaaatagcaaaagtagtttgtaagatttttgtcagagagagtgtaaaaatttatttttctaaaatttgaaaggagctaaatcatgcggttagatgtaagaaatgcctaacaccatctccagtcatatacgcttgccaaaagataaaccaaaccaagggaccagagatacagacaactccttttcatatttactcacttgcaaattgcaatatagctttgtttgacttgtctttctccaaaacgccaacgttttcatggtgtgtgtgtgtgggcttttttaaatttatatctcaaaagggtcaaaagactgatcaaaacctagtggctcagccccagaataaacaaccaacaagcagaagagcaaaaccatttctaaaatccttcactaattataattaaccattaactaactcccttctactactattgtaataatgagttatattatttattttttgagaaagctatattgtaataatttattgactatctacacatcttagcaatttcgctaaaagttattgagggaaaagctaataaatcaatttaataatcatactttcgagtgatgtactaagctttccaccataaactttgatgacataaagtttagtagaggaccattaatcttcttaggttctactcaagtgatttgtgttaaccaaattttttatataaccgaccaaattgagtacttcattggtggatgcttaattaagccaatagatagacaaagaataggaaaagaccaacatttatgtcttctaaggcaagagctctctcttccaacctttttactttctttcttcttttttttgaaaggaacctttttaccttcagtgctcataaattgcttattatgtactctttcatgaattatacaactcaaataactaatgttaaataaattaattagaaaaatctagttaataaatacatgtgtcattattcaaaatatttaaataaataataataaaattttgataaattcagtaactaaaattgtgcctcaaatattaaaaagaaataacaataataattatttactaaaatatttgtcaactaaaaaaatatgacaataatgatagaagagaataagtgagctaaataaaaattagacaaaaaaaaaacatatcagacataacatggtttagaccgtcaataagacataattaattcacaaatcacatgtattaattaaatcaaaaaagttacagcaatagaggttttagatacaatttggcagaatttttccttactcagatactttttataaattacagtgtgatccttaatttatagggaaccagatgatgagtcgtactaatctgggctcaatgtagaatttcttaatctttagctcactttaatggaaacgaatacaagactaaactggaccaatttctcaagaatccactcaatggacatgcgcactccaatacacacaaagtccatgacctgtcatttgcttgggaaaggcgcgtgagttatgtattgttggaaaattaagactaaagtacagaattaaatcaactaaaatttaatcaccaaaataatgacaagaataacaaacacaaaacagtaatcaaagaaaatatggatgaacagagtattaaaaattcaaaaacgattaaagcggtaaacaataaaatcaacacaaagatatatattggttcaagttcgataaatctatgtgaattatgactctactccagttctggaacaccaccaaagtctctttattgattgagaaagaacatgtacaatacaatcgaaagaattctttgttggatctctcaaagtgtttcaactctcacattcttgcccaataattttttcatctacagaagattctttatacaaaaatccaaacccagtctctctattttttaagtacctctctttgtctatctctaaacatctttctctttcaaactcaaagtctcctcttgaaactcgtcaatccaacattttttgaaatgataagtattggtggtatatataagctcaggataaagatcttaaggtccgtagctgtaactgataagttgttaagttagttactccataataaacttaacaacctcctcgaaacataatctccatgtcagtacaagatgaggtgcttccggatgagacatacgcttcctagttaacaaactgaagcgaatgctaaggagcttctagataggaaaagagtcagctgtagtcgactaaccggaacatccttccaagaagaaaaactagccatctgaaactcctttctagggaaggactagctttcctgaagactacacctagagtggacatgatagtcatccaagtatgcgcttccggatgacaactatcattccacgagacttcttctggagggacaagttagctatctgggaacataattcttggagacaactaactttctattacttgaacagtcttatggagatcttttcatttagagaaactataacacaaattccacctagttactttaaataaaaataatgacggtgatgaagacagtatgcagccatcatggttggtattcaaaaaatttcagtttaataacttctgagactgatgaagtccaagtaatgcttgaacttttttactgttaagaccttagtcccaacattggtaggattatcttccgttctgaccttctctaaatcaacaagtcattcttctatcttttctctaatccagtagagtcctatgtctatatgtttgcttttttcataataaaatggatttttgcaaagatggatggatgattgtatatcagagtacacagtcactcctcttcttattttctttaattcaaactaaattcctcgaagccataacgctttcttgaatgcttttgtagtcgccataaattctactttcatgatggaaagggtaaccacatactgtaattgggcttttcagcatatacatttctggtttgtcaagaaaatgtaagaagtggttaattttttggtctctctattcgaggcatagtcagcatccacgaactcttttaacttcaattgtccttttgctttctcataggccagaccataatctaagtaccctttcagtatcttaataaccatttgagggccttctagtgttcaacgctcatattggacatgaatcggcttaggatgcttagagcgtgagctatatccggtctagtgctcaccatcacatacattaaatatcctaagaccatagcatatggtacatccttcatttcctctttctccttcaaactgttcgaacactattccttcgaaaaaacaaattgtccccttaatagagtggatgtactctttgcatcttccatgttgaacttctgaataactttcttgatgtacccggactgcttcaagctgatggtcccttctagttccttgaaacatcaatgttaagtatcttttgaactggtccaagctctatcatctcaactctctcttgagcttagctttgatacttttgatcaatgattggtcttttctcattatgagcatgtcatccacatagagcaataagaacacagctgtagattactcgagattcttgaaatataaatagtaatcatatgttgatcgtttgaactcgatttgttacatacaagtatcaaatattttgttctgttgtcttggggactgttttaaaccatataaggacctattgagcttgcaaactaactcaaatccttttccttccacttgaaacccaggtggttgcctcatgtagatctcttcctccaagaattcattcagaaaagcagtcttaacatcaagttgttcaacttcaaaaactatttgagctgctaaggacaacatcaatcttatcatttattattttaccacaggtgaaaagatttcagtatatagtcaattactttcacctgagtaaaaccctaagcccctaacttggctttgaaccacactggttcattctcattgattccctctttcaacttgagaatccatttgcacttcacaatctttttattctctagattcggtacaacaacccaagtcttgttctttcggagcgaatccatctcctcatccatggcctaaagctattttgacttgtttccacctaaaatttcctctctgtagcttctaggctcttcaatttcattttgttgtactgctgccagtgcaaatgctattaaatctgcttccgcaaaccttgctggagggtgaatctctcttcttgttctatcactcgccaactaataaccttttagacctatctattcgagtacttccaaaaactctattttgtcttcgttatcttctagctcagcatcaactttcgtatgtgcactgtctttcagctccatattagctttcgacggtgaacctccttctagatgtttcgttccgtattccacttccatgcatgcagtgttcctatttcctatttttcctacatcacgtggagatacactacctttcctggatgtcaattgaggatattccaactcattgaaaacaacattttttgcaatctcaaccttcgatctacccttcttagaattgtagattctataccccttggtacctaaggcataacctaggaaagttctcttaactgatttaggttccagtttgtcaatatattggtgtacatatgcactacatccaaaggttcttaaatatgttaggtttggggttctgttgtaccacattttataagggtttttcaagcctataacctgttttgggcttctattagtaaggtatgttgcagttgctagagcttctcccaaaatagtttctctaattcagaattgtactgtaaacatctaactttgttcaacaaggttcagttcatccattcagcaacactatttttctctaggatcttcactacagttctatgcctagtgatcccaaactcctaacacaacttgtcaaattcagaggtgataaactctaacccattgtccgtcctaaggttcttaactttaaggtcggtttggctttccaactgagttttccaaattctaaattattccacgcactcattcttagttgctagcaaataggtctaaatatgcctactataatcatcaactatagaaagaaaatattacttaccggagtgagttggcactttgtatggcccctaaagatcagcatgcacatattcaagtatcttcttagttaagtatcttcttagttgtgtgcctcgctggagtgaatttcagcttatgttattttcctaaaacacgagcttcgcaaaatggtaaggcacaagaattt

SEQ ID NO: 20391 - DNA, 2986 bp, Cannabis sativa
  modified_base (56)..(62): a, c, t, g, unknown or other
ttttgtaatcaaatattaatgagagttgttttattttttattttattattttattnnnnnnnaataatattttattattttattatatataaataaaaagtcatccgtaaatttcacataaatcaagaattcagctatataggcacactttatatagaatagatatacaaacaacgagaaagagatgggcttgagctaattagcgacttagttttcttttgtaataaaaactattaattaagggtgtttatccgatccgcaaatttctacttattgatataacttgtttatctctactcatttatatatacgtacgtttaaacataaaatattaaaaatatttatataaaaaaaaaataaacaaacaaattcagcaaaaatgaataaacaaacaaataaatgaatgtaaaagctttaagaatattaatgaacaaataaacttaattacccgactaatataaatagaggaatctttgtctcactttcttttgtttatataatatagactatgtatttataaaatataatatcaaataattaattaatgaaacagaaattttgtatggcagactgtattctgtacctatcggaaaattcgttgtcactctctctctctctatatcttacttcattatatatatatatatattaatcaactctccctatatatacgggggattccatttatttgttttctttcctgcatgcatgcagactgcagttcaactttcaaggaagccatatatattatattggaaatgctaaattagcaatggttcagattattatataactaaaagaggttgaaaggaattattcatagcttcacacttatagcttgaaaggaattattctgtttgaattcttgatcctatgagcttgtgggttagccatttcataaaagaggttaagtacagatgagttgaattattaaaaaaaaataaaaaaagtacagatgagttgaattatcaaaaaaaaaagtacagatgagttgtcaatttcagtttctatactatgcgcttactaattcaaaatttactttaaattaataaaatgcgtttatcttttagtattatttgttttcctttcactttcagtaaaacttttttttatatatatttctttcagtcttatagaacaatcccaatgatataatattaaaaatgaagaatttttgtaaatattataaagtataaaaactcaaattttattagtaaattatttatacatgatgtaaatgggggactaaggcgaattgttgtgattataaataacaattaacaaaagaagttaatttttcgaacattttttttggtttaaagcactaatgaccaatatcattaaaaaccaaataatatcatacatattaaaatagtactacacattcaaaaaaaaaaaaaaacttcatcttagtcaaaaaaaagggtaaaaatatccacaattaatctatatacagttatctattaatcgttccaggtgcatgaattagagacagtattcataaaaatctaaataacaaacttacaatattctctaataataaactaaaattattgaactactaaagaaacaaattcaatgtgtacaacctgtcctaaggaaaaaaaaaaaaacagtaattgacatagattttgcttagaactaaaaattaatgaatagccttacagaataatcttaaatttaatcctattaataactcaaataattttcaggtgtatttcaataagctacgagcggtgtttgaaaatgttatagcttatgtggctcgctttagatatttagcgacttatggtttggcaaaacatgctctgggattggacgatgaactatcttggttcgagaaggttccagcactggtgacgatttgcatcgtaaattcatgagtaattctaatcacttcgacaaaaaaataaattaaaaccaaaaaaaaaaaaaaccatagaaccttaaaggaaaacagcaacactacatgtgtaaatcaagagtggtctaaacagccagccatgccacgtgatcattttattttatgtatagaacaaaaccatttaagtgtaatctatatataaatagataaataagaataagatggcagaagattataaacgtacggtcctctcacttcattgaccaaaccgtaaacagatcacaaggcggcaagtaagaccatatatggtccattgctaagagcactcacatattttatttttagagcacctttaagagtatcttaaatagtactattttttcaaaaatatattcatatcatcaaacatttttttataacattttcaatattagaaatgttttaagtaccctaaaatatatatatcatcttaaaatattattttttttcttcttcatcaatgcaacaaatgtttgtaaatttgcttgagtacacctatatttacagtgtataatgcttgtaaatttggtgtaaagatgcttcaattaaaatttataaaattaaatgaattttgctttaattttttatataaaacattaaatattaatttatattaccaattaattattgtaatgttttcattataatttaatttttttaagttttgttgattttaattttttaatctttttaagtgtcgattttaaactgacactaaagggagttttagtttcggttataaaacaataacaaaactcaatagtattaattttaaaatgatattaaatgagaaaaaatatatgtatactttaagtgtcggtttagaatcgacacccaaatttattagtatcagtttagaattgatactcaaaaattggactttttgtctcaataatacaggtgtcagttttatgaacagacactaagtataagtttaaaaccgacaccaaaaatataatttataatagtagttccacactgtaaaaggaaaacatgttccctcactataatatatacagtagaacctctatttaagaatactctatttaagaataacctctaatttgttataaaaaaatcaag

SEQ ID NO: 20392 - DNA, 7124 bp, Cannabis sativa
gagggagagatatgaacacaaggttttaaatctaagcagataggtgaataagttgctaggatcccacaaagactaagcatacgagttttagttgctacaactatgttggcaccactatcttctcatggagtggtcttttatgcttgagttgtaatgaaaatatttttcataatttccatagaaatttatacaatctagcagctatcagtgtccctaccgcatgaatgtaaacacaagataagccatttttttaagagaattattagtgagaaaacttaagaaaatgtcgaggtggactaaaagagcgagcacctacaaatatcaagatatctctacttcgccagccaccacaaaaagacaaattcatctagaattctcaccttaagattaggtactcgaacaatctgaagaactgtagttatcaacgcaataccctggttagatcaaaattaatatattagttagctttttcagtcatatacaaaacataattcaagataaaatataatatatatgatcaaattgattgaaatttttattcatgtgagaaaaatgtgctaaagtggcagtgtgggattgaaaggatgcatgacaagtgttccgcagtccaagataacagagacatttttcactgaagtattctgttgctgctactaaaacagcttgatatgagttgagtatgtgacaactgcaaccaacttcttaaaaaggaccaatgatatgctcaaggacaaaatgaaaacaactaattacaagctttcattatctacatggtatagggtgtttgtctagaaataattcattcactcaaaaacttgttattcaccggaaaacgatatcattttctcagtagagctgaaataataagccaacaaagatagatgcagtagcctcattgcacttgattaaactggacattatatatcaaaaacaaaatctaaaaagactaaagaaagttaaaatgaaaggtaacatttatttttcttctatttcttaccaggatatcttgacctatccaggcaagtgagtcacgacgataaactgcccaaacaacagcaaacgtaatgcagaaaggagaaacagctagagtcaggtatgaaacagctccaagtaatggcacttttacatatgactctccagcttgtttaaaacatctgaaactatagtcacttagtcatcagtttcataattgtataacaataagggaagaactatatcagcaagaatggaaaaccacatatattctggaaactagctgagctcccagaaaactcttttaagtagctgtaataatggaattttattatgaacaattaaaaataataatatttgaaaaagtttagctatgatgttcgaccttaaataaaacaaaatgcacttcgagtgtacaagatatttgatgcttgtggtgcaaatcatctttatcacaaaaaacttcaaaagagatgattttaaattaaagttcattgcaaaaataaagaaaactgcaaggaagatgtttccaatctaacaaaaatcctacataaatgctaatgaaatcctttttcctcttttcataagggatcgtatttgaccttgaacagaagcataatatagctataataaaaattccctcaaaactccaaatattataaagaaaacataatgaaaaaaaataagaaaaggggacagaatatataccatgataacagagccaccaagcaggtttgcaggccctgtaaacacataaaatgtggtgttcagaattcatgttgaaggaagctgagagtatgatgcaaaccaattttaacagttcatgtcccaatataagaaatttaagcatatttatgcaaaaaccttattttatatttattaaatttgataaataattgatgaagaattaatttcaccaagttaaaaaaaatggaacagaggcgcataattagggtcataagaattatctaacttaacaccttcattaaaaagctgaaaataaataatgcaattaaaataatactatcatgatttaacaagaaaggagcaatggcaaaagtgggttgcagtcttggggaggaaaactatcacttaaaattaagtttctaaagtatttttcttagtagaaaatattcagataataggaaaaatagtatagtatatatcttcatatataggcacatacatatctaaatctatgtgcgcatttgtctatctgtggataacacagaaggtggccgcacctctactccaccaatagaaaacaggaccaccagaacctccacaaaccagaatgacataagtttgtaaagcataaccaagaagcatgaagcaatcacaacaaagaggactgctgcagtggtattaatgtccacataaccagttggcccagcatcttccaagtgtaaagtttcctctgaaccatcctggaagcacatgtagtagtcaaagaagtcagtgaaatattcaggcaaggaaacaagctcaacaaaaagaaaatccttgcataagcttaactaatattattctggaataagactagtaacctttaatagtttctcttgttcaagtgccgcttctctagcagtccatgcagaccagtatgatgcacataagatggtaccaacagccataagccacagaaatacttctgcaatgtcaaccagtggacgcaatggagagtatagctgcacagatactggagaaaagggtatcaacccgtcaggatttgcaggaaaagtggatacaacaattgctaagttacaatactgagttcgctacaaaaggattattttgaggaggcaaagcatacccttggaattattcttaagatctgtttccaagattgtaccagcatcttgaggtagcattacagtaggtatgcctatgattatgtcagtttcattctcttcgcacaccatcttgaaaagttctgtgaaatagaaagcaacatttattgaaacaaaaccaaattctgacatatacattttaggtcttaattatgattcaaacaaactctactactagaaattctgattctgttctctcccagaagattcttatggaataagaagacaagcagcttaataactaaataaattaacctaatattttctatgccttataaattttaataaaaatctgagaatattcaggtatgcaatgtgttggctgggactaagcacttatgattggtaatggaacattacatgcaggtacctgttcgatagtttataatgagaagagctgaagcatgagcagtttctgcataattagcctttgttgtgaaactgcaatttcctctatggaccaagacaatctcccctgagagctaccaaaaagccaggtctccaaattatgagacacacaacaaatgaacaatcttgcagattccacatataaaacgcataaatcacttattttaaactttgaaagccgtatcaaggattatatagtctacactaagagtaccttttgctttggtggactacaatagtcaggaggatctgccagaaccactctagtatggttggcacgtttttcctttgattccaaggtaggaccaaatcgagcaccaacaccaacatactcactggtttctatgccatcaacccaagtagggacttttacctacagggttaaacagaacttatcgttgatatcaaaccaatcacaacaaacaaatgagaaataaatttaatagaaccaagaatcatgcctgcctcaaaaacatgtgttcagttcagatgtcttagtagtgactagtgagtgtagagaaattaggtcaataacttatatacttaaagcagtgagttgactgaaagtaggttaccaccagatttctctactttcaattttacttacagtaatattttaataagcacagggtttagagtttatgctgtgataaaggaagcactagaaaaggattgattccatgagaaatgattattctatttgtcacattttttgttcacacaacaacataagaatcccattttgcacaggcatggaagactaaattatcaacccaaataaaactcactcctaattaatctgacaatcatcagaacccatgttcttcctcaatatttttacattcaatctatgtgggacaaccgatttgatcggttaaaaagccaaaactattaacaataccataccatgtatgaaaaaaattatttggtcggtttagaatcataggatcgataatttaatacaattttacttaaaataatcgtttcatctcaatccataactaactatccatgaaatataaattctaaggtgatcaaaagtcaaacttcagcacaaaaataaaataataaatgccaagaaattttaaaattgaaaaccaaaaacatcaacagacagacatcttgtcttaaaacagcttatagtatgttctcagcccattattttgtgaaactagaacttcgatcaaatccaaaaaaaaaaagtcaactaggagtaataagatgtgaatcaagataaacaacccaggatctaaagtggaaaggaaaacaacaagaaagcacggttgttaatattgaataacttcataactatagaacacaacataaaacttgaaatttgttagagagagcaacagttcaatcctgaaatgaactgagtcaactgacaattttattatatcctcaaactgaaagcagaagtgttaagacgaaataatttagtattatttacatgccaaacaggggcacaagaaattgtgggagctgggaggtgggatgggaaataaagaggcaaattcaagttatgggctactgaataggcataatgtatgtacagacatcaataataagaaaaactttttttgataatttttacgtcagattctcaatatttagtacccaaaataagaagtctgattagagtagcataatacagctggtctattcaaatcacccaattaaaaatttcaaagtttcaacacctgaaactggcaaaaagatccacagaaaagaaaaaacacaatcttttttgtttttttgtcttactcagccaattttcctagaatcaaacagagactaataaatgaaaaaatatatatatatatatataaataaactataattcaatcaaacggtttatttgcaaaacccaaaatagctaaagcttaaaataaataaattaagtggcattcttgtcttgtttatcccagtgacaaaataaaaactaataattcatttttcaatcattaaaaaaccaaatattttaaataaaatataaaagttcttccttccagtttcccctttcacccgtttttgcagctgaaaatcaggaaaataaaaccaataagtagagaaattggggtttcttaccagaacaaagttgttatcacagccaggccttttgggagcaatattatcattgtgaactatgtccccagctgaaccaacctccatactcaacaccataaccagcagaacaacaagtataactttctgtaaatccatttttctcactttaaaaaaaaaaaaaaaataacactaaaattaaataaatttaaaaaaaaaaaaaggtctccagaagaaaattaaataatggaattataatcagagtttaaaggtaaaaggttagggtttcagaaaatgagatgcgaagaagaagaagatggaaaatgtgagtgaaagaaatacggaaaaaggaagagaaaagatataagggggaagccaagtgggattgcgttttgctttttctggtttgtcgtttttgtccaggaacgaaggccagatgagaatggaaattaattaattttttttaattattattaattaaataaaataaagaggaaagcgaagtcatccagtggttgtcgttgcgaaaccgttgaactggtttttcttcctaaccttttcagccttcggagtctaaagctatctcaacttttcctacttcatctgttggcgcgtgtacccacgtaccaattggtttcgacttaaaaaagtgtcggagaataagacatgatgtcaagatgacattattatcgaagtgatttttcttcgtcaaagttataacccgtttattacgtggccagtttgaataattttaatcctatctttcttttcatttacaaaaaatattacccttctttttatttattatctatatatattttacaatacaccctttaagagatatattgatatattattatttcgatatttaaaataattttcagttaaatatttttgtatagtctttttgttatttaaaacatcttttaaaattttaaaaaatctaaaacattatgttatatacgtaattattttattttatacgtataaattattttaaatttttcaaaactaattttatataatattttaaataattataacatacacaaatataaaaaaataaattattttttttaaataacaaaatagataaatagtgtattagtgcatctcttttaaaaaaatgcattgtaaaagcaccttatatttcatatttaaaatattagcatattgaaaaattatgcaagctagcattaaatttagattttccaaaaattagggatataaataacttggcaaatatatttaaacaaaaaaaatatattttaacaaagttataaatgattatattattaaatttatatttttttttatgatcggcctatacaataattataagatggtataaaaatttttgtgttcgaaactttttaagaaaaaaacaaaattaaaaaggcatgcctaaccaccccaaattaatgacttttttttattttattagtccatgtacatattttggttttggaccagtgaataacgttgttatataatggtgtatttggttgtattgaattgaattatatttgatgtgatatttttttatataactatatttaatatttatttttatggaaatttaaatatttaatattttctgtttcaaaatatatatatattttagtataaattaaaatttaatattataagtgtcatgtttttatatgacaaattatgttatttgatattgtgttagttatgttctgaactatatagggttgtacaccggttggtttgggcggtttgtcctatatattttttaatccaatttaaagtttggattgctaaaattttaagtgcaacccgccaatttgaaaaaaaaaaaaaaaa

SEQ ID NO: 20393 - DNA, 5295 bp, Cannabis sativa
  modified_base (5229)..(5250): a, c, t, g, unknown or other
ttaatttaatatttataaaattataccctagaaagatcttaaaaataaagtttattttctatccttagtataaattttgcaataaatattatgcaaattacttaatttaagttagtccaaagttaattaaaattaattttcaacttaaatttaattttctacaaatacatacaattgaatttgaaatccagtgtattaaaataatatgtattctaaattctatttaaaataaaataaaactagaaaaaactattctaatttatgttgctcaaaaattaaataaattaattttcaacatacatataattttcctatttaattaaatattttaagaaaaatatcaaatatttaagtgtctagaacaaatcaacttaaatattaattttcttattaattaaagatatctagaaaaataccaaaaaatttacctagaaaatatctatctaaataattcataaactaatatattttttttgtcaatcaatgtaattcattactccaaaaacatttacaacctattagcatcttcaataagaagacctgaatactatctattcaatacaataaaatgtaattacacaatctatcactctttctttcttccttttccttgttttttttttttacaaacagtgggcaaccactatagtaaaagctgaaacaaataaaagaagacagctaccattttgcaaaccagtcgggagctggctggtgttttttcgactaattacacaacactctattctttacatcctactttgtggcgtgtacaacagtatcatgggctaatctccctgaattccataggaaatcattttgatttttccatatatgatacaccaaagcagccactcagcagttataaatgccttccaaaacctgcttagttttgctctttccagccacctggacagcttactcaaagttgttgcttcaactctccaacctagccaagctttaacttgagaaaaacaaacaatagagaatgtgcaagagaagaaaagatgctctgaagtttcgaggtgatccttacagaacaaatggaaatcttctccaatgatgttaaatttgtgcaatctttctctagttctaagtctatcttggattgtaatccataagccaaagctatgcctagtaatgttgagtctattccatacctcatgaatccatttaacttttctttgagaagggcaaagagtcttgtagccatttgatatcctgtatttggtgtttgtgaactattgagtgtccataacacctttgatttgatttttgaccgaattcaacttcctccaataccagcttgcttgaggtggagcttgataagtccaccaatccacacctttgatgtatacacaatgtatccatctaatccacaggttgtcttctttgttcgcaattgcccacacatattttgtcattcctgcaatgttccactctgcaattcttttcaaaccgattcctccagcaacttttggttggcaaacatgatcccaatctattgatcccgacccttgagaaacatgattgcctttccataagtaggcatgacagatggcttcaatatcccgtattgttctctttggaagcaccatgacttgactccaatatgaatgaatggacatgagaactgagctgacatgtataactctcctcgccagagacaaatttcatgtactccatgttttgatcctgactatcattttatctgctagaatcatacattcctttcctgatattcgtttcgcacaaatagggatacctaagtatttgaatggtacctcttttttgaaaaaactcgagcaatcaagaatgcgttgtatttcagagcataccacagcggtatatagcatatttgttgggattcggctgtaggccagttgaacatgaaaacagtttgagcccctgtaacatatagtaaatactcttataatagccatgacaaaagagtataacatcgtcagtaaacatcaggtgattcaatttaagttcagcacatctatcatgaaatttgaactcctatttagatccaatatttagcattattcttgatagatactccatacctagaacaaagagcaaagatctccctgtcgtagaccccatttccctttaaaatatccatgtaatgagccattgaacataagtgaatccctaggtgtgcgaacacaaatcataatcaacttgataaatttatcaggaaactgaaaggcatgaaggatttcttccaaatagtccaaatcaagagtattataagctttctgaagatcaagcttgatcatacagccgactttagaattttttcttccatagtgccttttcaaatcctgacaaatcatgatgttatgagctataaacctgccagaaaagaatccaccttggttttgcgcaatcagatcaggtagtatagttttcaatcttgaacagaggagtttagtagcggttttgtagattacattacaacatgcaataggtctaaagtaactaactgtattaggacacttacatttaggaataagttttaaaacaatagtattaatttctttaaggatctgacgtgtatgcaaaaaagacaacaccgcttcgctaatatcttctccaattaggtcccaatcttcctgcaaaaagcaactgctatagccatctggacttggtgctttaattcctgggattgcaaatatagctttcttgacatcatctttggaatactctttcaataaaaattttgcttgatctttgttgacaataggtcccaaattcattactcctttgttaaccttcgtccttccttccattttagagccaagtaggtgctgataaaatgaaaggaaagctgctaaaatttcttctgctttatcagttcggactccttgttgatcttcaatagaaagaatactgttagacctcctcctctccttgatactagcatggaaaatggctgtgttttcatctctatttttaatccaagagatcttagatttctggtgcaaaaaagaattgaggcccttcaaaagttgcccgtatttgatacgaacaacagcttccgtggctatgagttcagtattaagatgatcagattgtaatttcagctgagtttcaaggagctctttcttcgctttttggtagcattttgtatgttggaaaatgctgccgattaagctctttaaaacctcctttaagttgcttcagctttgttacaatttgaaacagcttagatccatcgattcgttgattccaaatctctgttacaatcttagtgtagcgaggatgggctatctacgtcttaaaatacttaaatggtttttttccaccaaggatttcatgagacaaggagattatggctggagtgtgatcaaataactcctcagctgaaaaaattactttagcagaagagaaattatctaacatattttgattggcaagtacccaatctatcttggagcgaattccctcattaccttgccttttgttattccaagtatagtagttgccactatacttaacatcttcaagcatacaagctccaacacaatcaataaaatccattgcagcagtgtatttcactcttttcccaatcctttcctccttaaaaaaaatatcattaaagtctcccataacaatccatggttcatgggaaaccaaacattttaaatcagttcataataatttcctaccatataattctttaaaagcatacacaaaagtagcagagaaagacttagcatccaaagtagagacttgtagatgaataagctgacttgtacattttagtatgttccctgaataactagagggattctaagctacaattattcgaccgccatcatgccaagcaatattagatgtaaaacaccaccctttgaacatatttaagtataagaccccaagctttgaggcctttactctcttctcgaggagaccaacaagagcaacctttttagcatgcaacatgcctttgacttgatttttttgaccatggtcgttgatccctcgaacgttccaacatacgattctatccttttcgaagaggaggatctccccctcctcttgtcttccctaatgtagaaactttgttggatccaatcgtgatttccccatcaccaatagcatcagcagaaccgtgaccttctgctccaattttgatagcctccaaattgtcaacaaagacctagtaggtgttagcaacttgagttgtccctacataaacattactcttcactttgaagcctttacgaacttgcttaaaaccttcattatctgttttgtttttgctgtcagcaccagcaccagcagccttgctgctatctttaactatccattattgttgtttcccttctttcttcttgcaatcttcagtaaagtgtcccaagcctttgcaatggttacattgtaaaggcttccgctcatatttaatgactaaaaacacgttaagtccatgttcatcctcaaatgacacacgtttttggaattcctactgtattaaaactcatatgaggaccctcgaatagttcaatttgtttctttcctttgtcatattatccatctgtaaaggggtgcccaattgccctactattttgaataaggatctctcaccccaatatttaagttcaaggtctggtagttgaatccaatttgggactgatctaatgtcttctttcttgaaattgacatccggatcccaagctttcatcactacaggcctattgttaaaaaaaaacatatccaccattcaatatttcatccctggttgcaacagaatcaaattgcaccaggaaaacaccatgggacagggatcctactctatcaaccttatctttccatatcctcctgatgaaaccttcaatgactgataatggaggattagccccaaggatatagcaaactatagaagagctccgaaagtgaacttcatcttcaatatcttctaaagtcatcttgactttactaacatgttcagagttcttaaaagatgattctatgtttctcaccacagtacaagattggaatatgggaggggttacagaattaccttgtcgaacactggttgtacattgcttgtttgcactcaggaagaattaaaaatctctacttacatcttcttgcctctctatcgcttgcaaggacgattttggagataaagcttgttggaataagtcatcctgcgatctcagttgttccttattgttgggttttgagccctaaacaaaacctatttcaatataatcagannnnnnnnnnnnnnnnnnnnnnaaataacattttatgttgcaaggttcacataatttatttcatgat

SEQ ID NO: 20394 - DNA, 2188 bp, Cannabis sativa
  modified_base (1592)..(1600): a, c, t, g, unknown or other
tgtttaggatgttaaaaacatacttgttagtaaatcttgatcttggtaaaacatattccaacatatgccaatcaaggatgtggccatccctctaccaatcgtgcttaggggcactcccatggtcgcggaaatccatccattcctcaattgctttgtcaggtttgccataaagtagggcacacggctgctgtctgccattacaaattcgataaagggtttgtcacacctaagatcaatgaatctaaggcctatcttgctgaaattaatgaacaagaagatccacaagtttagtccagctcaacattaccagaatttgtggaagattatgactagtatgctgacacaggagcaaccaatcatatagcacaaggcatggaacatcttgaatctgaaattccatactcaggttctgatactcttgcagttggaaatggcaaaagacttgctatcagtcatgttggtaactactctctcccatcttctaattcttctttacatctgaataatgtccttaaagttctaccataaccaaaaatcttattagtgtgtctaatttaacagctgataacaatgtttacttgaaattttattccaaatgttgttttgttaaggataaaatcacagggagagtgctactcaaggggaggcttaaaaatggtctctacacgccatctcacaattctttcccttcttctaaggtttagctcgagtgtcatctggttaccaagcaatccaagtctgagtcaaactcttcacctgcaaataattaagagtctgtaataactcctatttccatttcatctcaatgtaataaaagtattggtaatacagtatctcaatcttgtattgatattcccattaataaaaatgatgtttacacattgccacttgttaatgaatttgcactctttcttgctcaaaaatctgatataaatttatggcacttaaaacttagtcatcctgcccttgaggttttagccaagatcttagctactttgcatattccaagcaatctaagaaacttaaaattctgtgaggcatacaaaaaaagaaaaagccacaaactttcatattctctttctgagtctagggcctcccaacctttagaattggtccacactgacttgtggggaccatctcatacaacatctaaagaagggcataggtactatattcatttcatagatgactttagtagatatacatgaatttttcctttatcttcaaaatctcaagcctatagcacatttctgcagtttaaaatacttgttgaaaaataagttgatctccctattaagtctgttcaatcagactggggagatgagtataggtccctagcatcctttctagtccaacatggagtccatttccaacatccttactcccatgaccatgaacaaaatggtcttgttgaaagaaaacatcgccacattacagaaaatggctttactctattggcacaagctgggttgtctctatcttactggtggcttgcatttcagcatgttgtataccttttaaaaaggtggcatttggttgggaggaatgaaatgtaggaataggaattgaaataggaatggaatggaataaannnnnnnnngcataaaaaaattgataaaaaagttattaaattttttcaaattttgtattggagtggtctttccttctattttaaaatggaatagtcattccaccaaattgatggaaatgccattccatcggaatagtattccaatggttttaaatgcaaccaaacaaaggaattgagtgaacattgtttcctttccattctattttattttattacctccaaccaaacgtcacctaagagtttcttaaatgccaagagcttcagcaacttcaagtgttacagttccttcaagacactaaattcgcatctgaacaatgctaccacaatgatttcgagctacacaaacacaacccatcgcacactggttctctcctttgaaacattactcaccacccaccttgtataaacactaggtgatgggtgggtttgtagttcgatgctcaatacttgagcctagcaacacacattagtcaaatcaccattcacatttctcatacaatcccatacgctagacaaaatacaaagttattacaacatgaatgcacacataatgacaacatggagccacatatcactaaatggagggcttagacttga

SEQ ID NO: 20395 - DNA, 2643 bp, Cannabis sativa
  modified_base (48)..(63): a, c, t, g, unknown or other
tttaatttcattgttttagaattcgttgttaatccaacatacttgttnnnnnnnnnnnnnnnnggtaaaataatttccaacaagcttcccccgtgagataactttcagcttcaccattaattctggaagggctgactccttcccaccgccactaggaatggaaaaccttggacggacaaaaacgccgatgaacggcaacaacgacaacaggcaacgaaacatcaagaaccctagagaagcttctttcaaagagagaagggaagaactatccagaagtttttcatattattttatttatattcatccagattttgtacacaagggctgccatagcagcgaccatcaccttctacttgattttatttaacttcaattaggttagccacttgatgagcttggccaagtctgcaatatttgttcttcgagctaaccaatctttaatttcaattaaacatcttagactaaattgacaatcaaaacataaatgttcaatagtttcatcatgattgccataatcttgccttcgttggaagtttttgtaaaactgctagccacttaataaaatattttttaggcattaaccggttccatactgttgaggtccaatgaactttattctgctccccaactagtataatgtattcttatttgatgttatgtatccacctcatccataggttatcttgtttggatgcaattgcccatacatactttccaattacagtcatgctccataaaataattcttctaaaactacgatccttttttttttttttttcgatttgcacatttcctcccatgatacatatcttggccccaagtaatcaaatattcctttccataaaaatactctacacgctaagttaactctttttaggatcttttttgacaagatcataatttcagcccaataattaagtatgtttagaaatcatcacagagttaatcaatgtcaccctaccaataaagaaaagatttttagagctctatttgttgaatcttttagtccttttttcgatcaaaacttcagctctagcactcgtgaaacacctggttactgtgggaatgcccaactatttgaatggaagatatattcttgtgaatcctgatacattcaatactcgttgaatttcaaaatattgcttcccacaaaaaaagaaggcaaattttgcctcactcggttggaggccagaggttttggaaaataacttcagtccttgaaataacatgtatatggccttataatcactgtggcaatataataacacatcatctgcgaagcttaattaatttagttacaagtccttatatctttcatggtattgaaatccctccttccttcctatttttatcattattcttgagaggtattccattccaagaataattaataaaggagaaattggttcaccttgtcatagacaacgcttagcctcaaaaaatccatgtagagaaccattaaaaaataagctaaacctcggggttcagagacatggcataaccattcggatgaactcaggagagaagtgtaaagcatccaatatctcagtactaatacaactaaaaggaaggtatgtcattactcgctatcacaaggggccaaacctctataacaaatttgtgtcactactacaatgtgggcctttagaggcttttttttttcaaccaaatttataaaaaggaaaactaaagggtgtgaaaatacccgcctagttcgaaattgacatttagaggcggtattttgataaaaattgtaggtatagaaattaataatacttatgccgtcagttgggggatgagaattttttagctggtattattacacatatgacatcgattattagggaaataaccgacgccataggtgcacacgtgtcagtaaactgggcacctatggcatcagttatttcctaataaccgacgctgtaggtagtatatatacactatcaaggcttcgtcttccccacttcgaccttcttcctcatacacaataaacagtagccatagcagccaccatacccacgaaaaaaccctcgccaaccacccataaaaaaccctcattctccctcatttctttactatttttcccatttttatcttaaaatcttctattttcaatacctaaacctatactataaaaaagtttggttttttcccctctatcactataactgaacctattaaaaaaaggtggcagtataactccggccaccgattttggtggagaaaacgttgaatctcaacgtctattaaggtataaatatgatttctatttattttattaatgtacattgctttattttttcgtttttgtaaatttttattgggatttttctattttattaatattatgttgttgtgtgtgcatggtggccgattttttgtcgcaatttttcgccgaattgcgtttataaggtaaatatttattaacttaatatataatataaacgtatatattttgtattttattgaatatgtgtttatatatatattgtgcgtatatatattgtgtatatattatttgtgtaaattgtgtaattgtattgtatatatatttattattaataagaatgaggtagtagggatttaattagtttagaaataaagtttttaaaattatgttagtgtgatatataattgatt

SEQ ID NO: 20396 - DNA, 3201 bp, Cannabis sativa
taggcattggaatttaatatttaacacacaaagatagctattttgaatgttttgtggactttgatatgtgattctttgttcaattactttgttttttttcctcaaatcaaatgttaatgttttttatttgatgactacccattatgtcatttttcctggttttatactctagaactttttgcttgtgatgtttggttttaatgccaccagggttataaaaggctgtcatatatgcttatgcctatctatatttgatcccctttaagggaaaggatgtactaaattgacttcttttcacttattttattggcaaatgacaacatgttatgctgttcagaagatttaacatgtattaatgggtttaaatttaatttctgtatctctgctatttgtgggatctgattttttgtttgtcattagcaagttaataggcttgagataagtccagataaaagacacctagctgcagcgggtaattctcatattcgattattcgatgttaattcgaacagccctcagccggtgagttcatcacgggttcccttgctgcttttttccttttttctaagaagggggaaaagggatatactattttagtatcatctgataacccttattttattgtggtaacaggaaatgagctatgatttacatactggtaatgtgatggcagtgggattccagtgtgatggtaaatggatgtattcaggttccgaggatggcacagtaaagatttgggacataaggtagattgcaaatgtgattatctaatgtttctgcctttcatttggttctatttatatttaatatttgaaaaagagctccagggtgtcaaagggaatatgaaagccgtgctgccgttaacacagttgttctgcaccctaatcaggtattgatgccgtcttactcttttaaatgctttgcatttgttaatgctgcttcttacatgacttatttatttgctgacatgctatgtttatgtttttctaagctcttttgagtgaaatgctaatttacagccatttctttttcacatatgaaatctcctcttaagcaccactttaaaaaatgaattttgaacaatttggaggtaatgtatgaatctcaccaagagtagtgaaacccataatcaataaaggatagtttgaaaagattgtcttttaattcataagctaaaacgaaaagactctgttttttataaagagataggaaccaaatgcataagaaggataggttgatgccacactcaaaaaaagtggaaggattgtgagtgataagtctggtcttgatcaccacaagaaacttcattagttctgaaaaagttctatgaagaatcaaatagaaaactttctcaatatgtttaaaaactaaaagttcattgatcttttgttgtgattggccaactaggattctttgatgaagcttctttattcccatcagataatcggagttattatgtcataataactggcttgaatgttattttgcagacagagctcatatctggggatcaaaatggaaacattcgtgtctgggatttgacagcaaattcatgcagctgtgaattagtaagtatatgttggacttatttatttttcattttgtggccaataagaatttcattagcaatctagactgttccatcacacaaattctaaccttcggtacttatataaaacatttacccatttgtttgggaatggttttatgtaaaaatttagagcctttttttttctttaatctagtaccaccaaccacatatgattcaattattgaaacccttaaaacagttgtttattttaacagtgattctataatccactcctaataccatattacatcagtgtcataatgttatgtctttattatctttctcaagtcaagatattacttgatgattgatgctgttaaaattctcctagctgtttcccctcgtgtaggcattctctagcacagatagtttacatgtgtcataattttcttttgatccatctcaagaacatttttttccatccatggtaacttaggtgccagaggtggatacagcagtgaggtccctaactgtcatgtgggatgggagcctggtagttgcagcaaataatcatgggacttgttatgtttggcgcttgttgcgagggactcaggttggtatcttcatagacacacttcatttgacgtctggtgtgtcatgtttgacttgtgtcataacgtccatttcccttgcagacaatgacaaattttgagccacttcataagctacaagcacacaagggttacattcttaagtgccttctttcgcctgaattctgcgagccacacaggttcgttcgggaaacccgttttcatacctattcattctcttctttattttgtcatggttttatttagttatttgtgcgggttttgtttactttagatacctggccactgcatcttctgatcacactgtcaagatttggaatgttgatggttttacattggagaagactctagttggtaattcttgcaaatttagaatcttcaataaatcaatttcatattctctcattgacctgatgttttactttttctttcctaatattgtaggacatcaacggtgggtgtgggattgtgtgttctcagttgacggtgcttatcttataacaggtattgaattagttgtttatctcgaggttgtaacttcaaaccaaaccaactggtttcagctttagtttctggttcattatctcttataccttttctaggttcaataagtaataatatgatgaacaaagtcattttctataatattgttgtgtctcaaaagtcttccattgttgcagcttcttctgatacaacagcaaggctttggtccatgtcaactggtgaatatataagagtgtatcaagggcaccacaaagcaactgtttgttgtgctctacatgatggtgctgaaccttcctcatcatgaaaccatctaaattattacttgtttgttcatagtggtttcaaataagcatcgatcaaaattcactaaattaccttaattagtttattgtggctattttttgtttgtttgtttgtaaattgtttccaaaaatgccatgttgggtttttaagttttataaccaaaaattctatttttcctaaatgacaaggttgatgtatgatgaattttagaatggcttataaatttcaaaacctgagccaatgttgtatccc

SEQ ID NO: 20397 - DNA, 3776 bp, Cannabis sativa
aaataaatgatcatgaaataaatatgtgaatcaaataacacattaaacaagtaataaaataaatatgtttttttattgataaatgaatatagaagatcacatggaaatagaattttatttatagcacaaaacccaacacatgatacttagtaaaccgtacttacaaccccaattaaagattttcaaaactttaattagtagttaactattttattcattcatgtgatcttaattctctcgaactactataagatcacattctcaataatgaatatggaatttttcaatttttacataaattattcaatcaataatttaataattcaataataataatgatactaataataataataaactattgtatttatttgttcaaattaaaataataaatttctttacatacttttaggatacactcctaaaaccaactgcttcaacaaataccaaaactaagaccgcaaactagcatcaggctgcccatacaatcccgtataccaccaccaaaggttcccataaaactgaaccataacatcaatgtgactatgcaagtagcctttcaaacaccatttccgcatttctcgtccaaaacaaacataaccccccactatgccccaccttctccaccacaagcttccccacaaaacccaaacgaacccgtataagctcaaggactgaatgagagactagcatctcaaacaagaacataatatcaggagaaaactctttaatgtaggaattaaggatttagaactttcgatcattcctaagaccttagacgttccaagctatgcaatttataattcttgatggccctgatcatcaggagccactgtaacaagactacccacaacatcattcctaaccacaataggtaaaagagatgacattaccacaatcactgaaacacaatcagtatccacctcagcaatataaacctcatgcaagtttttggaatccaaaaggagaggaccccgtaaatcttttagaccttttttataaaaaaatttaggactcttggatttaaccttgagtgccccaatcttatcttgaaaatttaatttcattttatttttcttttttgtttgtgagtcgatccagacatgcccccatgcatggatttcatgggattcacatgagacgtcaatgacacagcatcaccacccaaacaaccagcgaccacaggacccgtctcaacctccattacaagactcccatgcaaccccatatagcagccagctccacatgatccaatccaaaagagaatttcatgacttaaatcacgagacaaagaagttcccttagaaagggaaccatcactcaccccattataagaaagtgttgctcggtactttccaaagcttcaaaagaattagatatatcaccattaaaagctctaaaaaatgaatgtcatttaagagaagcatcccgcacatcgtttgatcaattaccgccactaccccaccagatttagccaaaccacctccaatcacaccacctttcaccaccgagaccaccttggctctaaaaaaactctaggaatcgccaccccgccaccatgatcatgtcctcgagatcgcttctcaacaggactagtaatgcaatcagcaaggggaacccttatccaatccccatattttaatttttccttcccccaatatgcttaggcttcaacagacattccttggtcagatgtcccaaaatcttacaaaaataacataagtctaagagtcattggtaacgtattggcataatgattagtcgtttattcggggcaaaccgttgcttgtccatacaagccaatagctttttgatgtccacactcacacgtaccttcatgaaggcagcatgagacattccacacggaccacacaacacctccaggactgaaaaactagcactttatggatttgaatcctaaatagagcgaagtcaaagattaactcttttgaatccaataattcatcagactcattcaaggttaacaagcagtgctcgaagacccaaggtatgtttttaagaacgtgtttggattagtcaccatatcaaactaaaacacgaattattcttacctctcgcttccaccgtaaacgaactatgtatcttccataacctattcacagcataaatttaaattatctcaattcatggaccaagtagatatcactcgtcctataatcttcttagccacaaccatcaccccctcctccaaatttttatcattcaatctcgatcacaacagtcgaagaggacgtcgaaaaagacatagaatggcactgggaaaccaggatagaaaaaagactcaactatgtaaccctagaaaccaagagaaaaagtagggtcaatattccaataatcaatttaactagtcatttttttccaactaatattgattgcctaactaatctcaatttcaaaattcatttccttatagggatttttccttttatagcccaaaaaagtaacaatattataaatataatatgggatggcctaaagaacttttgtacagccgaagaaaaaaataacaaaatacctcttagtctacccttgcagtcgcacattcagaacaccagagaaacgaatccaaccagtgatcggagaagcgcggcaacgatgaatcaacattggtagacaaagaaacaccattaattctggcaaaatcacctgagaagaagaaaaatatcaaactgaaaaccaactattactgatttgatgaagaattctgtagaaaaaaaaaactagtttaaaacataaactcaacctaaaaaaatcattcaatttatagatttataatatgtagatctgtaagaaatagatttgaagtttttcgatcaatccaaatcaagtataatcaaaaaaaaaatatgtatcactacaatagctaatattctaattgttgtattaacgttatttttcaaaatttcaatcatggatttattcaaatccaatcgcaaaaaaaaaaaattaaatttgcatttatctcgcctcatggatctggccatgttttttttatagtatttttgtttctacgccattgcattacagttggttgtcatttttattgacactcttataattgataatcaattattacaccatgattaggctatactgctttagtcttatttgtaggtattttatatagacaatccaatacaggactctcataaaaacaattgtaatatggtcagtttgttcatattttaatattgattgagtttacattgatttgcagtgttcttacaattgtttcttcattccaataatactttgttatttttttaatatctaagcacattgttcatacatggttgcaactacgttgtttatgcattgccccatagctgtgttactgaaatcttattatgtataaaatcaaggatcaaaattggcaatatagaactcatataaaggaacctctattgtgataagtttgtttatattactaagtggaggttattagttcatttaaagttgtaaaatatatgtctaacaatacatgtatcatataaaatagctgatggtgtgcctgtatttttaatgccttattgtattttagtttctttatagttttttcatagttggctgatcataattgaatttttaaaaaatttaagaaatgaaagcaattccatttctcatacagtttaataggcagtttgataaatgaatggattatgtaaattacgaagctagtggtgaattcatctcaagggattgtgtgttgtatggtgtgtcttagtcattaagtgtcacttactatttttgtccat

SEQ ID NO: 20398 - DNA, 2251 bp, Cannabis sativa
tcacagtattatatcttttcattcttgagtttatttttctttcttacattatccaaggtggcgtgtcattgctcatggttttgtctgatgttttgcttacgtatatccagattccaaatgccatacaaacccatttttctgatattgtcgaggcagagcagcatccagtcattatacttagcaggtgaaatgttgtttctacctgtcaatcagcgggccttattttcttgtcaagctaagattatagagtaatagatcctggccagggatggaggtagctccatcaattaggggtgggaaaatgctaagaaaataaattaacgcgggccaaaatataattttttcaaaatatcaagtatagctatataaattacatataataatattagaaaataaaaaataaataaaaattgggaggggccaaggcccccttgggttgcacagccacaatgatcaaggttaagatcattcaaatccttgagctcttgtaattccaaggcagttactgatgcatctccacgtcttctattttggaaattacctgcattactatttctacgaattcggcttgttggcctaattttacaaattacgtcgatattccatatccatgtttcaatgtcatatcaaatttcttttttcacctttgaaagcagagggaatatgaaggtttagtatgtgtttctctactgatgatcactctatttaatccagctcaatcgtaggatttgccgagcagagtttaaacccagaaataagagcctcagtgttcagtcctcgactcatggaggtagtaccattttatttgcatcttacctgttgtgttgttatgtcgggtaaagtccatacatggtaacttttgcagaatttgatctagctgaaacctacagctactaataaaattaaaatttgggtcatagtaaattcagcctctgtcttggtgccttctaagtcttttagactcttcttggccttgtccaattctgttgtgttgctatgaccatgggtccttagctactaataaaattgaaaaattgcgataccatcaatctttggccaaataatttactctccaaccttgaatgtagaatgtccaggtcacatgaattttaggtttctgttggttgtgttgacatgatattacgttattttttaaatattcatagtgaagtttttgatctgtataaatttacttgttaaatgatgctatgagtttagatgtggtgaacgtatgatttgtgcaggctgttatatggttccttggaagatggtcttgcacatatataatgccacctgaagaaaatacagatacaaactccaagaaagttttaatgaccttttttggactacataatcaaggaaaacttgtgcttgacattattattcgaatatccctaacagcactagttacatatcctggagagaaagatctacaggtatgttttggtgctgtttcagctagacttttatgcatgtcctattgcatgtatgcatatagagacatcaaattacttttaagcaatatgattatgtgtattgcgggtgtcatgcttttgtccttatttttcaggcgctcacttgttaccagctacttcattcacttgttcagcggaaacatatttgtgcgcatcttgttcaattggtgagtcactcaatctttcagagtgtcaaaatgcttgaaatatatattagagttctatgagtaaaaaatttggattgacctttcgtccaacgttttagtgtctattaaacataaaattggaaataactagaatcttaaaacataactcatagaagagaattttcatgaagaaattttataacagctttttttcttttgtctataaacttttcaaaggcatggttactccttataagatctttctcgtcaatttgatttaaagatttagatgatcttgaatctggctaggatcctctttccattttattttgttatggatcttctgatgttttacactgtaataacatgatttatatctatgatcagacatacatataaacttatagggtctgtctgtccccaaaaaaaaagagaatcacttgctgtagggaaatcatttttgaccctttgattctaatcactttccatacaaaaatatttgtaactatagacaaggtataaaagaatatgattaaagagggtccctaatataaccttctaaccttaaaagcttgacacttcttaagaacttgagcttttcgtgcaacagtgcttatttgttttattttc

SEQ ID NO: 20399 - DNA, 5325 bp, Cannabis sativa
  modified_base (4045)..(4057): a, c, t, g, unknown or other
  modified_base (4206)..(4209): a, c, t, g, unknown or other
gtttagtagtagttaatccaattcgttgtggttcgacctcacctgtgtgagtttactacttgattacgtatacttgcgtagtgttaataaattttcgtaacatgtgtatggccctccgtacttccatgcaaagaagaatttttgggttgatttcttgcaaattggggatagattcagcggtctgtggttgattttgggagatactaattttgttcttagtgattcagaacgtgaagggtcttccagtaaggaccagttcatcccgttcatttctgatctggtagactcccggggtttgattaacatgccaatccacggtgacaaaatgacctgggacaaccaccgatctggaaggaaccatgttaaatccgctcttgaaaaaggtttggttaatagggcttggcttaacttattcccgagaggttttatctactctatgaatacgagcaattctgatcatagacccttttgtcttttttctggtggcttggatgccaagactaaaagatgcttcaaatttgaagaaggttggatgcgagactaaagaagtaagttggtggcgtcccatgcttggaagtcaattgctcacccctggccccccgcttgcgttttcaaaaagattagagctactcgagtagctcttcttcactggcacaggactcaatatggaaaactagacaatcttataaaaaatttggagaaaaaacttgattggttgcaacgactccccgctcgaacccgtgattggaaagctgaatgtgaaatctggagatctctgaatgagttcttagagagaaaagctatttattggaaacagtgggctaggatctcgtggattaaggaaggggataagtgctccaagttctttttcctctctgctgctattcgcaaaaggagaaatgcaatagagagtatctttaacaaggataatgattggatctcatctcgggaccttattggccaggaattctttgagttcttccaagggatcttcgctgggtcggacagcgggcagaccctcaactacaatgatttgtttcgtgagggaatctctgctgaggacagtgaggccctccttatgatcccaactcgcgaggatatcagaagaactctcttcgccatgaacaatcacaaagcccaaagtcctgatgggatgtctgtccttttctttgaacactattaggattcagtgggagaagatttatgtgaagctgtttctgacttcttcagtattggcaagatgcataaaggtgttaatgctacaaacatttttctcattcctaaagtccaaaacccgaagagaaccaatcattttaggcatatttttctttgcaatgtgatgtacaaggtcatttcaaagattattgcaaacagaattacgccactccttccgtctattatatgcccaacccaagccacttttgtgccgggtaggagtatacaagacaataatatgatagtgcaagagattattcactctttcaaccgaaaaaaaaaaaggcaaggaaggttactttaccataaaaattgacctcatgaaagcgtatgataagttgaattggagatttatagaccatgtgctttcttgctatggtatacctcaaaaattttgcaattgggtttcccagtgtatcactaccaccaccctcaatatttatctcaatggggggccagttggcacgattaaaccatcttgtggtctctaacagggtgaccctctgtctccctacttatttatttgggctgcagaagttttatcgaggttgcttaaggatgaattaagcaagaactctatcaaggggataaggctcagcaggggaggtctgattctctctcgtatcttctttattgatgacttaattcttgttagaaaggccaatttacgtgaagccatgggctattggcattgccttgagagattttgctcttggtctggccaacaagttaataaactcaaatcctcaatcttctttagtaaaaatactcctgataatttgaaaagagagattagggatgttttgggaattggctcttcgaagggcaacatcaagtatctggggcttcctctcttcaaatcaagacagaaggatgtagacttcaacttcattctggacaatctcacttctaagttgcagggttggaaagcaaaaaccttgtctaaggcgggtcggactacccttatcaaatcagtggggctttcattgcctttttatgccatgcagacttctaaactctctaatcgtctagtttccagaattgatggtttagtgcatgatttttggtggggctttgaaaaaggtaatcatggtctttaccttaaagcgtgggacaagctttgccttcctaaatcgcgaggggttgggctttaggaaaactaaggaaatgaaccaggcctttcttgcaaaatggggatggaacatcctcaatggttgtcagtctctgtgttgtcggatcctggctgctaaatacctaaaagggcaagatttccttaattacagatataaagatcctgatacttggttttgaaagaatgtttttaaaaccaagccaatcttgaggaaaggagcgtgtaaaatggtggttgatgggagggatacaagcatttgggggatccttggattcctcacatgaaagatttctactcgaaatgaaatggatcatctgattctaattctcgtatagttgcggatctcttctcctctagtggaggtttggatatccacaagttaagatctctcttcgatcgagagactgtgtctgcaattttaaaaagtgggtccccctttggccatggcaaagataagtgggtttagattcttaaaagcaatggtcgattttcgtgcaaatcggcctacctgacccaggtcatggaaagagctcccctctgtgaggtttctctgtcgctttggaacaagctttggaatagtaaaattttggagcaccataaggttctttggtggtctattctatccaatgctctctcggttcgggctgtgatcaggaagagatttcttatagaggatgctagctgccctttgtgtgggatgggcgaggaatctctagaacacttatttctctcttgtgaagtggagttacatgtttggaggtcctcgccttggggcatttatcctatttgtgacactggtatccgctgtgggatttggtcaaattcatctgggacctgaaacacaaggaaattgctactgaggaggttttgctttatgcttcgattgttgttgacacgatctggcaaacccgcaatgcaaaggtacataataatgatacagttgatgtgaagaagtgtattgactctatttttacttcttttactgatttacatgcttctttatttcctttccctgatttatgccggaaggtggtttggtcttctccccctgaggattggattaaactgaattgtgatgtaaaagtaggattagaaagcatgtgtactgcaattgttgccagaaaccatcttagtagggtggtttggattgaaacggctcggctggatttctcttatgcgttatgcagtgaggcggcagcctgctgcttggctctatcaattgtgaaggatatggtttccaagtttgtcatcatggagagtgactcaagagtagttatcaatgctctcaatgggaaggcgtcatgttgggcattggaaaactacgtctcattttgtaatagttattctcctttttttactagctgtattttcagtaatattagttgaacttgtaattttgttacccataatgttaattgttaccgtacataaagcaatatgatttgactctttttttctctttttaatttctaagctaactattttatttattttttttggttagaacttagaaaaatagcaatgtcagttaataacttaatatatatatatatgtgaatagttaaacataagagataattacacaagataccattttttataaaaaaaaaaaaaaaattacgtttaaagaatttttttttatatatttacagtttttcatagaaacaacacgaaaaccacaaaaaaactacataaaannnnnnnnnnnnnaacatcaaaataacaacaaaaaatcaacaacaaattaatcagagtacaatataaaaagaccgtatattatgtaaatttaatttaaaaaaatcataaacatatttaaaattccgtgaaatcgtatttttgttattttttttttattattnnnntgtatttgtgaaataatccctaaacataatgcatagaaaagggtctttctcaatatcaggccttagctagttgtcattcgaggaaattagactctatatcctttttatattgtcctcttttatttttatcttcttttttaaagtctatcatttttacctcttttttaacactttatcaattttgcccctgtcacttcaatatactcttcatgtcactactttatatcagggtattttgggtacagtacatacaaaaagaggtatatttcaattaaatataaattagaagtagatttggttaattgataaataaaagaggtatttttcaatttaccccttgcccatagcttgggccggcactaagaagggtattataggtatgaatataaagtgtgccgatttttttaattttaataagcttgttttcaaaaatttaatataatcaaatgcatgcatataaattcaaatttccctaactatatatacatcatcatataaaaaaagtaaaattttaattattcagatatcataaataaaaaagggtgcttatatagatatacttattttttaggggtgcacggtaaaagtaccatttaatttatgtacactatctaaaatatttgaatatgaaaacctaaattcaaaataatgaagaatacaacttctatttatgatagaataattagtattttcattgtttgacgacactatgtaatcgtgcacctaaataaataaattgttaaaaattctcattatataatcatagcctttttattaggttttacttgtttttatttgattttcattgttttaatcattttttaaaaaaaaatacatattttgtattaattcttttgtaattattattaaaaattcaataacttttctgaaaagattctttttcctaagaattttcatttactcaaacattcttcatatttacaaactcatattattatgttatgaaagatgcaaatttcttacctaaatcaacaataaatacattggccaataataacttttagattagagttatttaagagaaggcatgatttagaaatagaaaatatttaaaaaaaaaaaaaaaaactaattaaaaaaaaaaatttttaaaaa

SEQ ID NO: 20400 - DNA, 2690 bp, Cannabis sativa
aaaaccgaagcacctacaaacaagagggatgctgatgatgaagacaactgggatctacctgcaggagacattccctattgattgcatcttctccagagtttttcaacttgtagaaaagaaaattcatccttgattgactttaagaggcattttgtttgtgtaagttcagtttaagttaattatcttcttctttttgctaatttggtgcataatttcatccatgtttgtctgaatagaaagataaaagtaataaatttcattcttaaatcaatttgagttcaccaatgcaatcatatcatgaaaattaattctgtgtctgaaatactagtgcaccacctaatggtggtctcttttagaacaagggtagccattatgtaatatataaacaaaatcatatcttatgctatgcatttggttggtgctctccaagagggcaccatgcccactcctgacctgaaattagatggttgtgctgtgaagtttctccaaccatcaagaacaagtctgagatcatagaccttgttctccactcctttacaacaatttgcttgcatggtaaaaaccatgttcatgtccttactttctccactgcaaaacccaccaaaataggatgcattgaggtaatctatctcgactccaatcattttagtgtactcctggtgctctctcaaattttcacatagagattccacatgaaaagtgtcatatagagtcctcaaaaacttccaatatttgaatagctcgactgctcgctcggttgatttcacgtagaatagtcctctacccggtctgtttctttcactttcagatccacgagagagtaaattacatgggattgtgatttcgtgcaatgggtttatctcgaaaactagagtcctaaaccacataacatctacttcctgcaatccagatcaatttgtgatcaacatacataataaaccaacatgatataggtaaatagtttcaactagcaagtaatgtgaagaacctacagtgaataagaaactgtaacctagtttgagcacatccaacagtaaattgttgatggaaccaattggggtgagctccaagcaatgtggatgcaaggaatggcattgttgatatgctttgtttccaatagtaacaaccaacaagtgattcaagagcatttcagtaccttgtcctagtcgaaagctttccagaaagaggtctaggacagagccaggactcgtccaggcttcatcaacaatacctgttagtataactgttctgtcttccatggatactctccttagtacttgtaccagttcatttctttccaagctcttctgacaacaaaatgcacaaatatattaacttcaagaaaaagtttgtatattaacttctgacatcaaaatgaaagcatatgctattttacaaactgggttttgagaagcagtgcttgttgttccacaagtcccatatgagaatgatggttttgatgaattgatcaaaacaatgcaacaagtgatgaggatgataaaaaatgccactagaagaacatatggagactttatcagtcttaaaggcctaatttctctcattttggctatgggaaaaatcaggatttcaatggtaaaacttaacagaagatgctacccaattcaaagagaaactttctaatatgaaagatattgttttggttaaaactatgttctttgtcgtgggaaatccagacgttaattttggtgatagattccatatctgaattgattttttttcatgataaattgccattatgtctcatcaaattgtcattatttgcttggattttttaacttgtattattggacacattgactattgctccctaattaggaaacagtcacattttggtttattataaatcttcaattcgatcttttctttttggtcattaatttttaattgttcactgtttcctttttgccttaaatttgagggtgcaaataataattagaggtttttttagtaaaatatttagagatattatcactataattcttctataaaaacatcccaattcatctttagcgaaaaaaaaaattgacataacactttttatctatataaacatcccatttatcattaacaaaatctgagctaacactctctattattatgtatataaatagataaatataatctattttatttaaataattagtgcaactaatcttttagaacaaattcaacaaaacctaatacactgaatttgaatgtaaagaaagtggaaaaaaattaatgtataatttgatgtttacttataatagttttcatttatttagaaaaaaatacaggttaaaaataaaaatttgtgtggctgctgggattcgagcccaggtctccacggccacaacgtggaattcttaccactaaactacagccactgtttgattagatgttaacttaactaaaatttctctaaatgttttgttttgtccatgtttagtgttttttttttaataattattagagatgtttgtgagataagtgcccaagtattgaatttttaagcggtataaaattaaatgttagtaaaattataatttttgtctagtttcatcagcagagccgaccctcataatatataggcctaaaaaaatattgaaaaaagtgtcatgggacttgaactcacactattgtgtaacgtatcatacatctcaactaaccaaactatgaatatttgtgtt

SEQ ID NO: 20401 - DNA, 5877 bp, Cannabis sativa
acatatttttgaaaaatattttcacttttttaattataaaaacagaaaattaattaaaaaagtgttaccaaaccgcaccttattaaaaaaattgataagacattgggtgaggagcacagacttaacgtgtacccatttacagactaatagtactactacatttgagacaaggcttgttgcgcactccatcgctactcctcaacaaccaactccaatgacgagcctcccgtcggagatcatcaccgacatacttgtccgactctccgtcaaggatctccttcgctacaggagcgtatccaagccatggtgctccttgatagacagccccgatttcgtcaaaagccacctcaagcactccaccgatacctattccaacactggcctgattatcagaggttacgatctcaactgggttgacctccataatcttaactcctctgagaaacttattcatcctctcgatttaaacggcggtatgggtgcagatgtcttgggatcatgcaatggcttacttgccctaattaatatcgatgacgatattgctttgtggaacccattcactaaaaggtacagaatcttacccattgctgagattgaatttccgacccacggctttactttttgtcaatatatcatttacggatttgggtatgaccctattaacgatgattacaagttgataaggttgattcagttttatggaaaagatcatgactcttttgactctgaggttaaggtttatagcctcaaagccaaaacatggagaaggattaaggactttccttattaccttcgatataagcgtgtgtatggtgttcttgctagtaatgctttacactgggttgtgtcccgaaagccagaatctgatgtttccaacttaattggggccattgatcttgtgagtgaggaatactatgtggtgcctcaacctgattatgtggatggtgattttcacatgaatttgaatgtcttaggagattgcctttgtctgattgctaattacacctctaacccaaccaatgaatactgggagtactgcaaggccgatcgtgttgacatatgggtgatgaaagaatatggggtgaaggagtcttggactaagttgtattctgtggtacaatcagatgtgatgagctctttcagttttgtgatcccagttgcgtatttgaagaatagtggtgaccagaaaattctgatgaatcagaactccaaaaagtttatttcatatgatttgggaaggaataaggctgatgatgtgatgattcctcatgtgcctgactactatgaagtgtgggtgtgcttgcaaagccttgttggacttggtggtaaggatggggaaatttctgctaagaaggcagagaagcgtaggaagaggaggctaaaaaaggagttgaagcgtaagaaggcagaagaagctgctaaaaccaaggacaaaaggtaagcttacttatttcttcttcttcttctttatcttttgtccataataacataatgatctatttattgcacacagacatagttgtaatttcttttaagttcaattccaaaagctatccttgtgctatatatgatataggtggttgagaaatttattgttatttaactttgattaatttcgtttatgtattatatttctaattttttcccttcaaactactgcattctgtttatgatacagatttccatatgtataatatatattgagagaaggtaaatgtttgaaatctgatatgtgaatattgcatgctaatcttattgcaattacatacattattgttccttgctttgaaattgagcagggatgatttcctgtcgaagggattcaaactggtgctttaactggatggaggcacaggtatgtatatcatgtgtaggtatatatatatgttatgttttttttaaataaattttgttactttgttagagatggttcttcttctgtagtaatatatacaataagcatactattttctaaagctatgttcttaatggcttgcaatattttattcttatttttattttttttctctcattctctaactttgctttctccaatctatcctcggattttgatgtatttatatttttcctttttttcaggggactgattaggattagctcgatgtttagtctagagatggaatcgtgttcaactttgcatgtattttggtaaactctttttttgacaaagtggccatatgctattagttttaaagtaggatttagtgtacccttcaaaaaaaaaaaaaaagaaagatatttggtgatgcagtggtgtttacttgtgatggaacagtgcccaactttgcatctcatgttttggaagtttagccatgcatgttaaaatactttatgcatttcatgttttgttcattcacaaagcgctcacaacgtgtaaaagtagacacatttgatagtaaatgaaaaatcaacaaacacatcaatttaatttgtctatcttctgaacgcacaaagtggccaggtgtaacagtcaacatctatataagggatctacaaaggatggaaaagcattttaacttaacgcacagtaaatatgtgaaaccattttataataattgtgatacaaggaggcactagtttctcttttctttatttttttcagaatggaggggataagttttaatttattcataataatagttattgtgtataggctcatggtttgatcggaattaatttgtattagtttagtttagaataggattaagtgtttaataatttttgtttgtggtaaaaagtgtagtgatgttgatgggcacttgttggtttagtagatgagaatagtttgcttagaaagattattgtatgtagaaaatggtaaggtttatggattgtttgtagtttttggcttttggatgttgtgttagggcatgctttaaatacactccttttgtttaaatagggagtgattaaaaaaaataaactccaatcatacaaaaaaatagctctctataataaagaataaatagggaatttctaagtctgtgcacaactaatttattggatgacaaatatgaattaagcacgtcttagaaaaatttagaagtaaactagcaaaaacttctaataaagcccaaatcattatagaatgaatattgcaaagaaaaagcaacattttaaagttgaatatccctattcaaaagaattgagtggaagtttaagcccaagcgatcaattcaactccaccgtaagagttctaatttcgacctggataaatgtaacatttcttacaaaaccaacataacatataataaggtcgaaattccacccactaaaagaacaataaaatgaagcatgagattgaattcaataaaatagcaatagttatctaattaaattagagttatttgacaaaaataaaaataaaaataaaaaaaaatatattgtgtaattataaaacattactattttagatgatttatgtcatttcttatatataagaattttttgctgttataccctcctaagtcttaattatcattttacatatgtttaaccctctaagttcaaattttggtagtaaaactttctactaaactattaacaaatttaaggtatcatttatttaccaccattaactattaacatgaattgcttatgcaaacattcttatacacgtggtacattatagggtaaataccattttagatcttgttaccgattagactctctgttttgttaaatgacaaaatagattctgtattttttaaaatagtaaaaataagattctgagcttaatttttaacaattttttttcaacttgaagacaattgctaatacgaatagatacaaaaaaatataaacagttttgtcatactactttcagatcgaattataattaaatttcttacaaaaccaaatcagttgttgttcgagccaccaaaccaatgccaaactacctttcattagagaaaagtgctctatcaaaattaactttgattgtaagaaatttggggggtccaatgttctacatctaccacatttggataattatcactcgtagtagcagagttctatttttgagcattatatgtatcaataaagtttaattttgctaataatgacaacacctcagtaacctcgagttgtttagagttccagaccagattgtttcgaccaacaaatcacggcagcctctaagcactcagctttgttccaagagttcaaaccctcctcaaactagcctgcaaaggtcatagcagcagcaactactactggcacttgagacgcatttcagcagttttgagcaaaagcacatcgtaccaagacatgaatgacagtttctggagttgctaaatagaatggacaagaggaagtaattagcacatgcttaatagttagctgaaacctagttggaagatacttcgtggatactctccacaaaaaattttgaactttgggaggaatcttaaggtgccatagttttctccaaaaataagaattacttggttgattggagctgttttttaaatacataattattattgaactcttcaatagaataatctagtttattaattttattattactccgctataaatatggaattgtactatttgataatataaaattatatttgtataattcttacttgtagtccattgatataatcaatataaatagtttgcactccaattattagtttataattagagttggtcaaaattactgttttacctttctaattatcccttgattacttatgtatcattaattcaacgcgaacagttaatctataatccaattatagatgtggatcaaactgttagcactcccagaattaacactataaggagctaatattctatcctttcagaaagcttggattccattattgtataatatgttcccagccactcatgttataaagctcctaaaacagaagttgtaaggatcatcttctctgagaaactttaacgagtaaatcaaagaactcccagattggatcggttattttggattgattactttttaacatcaaattattcaatatattttttttttttcacataactaacaacaaaataaaataacaaataataattttaaaagaagaagaaaaaaaaaaatgtatgtaaaacaataatatgcataattttattttaaattatttaatttattaagttctgaaatatatttgtatcatatatgttagatttttaaattactatttttttacataaaaatattaattgtatatggattggattggatcggtaacttttatatctcaaacaacatccaatccgcacaagtgcgaattttgaatttttcaatctaatccaattcgcacaagtgcgaatattcacactttgcaaattggattggattgaattctgcggattggattgggtattttatgaacgataagaagacgaaaagaaaagggcatcccgacccatggaactttgatcggggttggtggaactagagacaaggaagacccatgatttagattgtcattgcctagagtcagatttgttcatcctccaacgacatagatctagatctgttgatcatttgtgttgttaaatctaatttgtggttttttttaagttttctttgtttttattttttaggcgttgatttggatccaaccaatcgattgtcacactctgagtcaagaactgactcgattaatcgaaccagttaaatcgatggtaaagacatcacgattcaagtgactcttcgagtggaagttcacaagtgtcttgagattttttgcacttgcgccttgggtgaagctaacaaatatttttgtcgagctttgtgtgcttagcgaaaaagttcataatttcattcagggaggtagtggaaatgagaaacaaatttctatttcaactacttcaaggtgt

SEQ ID NO: 20402 - DNA, 6205 bp, Cannabis sativa
tttttttttttttttttagtttaaccaaagtaataatattataaaaatactgtcaattgaccaaataaataaatatacaatttaaataaaaaattacacaactgcttacacacaccttcaacccaggatctatgcttcctgggcaaccatcgcgcaactacgcagcaatccaatgcaaccaaaacacaaattcaaccagaaaaagaaccaccattaatttcgacgacttcacttaagaagacgaccataatcaatcaaaatagggctattcgaattcataaaaaaagttgtagaaaaacttcttcgaaactaaaattcaatcgaaaatccagtttaatttacataaaactaatatcctgacttcaatttttaaatccatgaaatgcagatctcaaaaagttgagctgagttcccaaacaatctaactcaagtataatccaaaaaaaaattacatcaatactatagtaaaatatttatcttggtgtattatcgttgttttccatatttctaatggtgaatttgtttatattaaatcatgaaaagatatgtagatagagttacgtatgtgaaaacactaatctgatttttaatgttttataacagttgcatagatattttgctaacagttagtttgtctgattgaaaccctcgtctaacgcaaccttcagccaaccatccaacaacttttgtctgattgaaactttcgtctgatgcaacgttcggccaatcaccctgcaaccatcgtctgattgtgtaagtgatagtgtaagatgtattttggtaattaaaaacgcataaaatgtataaatattgttcacaccttaataaaatatttttataaataaagtatcactttatattttgttatgtaataatatttttttaaaaaataacagtaaaaattaaaatttatataaaaatataaaaggaaactggtaaacataatttttatttttccaaaggttttttagtaaaacttttttttttagtttgtgaggtcacgtagagacataggaaaatgtccaatgaaagaactcgttcggaagatgaggttgttgtctggccacaatctcatctctactcttctcttccaaatattaagaatcaatcattacacaaatattccttgcgcgcccacgtctctactcggctctccgaacctcacaattctccaattccaatcgatcaatggcggctgctacttcattattgctcgaacccaatccattgagatggaaacaaagcttccccattctacctcctcgtccatttcccaacaattacagcctcaccttcaccagacccaccaagttcaccggaatcataaacattcagggctcgaccaagctcagcatcaaatgcttcttccactccaaaaaacaatctttcgacccggagcattgctctaactcgattacaagacaaaaccccgcgaacccatttgaggttgtggctaatactgtaatgaaggccttgaaagcgttgaagaagcccgcgattgcggtggttttgctggggttgttgttgatgtacgatcccaatatggcattagcagcttcgggcggaagggtcggggggaggtcgttctcgtcgcgctcgggggcgccttcttcgtcgagaagctactctgtgccaccttcggcgcggtctgggttttcttactcggcgccgtactatgggccttctccgtttgggtttggtgggggtggagtttatgtgggtccggcggtgggggtgggagctgggtccagtttctttctgatattcatgggtttcgctgcttttgttttggtttcggggtttctttcggataggtcagaggacagtgtgcttactgccacagagaagacaagcgttctcaaagttcaggtacggtccaaatgggcatattttatatttaacgtgtatgcaaagcttttcattatgattctaagaataatttcacgttggataaaagggaaggctttgtgtgaactttttttttttttcctttttttgctgtggactttgtgtaaacttagttagttgtactatttatgtgtagtttgagtaatgtataacagtaaaattattcttaaattaatttagtaaatagtccagagtagaacgaactacagcactgcaggagcggcactacatctgaatctttcaataagcaatttagaaataaaaaagctgcacttaagttagatattagcttgaattgtttgaaggggaaatggctgcataggttcgactttggcaaggatttatcttgcaaggttgtggacataacgtgtacagaaccaaaatccattaaatttaaaatggatttttgttatgatattgatgctcagtactcacattgtctggtgaacatgcctaagtagatgtttatcctgtagtttataaagatttattgcctttttgtttaaaattgttttcatgaacgagttatcatgtattgttccaacattgtcttgttataggtggggttgttgggcatggcgcgggatcttcaaaaggatcttaatcggattgctgaaactgcagatacctctactcctcagggcttaagctacgtgctgacaggtaaaacatttaaacagtgatattcttcttttctttttaaacatgaatgccattttcccacaaggtttatctaaaagatgtttttttttttcaaagttggatcatgtgtggtatacattaaatttgaagttttaattgatggaaatggtattgaagtttttagatgaacactgctgggagctggatattactttattctcatttgtccatctattctaatgtgaacttttttgtgttacatagtttcttttataaagagtttttaatttgtcacttttggtttcagagacaacgctagctttacttcgaaatccagactactgcatttcaggttattcatctgtaagtttgctaccatctcttggtatcttcattggtgtaatggtgaaatgcattctgttatatttgtgttccatttgagttgcagacagagggaaatatagataaggtagtaatttatgtgaaataagtaatggcaactaatacaagccaaattgatggcacaaagtcttgagtacacttttgaattggtcctcctgtagagcacataatttggagtacatgatgctcgtatttttgtgcgttatagaagtagattggttgcacttcttaatttagtagtatgttcattcctttggtagtttgggcaaattacttgtgtgaagatagattcttcaaagaatcattttataagtattcctttaaactatgttcgctttattgtggtattcttttattctatattatgaaattttgaattgtatacatgttaacagcatgaattatgagttttgatgtacttgtagatggatttaaagaagagtatggaggatggagagaagcgctttaatcaactttctattgaagaacgtgggaaatttgatgaagagacacttgtcaatgtcaacaacttaaaaaggcacagcaccaaaagccagagggcaagtggatttagcaatgagtacatagtggtaagttagcttacctaatggtagattgcactgcataactcatattccgttgactgggatcgtgtctaacattttctgcttagtaaaatatgcatggctgtttgaatttttgtgtgtgttttctaaataaaaaataaaataaattatcttagtattactagtgtaaatggcaagaatgataaaatctctctgcctgttttctttatatctgggtgtacaggacagtatgaaatgatcacacatcgaaattagatcattggttgtgccctcaaaagaatccttaaaactaagaaaatcatgtcatggctggttttgtctccatgaatttttgttaggaattaaaatttgaaataatatttttcttttctatgattttccatcagataacggttttggtggctgctgaaggagtacataagctacctgctatcaacggcggtaaggatctgaaggaagccttgcaaaagcttgcctcaattccctccaacaaaatacttgtaagaacgattttttacaatgttctgatccacacatacaacaattcgagtgcttataaataattcgtgcttgaatttccttttttttttcttcattcctgtaggcggtagaagttttgtggaccccgcaaaatgaaaatgatactctgtcagagcgcgaactacttgaagattaccctcttctcaggcctttgtaatagtacgtgctgctctgttgcaccctgcatcatcaacgggtatgaactgagcaaaatctcattatcaatggggccatttgtacagggttatagcttatagcatacatgaaatatatactagtttaagattccgctactgccccttgtgatttattaacgtgtagaacatttgagacaacaaaagtgctccatgttgttgtgattagaattttgtttataggtttctttctggtagtgacctttgactccatgcacgagtctgatatgatatagttgaactacaggtcctagatgtacttcaaagcattataatctctcctaccctttagaaaatctttaccttctttttttattggaaaaataaaaacattatcttatttttctctcacacctttttttttatataactaaagaaatatataatgaccaaaggttcttttggtggtattgtactgttgttcacgtactcagaagggttagaagcatgattttcattaggggttggtctgttgatgtggacaggcttagtgcgttatgaaggttcttttctaactccaaaactccacatatacttcattttattagataaggaggaaatttatgaaagggatatttgctgctaaataatcttaatttacaattgttatatattgaccctaataaaaaaaagtggcgataaaagtatcttatcttacgattttattacagtggtatcattttttgatcatcaagcatcaattcagaaacaagtgacgacatattattaaactacatattaaataagctaaagaaatatgtcgtcacgtgtttctgaactgacacttaacgagcttaattgatacttaacagctaaaatatggtacgactgcaacaaaattgtaagataaggtacttttgctgtcaattttcttgattagggtcatatgtataacaattgtaaatattaacgagtttttgccgtaaatatctctttataaaataatgatactatcccatttgtttttgtagtatccttttcaataatgtcaagcacagtttaaaaccattgaagttgtttgaaactcaaattagaatgatcacacccccacccttccctctcctttattttgtttttctagacatctcaagtcaactacttggaaatatttgccaagacctggcagtggtaggttgtatccccagtgatgacctgaagaaataagtaagacactaggccaaaagataatactttggcgtttaagacgagaaggagccacctaagtttgttctaccacctcaagcatctagggggtaacaatattgccactactaggccacttgttaggtaattaattatgatgacaaaggctcttgatatttttgaaaagttgtcttagaatggtaaaagcctagagctaaatctggttaggaatatgaaaagatgtagaccaagctcaaaaccagttgtgtcattttcatcaattgtggagttaggcctaacattcccaagtcctttggatgtgggggaacttcatcatttctttgacttctattaatgttctttttggagattggggaaaaagaatatccaaactcacaaaccaagtttttttgcattatccatccttcttgataagcctaggtttgtgcactgcaccgactatggatagatttcagttgcaattccaattctaaatcattggcatataaattattatattatattgtaatgtttttttaataattatattttaatatttgattcatataaataaatgttttctttttagtatctttacctactactattcttaacacttttgataacatatcgttgaagaatataatttagctgtgattgacaatagtgttcttccgaccacttcttatttgtaagtctaaaaaaaatgctgaagatgctcttgaatattttactggaatcggatgcagaagatctgaaaaaaaaaggaaaaaaaaaaaaaggaaaaaa

SEQ ID NO: 20403 - DNA, 8823 bp, Cannabis sativa
ttgctatggttgagttttaatccaccttagcgcaaaactacccgactttttttttgaagaaaagcgtacatatattagaatcaaaagtagttaaacctcacggtcattacaaaacaagtgttctgaaattgagcaaatcgggatacaactgaaattgtggtgggtaaacgcccatttagccacattataggcgacaaagttacaatgcctactaatattagagaaaatataactaacaaaataaggaaaagatctaatacaaaatgagacatagttctcaactcccatcaaaatacctccctattaagagtgttgataactaaatgccacacgaaaaatagcataatcaacaattagcttcattgtcatatgtatttaatatcacaataatattattttcagtaataaaaatgaaatttcagaaaaaaaaaaaaattagaagaaaatgaaacagcgcatgttaacagataatatacgaacccagtgcacgttagcatgtgtctatgcttcctgcaccgtctgtcactactacgatacgtcctctttctccgccgacctctcttatcctacgcaccaaccccattgtctttcccattctcttcttctagggctaactagggcacactcttcttcttctcctcgctcaattctccttccccaattctccatgcccttccaagaactagggttttatcttctcaccttttcacactgcacatggaccaccggaaccaatccaaggactccacctcctactcgaatcttttcgatctcgaggttcgttaatttcttactttttttactttgctcaattcttctgtctctgttccttcagatttttgcttattttagttcacttttttcggcttttgctctgtgaattcgagcgttgatggtttgtttggcatttttttttggtgggtaaattgaaattttgattattttgaactttgtaaattttgtatttttgattaaaaaatgaaactttgttttgttttttaatttgattttctttaatttttgagttgtgttgtagtctttgatgaactttcaacttccacaaccagatgatgactttgattattatgggaatagtagtcaggatgagagtagaggaagccgaggtttgttcttctttttattggataatttgaactcttgaacacacttatggagtttttacttatgcagattgaatctcattgttttctattgtattataagcttatgtgggtggatgaaaattgtgggaagtttagataggaagattgaaaattatgagctttactatgtctactataggtggggcaggatcaaacaaaggtaatggactaatgtctgaaagggaattgagctcattgaagaagagaaggcggtctcagaacggtgactacgaggacgaggatagttactacaacagaaacattacagaggagagatatcgatcgatgcttggagatcacattcagaagtacaagaggaggatcaaggattcctcagccagtcctgctgtcccacccaggacggtagttccagtcccgaagagtaatgtgggtttgaaagctaggaaattgaagaatgaacaacgaggaggagggtttcttgaatcggaaaccacacctgagtggctcaattatgctaatcatcccaaaccagggaattaccatgaggcagatttgacaccgcctaatggctctgataggtttgttttctggcatctcagttgtagggatgtttgaagatctgaaacagcctctttagtgccagataaacaagttattcgtatttgtaacttttatttatttatgcagagcaatatatgagcctccttatttggatattggggatggtatcacctacagaatccctccaacttacgacaagctggcggcatcattaagcttgccaagtttttctgatattcgagtggatgaaatttacttagaaggtacattggacttaggctcactagcagaaatgatggcgactgataaaagggttgggcatacaaaccgggcaggaatgggagagcctcacccccaatatgattcacttcattcaaaattgaagtcgcttgctgcttctaactcatctcagaatttcagtctcaaagttcctgatgcatattctcccatcccagaaggggcagctggaagtataaaacgctctattttgtctgagggtggtgttttacaggtctactatgtcaaagttctagagaaaggcgaatcgtatgaggttttgatgtcctttacttatgattgttaatttacacttgtctataaggggtgggaggtggctggtgtgcaatttctcattttcttagtatatgggttttaatcaaattgtgtttatttgtactgcagataattgagagaagcttgcctaaaaagctaaaggtgaagaaagatccttctgtgattgagagggaggaaatggagaaaattgcaaaagtgtgggtcaacattgtaagaagagacatgccaaagcatcataggaattttacagcttttcataggaagcaactaattgatgccaagagggtttcagaaacttgtcaaagagaggcaagcaaacattctctctctgaagcatatcttgtttcaatttcttgcagcattattaaaagtaactttgaattttgttgtagctaacttagtgaagcctaaatttattagtgtttgtactgtaatctaatatcctgaagctatggttttatttatctgtttgtcaatattttcttcatcaggtgaaattgaaagtgagtaggtcacttaaattgatgagggctgctccaattcgcacacggaagatagctagggacatgctgcttttctttaagagagtggataaagagatggtaactttcagctttcttaatgagagtacattgattacagttaaaaatatatttttttgaaagaacattattggtggaattttcccatgtcataaactagttttattttctttaaaaaacccatgtcataaactataagctggagtggaattattaatttattatgtacatacttcttttgcaggcagaattgaggaaaaaggaggaaagagaagctgctgaagccctaaggcgtgagcaggagcttcgagaagcaaagaggcaacaacaaagattgaattttcttattcaacaaactgagctttacagccatttcatgcagaacaagtcaagcacacaagcatctgaagctacacttgtggatgaggaaataactgagcaagaagagcacattatgtctgttgatgctgggaaggttgaggaagatgatcctgaagaggctgaactaaagagagaggccttgaaagctgctcaagatgcagtttctaagcagaaaaaactgacaagtgcatttgataatgaatgtatgaagctgcgccaaattggtgaacctgaggctccacaggaggttgcaggagctagtaacatagatctacttcatccgtaagttttgttttcatctgtttcctcagatttctattcttgtttagaacagataaggagtgggactaaagtgtttttctcagtttaatataatttataattatatttccattttttgcagttccaccatgccagtgacatcaactgttcaaacaccacagttgtttagaggcacccttaaagaatatcagcttaaaggtcttcagtggctggtcaattgttatgagcaggtcgattaatgcaacataatttaaattaaacatataatttctctttttttttccttcttttttctttttccgattgtttacttggaaaattttatcatttgtagggtttgaatggcatccttgctgatgagatgggacttggaaagaccatacaggctatggcatttttggctcatttagctgaagtaattactcggcttgttgtctgaattttccttgctgtaacttggaattctaacttttaatttttgaatttatatttttaatgcaggataaaaatatatggggaccttttcttgttgttgctcctgcatctgttttgaacaactgggcagatgaaatttcccggttttgccctgacttgaaaactcttccatattggggtgggcttcaggatcgtactgttctgaggaaaaaaatcaatccgaagacattatatcgtaggtaagcttctttagttctgttgtattttctaaggatcattggggatttggtaaaagaagcatttttgctttcatttgtctactagtttcctttactcatttgagtttgtagtcaagggctgagatacttttcaatgtaatcactttttttccttcatttccagggatgctgggtttcatatccttatcaccagctatcagctacttgtttctgatgagaagtactttcggcgggtgaaatggcaatatatggtgttggatgaagcacaggcaattaaaagttcaaacaggtttgatacatatcatccgtgtcagtgtactttaaagtttgtgctaacatttaaccgttataatgtagctgagtaacatagatgtgctgcctttaggaaaagggaattatttatttcaatggtggtggtctttttcttcttatctgatcatcctagcttgattttattgtaaattgtgttcttggttaaagaacattagacattttatcgacttggaagaaggtttactgaaagaagttattcctgtgaactgtatgttgtggtcatattgctgagacgcttttctaatcattatttggtttattagctttatagtatatctattttcttcaagtccatctactttctgggtggttttctatttttagttctttgtactcacctactattttgtgttgtgcttatgagtggacagtataagatggaagacactgcttagttttaattgccgaaataggcttctgcttactggcactccaatccaaaataatatggcagagttgtgggccttactgcatttcatcatgccgaccctatttgacagtcatgaacagtttaatgagtggttttctaaagggtatgtaaatatttttttatgtttgctgacacagttcaaataattaatattcctatgcgctatatattcttattaatcatcttctatcgtatccagaattgagagccatgcagaacatggtggtactttgaacgagcaccagcttaaccgattggtaagcatctttaacgcaacaaaatttaatagatttaacttgcaatgctaacataagaatggcgctgctttaatgcatgtgttagcatatcaacttactgtgagcttgaaactatgatgaggtcagagggtatttgtttgtctttaacatttaagattcctctagttttaggcttggttaatattgtcgctattagtgtttacatattgctagtgaagggatgatgcaatcatttggcctttaaatgtatgagtaaattcatctaacagttgatttctgacatatattatgcttggtccttctacagcattcaatattaaaacctttcatgctgcgtcgagttaaaacagatgtagtttcagagcttacccagaaaacagagatcacggtgcactgcaaattgagttcacgacagcatgctttttatcgagctatcaagaacaaaatatctctttcagagttatttgacaacaatcgtggacaacttaatgataaaaaactccttaatttaatgaatatcgtcattcagctaaggaaggtaagctatgcttttacccctctttcccgaaattaatttgattgctctgcaatcaagctaaaacatttgcctttatatttaatgtggggagacaggtctgtaatcatccagagttatttgaaagaagtgagggaagcacatatatgtactttggtgagattcccatcgcccttttgcctgcccccttcggggagttggaggacgtacactacccaggaggtcgcaatcctattatattcaaggtttttgttacagctgctttcttttaatatgcataattatgcaaattgtattgttattattcttttcaaataagctctatacaccacatgtcttcacaatcacatccccttatcctctgtttttagtttaatgtaaattgaaaacgaaaatgaatgtcgctgtagaacttgtttaccatatgtccatacatgaggaaagtaattctggaatctttttatcttatttttttcagattccaaaacttgtccataaagaatttattcagaagtataacacatctaattcagcagagtgcagtgtccgtagagaatttttggagaagtattttaatatatattcccaagaaaatgtttatcaatcaattttctcaaatgagaccagctcaatttcatctgttaagagcggaacctttggttttactcgtctgacggatctttgcccagctgaggttgggtttctgggaacctgttcttttatggagcggctcttgttttctcttacaagatgggaccgacaatttttggatggtattgtagacttatttatggaaagcaatcatgatgattctgaactctgttaccttgagagtgggaaagtgagagctgttacacgaatgttgctgacaccatcaaaatctgtaactgtaacaaacctccttcagaaaaaatttgctactggacctggtgatgctccctttgaggctttagttgtctctcctgaggacaggcttttatcaaatatccgccttcttcattcaacatacacagtcatcccgaaaactagagctccacctgtatgtccactatgttcaattttgtaactttatttattttttgtggaaaattagattgcaagtttttatctaaagcttacgctcttttttaggttgatgctcattgctctgatagaaatttcgcttacaaaatgatcgaggaacaacattcaccgtggatcaagaggttgtttgttggctttgcacggacttctgagtttaacgggcccagaaagccaaatgctcctcatcatttaatacgagaaattgattcggaattacctatttcacaacctgctcttcaattgacatacaatgtttttgggtcttctcctcccatgcaaagctttgaccccgcaaaattgctaacagtaagctgctctcttttattctcactttgtttaccatatttctcgttttaaattatacaggctcagattgagttatcctttttcttttgtaggattctggaaaacttcaaacgctagatatattgttgaaacgcttgagagcaaataatcaccgggttcttttattcgctcaaatgacaaagatgctaaatattctcgaggtaatttaagtctttaattttaattctaatatatggaaccatgtggcaccgaatgagctaagattacaatttacctctattgtcagtgctcatggaattttattttaagcgtttgatgaatgagactgtacttgcaggattacatgaactacagaaagtacaaatatctcagacttgatggatcatccactataatggatcgtagagacatggtcagggattttcagcatcggtaggggttggctgacatgccgtgatttgtaaatatatatattttgccgttaaagctggcataacccttgtatggctgatgttatatgtttgttgcaggaatgatatttttgtgttcttgctaagtacaagagctggtggacttggaataaatttgacagctgctgatactgtcatattttatgaaagcgattggaatcccacgttggatttacaggcaatggatagagctcacagattgggtcagacgaaagatgtgagttttttttcgcttaagtggcatttatcttccttacttactcaatatttatttatttaatactcaactcattattgcgtaggtcactgtctaccgactaatctgtaaagaaactgtcgaagagaagattctacagagagcaagtcaaaaaaatactgttcagcagcttgtcatgactggcggtcatgttcagggagatctcttggcacccgaggatgttgtatcattacttctggatgatgcccagttggagcaaaaattaaaagaaattccactgcaggtgagacaggcttaaacatagtgtcctttgttaactttacctttcaaattttattgtattgtttgacaaaaaaagaacatgtaattttatcctctcttcgcttcccgagaaagcgttttttgtttactatgtatgttaactgttattttgttctcagcaggcaaaggatagacagaagaaaaaacaaaccaagggtattcgggtagatgcagaaggtgatgcatctttggaagatttagcaaataatgtacccgaggctgctggacatgagaattctccagatctggagaaaaccaaatccgccagcaaaaaggtttggatgtgttaaattttgctcttgtttctatttctagatgcatactttaataatttcgcatctttaattagcatattacatctctgcagagaaaaccggcacaaacttccaaatcaaggaatacccaaatgacagatgaactaaacaccatgtcaatggactttggtttggatgatgcccaacaaaatactgattcattaccaacaaaacccaagagaccgaagaggccaaagaagagtgtaaatgacaaccttgagccagcttttgtagtcacatcggcagttccagagcagagccaatatccatcttcattgcaaaccataagttccagcgctcctatgccacaagcaggcgaggatttctccatccacgggaattcatttacttgaagatcgtaactctgaatctgtcgataaagcttggcctcgaggctcctattccgaaaggggtcccatg

SEQ ID NO: 20404 - DNA, 3028 bp, Cannabis sativa
  modified_base (2445)..(2456): a, c, t, g, unknown or other
atattaagactaagatcccagctgagaacccaatgatcaccgccgttctgcggtgcttcttgtcgtaaggctccgtcaagtccatgctgttgacttctgcgccctgttcaagcgcttttgttggcgggggtgaagcagtcaccgacgacattgggccgaaaaagggtgggcttggattgcactccttgtggataatctcgccgcacaggttcgggttccacgagaacgcggacggttcgaagcgaagtagggttggggtgactggtacagcaccggagaaattgttaccggagacattgaagtttcggagagaggactggttcagaggagggaccgatccatttaagtggttccactctaggcggagatagttgaggcggtcgagcttcggtagccagttgggtagtggaccggcgagattgttatgggataaatccaagtttcgaagtctatgaagggataaaacaggtgggaaagagcccgtgaagttattttggtcaagaaagagacttttaagatttttgaggcccgagaggtcaggaatgggtccggtgagtgagctcttctgcaaactcaagactcgaagctggtcaaggcgagtcaatgtgttgggagcaaaaacacccccaagatctatcccttggattataaggcgcaccactttgaactgagcacattccacccctacccatttgcagaaactactgtttgaagagaaagatagcttgtttttcaaatctgctttagatttgaaggcgagtagcccaagagcatcagagggcaatgatgagttcactgaagccgaaggctgagagagtacaaacttagaggaagaggaagaggaaacataggatggcaagacaaagatatgggcaaaacaaagcaacagatgaggaagaaagggttgccatttcttccgcattgttggaaagaaatagacagaggaaaacaatgtgaaggttgctttgttattgactatttcttagctgctagttcaaagacaagtaattaaataaaaattgtgcatttaatgctgtcgaaaaagaaaagagttggcgtaaatttaatgagtaaactaatcaaaataacagagaagaaaaaagtggtagagaaagaaaagtgctaagagacagtaatagttgtagggtatagcatatatttgacaaaagcaagtatatatcaattgtcggactgcaagctcagaatcacgtgaaagggtgaggtggccttcaagcccagtaagggtaagcctgaattggtgtttttggagttcggacctttttgttatggtcatcttttgttcaattaaaataaataaatagtagatatttgcaaaacaaaaataaaacaataaatagtagattttgaaaatttaataaattatggcttttcttccagttcttacatgtgattttttttaaaagggaatatcttcattaacaaacaaaaaagattataatcccatttcaaatagcactaacaccaccatatcattatcaagtgtgtacttagctagactttgagcaaagcaatttgcctttctaaaaacaaatgaaaaaccatcaaaaccacatataaggttcaattttttttaatactccaaatagggtatagtgccaaataatgttgtcctttaacggagtgtgctcacaagggaataagacaacatcttccttgttaaaaacaacattgatgaaatcctcactccactgaccacattgttaagcttcaaatcaataactttgagattaattgcttggtaaaaccggtttatcatagactttgatagatgttggtcttgaaattcaaggatcttccagggtactaacctcattaccatcattaatcttccatttatacccctgaagaagaattttttttctcataccaagcttttccaaacactaaaagccttagacccgtttttagctttatggatgttaccatgtggaaagtagcttgctttaagaactcttgcactgttatgcgccgttcttccatattgttgggccgccaccatcttaattcccacattagtatgatatggtctgctttgagtttaagctttcatagttttatttttatgtacctcccaaagatctcatactaatagaatagttagaacacttatattttaggcaactctattctatttttgatatggaacattggttgataacccaaacaattctctcctcaaccaaattccacgtactcgtcttcccctctaacgaaacaatcttgtgttgctgttatcaccaacgaaactcgtcgcctgaccatcattaagtaaaggtggtttagaaatcgaacttccatctgcaaaaaatgatattttacacaaaaaaacacacgaaactgttaaaaggaccacactaagagtttagtgtcccgctctgataccaaatgaaaaaaccaaatttttgcaaatgtcaataatatatnnnnnnnnnnnnaactgtatacgtctgcagaagcagaatgtaattctgttactgcaatgacaaaatagaaaagacagaatataaaaataattgcagaaaattaaattacttgacacaagagatttgtacgtggtatcagtgttctttcgaacatttaaattgataagtctttaccaatataccaaaacataatctttatataaattagctactatgattttatttaaatattagaagagatatgaaaggaaattagtattgcacatttcattgtattagaattatcaaatgcatcacaaacattgattttaatatttaacattagaattttattagtttattttaagtaaaatagcaaaataaaacacaaaaattaggtaaaaagggtgcataacatgattttagtatacaaaagagtgttttttggacaaaatggttggccaggctgtttgcgatgtgtagaacgcgaaaaaatacccaagttaaaaaaacaaatcgcctcaaatggacaatcgggtcaaaagttattaatgtttaaagttttcaaaaaatttcatgcaaagtttagccctttctctaatttt

SEQ ID NO: 20405 - DNA, 2990 bp, Cannabis sativa
acacttagcttccaaagagtattctaaaagacggcattatcatcctgtgcacccaactctttgctgaattgtaagaacttgtaaattgattttaccgagaaatggtccgagctctcccaactccaataccaaacatcacataaacaacttgaagataaggaaatattaagaatcaagttagcatccctttcattaaacatatcatgcaccaagtcaacacacttttgaagccacatcaaaatttttagataatgacaatactcactagagcatgacagttgtttaagttaataaaaaaagaaatagaagagaagaagatgaagaaggtggggcatcatctcattgagagagacgaaactgttgccctataattttgggttgagcttatgactcaactagaaaatatgaaaaatagggtttaaaattcaagtttacataaatgtagcatatcaaatctcatcaaaaaaaaaaaaaaaaaaaatcaaaagtaataaattgccataaataacatacaaacttaaaaatgtgatatttatcaaagaaagatttagtggcatgaatgcgaaataggaacatttattggcttgacacacttcacaccagaatgaacaaagcacccttcacgaaatgtcaatctccattgccacatcaccaagcttaggcacctgcattggatgtgctgttagttttccttaaaaaatttaagaaggaaaaaggagttactaaattcggacaatatacgaagtgttattgtacacgtgtggatacattattggctacactttcgtgaccaccccatctcacccgtagagaattccttttcttttttttttttttctgcttgaattcttcattgaaagtggctgtatttattactggatgtgacgtcagtcttctgaagaaatctttttcttcaaattttatttattcatttatggcgaaaagaacacaattatgagtgtaattatattgaagattggccacgaccgtacgttttgtaaaaactgacacgattttgactggtttaagctaaaagccaaaacatatttaaggaatggaattcctcaaaagaaagagttaggtaggggatgcgtcatacatccaataatgaaattaattattgaaaaaaaaaaagcaaattatattttaccattcatctcaaaaaattaaaaattgagtgatgataggttaacacataaatcacacaataacacaagtctataactatcacacataaaaattatttttggtttaatttttacaaaaatactgtcacacggtagaaattatttttctactgttttggccaatttttttttaataccaaaaaaatgaggcctccatctttcatacctacggacagaaccactacaggaacaccagaataattgaaaaacaaccattaattccagtgagattgagaaaaaaaaaaaagtaaaatcgacatcaaataaataatcataacaaacaattgtaaaataactgtaaactaacactaaaacaaatcaaacaaaagaaaagaaaacatgattaaaaaaaaactaaaaaatgttctgcatagcctcaatgctcaatgcaatagcaattatatttgcaagctcaatcttaaaaaacagagcaaaaaaactactaaaacaacacaaaaacaaatgtaaaacaataaacagatataaccacttagaaaaacataaaagaaccacacacctcaatacattttctagtgagctcgtcaaatgtatttttaggagagccaaaataaaaaaaaataaccaaaaaataactagagaaggaagaagaaatatattttataacctctatctttacacctacggatagaaccatcacaacaccatgagaacttctaaaaagataatcattaattccagcaagatagaacaagaacagtgaaatcgatgttaaaaaaataaattaaggaaaacaatcgtagaacaacactaaaacaaacaaaaaaaaaacactaaaaaataaacacagtatactgcaatataaaacttataaaaatacatagtaaaaaaataaaaaataccgtctgacaatatttttataaaaaaataacaagtatactatctaaatttccctaaataaaatatatacacatctatataacaaattgctttaattaattatttttatttaatataaatctcacttatatcaaaactaacttatcacataaattatgtgttacatatatatgtaatttatatgtgcacaataattttgtaaaaaaatgacaagtatacaatgtaaattttcctaaatataatatatacacatctatataataaattgctttaattaattatttttatttaataaaaatctcacttatatcaaaactaacttatcacataaattatgtgtgacatatatatgtaatttatatgttcacatattattacttataaaaattaataagaaattttataatataaaaatctccataatactttttatttttattttaatatggtaaatataattttaaaccctatattttgtaaatattattaatttattacataataatattttgagctcgagttcagttaaactattttttattctaactcttgaaaaacctcttttcaactctaaaattttctattccttaaatttaataattatagttgatttcttttccattatatttggtttcacaaaacacagaattcagaataatatttactattttaactttgactaaaatagcttaaatattaaaatggaaagccattttttcttaattttactctaagtatgatctctactttagttaaaatcaattattttaaataaagttaatttgtaaatatagattaattaattaaaataataaaaatcaattataaaactacccataaattttcaaaaaaatctgaataatttaccattttaaaaataatattcacatattttattgcaagtgatattatttttaaacttctaaacagttttttttttttttt

SEQ ID NO: 20406 - DNA, 6504 bp, Cannabis sativa
acattaaaaatagtatttaaacaaatatttaataataatatataaaaaaaaaataataaatagtgtaatatttgagttttattttcaatactataacttattggaaagtttttaaaattgtactggtaaccgtaaaaataacaattgcatgcaattataaaacataaattggaatacattttatttttttttctaaaaaaaatgccgaaacatgtacttaattacccgatatttttatacttattatgtttgttttgagtagaaggatttgatttgccgaccgacatgactattaatcttttttaaattttgtttaaagcatagattacataaattatatttttgatttatgatttgattgatttgggggtatgaacgctatacaaaagcataaataaaatatgcaccgtttttattttggttaataataatatccacttaatttagaacaataaatgtaagtttacaaagcgaaacggacaagaggttttttttttttttttaacaaaatggatagattatgtagcaactatatatctttattggagtaaatattatgtttatatttaaaacaacacataatttgtgatacaatcatgtcaatttttagtaatgtggtctctgatgtaataatattacaaaacttatactaatttaatttttaagtaatgtttttaaaaatataaaaaataataactttaataatttaaagtgaatgatttataattaaatttgaatagtaaatttaattttataaaaaacgtaaaaaaattatattataatagaacaaaatttaataataaaataattaaaaatagtataaaagtaaatataagagtaatttatttattgtgaattaagtttagattaatttttaatctgtgatcaatttgaatcaaaagtgttttgttagcatcaaaatttttaaaatataagatatattttagatcaccaatcgagatctccattggatatactgaaagaaaacacatataaacaaaatacttaataaatgattaaactctactattaattttctaaaaggacaaatattctagtattgttaaaaaaaaaaaaactaataattactttaccatatattatggtggtaggagtatataattttcacatccgatgtttatagtcaacatgtccattagtacatcatgctgttaactagagataataatggattttaaaactaattctccctaattcatttgacctaattgatccaattccaagatgcatgtattggatgaaggatccacccaatatatttaagatacatactttatttatataaattttaataagaaaataaaagctatattttaaaactaatttacatttatttttcgagatttaaaacactaagtatactactaactcaaaatttatatggtcaaccttaaattataaggttcaaattaatgtaaatagaaacacaaattattatgtagatatatatattaaaagtatatatatataaatataaattactctattggttcgaacatatttatttaaattaaattctctttttttctttgcgatttttacatgttcactgaattgattaactggatatttaatttttagtagagttctttgtaaggggacggacagataccatcgagttactctaaaattgtacaggaaatatatattcataggcataggcggacctaggagagtgttcagagaaggctaaagcccacttgcaggtttaaaaatatattaatatgtaattgttattataatatatagatagtaattaagtagaataattggttaaaatactttatatttatatggagaccatattttgaattttcttgctctttttttaagtgtatctacattttatttatttaaaaaatatatgaagtataaagtttaaagtaacatcaaatttatgaccactaaaatagaggaaattcaattatcggtctgccactatttataggaaaatttacctaaatagattacctttaattttttttttttggtggtttttatatttttagcatttagaatttgaaacattatatctcaattttttttattgacaatatgaattgtatttataatacatattttatattggctctaaattatttatggcattaaaaataatttcttattaaaaaaatagaagcacgctatattatcttattttttcaactgtaattgttatgaattaattaccttatcatattaaaaaccattaaaataaaaaacaaagtatcactgacggtcacacattaattttttttaaatactttttataatactgtactcaaaactgcatgcaaagaaaaaagaaatagcacataaataaataaacatgttataattaccttcttctccttgccgatgttgagaacaataagctccaccaaacctttggtgttcataagcacgcccaaaacaatcgaatcccttgctggaatcatacatagcatggccaccacaaacgtcccaacaatctttccagcgcacgacgttgttatgaccagcaccagcagcgcccacgattcaacccctcttatcttagtcacgtccgtcttcagcccacttgacgcgaagtagagcggcaatagcaaccctgtcacgaaatcctcgattctctctatcagtcttcctgcaaacacactcccttcgggaattgtcagcccgaaaatgaatgctccgaaaatggaatggattccgatcaagtcagtcatgaaacccgacgccattactcctcccaaagtcaacaaaatgtaaacttcgtccatagacttctgctgctttgacgagtacttcttggacacccagctcatcaagggccgaacagctaacatcataaaggccacgaacactacgccagaaacaagaacccagatcgggaccaaggagagtgtcttgttattattactgtgtccctcatttccctcagacagtgcttctgcaaaagccagtaatatccatgcagcgatgtcgttaaaggctgcagcagcaatggccgtctctccaacatgagtagtgaggagcttgagctccgctaagatacgagccagaacaggaaaagctgtaatggagaatgaaacacccatgaacgcgaggcactgtgcaaagcccactttttcctgtccctttattgcttggcggatgagaacggtgactccaacactgaatatgaaaggaagggagataccagccagagctattgtgaaagctttgcggccgctacgtcgaatagatgacaagtctagttcaacaccaaccaagaagagaaagaagaggagacctatgctggccacagattcaagaatgggagtactccatgatgggaaaatccatttcacgaaattttggttacgtccaattgccgatggtccgagcaaaatcccaccctgaaagtgcaacgcaaaacatttagctctcatgtgaaaactcttaattagcatatatataacagttagttaggtttaatttttttttatataacggtttattatactgtatttaataaccgtaaactatatattcagcatttttctaataaaaagtgtgcagcgttttataaaaaaatttgatttttttttatatagccgaaaagaaaaaatggtcctactagagacaaaattgattctccaacaataataataataaaaaaatcatgcatatataattaattaaacgtactaaaatctcagcgatgactttgggttggcgaagtggcttgaggaggagagtaagggagcggcttgtgaagagaaccaaaagggtttgaattattagcaaaggaaaggcgtagctaagaggattatcgccttgccagattcctccggatgaggtcttaatcatcactgggttgctggtcgttgtgtttgccattattattaataagcagtttgtgcagtgttataatttacttgtacactccatgcgcatatatgtgatcttatataggaaggcatgtcgatcagacgtaaacagtatgtggagagaatatgtggctgttctccttccaatatagcaataatttattttaagtggacatgaacgtctcagtagcaaagctcagtggaaaaagattcaacagaggaaccacacaaaattttgattgatcaacttaattgttgataaatacagcactatagatatcattattccagaacaacggctccaaatatcttatagtaacaattacaagaaactaccaaaagatgctattgtatttaaattatttgttgatatatattttaggagtattttgccattttgaaagttaagttaataatccaattaaattaagtaataactttataattatatatatttttatatagatatatatatatttccatcataagggtacagcgaatcatccatttgtgtatcatttataactatcatttaattatagtccatattcaaattgccaatcaattgatctataccttctcccaacactactcaaattcagactgattttcagctcgacatgccatgtgacaatattgttaataattaatcaagtggtcggagccaaaatttcaatccgaattggtgttgtaaatatgaatagaattttttgacacaccataattaaacccgggacggaggtatcaatatatgtcactacaataatagtagcatattggcaagtctaagtagaggacgacttaaagtgatgccaatctttctagtattcttggggccgtggctcttaattttttattttttttttttaattttgaggcatttgggcgcgacatggagctgaatgggcatgataatatcgtgccccatcagctttgaaatttgcccgttgctgaacgcgagaattttccctatgtttaatgtgggcatgactacgatcgggccccatgccctgacatggcgtgccatttggttgtaaggggcacaacaataggcacgaacaagtcggcccagtatttttcattttcaaaaaacaaaactcagcaacctcaccctttccatttcatttcatcaaactaatcctccaacccaccgtaacccattttctcagccaaaaaaaagaaaattttattttctcaaatcctccaagccacccaccatcggtgcccccatcaacctcgaagccctcaccgtcgaagcatatccctcaccggtcgattgtttgtgagtttattttcgtttgggtctcacatttttttttcatcttcatctctcacaatcactcactcttttgggttgtagtggatggctatggggacgtttgataggcagcaaagggctggcatataaagccaatgtcatgcccttgataatatgagtaaattaggttttgatttttgtctattaattaagtgattttttccctattaaattaggtttttttgatattgatctatctcattattttttgttattattgtttgaatttaggatattttctaatttatttaattatttaggttatagtattttttgaattttcacaatctataaacatagtgtttaccgattttttgggcaagctaatattttttagagtttaagaaagtaatgaaggtgtaaatagtacaataataaactagagatttttacgtggttcaagcgttaactatctttagtctacgagtctattttattaggctcttcgaccggtgactgtttttacaaatacaaaaaaccatggacttttactcatttccaccgtgttcttcttgaagaagaggaagcttagtaggaatattctggagttaataataggattacagaaatgtgtttgctttttcgtgatgaagaactagtcttctcttctagggttgaggcaaagatcgagacttctagatcagaatccctctcttgtgctttcttttaagtaattataggtcaacccccttgcatgggctaccttggatggagatcttcatagggatgaacccccagcgttagattggtaggtggcatattttccatgtggtctttaccgatgtcagactgtactggctgtaccagcggggctttgaacctgtgtcaccccaggattgttctcatttaaattacccttattcctagttatatgattgtttggctcactacataaggacacgcaagctctacatggtagtgtggcatgagagacaacctctgacatcgtacatgaaaatctcgaacagtgggaccatagcctgtcacgcgtaggctaagcctctccgggtcaaaggcgtaccccggactggtgcatcctagttaaaattccactttcctcgtagaagaaaaatgtccagttatctcgaatggagagagatattaccttgcggacacctgtagcgtgtcctgcactcagggagacttctctcgtggagaccttcttcacaaggtgagtgcctttaccatcccagagcatgaaatgaagcacgtgggcaccttcatgtctctttgacctcctttaattagtctccacgtgtaatccttgcaaaaacgcaaataacattcaccccctaagcttccgaaataaat

SEQ ID NO: 20407 - DNA, 1414 bp, Cannabis sativa
gcaataccaaaaccaatcaaactataccaaaacaatctcaacgatcaaaacgaactataactggacaattgaaacgatcaaaacaatcaaaaccatgtcataagacaagacaaacgatcttcaatttctattaaaactagtttttattattagatgaaatttaaaaaaaaaaattcttcgacagcctgaaatttgttcaataatatttaataatttattccaattttaaatacatgttatattaaagaaatcttatctaagaactcaataagtataccaaagtccaaaactatatatgtactcacattaatatgtaccaaaactatgtactatgtacacatattattgtttccagaaatatgtagtcccaaaactattataccgaaagaatcaaataatctatgagacacattttaataatgttcggggtgataaataatctaaaatgatcatatatgttgtttttcaaccatgtgaaattttttgatttttgacttgagccatattgatttttgtttcttgttcattttgttatatattactcacattaatatgtaccaaaactatgtactatgtacgcatattattgtttcctttccggtaatatgtactggtaccaaaattatatataccaaaagaaatcaataaagataaaaatgcaagtacaaaaattatgggacacaatttaataatgtaatttaggtgataaacatgagtattgttattgagtatcactagtgcttagtattttttataggtgacactttgcaattagttagcgtcagggccgtcttaaggtgatgagagacctagggcgaaatttgaaatgaggcctttttttataaaattaaaataaattttgacacaatatcaattttaattcttttatctctatgtaataaataattgtttgcaatgtaaactaattcgatcaagtaatatttaattactaagaacatctctattaaagttctatatattttaacacatttgaaaaaaaagaatgtgtttaaattatatatattttaaaaaaataataataaatatattattatagtatcattaaaaatgtaccataatatttaaaaaaaaaaaaacttcaatcattttttatatagtctaatataaatactttaagctataatattgttatttttttatttttgaaatgttaggcttttcacaaataactaaaagacattttttatacagtttttcacaaataactaaaagcctaaaaagtgactgaggaaggaaccgaaccttgacctcaaggctaataaaaaacccacttgccatttgtgctatacatttttcatgtattttaataagttaaatatttatatattatatatttttttatatgtatatatatatcaattttaattttttcggggcctccaaaattgtgggg

SEQ ID NO: 20408 - DNA, 3664 bp, Cannabis sativa
ccttaggatcaagatctcaaagtctatggctgcaagaaacaagattgttaagttagttagaaataactaacttaaccaacttctcatttagcgaagtctccacgttagcgttaagcactagagcctctagcaacatatatgagctttcagactcacggaccaagggcactcgctgaagatgctttttgataggataaagaccgctggagtcgattattcggatctgacattctaggagggatgactagctctctagaactcttttccatgagaaggctagctaccctaaagatgggaactagagtggacataataggtattcgggaactcctttccagactcaactattattccacaatactctttccggccttggcttccgcaagagaccaacttccaaaaaagaggattacggagatattttcatttgaaagaagtataccacaaattgtgttaaaaaaatttaattaattatgtttatttaaaataagtttcattgattaaaagtaactttaatttatgagtgcacattgctcaatattttttgggtgaacacataaaacaaccacgagtaggtgtagtagtatgtgttccaaacaaggtttggttgggtacatgacttgatcggaaaaagcaccactttctttggatgtagacaccactaacctttagtattcctatacgcaaattgcatggcaccaattattcaattctttccattacattattgtatactctattaagtcccaacaaaggtattaattatgtaaaacaacgtgtcatggcttccattttgggccaatcatatgttagaagatcatataggagaagctacaaagacacattattgctcctcccccgcctaaactaatcgaaatcttttgtagtgggcagctcaagctagaaaacacccattgcaaaaaataatgatattacaatataaattgagtccacgtaacgatgacttgtgcatagtttatctttagtgggtgcgtgagtgtggggtactaccactacatttactacacaaggcaaccttatttagtattgagcactttaactaattaaaatgaaacacataaacaaagccctcttgatataaatattaaagtccaccattttctttttatctttataaaataaaaaagtgtatatatatatatatataaatttggtatcatgtgctatttaaatatagatttagtattataatgctcacatatattttgtatcataaactcaatttcttttataaaatttgatcaatgctatcaagtcttcaattttataaattttaaattcaaatttaattatttaattacacataattaaaaatggttttaaataaattgataaaattatattgattaaattttattttaaaatactaaatatgtataatttcaaaatataaaaaactaaataaatataacataccaaatatctttttgaagaagacataagtgactaaaaaatacattccctatacacagagttggccctaggcataagcgggctaggcccgtacctagggccatactttccaggggccaaaataaaaaaataaaagaaattattaagcttttatttgagtaaaatttaagtatattataagcaacaattattcatagtttagttggttgaggtggatgacataatatccaaggtcatgggttcaaattccataacaaggcctcaaaatttaattcgtgtgttggactcatatattttcagcatattacatatcagtttttcttgcatgcaaaagaacttttgtggcatgtgtctgatgaactagcaaaatcgataattcagttcaagtaattatgagatcagaccatatcaatgtaacgtagttggtatatacgtacggtacggacgtattttatataatcttacaaggatgcatacatccaccaatactaattaatagcagctaaatattacataattccatgagctgaaacagaaaagaaaaggagactaatacatatattttgtattacacttacacatacgtaccatgaaaagttacgtcgtagtaatttatatatatatataaaagttatatatatgatctactacatattgttgattgatccacatttctttcttatttccccatatggtgcagtaagtatcccaacagtactgagcttgatcattgaagcagcaaaatcattagagaagagatatgggtcgttgctgtaggaattaacaagtgctgcggcaataggatcatccaataaagcttggtcagattgaagaagtcccctcttgttgaccacattgacatagtaggaattatcaaacctaaaggtactagaataatcaagtggggccaggttggagtttgaagtgtctttgtttggacacatgttttgtaaatttgatagcattaaagaatccatggatgggtcagagctgcctgagtctttgaagtcaaacagtctcttcttgaatgtggagcactgcgcaaatcctatggtgtgtgcgcctaaatatgacacactttatttaaatctcaatatatatataatatgattgattgtattatgattaattatgataaatttaaatacgtggcatattgtctcaaagattactttctctgtttgtgattggaggcttgtataaagcttgtaatttattgttttggtattgtcttgatgagttggaaatatgttttgtgattaatacaaaagctacttgatttaccaaaacaaaacatgtaaatgtgtataatattgatggagaagagagaatatataactaaatatatatttgtacctgagaggactactacatcctttaagtcaagaccctttacagtgaatttggcagtcatttccttaaatgactcagtaggagctggtatttgctcattagctgccttctgacttgctgtagtcgaatctcgtcgtcctaatacgacaggccaaaaaggtcctccagcctaaacagcatatatatacattaaatatgtttatacatatagcattattataattatttattaaattttacaaatttattatcaattaataaatgtgattatatatatataccgattgaacagcttctctaacaactagagtaagaagatcagcgcatgaaacagtggatggacaaaacctttcaacatcagccttgatattatcgatcacatcataacctctaagcgattttcggtttggaaatgaattcttttctccctcaaaatcttcagtgtcgtcaagaagcactgatgcatcacatccctacatatataatttactatataagttagacaaaatgcttaattataagttataaccaaaacattaataagattattatgctggtagcattatctagttttctcttttttatataatattaattaaagtgataattttacatagcaataattaatgtatagagaatatatatatttatataaatccaaagcctaatttaggtccaataactttccgatttccattgtcattgaaaccctaatcatgtacatgtatggcataaaatgtcacattcattaaaatggttattaactatatattataccactaatgactatagtatttattggactaatatattatgccctttttttttttaactaaatatccaataaaagagcaaaattatatcccaattatctttt

SEQ ID NO: 20409 - DNA, 4833 bp, Cannabis sativa
  modified_base (1477)..(1484): a, c, t, g, unknown or other
agaaaaaaaaattaggcggggcggagcagatctgatccaagatccaataagtatctgaatgtttctgatcagaagtgatccgtcagatcagagctccaatccgctccaactaaatggatctttttgacatgcctaccccaaaaaacttaattttggctcggcccctgttgatagttacctctgcccgattggttggagagctgaagagaaccatgcccatttatttttctaactataatttctctcaacatgttattaaccagatccaagcatggattggttgtaaatggtctttgccgtataagaattagactcgctggattgaggacatgaacaatgatgttaaggccgtgaatgttgctgcaattttttcaacaacaatttactatatatatatggtataataggaatacttggttactctcatagagtgaatgaatgtaattgttagtagttttactcaaaaaaaaatgaaagaaaatgagaggagctttgtgagaaaagtttgctctgtgtaggtttgctggtgtccaaacctcagttaagtgaatgtgatgtgtattaactattaatccacactttctcaatcatttctcatataattatttggctcgattgtctagctgttcatcgatccttttgaagagttgacccgaatccctttttgattaaacaaatccacttgcaaatgagtagaacaagtttaagaaataaattaaggaattgatttttttttttttttttgtcattgcactataaattaggtacctactaaattatcattcagaatggagataatgggatctgggtcagggccatttaagcagagtgcaacatacataatggagaacatgggaagtttaaacaacctgctttttgtgcattatttgggacacaaagaattaatatagtggagaagacaaagataagaagagattatacgaatcatttttagtgaaaacaaataaatacaataatagaaatgcctaccctagaatgaaattggactaaaaatgagaatagcaattaaatagaatagttggggtttgttgtggtgtatgaaaaaattgttcaatacttctgagaagtttttatatatggtatataataaaatgatcactgtaaatgaagactttctattccacatagtcagtccaaaacaaaacattcttataaattgatatgatatattgataatactataatagtttgagactcgttgcagagcccaaaacctttgacaatattaatttgcgagtagttaacattaatgaaaattaacataaaatttagttttagtttaatcagacaaaacacaagtagataagagtggaagatgaagaggcacaagatccactacatcttcaatgatgtattggtcatcagatacaaaacgcccttagtaaaactagttttggtatataagaaaagattatcaactccacaaacactaataacaacaaaaacaacaacaacnnnnnnnncaacaacaataataataataacaatcatcttaatcaactttcacaaggatttgtaacaatcaggactcccaacttagcaccgacacactttttctttcttcttttggtacaattaaaacaaagacaagaaacgcatctgaatcataatctgctgtctagctgaggctatcccatgtcaacattttcctcttcttctttttaaccttcttcagcttaattgttcatccccatttccaactctggatcagacttgggacttggcagccaaaaagcagttgttttcagacactagctagtttctgttttgggatttctccactgccctcggagctaagggaacaaaccgaaagtagttgttagctgtttgactctaacctctagtgcgagaataggatacaatttttcacttagtgctaaacaaccataattgcttcataagtataaagtttaggctgagattaatcaaacatattagaatctgaacttaagaagcagtcattctagaatttttctaatgtaaagaacatagggtaatttgtggcaaaaccctcttatgttttaatttttatacacttaaccccttgatcttttttttttttttgtggcaataccccttaacttcacttttctttgcaaatttaaagcgccagttaaattctactattaaatgccaactgagattgctactgtgtatacatgtgtacacgtgataataaaaccttgaagccaatgaaaacatgccacgtatatattggtgtacatagacacaatccaattggtatttaacggtaggatttaactggcgctttaaatttgtaaagaaaagtgaagtcaggggatattatcaccaaaaaaaaaaagattagaggttaagcgtatcaaattaaaacataaaaggatttcgccacaaattatccaaaactatattgtaacatacctacctactcaggctccagcccccagaatacaatatttactacttatcaaaaacaccttccaataatggaacctgaaatgtatatcctactgttgacacatcaaactctgattgattggatttaaccatcacagctctaaacacgcccaattccaaaaatactagggagttcgatttctgatgtatactaattcactaccggcaaattgttattagtatgtattatcagattccaattttatcaacctaaatgcttttgaacaacttaatgctttcccaaaacacctctatatttccaatcaagagattctaaacagttctggtgataggtaataaacctgaacacgtatataggtgttaccttacgagatgctaatatgaattctaactatgatttacataattttaagacaatgctagtaacagtctgaatcaagaaattatagaaaaggtacctaagccaatggcatcagagcccttcatgatctttagcttcttgcatgaatcaataaacatcctgggacaaaacataattaaagttcagagacattatatgaatagagtacatccaaaaaaatataagcctactagctcactgcccatatataaactgaaacaaaattgctgaatataagctctgatgtaggttataggattcatacaaagagccacaccatcaattaagaaactatgaacctaaacaataaggtccctatgcagtaatactgatccttaagtttcttggatcactattatgtaagagaatactaactattactaattacagttctctaaaaaacccttcacttacttgtactgccccagccctatctcatctttttggtcacaggtcaatgataggttcacacatctcattggatttgaaaggtatgcattctatattatgatttcagctaaattactgatgcaattgacgaaacaccaacaatgtccattattttctcttaattataatgccaataataggtttacacatcttttgacttttcatgtctgatatgaatgcataatatattatgaatccagctcatttactggcttaactgatgaaacactaatccctttaagaagcaaatacctaacctttcttctagagtgggaaatacaacaggctttaaacatcaacataagtaaaacattattgtcagacagaagaaaagtgcatttttacccccattctcatacatcagctacataaaattttatcacggcctaacttcatatcttggatcacaaatgattgtgtttgcatgaaagcaagttcaaaaggtaaaaaaaatcattaattaacttactcccatgggacatcaccaacaagcatccagtcaccatctttgtcctcataagtgagcacatattcagatccgtggaggagatcccttaacttgctctcactcagcttttccttccctggagctccatgagatccacattgacctgaaatagtatataatacaagtagatgggctcaggccaaaatgggagttcatcttatattaaaatcatatggctctacttattaatgcaagaaccatgaagtaaacatttgaaatctatccagaataaaacagcgaaaattctcacctatggtgaagcagctgaacattttttcaagagcagaagacaattcttgataagtagcataagttctcagatccaccttcctcaaatagggagcaccatccatgctgaccttgacaaaaagcgctccaggatttggtttcccatcaacttcgtcattgttcttcgaagcgggggcaagtgaattcttcctaaatgatcttataggaggccaaccaacaacctgtgccctgccacgacagaaagcagcatctttaagtactaacaaatatgaaaacatattagattttgttgctttagacagcaaaaccttccttcgattttttaacttactttgcagcaggagcattgttgttagcagaagaaacatgattatggttggctccattagtagcacgagatctttcttgcatccctttagcagggacctctttcactgtggctggctgagcagctgcagcccttgatggtagcatcacattcattcctgaattacctgggaatttgccttgtcccacagagtgtggagattcattatcagaaccagatgcatacctccaatttccatcaccatatgctgaagttttcacctctgagaatccatccatagcatcagagaatcctcttttattgcccaaaacaacattcttctgtgatgaagagcagatcccatctttcaaaggaagcaaaggaaaaagttgcttctcatcaagtttccctgagcccaacaaacagaggtcagtttcacgctccggtgactgggatccaggaagaccaagcctcaactctgtagccttaaaattcagattg

SEQ ID NO: 20410 - DNA, 1321 bp, Cannabis sativa
atttcggtatttatgctgacgtggcaatcggtatttgtgcaaataattttcttaaaggtatttttataaataaaatcaattttaggtataatattgaaaagacccttaaaaataacttagtatttcctcaactttttaaaggatatttatgtaattttcttaatttgtttttttttttttaatttttttgctttgtttatcactgattctctaaattcattttttttataaatttaagaggaaaactttactcgcattcgattcttatttcatatatatatgatattttttttgacataatctcttatttcatttagaacaattaatttttgttatcatctgttgctaatctctctcccttatactcctttatatagttgtggaaataatacgtaccaaacatagtgcaagagtaataatggtttaggtatcttagtgaagaaggttataagagagaggagatcaagtaaagtatatataataatggatgaaatagcacgggaatgagggatggaatgatgggagggaattgatcaggaaggaataggacccacgcaagagtggcagcacagcacagcaaagcagattaatttggatgagtgattgagagtgtgtgtgtgtgtgaagtgggggccattaatggaggtatagatcgaatgaatagaaagaaaatgaaagaagaagtggagtatgatttgatggtgatcaacctacaacagaaagagaaagagaaagagaaagagaagaaatatatgtcatctctgtccaactaccatacgacacgcttccgatggcgtgccatttgggtcctgattgacgcccacgcttttcctcactctctctctctctctcttctctacatttccctcttgcatcatcatcacattctaatattttacatatatgtaaccaattagggggaaagagtacggtattactagtaactagtttagttaaacatttaacaatcccattctaaattctaatccactctcaataaatattattattcgtagaatcatattccaactctgtttaatacaaatcccaaatattccccacagatttcagtacaaggaaacgattttgatcaaataagttaattttcatataataaacaccaaaaataaatacatcaaacaaaattcccacttattatttctaattaatatatatatatatttaaaaatgagttttgagaacaaaatgtcgattatgcaaagaagctccaaaataaaaaataaaagaaaaattaagttggggaaatttggaaaagttgaatatgaaagtgaaactacatataagtagtatcctaacacac

SEQ ID NO: 20411 - DNA, 3407 bp, Cannabis sativa
acgtggaggctcgcactgatgaatgaaaatcaaaagtaagaaactgaaacatgtacaggctttcatgactatacaaagacagtagagcattcaaacctgaataattaattgaacatcgttaatatccaatcccctagcagcaacatttgtagcaaccaatgtcatgaacttgcccgacctgaaaccagaaagcgtgatctgcaaacaccaaagttaaataaggcagtaaggtggatatataacaaaatgtaaaagacttcacaaaaacaatattatcttcatgctgagctgaaacaattttctcaacaaaaagaaacttccaatttaatctaacctcgcgctgagcttgttgtatgtctccatgcaaagctcgtgcaccgggtagcaacccagaaagctcagatgcagaatcttttgtctcagtaaagacaattgtacggcccgcactgaatgtgagaaacaattatagttagtaaaccataaatcacaataaatgaaaacttaacataaaaatagctaacctgctataacagcgaatgatatctggaataagttgggatctggcattacttgaacaagggataacaatatgtcttacatttgtgctagccttcatcttttcgttaccaacaagatctgcagttttcttacttggtttaagaaacctagaagcgatctgaaatgcaaattagagaaattagtcacttagtttaaaggtgcaatagataaattccaatgcttcataaaaaagttgcattttatgaaaaataatttgcatactagaagtgaattccaaaagaccactgaaaattttggttaagaaacttacctctttcacccaagaaggcaatgttgcgctgaaaagtagggtttgaacttgagttaaatccttaacctggcctgtaagaacaccaaaagaaaaagaaaagaaaattaacaaatgcaattttatatgaaacaaaatatataaatagaagataaatgcttatcctctgtaataaagcctagtcagaacaagaagatttttagtactgaagaggcagtaaggtaccgagaataagttcaacatcatcaacaaatcccatcttcaacatttcatcagcttcatctagaacacgaaacttcaaagaggtcaaatcaagattttttctctccaggtgatcctgcgccccaaaaaaaaatacttgtcatcttacttattcagaagtacagagtttcatccgatgacagaaaagtcacatactacatatcataattccaggacgaagataagaaacaaaaaggtacctttacacggccaggcgttccaataactatatcaactcctcttctaagctgaagttcttgagaacggaaagctgatcctccatatatactgcatgcagtcaaccccacagcgccaccataaatttcaaagtcagcatgtacctaaaatcaagcaagaaaaggcaataagtgatggttaaaaagtggcactaagataaaatagaaaatgagtatttcaagaacaggtcccatggactgcactgcacctgcacagccagctctctagtgggcaaaagaacaagaacactaggtgctttcccgtatccagtcttgcgtgatgatttagcaggcccatttgttagagactctatgatgggcaacacaaatgccaatgtcttaccctgcatataacaaagaaaagccataatgtaaatagccagtttaaacttttctgggtccaggacaccaccattagaaataaatcaaaaatcggtttacattgtttttaaagagaagctagctaggcaattaatattgcaaacagttttataacacagccacaacgtttgactgttccttcaaagtttgtcaattccttttgcacataaattgtacgaatatcttcgtctaagcaagacttcataaaataaataaataaacgcaagactgaaattacctgtccagtgcgagcgcggccaaccaagtcacaaccatccaaaactatatcgaaagtcatagcctgaatggggaacagtgcctcgatacccttctccttcaacttagccttcactggttccgatatcctatactttgagaccgcattaggatgctcctcgacctttgcttcctcaaccaccacctcttccaccttggccttcttctttttcttcttttcactttcaacctctccgttcttcaccttcgaattcgcggccggttcgacgagttcagagcttgtctcgcttttctcctcctcatcctcaacatcagaagcttttcgcttcctgctctccttcttgctcttagactccttcttagtcttcccggcggacaaagggtccgatcctagagtttccattagggtttggttcttcaccttcttctccttcttgtccttagggctggtagagaccatggcgtcaacgagacttatggaaggcatgtatgaagctttagattttctcctgctatggaaatttgtagcagtcgaacgctgctgcaggagaatgaaagaggagttaaagaggttagggtttttgaaatttatagtttaagcagcagagatcttcagcctttggattaataagcccttccaataccctggactcagccgttggattggacttttactctattaattaaagaataaaatatctaaccgtccgttattccaattctggaaaaaatatctaggctattgaaacgacaacgaaacttgaaaaacaacaccgagtcacaaacgacaacaaacacacatgacatatatattggcgatcatattgctgggtgggattttaaaaaagagtaatcgtaaatacataaatttaattatacattaatttttaatgataattatatctaaattatagttttagaatcttctaagtagttgacagattaaatattttagaagtactgttctaatttaaaatttagacttctaaaaataaaaaatataatttataattaatatgtttaaatattatcattcaattatatattttacaaaatactaaaaaattccaactatttataaaaattgttattaattccaatagaataaaaaaaaatgataaaagaaaaaaagaatataaaaggttttaaaaaataataaatagcaataatagatttttaatttttttttttttttttacttaaaaacattaatagaattagaaatggactttgagaattgagatggaagtgactaatgacaaattgctagccctttcaaagttaggtttattaaaattgggctttaaagcaaaagtataggggaaataacataaatatgggattttttgttaccatttacttttttatggcagaaaaaataaagagaaatttacatggtatactaatttttgccattattttacaaaaatactgtcatgcgttattttttacttttttaccgtatt

SEQ ID NO: 20412 - DNA, 3472 bp, Cannabis sativa
acaaagagccaagatcttttaaggcgaatgtggcatgaagttgatgagttagagtagtaatagcagcagaagagttgctagttaaaataatgtcatcaacatagaccaatgcatagattgtatgatctgaattcaccctaaagaacaaggagttatcagctttagcacacttaaatccgaaagacagcaaggcagttttgagtttctcaaaccaagctcgaggagcttgtttgagtccatagagagctttgtggagtttgcacactagatgagggttatctttgtcaacaaatcctggtggttgtttcatgaaaacctcctcttggagttccccatttaaaaacgcattgttcacatcaatttgctgaatacaccagtgataagtaacagctatagtgaggataattcgtatggtttgaggctttaccacaggactaaaagtatcactatagtcaaacccaaattgctgagagaaaccttgagctaccagccgagctttttgtttttccacactaccatccgcatttagtttttccttgaacaaccatttacaaccaataggtgtcctaccattaggtaggggcacaagaacccaagttttgttccttacaagagcagacatttcagagttcatagcagataaccacttactgtcaagcatggctgctttgtaagatgttggagtacaagtggcaagaagaactctggcttttgaaataccagattttgcccgagtaaccatatgatgagcattaacagggatgagaggagtggaactaactacaggagcagctgtagagacattagaagattcaataggagcagctgaagatgtgttacctgctgctggtgcagaaacatcaacgacagcaggaggttgagttggggaaatgtttgtgtgtgggagagatggcgtaactcgaggtgagggatcatgaggagtgggaatattggaaggaggatggtggggttgagcaacaatgggaatgacagcagtttgtgtttcaggataagctgtgggagacttgttagttgactgagagaccaaatcagcaaaaggaaaagaatattcattaaaaagaacatccctggatatatagagtctcccagttgaagataggcacttgtaacccttatgttggagactataccctaaaaaggtacacttagtggacctaaattcaagcttatttttgttgtaaggacgaatattaggaaagcatgcacaaccaaagaccctaagttgactgtaattggggtccttgtgaaacaatcgttccacaggagtttgatttcctatgacaggagagggaagtcgattaatggtgtatgcagcagtcctaacaccttcatcccaaaaggagaggggtagggaagcatgagcaagaagggttaaggcagtctccactaggtgcctatgttttcgttcaacaactccattttgctgatgagtggttggacaagacaatcgatgactaataccattagacatcaaatattttttaaaagcttggtattctccaccatagtcagattgaacagcttttatagatgtttcaaaatccttttccacttgagttttgaaattaatgaaagtctgaagagcttcagacttggatttaaggagaaaaatccatgtgtacctagaataagcatcaataaagtgaatgtaatagctgaaaccattagaagaaagagtaggggaagggccccataaatcggtgtgaattagttctaatggtttggtgtacacagtggtggataaaggaaaaggaaacttatgtatctttcctttgcaacaagcttcacaaaaatctagaacatttgtattactatgaggtatattacaaatggacatgatatgttttacagtcctagcagcaggatgagctaacctgctatgccaaagagaaaacatagaattgttattacaattagaagcttgaacattattgattgagaaagcatgatctgaggtggaatgagtatgagatggctgagaagtggaaggtttagcagtctgcagttgagtggaaggaatgacatagaggccacgatcaagatggccttccatgagaactgctttcgaatgctgatccttaacaaaacaatgattgggataaaattcaaaataagcattgttatcaccagagaattgagaaacactgatcagattcttagtaatattaggaacatgaagaagacgatctaagtgtaaaggtttggatgtaaaaggtgtatgaaagattttcttaccaacattttgaatggaaagaccaactccatctcccatatgaatctgctcatgtccataatatggttctttttgagtgaagacagattcatcagctgtacagtgactggtagcacctgaatcagggtaccaagctgggtcatttatagtgtcagaagtagcaatattagctgtaagttgttccatgtttgcagctcccacaccaggaaattccatattaaaacgttgatagcagcgcgcagcaagatgtccaggttttgaacacaattgacagatcggtcgagagctagtggtgtttgattgagaagagactggattctgagaagtaagccctctaccagcagcggatggtggtggagaagagaaagaggctccacgggggggaatagcatacggattccacactgaacggccacgaccgaaacctggtggggaatttaagcttgatctggagtcagcagtagggttgtaggatggtctgctgcgatgattgcgattcatggctacattaacagagtccagatcacgatgatgagcatccatgcgatgttcttgagataagaggagggattcgatttcagcaacagtgtatggctggtttcttgaattgacagagattacaaaagtgtcatactccattggtagacccttgaagatagcagctatgtgttcttttacagagacatgatgaccaaccgaaccaaggcgatcaacaacagtcttgatgcgcagaaggtaatcattaatggacaaggctcctttcttgatgttctgcaactgattagtaaactgatcaatcttagcagttgtttgagtggagaaatatacctgaagagtattccagacttgagaagaggtttgacagccaacaactcgtgtaagaattccttcagtcatcgaagagaggagccaggagtaaagaagttgatcctgttgttcccactgagtaaagagaggattcgtgttttcaagcagacgatcttgatcagaaagaaattccagaggcggagggtgatcggagatataatcttgcagattatggcctcgaatggcagaaatgacttgagggcgccatagaagatagttattgttgtctaatttgactgaaagtttgtgggagaagaagacaggatgaaagatcgcaggagcagcttgctctgcttgattgtgaacttgcgccatgaaaacagaggaagaaccaaggtagacgaaggcaaa

SEQ ID NO: 20413 - DNA, 4602 bp, Cannabis sativa
  modified_base (1375)..(1416): a, c, t, g, unknown or other
cattttcattgtgagagcttctatcacaaacaatttacaaccctctcttcaatggaagagaagggtatttatagggagctttaatggctttgaaataaaagttgattccccggtagtccccatgtgttaagaaggacgttacaggttgcaagttgcaggttgcggttgtaggaggtgggctcgcgacttgtacggtttcctggtgttaggtaatcttgggggcacaagtagtggctgcagtgtacctcttgttggaacatcagagcttgcaggtgagatgcctccactacttgtcctctccctatgctcaggtgttgggtgtgtcaggtagcaggtagcatggttgtactcgagtgtaatgtccttttgattcttttccttacagctcactaagcaatcgccatctttttgaaatgtgtggttactcgtcgtaatgtccgaatattgtatacaatgtcgagacacattcaagctatcatgctaagaggcatgcacgcatggatgccaagtgagtgcatgtcgagtgaatgtcgattggccgcaagttgtagcatgccaagtagttgtagcatgtcgggtggttgtaagttacaacttgccgagttgcttcatgctgagtgcatgctgagcgaatcactcgtgactacctttggaagctagtcttgcttgtctcttgaattaaggttgactaatctcagaggttagtcttgttaatgttttcggtcaacacttgccccatagtctataagaattcttttaagtattcttgtagactaagtttgatgaactttaccccgtcgttcgatttcgtggctactcccttaggtacttatgccttgagatctttttgttatgaccatttatgggagagtgttggctctaggagctatccctactccttttcatggtgggtacttgtcacgtggaggaagtgttagcctcttgagctttctcaacctttttcatgagttaccattttatttgagggagagctttgccacttagactttcttaacctcttctgtggtgtaacttttttatggagtgagtatagactcttagagcagtctcgacctcttcttggttactcactgaatgtaaggaagcttttagccccttaggaaacaatcaccttttttaggatttaagattttattggtggagctttggccccttaggtaacactctacccctttaatggtataatatttaattaagggagtttgtggcaccttagtcgtccctcaaccctttttactgctttcattgtgcttggagcacattttcaaatgctacaaaatttgtactccttttagagaggcctcctcttatattcatagtctttttctcttcatatcattattattattattannnnnnnnnnnnnnnnnnnnnnnnnnnnnnnnnnnnnnnnnnttattattattattattattgcctttgtgcaatcatatagcattgctaggcacttttgtccattacgccgctaagtttactttgacaattttgattgacaagtataatgaacaagttcaatggacgttatgagagtgatgaatgtcacacataaagtgaaaatttaacattttatttataagtcaaatacataagcgccttttacatttactatttttggggattaacttaggtgccctctttaatttagtacaatgtatcaaagacagactcgtcattgtcaagagtgctttcctcgatccactgttggaaatagaagagctttactttgaagaatctcttggatgtttaatgtttacgggttataggctagaggcttcactcaaatgtatcatcttataagtgttgggggtatcgcctagcagaccctataagggtctgacgagcttctttaagaacactcacttgtatatgttctcaagactgttaccctcctccacaaggatgtacttctttgctctctcatagaagtcatttatgccatccaattctcttttcatcatgttccccaatagtccacttccaggatgttctctattagctacgacaatcttgagttcatctttggacacttttcctactttggtaacttcggtgttgaagtgatagatgtagcttcgcaagctttcttgttcctcttgctttacattggtaatagttgtgacaagcataatgtaatcatatgcaacctgatattgttggaggaattcttctaaaaattgcttccaagatgtgattgttcttgatcctagccatttgaaccacttatatgcagctcttttcagtgtgactgtgaagcattgacaccttgtcttgcatgacacttttttttttttatcttcattagttcattaaaagctttaagatggtacttcaaatcatctgtatcatcatatggtgtcatacgccgctccttaaaattggggagaagtggttcaacttgaatctcccttgaaaaaggagattcttcatcaaactcatcatcatcctagtttaccttcgaggaggtagctatttttcaacgtaggtcttgcatcttcgcttatatctccttcatcctttcacacatcgttttttaggagttagcgagtggaacttgggtcccctttgcagcttgcataaggcatgtaggaggtactcctcttgtctcatcaacatgtgacttcccaccaaggccgaaggataaggctttatgtttgtttttctcttgggagggggtcataggcaagtggcccctagcacgagaccatttggggtgaagtctcatcataaagttatgggatgcttccccagtgcgatcttcttatggtgggtaggctcgagttgtctcaagtgacccataggatgttaactcaaacttttaggtctccttattttgatggttaacaaatatttgactatcatttgttactaatgatttattgattttgtagcacaattaaaggtaaaataaaatttttctaaggcgaaattaactgtaagggtaaaatggtaattttactaaaattctcaaaagtgactcgaagtggattccaagattcaaggaactcaagacaaactccatgaaggtttatttacatttcctagtcttgtatagttattttttgagtccatatttaaaaaagttttatgtacaaattttggcctactaacttgtgcgacaaagttttctcaccaaatgatacaaaaaaaaaattgattgaatttttaaatcacatatcatttaacgaagagaataaaattagaatttctgaaatgggataatcgagtaaagagttatgtgcattttagaacaaaaaaatagaatttgccactgtcctattttcggcctaccattttccaaacgacaagctatttttctcaaaaatggcaggccatttagaaaacgacatgtcgatttcctaagatatttttaaaaaatgtgctaatggctataaacagctagtttttgtttaaatcctatataaacttaattttttctcaaaaattcaagttggctgagcatttattttataaacctaacatattcaagtgagtttaatgagctcccaagtgtaaaatctaacaaacacttttcacacactttgaggcaaaatttgtgtttaattctttaaagtgtgcttactaatcactctagattttccattgtatcatacttctagagtgaatttgcttgtaattccaaacatatttttatatggtgattaaggtgaggttgacaccggtattgtaaataatccggttagagtgagattgtcactacaacaatttgaaaaagaggttgatagtctttggcggtacaaaactattataagaggttcgaaaacaccttggtaaaaaattcgcagttgtaagggttagtaaagctcgttaatttagctcgataggggaactcaaatctaggtccatagctttcaagaccaaggacgtaggtggcttagttctaccaaaccttgtaaaaatcaagagtttgtaatttcttacccttaaactctttactttacaagtttgattatttattatatattattgtttgccatattacttgcatttaattgattaagagattaattacttagttttgtgttaaaagctttaatttaccgaaattagtttaaatttctaattcacccccttttggaaacatatcttaggttaacgtaggatccttgtctcgcaataggtcccttccaccctcatctttaaggatgctatcagtagatgacatggagtcccctccaccaacatatgtgattgggacccggtgctcctgttggtatcttttgtactaaaagtgcaaggcttgaattttttcgttgagtatgccactcaatactttttccatgctatccaccgtagtttctagcctctggttctttcaatagaggtcatttctctcctcttcatagtggcgagtttgagtgcttgagctcactaagtgcactcgcttctcctttctgggtccacatctaaaagtgtgggcgaggtcttgttgcacagatggtggtggatgccactattgggatttatgccctaaaaggaagtaaaaaaatgaataatatattagagaatatataaaatacatttataatataaatgatatattaattataagagtataattat

SEQ ID NO: 20414 - DNA, 6082 bp, Cannabis sativa
tttacgaaattctatatagaaactcttattacaactagaactgcaacctaaattgtaataaaaaatcgtatagaaacttctattgcaactagcgttgcaaccactttagaaactcaaaccgtaaattaaaaaaaaaaagttaaaaaaaataatatttagagtaatctcccatcataagattaaggtaaatttaatataaaatttacaccaacttataatagatattatatatccacaacacaagttttaactaaattttgcacgttaaatagaaaatagtgacatacattaaaaatgtggtgacaatgtcttgtacaagtgtagtaacctatttggtttcatagagaaatcaataaatactaataaatataattaaaaaaaaaacttatgtgagaatggaaagcatatgagagaccaattcttaggtcttttttgaggggtttggtaggtgatcatgttaggtaatgcctctgtctctctatctctctctttgtctatttaccaaaatgtccttattctcaagtctacgtctattgtgactctttatttaccaaaatacccctctccctgagtttctctctttcctagcaccacctaccaactactaccgcctccactgttgtgttttgactgctcaagttccaccaaaccccattacccctttcaaaccattatataaacacattttcttgatctctctaccaccattgtcagacctcttcaaaccttttcttcttcttctttatatctctctctagatttcaatctcttaagagtaagataagaagaacataaaaaaggttcagagagctttctgcaatggctttgtcaaatgcttcgactttatcttcaagttcactctgcaatgcccggtctctgtgtcctaccccagaatctcaccaaccctctttctctatcatcccaaccaagaaaaccaaccatggtaggagaacaatctccgccgttcacgctgctgagccgtctaaaaaggccgtagtttcttccaagcctgcggtggcgccgcccgctggaaaatggaacttggagagctggaagacaaagacggctttgcagctccctgaatacccaaacaaggaagacctcgaagctgttcttaagaccattgagactttccctccgattgttttcgccggtgaagccaggacccttgaggagaggcttgctgaggctgccatgggaaacgctttcctcttgcaaggtggagattgtgctgagagtttcaaggagttcagtggtaactatatcagggataccttcagaattcttcttcagatgagtgttgttctcatgttcggtggacaagtgcctgtgattaaggttggtctttttttttttctttttttttttttattttttttttatttttgacttggggacattagatttgagatttgatggtgtttgtcttaggtgggtttcaatattttgccctttatttgtgctgtgaggattggaaatagtggattttggattgtttttcatatggggtggagcaaaattatgtacttttgagctgtgtatttaagaatgtgtgtttgtgtgtaacaggtaggaagaatggctggtcaatttgctaagccaagatcagcaccttacgaggagaaaaatggagttaagctgcctagttacaagggagacaatatcaatggtgatgcctttgatgagaagtccagaatcccagaccctcagaggttgatcagggcttatactcaatctgcagcaactctgaatcttctccgggcctttgccaccggaggatatgcagcaatgcagagggttcctaaatggaatcttgactttgctgagaacagcgaacagggagataggtatgtatgcaacaaacacatttgtgatagtttttaactgttctgactattaaaagtcaaaagtcaatttgtttattgattgtggttttaattatgattttgatttgatgaaagcttcatttgattgtatgagcaatccagtttctaatatgcttgttgattggatgatttaataggtatcacgaactggccaatcgggttgatgaggccttgggattcatgagcgctgctggtcttacagtggaccatcctatcatgacacaaactgaattctggacttcccatgagtgtttgcatttgccttatgagcaagcacttacaagaaaggattcaacttctggatcttactatgattgctctgctcacatgctttgggttggagagcgtactcgacaactggatggtgctcatattgagtttctaagaggagtggcaaatccccttggtatcaaggtaattgtgatttgtttatctactgctttaattgcaattcttctggattgtttttctctcatttattgtttaggctttaattccatgacttttatatgatgaaaaaagtcttcagcagaagcagtactctttaatgagtttttctcaaaaaggaagaaggaaaaatgttgaatgtcttgagtctagcttttgatatatcatatagctaccattgcttgttctactgtttattgtgtactgtgaaaattaaatttgctaattgttattcttttctgattcaggtaagcaacaaaatggacccgcaagagctagttaacctcatcgaaatcttgaatcctgataacaaggctggaaggatcactattatctgtaggatgggtgctgagaatatgagggtcaagcttcctcatttgatcagagctgtccgcaaagcgggtcaaattgtgacctgggtgtctgacccaatgcatggaaacaccataagtgcaccctgtggactcaaaacacgtccctttgattcaattcttgtaagatttcactcaatttcctatcatttataatcaccatctgaaacaatgaaactatcgataccatagtacagtaatagttaacaatctattcttgttttaagagcttcaagtgtttactggagcatgatttacaggtagagggtagaatggctagataatcctaattaacgggaagtgtcattataagttttcgtactgaagtatcttaactaattgtgaaatagagcagataagtttaggtggttaaagtcggttgagatcccagaaaattgtctcatatacttgttagaactctaaaagtacccttttacatcttttattcatttactctattgccttacaggctgaggtgcgagcattctttgatgtgcacgatcaagaaggaagccaccctggaggaattcatctagaaatgactggccagaatgtaacagaatgcattggagggtctcgaactgtgacttttgacgacctgaagtctcgttaccacactcactgtgacccaagactgaatgcatcccaatctcttgagctggccttcatcattgcagaaagactgaggaagaggaggatgggaagtcaacgcttgatttctgggagcctctagacaaaacacatattctttctggttggcaattttttattttcttttgttagtaataaaatttggttatagagctatccaccaaacttcacttgcagccaccactcattgccgcaccaacctagggatggtcctaaaaatcaaaaaaaaaaaaaaagtgtgggcctctgaaagtgtctggttgtggttgtataagctctgatattttggctttgattggaagcaggaaaaaatttgggggatcatctgtatgttgatttatgttaattagtttgaatttggattcaagtttgatttgatgtatttatgtatgaacttatgtgaacccagaaaaactaaataaagacaagtttttttttttggttaattattattggcaaaaatccaagagcatatcttgctttggtggaagtacacatgaatagtgcttataacgctattttggaatggaaatgggttgttgaacttaactttttgttgtcaggctaggctggcagatcaagcttttgagcttattttgaattgggtaggtgaaccagtttttcttacttttggggagtggccaatcatctgactctgaattagtagttgaacctattattgtctacttgtgcctctggccgccatgtctcttctactagtgacatcattcttattattattaatattataataactatttggatagtgagtggtgtacctaatcatttttcggactttggaagtagattttttttttttttttttttttcagtttttcatatttctttttttagaggtttcaatgacacattttttctaattactaaaatctaaaattatattgagttaaaacttgatagctatgagcataaatcttacaaatcgagatgagcaataacatatatttcgatttcataatttctttttttataaaatgacagtcctctaaaaaaaataaaattatttgaaatcttagataaaagtaaattttttttataggttttgagggtgtgagaattatattttttttgtgtatgtcaaattataaattttttgccatttggatagtcaatagttctatctgagtatgtctgttactgggttataggttagctttgacagattagcatttttatgttaaaatatcttgaacatctgttaatgagttagtgagctgtcaaagtcagttttgtgtgagttggtgatatatatagttgattcttgaatattctaaccaattcctactcatttgattctttcatagagatttttttctgctagggcagaaatctttttcttcttctttctttcttccaggttcctccattgcggaagagttcaagcttctgtgatgaagtgataatggaggttgtttcatctgaagggagttcagagtcatagttgaagggatttagctcaatcaaagcaagaggagcttgtcttctaatataaggggacttagatttgaatcttggctggttaatcaagatcttagggtaaattgttgtaagaatctttgctgtattattttacatacatttgatttacacactggagtttgtatcttgatattgattcttattggaggttatttaccttggttcggggaacccaagcactagatgcctagaatgttttgctaggactggtgaaacttgtaaatctatggtgtttatcttgatttactttctgcattttagcttttaataatccttgaaattttgtagtgaaactactaggttttatattgtgtgattgaatgtcattgttttaattagtagcatctgattagatcgatttttcaattggtattagagctaactttttcgtgtaaagaaattgagatcctgttgctactgattgattcttgattagattctgtagtgtttcaattcttcttttattgtttattgctttcgaaaaactgatccactccaagattcatctcccagtgcaacgaagttgttgcttgttgtttttttggaaaactgatccacttcaggattcatcctacagtgcaacgaatttgttgtttgtgttgtgtgtagatcaataagaaatggagatgttacgtgaaggaggttccacgtcttgacctcttatgcttgaaggagccaattatccatattggaaaactaagatgatagtgttcttaaagatcgttgatgaaagagtctagatggcgatagctaagggttggtcacctcccacggtatcagatgatgaaggtgtgaaggctaaacgaacaaatgagtggatgcctgaggagatggaaagagccaactttaactcaaacgctcttcatgctttattcaatgcagtctccaccaatcaattgaaggtcatctcaaattgggagatcgctaaagaggcatggaaaaagttgaagattaaaaatgaaggaataatcgaggctgtaaagaaagccagattaagagctctagctaaagcttttgaaaatctgttcatgaaagaggatgaatccgtggctgagtttcatgctaaattatgcgatatctcgaatgagtcctacgctcttggaaaggtatactctaataagaagctggtgagaaaggttcttgggcaactgcataaaaaattcatgtcaaaagtagcttccattgaggaaattcaggacattgaagctcttgatctagatgagctaa

SEQ ID NO: 20415 - DNA, 7733 bp, Cannabis sativa
cttagaggcgattctaaacgattctgttctcctttcaaagtggtgactcccctggggttaggaatttcatagccagatggtacatcgagatgattgtcttcaaccagttgtgcgatggtcttcttagcacaacattgtaggtcattggacaatccactaccaggacggtggtcatcactatggaatgtaggggtctccccccactgttagtgctagctctatcgtcccccgtggttgaatcaagtctccggtggactcatatatcggtgatgcacagggtttgagatccctaagacccaaccccatctcccccaaggcagtgaagaataggatatctaaacttccattatcaaccaatgtctggtgtaccctggtgttagccatatgaattgtaagcactagtggatcattatgtgggaaatgtactcctctcgtgtcttcctctataaaggtgaccgagatgttttcccctccaaagttctttggaggtcttcactcaaagctcgaggagtaaggttctagccttgccccttgggtgtacttgtctctccctcttcgagttttgcctcctacgcaaggccctcctatgaaagttttgatgtcttccaccaatttggggacttcttcgagcattctctattggtgctcctcatccatttgtgccctgttgatgctcgcacctcctctcctgacgacagatggtgataggtcttgctctggtatgatcaaccgatcttcctcaaggtgagttcttgtgtactaacaacgaaaagagcgtctagtcattttgtagtgattgtgtgcaaaataatgacctggcttgagcttgttgttcccgcaaacagtgccaaactattgatgatgagaactcgtcaaataatctagtggttggaaaatacaaagcagcccaaaaattaaatgatgataaagatgaagataaaaagatgtctgaaagttgttttctctctattgcattgaaggcctgagttacaccaattgtttttcctaccccctctcacatttgagatgggggtatttataggatttaatggcctgttgtacaatgttatcctatggggacaaaacggtactttcacgctgcatgtcataggtgctagaggtggtttgaaacctcgtacccttgtctggtgtcaagtggtcctcggctgtaggagagtgatcttttgttgcatgcatgtggtccccagttacaggggagcagtcctcgattgtaggttgcaggagagtggtcgcaacatactcttcattgggtcctcaaacctcgcaggtccattgtcgctgctactcatgcctccttgctttcaaagttcccagaaggagtggttgaacgctttctccttgcacgccttgtcgatgtgcgttcacctctaaccctatatttataatcctcagaacatgcccacacaacacacgtaacatctcgcatgagagaccccccatgcgcaagcccccaacactcaatacacacacaacacatcccccattacacacacacacagctcacatgcaagccccccatgggctcgcatgtgagcccccatagactcgcacgcacacacacacgtcgtacgactctcccatatacttgcagacacacgtctcaccactctgccatatactcgcacacacgtatcaccactcccccatatactcgcacacacatctcaccactcccccatatactcccacacacgtctcaccactccctcatatactcacacacacatcgcaccactcccccatattcttgcacgcacgtctcaccactcccccatatactcgcacatacacacgtatactccaagcttggtttgcattagagcctccacgtgggctcgcacacgggtctccaactagggcatgcataaatgcacaaattccattccaatcatgtattatgtgatccattaaggaatcatttttagaaacatattcattcaattagaatatctaattaaaataaactgataagcattcaacagttaaatctattaagtgtaatggattgtaactaactatttgaatcaatatgagatatgatttaaatatattaaaagaatttgaatggatgtggttggactacatcaagattgagaataattgatagaaagtgttcatacaattaaatctcaataaatataacaactaaaaggaggataattttgcaagtcaaaattaaattttaatagtcatgaccataagtaaattcagaagtaacaaagtatcttagtgggagtatactactcaataaaatacaaaatgattttgagaaaactacattgttctccatagcaataattagtgtttctaaatcaaatcatgatttctaatagaactacaagaatttcaatgaatgagatttattgaaatatatgatatactatgaaaggtgtgaatgtccaactaatttaaattagtaaattttttgacatatgaaatatcaaagtcgaatgagaatgaaattaataagaaagttaacacttcttaatttaaaactttgaagtaaaaatgtaattttttaataatcatgcataaatagtctcattgaattattcaatacataaagatgatattgaatattaaatttcaataagtgagaaactttaaccttattaaaatgatattgattataataatcaataaatatgaaaggtgtgaatgtccaactaatttaaattagtaaattttttgacatatgaaatatcaaagtcaaacgagaaagaaattaataagaaagttaacacttcttaacttaaaactttgaagtaaaaatgtgattttttaataatcatgcataaatagtctcattgaattattcaatacataaagatgatatttaatattaaatttcaataagtgagaaaatttaaccttattaaaatgatattgattataataatcaataaatggtatgagaaaatttagttaaatatccatgaagagaaggatgacttagtcattgacttcataagatggaaatttaaactattatattcagatttaaattttgatgagattgaattcaaatagcataacgaattagtaattattagatatcacatattcttggagaatatagttaaaaatatctataattaataactattataaaagtattattaaatgcgaatttaataatataatatagaaataggcatgatattaaagtattgaataaataatttgaaatttatattcaaagtatgcgatacaagtttttgaatatcaaaatattttaaatgttgaaatttagggatacttgtataatgagtgttatcccaattttttcctacatgacgtgacatgtccacgtggtcaagatcaatgccatgtacagtacaacttgtcaacaaaaaggccaagtcatcagacacaacatatcagttgacggggagtctaaatacttaagcgggacaaagagacaacaaactggccagcatacatcttggcaggcacttgttgtgcatccttgaccttattggtaggtacttgttatgcaacttgcatcctagacagcaattcaagctgcaaattgggttttaatcacccataaaaataggggataaagtcagttatttacctatttcttggggatgaattaatatattaattgtttattattttattatgtaacaaattggttatatttcctctttttaaggaatattaacctattattctcttgtaagctctcttatataaagaacattaagttaaacctaatttccttaagtctcaagcaccctaaacacagaactctctaagtcttgaagctctcaagctctaagtctaaaactctagatccctctctctctctctgtcttctacaagcctcgggccttgtagaagagactaagtctctctcatctctcttatttgagattttcctaccaattctcactattgtaatcttaagagagccacttcagaatatagaacacttgtgatctgagtggtattatctctagtataaatacaaccaaaaggggagtaggtcattacccactaactaaggggcccaaacctctataaaaatattgtgtctcttgatttacttgttctaattgtatacacgtggtgatatcagttataaatacgactcttttgttggttagcaaaatttgaggtcaataattcggtgctttacccttttgatccccctaagggaatactagatacaatagctagttgttgattggttacttagtaagcccttcttatcagtaccgtggcctacctagtacgatcatcaatggctgcctattcagccttcataatctccatctctccattcctccattctatgaaataacgtctctgttcatcaaatacaagacttatggctgctcagaggtcttcctgatcatgatgcaaagtgttattatgaccttgcatgagcccaagtgcctctcctagatttcggagtttgatgtcatctccaactggcctttgagaattagttgtggacgaaacctcagtgttgggagtggaatgatcagctgccaaactggtgtttctagtttcgtgtaagcctgttgtgatcccagccagaagggaagtcactttgtgtcctacagtaggaggtcgtgtattgacctgctcaagatttgtccctagtggttctctcgtgtttccaagagtttgcacgttgagatctatcacaattaggttgccctgatcagtgaggcctcccctatgggtttgaacaaccatcctatttacctgtcaaatcttaagacaaaagacttgtgtttttgctctcaataaaagcagcaaaatattgacctcacttctagccaacgacagtgagtcaaaaaataaagcaattaagtaatttaattaaaagaaagcaaaaaataataaggtaaaatgaacaccaaatttggaagaggttcgaccctataagtgtggtagtagcctactccccttgtatttgtattaacttgagagaaggaatgacgtgtttttcctcttgaaatctcttacaattgatctctgagtaattttctctcttagatcagtactcttttctctctagagtatatttatgtagtaattctctccatccctttcatagcgaggctaggtcattatttatagagacttattacatgggggagggtttcccttttgcttataatgcacaaaatagaaaattacaatgtatgaaataggaaactaggacaggttgccatttttctgtgactcaatcccatgattatagggattttcttcgcgtttggacataatgagattagtctctgaagtcaccatctctcgtatgtcgctcggcacaaacatgttcacacctagtcggacatcttttccacaatcctgctcagatacctgactattacatatgctgagtcatttataggctgttagggatactttcctccgccaaggtatcaaaaatatcggacatgtgtcattcaattctattgccacttcaaggtgcaaaaaacaggataacaaaagggtttcttaaaagtttagtcaaatttaaacttctaattaaactttacacttttataaatatacaaccatatatagaagttaggataccgtctttaaaatttatgatcataatcaaaataaatttttaatacatgttgctccgcaattacaaaataaaagcccaagttgtctcgagaccaaactctccaagtctatctgtcctaatatgtacaaccatcctcgagctttggactcactgatgctcaacctttgcctttcctttacatatacatgtaaataacatttgtgagtcgacagacttggtaaaaaaaacacaaaacatataatacaataacaacttatatttaggcacccatacacctatttgaagacttcaaatgcatcaagaatgttcttaatagaattacgacctctgtaccacatgctctaagtactcgtcctgtactagtgttggtatatttgaaccattccccaagtactactgattgttgtaccacatgcactacgtagtcatctcatacttgtattagtaacactgtgtcataccctttgaacatcatatactgtaccaatacactctgtatcgctacggtgttaggatttatgtcctaaaagagcaagtaattaatggattatatattagagaatataagaaatataattttaagataaaggatacattaattataatactaaaattattaaatatctaaaaattctttatagagactaggtcactatttatagagacttaatacatgagggagggtttctttttttgcttataatgcacaaaataggaaattacaatgattctataattacaatgtatgaaattagaaactaggacagtttggcatttctctctgactcaatcccatgattatagggattttcttcgcgtaaggacataatgagattagtgtctgaagtcaccatatctcgtacatcgctcgatagaaacatgtttgtacctggtcgaacatcttttccacaatcctactcaaacacctgactattacagatgcttggtcatttataggctattagggatactttcctccgtctaagtatcaaaaatatgggacacgtgtcattcaattctattgccacatcaaggtgcaaaacataagataacaaaagggtttcttaaaaattgtgtgagatttaaacttttaattaaactttacacttttataaatatacaactgtatataaaaatcggtataccatctttaaaatttataatcgtaatcaaaataaatttttaatacatgttgctctgcaattacaaaataaaagcccaagttttctcgtgaccgaactctccaagtcaatctttcctaatatgtacaaccatcctcgagctctggactcactgatgctccacctttgcctttcctttacatacacatgtaaataacctttttgagtcaatagactcagtaaaataagcacaaaacatataatacaatacaaacttatatttaggccccctacacttatttgaagacttcaattgcatcaagaatgttcttaatagaagtacgacctctgtaccacaagcactaagtacttgtcctgtactagtgttggtagatttgaaccgtaccccgagtactattgagtgttgaactacatgcactacgtagtcatctcgtactagtattagtaacactatgtcatatcctttgaacatcatatactataccgatgcactcgatatcgctactgtgttaagatttatgtcctaaaagagcaagtaattaatggattatatattatagaatataagaaatataattataagataaatgatacattaagtataatagtacaattattaaatatctaaaaattctttatttatatggagaatgtataatcttataaggacgtacaagagaaataagattgtatgatctgaataaaacaagtcagtagtgtattaaaataatgaaaatatttaatatggaactactaagtatagtttactatacactatactactagtgtgtgtgattttgattcggatcacatatgtagatagacatgtagtaaaggtgctgtgtataattcgattatgcatgactggacagatatgtaataaacacctttcaataacgtgttgtttaccaaaaaaaagttattcatatcacaatgatgatcattagtagatcagcttgaattctaagtatacatgaactcctatttgtgttcattgagttctttga

SEQ ID NO: 20416 - DNA, 2889 bp, Cannabis sativa
agagaaaattaggttgtggattaatatccaccaggcaccagctgttataaaattcttcccagacaagttgaagagaaaatgttagataattacagttacatgtgtaccattttgaattgattggtttggtatccttctacagcttacacctacatctcaagactctagtggccgtgtttagtttttctagttttcacatcaactgatatcgatatgtcttttattttccactctagagtctagaccaaaacattttggctcttaagatgtttttattcctaattcatttcacactaaggacattctcattgttacatatttgattttaattagaagtctcaaatgtttattgcccttttgttttaaagcacagtaccttttgtttgctctgttgcatgattagtctacattttgttttactgaataattcatgttgtagaaatgataatgaaatacatatgaaatatgattgtacgttttatttcttggtaacagggttttcttggtcttagtagcgcaatacaggttcaattttataacatattgtgcagagacaatccaagcaattttcttcttatgcttgctcttttgcccactttggtctccatggtactattgtcattggtaagaatccacgaagcaaataaaggagatgagagaaagtatctgaatgctttctctgtggttgctctggtcattgttgtctatctcatgataataataatcttggaaaatgtcttaactctatcaatgtggtcacgcatatctatttttgtacttcttttgattctcttgagctctccccttggaatagcaatcaaagcacagtgtgaggagtcaaaactagctgcaacaacatcttcaaccgatactaatccactactcgaaaagtttttcgcttcaacatcatcaactagttcagctcatgaagaaagttctttaaattatcctgaagaactacctacttctgatcagggtcaagtgaaggttgcctcagattccactttgcaacattatgaagaagaagaagaagtagagatgaacctcttgaaagcaatgagtactgttaacttttggttgttgtttttggccatgtttagtggaatgggtgctggtgtggccaccataaacaacatgaatcaattggggaactcttttggctatacaacactagagataacatcttttgtctctctgtggagtatatggaattttcttggccgtcttggagcagggtacttgtcagattttttgctccatacaagagggtgggcaaggccactgctcattgccatcactcaaggaattatggctgttggacacattgtcatagcatccggtgttcagggaaatctgtatgttggctccatcttggtagggatatgttatggtgcacagtggtcactaatgccaacaatctgtaaagaaatatttggtataagacacatgggtactattttcaacaccattgccatagccagccctgttggatcttacatatattccgtaagaataattgggtatatatacgacaaagaagcttcagaaaacatttgtactggcactcattgcttcatgacatcttttttcatcatggctgctgttaattgtggtgggtgtttggttggtttggcattgttccttagaaccagaaggttctataagttggttgttctcaaaagattgcagagttcatcaagacaattgcagcagtaatcaaatatgtacatatactttgctgtgtagcaagcaaaaagtgctggtacttggcagagggggtcgtatttattagtgctacaaatggctatttattgatttattatgttcacaatttgtgattgtttgaaaggagagtgaaggtttctcatgtgtggaccagttaatgtttattgtgaaattggcttttcttggagttgaatatggtcatgtcaagctctcttatgtcttagcatgaaaaggtttttttgtcattagcattttctggttttagaatatcagaccaggagttcaggaccatgctaagattgttgctgttaccaggtacacatttgatgtaggatttgttatatgcctatctataagtacaggtctagttatatgatttgtttttgtagactatactctgaataaatgagcatttgttatttttttgttccccttcactttgtcctctctctagaatccttttcttctatcttctcaattttgcttattctaaagtaactatccgtacaaataattcattaatttataccttttattttctaactataacttttatatattttttaataataaagactcaattttcaaaattgatcttttattttattttgtttttaagaaatattcttaaaaaaaatatttcttgtctgcgcataagcttcatgaaaaatccaagttaatgattgcaaatttacagtatttgttgttgtaaaattaattttgctgaaaaaaaaaattacattttaagactatttacagagcatatcaaaattaagtaaaagaaagagagtattcgaatttggcaaactgtttcttcaaaaaagagactaaacttatcttcaaaaaaaaaaaaaagagaatgaattagcagacaggtgtgagttagttcgtaggtttcacacttagtattacgtagtaatttatttaaagcacaagtgtcccaacaaaaatgaagaagaaaagagtagaaacaaaaacatctacatctacattaaatttaaaatgttttgtttcttccaaaaaaaaaataaataataaaatgtttgtgtagtcattactcattactttcagtttagtactttacccctctctctcagtaatgaaaaaaaaaagaagaaatggaagaaagtgtgttgaatagcaaatgggtatcgacagtggcga

SEQ ID NO: 20417 - DNA, 3428 bp, Cannabis sativa
gtggtatccctggaagttcttcggaaaagaaaaaaaaaaaaaaaaaaaaaaatccaataattattattgacaatatattatagtaataaattactttgtttatctttttgatttcacttcactttggttttttacttgtcttcaaagtcttccactcctttgtctttattcttacacaaactccaaagctctaacagaacaacctcactttcctcatcaatggaggaacctcaaccacaaccccaaccccatttcccatactcagatctaaacccatctcttcatccaaacaccatgagacaacaacatcaacaacgacgacgacaaagaggagttgaaagaggaggaggaggaggaggtaaatcatgtactcacttacttttcaaagctcttttagttgccatactcatcattcttctaccattgttcccttctcaagctcctgactttattagcgaatctgttatcaccaagttctgggagcttattcaccttctattcattggcattgccgtttcctatggcttatttagtagaagaaataataatgttgaaattaggtttgatgagactgatctttcatccccaaaggttgaaactttacattatgatatgtctaaaatgtttcagatttcatcgaattgtgatgatgggtttgttgatcccaatttgtctgttagtgaaaatggggtttgttttcagggttggaattcaaagtatttacagggtgaatcaatggttgttgtggctcaacccaattatggtgagaatagattggtagctgattataaacctttaggattgcctgtaaggagtttgaaatctaggattaggaaaagggaaagtgtagatgttgttaatgattatgagttaggttctggtttgggtttgagttcgagttcgagttctcagcagggttcattatctgagagttttgttaatgattcacaagagaagttctttggtgagttgtgttgtcctcaaaatgatggcattgagttcaataaattaggttcgggtttgggttcgggtttgagttcaagttctcagcagggttcattatctgagagttttgttaatgattcacaagagaagttctttggtgaattgtgttgtcctcaaaatgatggtattgagttcaataaattaggttcgggtttgagttcgagtttgggttctcagcagggctcattatctgagagttctgttaaaaatccacaagagaacttctttggggaaatttgttatcctcaaaatgaaggcattgagcttaataacttaggttcgggtttgggttcgaatgctcagagttcgttacctgagagttatgttaaagattcacaggagaattactttggtgagttgtgctctcctcaaaatgaaggcattgagttcaatgaagctgttgttgtttcttcaccttccccagttccatggcgtccgagatctggaaggaggaggagaatgagagaaagagtttgtagtgatcttcgcccttcttcacattttagaccactctcagttgatgaaactcaattcgaatctctcagaaaaacaggatcaccttcaaatgattccccttcacattcggtttcttctgaagagatgaactcgaaaattgaggacgaatgtagcagcaatagtgctaagagctttcaagggtcttatgcttcttcgagttcaccatcaccaccctacttgaagaattcggatgtaagaaattcaaagagttctcaaggctcctctggttcagattccccttcacccccgaaaatgaatgatgaagtttcagaagtactgaactcggaattggaagttgatgatgacaacaaaacacaaggctatggatggtctcctgcttcatcaggttttccttcgccactgaaaccaataaatgatcaagctttagaagtaatgagctcggaaagagaacaagatggtagcaaaccaaaaggttttcgggggttactaccaaagccagtgaaacatggtatgaggaaaacaaagagtttccaaggatcttctgctggacgcccccgatcaccacccaaaccagtgaatgacaaagcttcattgagtggatttcacgcaaggggacatagtgttggttcttcatatgaaaatgatttggctagcccaaaagaatactactggaatgaacaacaggaaccgagtgagagtagaagagaagacatgttgagtaacaaagagagtgaactgaaatcagaaaggaaagtgtcgagtcccacaaaggcttcgttaaggggaaaatcagttcgaacaatcagatctcgtggaacaacttccaaggcctacgacaagggtgaagaagggaggaaagaaacaatgagacatgaaggtgttgagagcctggttagtggaagcaataagccaaaccttgataaggcctcggccacgaaaatgaacacagttcctgctgaatatcgaaatagagagagggaggaaacttctgagaatgtttctgtaggatctgaagaagatgatgcgaagagtgaagctgaagatggggataacaaatttctatccagctcgcgagaagatgctgacgctgaatctgtcattgatgcaacatcagattctaatgaagttgataagaaagctggtgaatttatagccaaatttagagaacaaatcaggcttcaaaaagtggcttcttttgatagatcaaaaggtttaaaactaggcaacagctaccttagatgacaattttacaagcttaagaaaggccaaagattcttcttgttgctgaaatcttgtgtttaatttattgattcttatatttactcacatttgattgcatattctgttggctcaatacttgagcaactaacactgttgggacagcttaaagtttaattattttgaaaattctattcaagtacatgagttgtaatgtgtatcgacgccattaatcgctcgaaaagattagaactttactcgaaaattacatgttttgtaactggtaagcatcttctttgatctgaaactggtatgttcctgttttcttttttctgggcatttgtttatgtattgagccattggattctttttcttttttttggtggttgtgatggttgttgagttggtttggtttattgtctgatttgtgaggtggggttttggattttgacattattggaaatgtactgtgtttctttgtggggtatgtttcttgatcatggtgttttgagaagttttggattttgacatctttgcagggctgtttctagtttttatggggtttaggacaaaatataaaacaaaattctaacaagtttttaaactatttttctactaataatttttggagggttttatggactaatattaaaaaataattaaaaaaaaaaaaaagtcttgggatgaggagccttgagcttcggaatttggaggcggtttttctcgtt

SEQ ID NO: 20418 - DNA, 6754 bp, Cannabis sativa
aaaaaaaaaattaaaaactagtatatgagataatttcccaaaatataaatatcactcgtactcaattttttaaaaattaaaaatcaaattgcactactaataaacaaaccctatattggattgatacccactcaacgtttatatatatgaatttatgtataattaactacaattaagaaaaattaagaaagtaataaacaaaaataattaattaaaaaattaaaaccactctacttaccactaaactgatggtatatattatatatataattttttttttctaaaatattgaaaataattaaaataaacctctattataatgggtatacttagatatttaggattgtttttataattattattatacttgatatatatatttatttaaaataattacagatgactattatgaatgacttttttcaattgtatgtaaatattttttttaaaatgaaccaatcaattaatatttataaacttaataaataaatttaagaatataagaattaaagaaataattgattgatgtagttggagtaattttagataaaaactgatcccaaattataatggtagatctagagaattaaagattgaaggtatatatgaaatattaaaaattgattaattaagaactcacataaaattaaagaatatttaaactcaaaaaattaaaaagaattaattgagcaatattaatgaaaaaaagttctcattaataatgttggatctagaaaaaaagagatgtggtcaaatattgtattataggatttaatgagtaagaattacataaaaaaactcaccttaaattaaaaatacaatacatatttgtgaaacttatttgccattaacgtgttcaaatttggggcagtcactgcttatttatattgtgactgtattattctcattctcatgtgcaataataaattattatcaatgtattattctcatgcattatatatgaaaggttattatatatgcatgggtgagtatatatgtacaaatttattaataaattgttatatatacatatatatatggatgagcatatgaagaaaaatcgatatattctttggtcactgagctacttttccattctttatagataaataaatgtatttattaataattacagtatgttaaattaatatattataagatatatactcaaaaaaattaataagaatctaatgtataaactttaaaaatattcaaaagaatcaatataagaaacttaatgtataaactttaaaaatattcaaaagagtcaataagaaactaatgtataactttaaaatataatatttattggaagaaaattgttactgaaaagagatgtattatgtattatgtggtgtttttaataaataatagtgagataatttactacaagctagaaaattagtagtgataattgtatatatgtaggaagaggaagagagctgttaatttgtagaggagataattatgtatttatatatataggtttaggattataagtgtgaaggttaaatatatgagttattgaaataaaaaatagatagtaattgatattttaaattgttatgtggtttaaggcttgataattaattaggttttattattattttaattaattaatcaataaattttataaacttaaaatgaaaaaataaaaaaaaaataatgagagaataaatagagataattggaatgagtcttatatattaactttatatgtatagattaagcacgttatgtggtcaaacatatgcttgatgatttttaacttgttgatatatatatatataatttattttgagtttaatgaataagaactttgcatacagctgatacagctgatgatcaactctctgctagtacttccattacaaaaaataaaaacaaatctctctgtagtacaatattaatagtagtttataaatatatttatatatcccaattacaatataatatattacactacatgaactggagttaattaggaaaattaaatataataaaaataattaattagaagtataaaaagttatgcatgtgcgctgtgaattattatatgctgttatttttttatcgatcgaaaagaagaattctcatgtcttattttttttgtaggcaatataccacgaacactctagttactagagcacggacgagtgttcttgcactgtatgaactcagtgagagagagagagagttattgtcggcatgcaaaagtagctatatagtacggatttatattattggcttttccacatcaccagccagaataattgacatccattagaacaaaaatgaatttttgtaatattggaattctgtggtcatcgtattccgacaattaaatttacgaccttggcttctctcttagatatatatatattattgattttcgtgctttgaaaccctagcaagctagatctaatggacagggcacatcccagcttaaaaaataaggtactggtacttctcaatttgcggagataattaaaaggtacaatttaaattacatggacttgtgtgtattattgctagtactacatatatatttatatatatatgcatggatagtatttaatttatatgagctgtaacactcaaaaaaaaagtgtatgagctttatgctgctctctcatgcctcaatatccacgtggggctgctggattggccgacacagtctttgtcaagctataaccaaattgtaacatctgttgaggaaagagcattgttatatatagcgcccagtattttttactttttagaacaccttctatatatagatagcattagttagtgatattatttaaaaattatatgcaatttaatatttaattataacaacaagtggtatgacaacaaaaaatatattaaacattaatgggtgtgccttttagcatttattggtagcaaataccaacatatatagaacttccaataattttaatatataatgcaactcaaatcaaaataatcatggaaatttgaggtgacaataaaaaatatgatccattttgaatcaaattgcaagggtgacatccgtcgatcgatttccctttctttacttcaaacttcaaagggaaaaaaaaagttcttgttgaaaaagttttttgggtctatttggtcagaaaagatgaggatggggatacattatatatcttggattcttggttttgaccagtagctatagatttaatttcacggagctattgggcctagctttgcaagacttttacaatcacttctaagacctttaatttaactttttctcttttatcatgtcatctatatatgtaggccaatgagctttcctttctgtcgattgaaaattcaaaggctgctgggaaatagacttgatgaaagctccatctcttttcggaaacttttctctcgatcatcaataacgaggatccatatatatatgcatgcacacaacacatgcacgtactactactacgtataccactttttccttttttcttcttttttactgacaaaattttcataattaacgctcctattatttcaaccaaataaattttgtgcaatcgatgatgtacatatatcttatttggtaacgttaggtctaccgtctacgtacatgttaattaacacaagtaataaaatgcatataatttaaccacttctcatcatttacgcactgcctatatatatacacacataataattacgtaatatatataaatttactgacctcagtaaatcttaactgcctggataaagaaaagagtactaatattaattaatccatacgtacacaactagtatgaacgcagctttgaattaacattactatattctgatattaaagagagctaattaataatttaccgtataaaaagagaacagggcgataaaccttagcagtagtcagtatagaaggtggtactggagggccatagtcaactatttcaaggggttttaaagaatcgaaaattattggatggtaaagagactaaaatatgtgacatttgggacattatatatatatatatatatttatacataaaatgcatgatgttgaaagttgatttgttttgcacgcttggaaaaagcatcttattctatagcttgctatatagtcaaatcttcttcaccctctcctttagtactatatatacgtacagccatgtatgtcagactcatcaagattagtattacatttactgcttctgcttcctttcccaatgctacacaggtccgattctttacgtacaaattttacaataatatcgccaacttagggagaagatgccaccaacaacagccaaattacttttttccttacatatcaatctcaattaataattacattttttatatatatatacaatgaataattgatctccttaatgcaccaccacatatataaatgcaccaccacatatatatcatatagaattttaattaaagtttggggtagagccaataaatatattacgaaaaagtcattatttttatttttatcttgtgaacagtcgttgtggtagcggatttatgatttgtaaaattcatacaaactactatgtttagcaaaattttaatatttatatggtcaaataattttttttttgaatatttttacaacttctttttcaattatttacgttatactataaaaacaaccaaaaaaaaaaaattaacaaaacaacaatataaaataaacattaatattataactagaaaaatcatggaaatatataattttttttttatttaagcgtttatatattacaacaacacactactcttttatggtcacttgagcctaagctcaagtagttaaatcaaataattagtattgaaaaaaaaaaaaaattgtataaaaatgtttaaaattttatacaactgtattttttttttttttttttgtaatattttgacttttttctggttaaatataaaataatcattttatgttgtacgcgcgcctatatatataggaaaaaaaaaaatttagtgagagtgttagttttgctcatttactctttgtttttgatatagagaaattataaatctttttatttttatatataatgatacaattattgttatattaggcatatatacttgtttttgaaaaattcataaatacttgaaacatttcattgcatgcgtgtcttttatcttataagtatgtaataagttattttgaaaggacaccataaaatattgagcactactcgaaaacggacaattgcctattataactacactatttatatatatttatatatatatatgataatatatatatatatatataaaagatataaaatgaaaaattaaaactctttattttttttttttaaaaataataatttaacatgttagttgtaatttagtatagttacgagtatgacatacctaccagtccatactataaattttgtaataatgttattatatatgcgaattggtcatcataattatatatttagagaccagtcaaacgccataaatatatatatatatatatatttatatatagatgattatgaatagatagtgcttttattttgggcgtgaaacgacagccacacattaacaagacttgatatataaatttaatggaataacttgggtgtaaattactttgtgtgggcttggggaaccccacatttgaaaattggtaaaaatatctgtggccatttgcaaaattgcttggagatatgaatatgatcatcatttcataaaaataagtacaaatatatataattattgtgtgtgagctgattataaatattaccactgccagttagttcctaattggactgcatttatttatttattgttttttttattatcaaccatgagtatagtactttgtatatggagaatgctccaaacgtaaagaaacaaataaagattcttaatttctgtttattgattaattaagtaatatacctgctttatacgcgcctaatttaattttttttagtatgacaacctctatttaaaaatactctattaaaaaataatctgtaatttgtaataaaaaaaaattaaatctcaatttaggtccattataaataagaataatctctaaattgtaattaattatacattttttaagtctcgtattaacaaagtatacttctatataagaataattatattgtaataaaatatatacatatattttgtaaatttatttatataaaattaataattttattccaaactatatataatgcaagtatagatattatatttactctaaaattattctattatgatattgtactaatgatcgtttattgttattattgttttttttttttttccggtaaatcagcaagtgtattataaactaagaaacaatttttacaaactcatagcatcctccaatttagaggacctaccccaaccataatcttacaatgtattaaaccaatactcttcactactagttacattctttggccaaatacaaataattctatatttgcttacacttttaattctatatacaatggtatcactattttccatcacttggttccaaaacatgttgtttcgggcaccccaaatcaaataaaccaacgctgcaatagcagccgctaatacattggcaactttgcttttttaatccacttgctgatacttaccaaggaaaccgaggtggttccccaatgcagccaatttttgatttaatcaaggcagccctttgagtatggacactcaaaaaataagtgttcaacggtctcgttgctgccaccgttacaaagtagac

SEQ ID NO: 20419 - DNA, 2701 bp, Cannabis sativa
ttaaatactattttaatctggatattacacttaaatatttgccttgcactttgaatgtctatgtgcaattggtaattttgaatgagattttggtatatataaatatatattttttattggagcagtttgtatgtttattagaatttttttcttaatttctcatgtgagttttagctttagtgacatgtaatttcatttatgtaatgtacatttaaattatatataataaaattaaatgccatttgaagcactatttatttcacaatattatttgaggttagagcataattttattggttagtattgttattcatctaaaattattaaataagttttttaggttcactttaagtgtattagtattttcttcgtttcttttcatttgtatcttcacttaatgcacggtatatgtttgataaacagactcaaacaaaaaaataacgggttgatgattttaatggtttggttgcagcaaattaagtctataacatttgggcaaatgctaattgaaattttatggtttgtgattgggttagcaagagttgcattcagtgatactccgatcattatatttaagacagtaagtacttgcacttgttcctatttgtataattatgatatttataagtgccttacatttgaatttttgcttgtaaatggtgtaatttatggtataatttattcgttcacaagattacgtggctacaagatggtatagagctctagagctttgtgattcattttcttccaaggtatttaactatttatcaccctttcttaattcactttccttcataaaataaatatagaaacatgatatgtatttgcttggattttaaattggtatgtgttctctctcgtattggattcaattttttaaggggatatcttgctttcaacctctcagtgtgttcaggctaatcctagttttgttctcttgattgttttagtgatttgatatataagattatttggacatttgacaataatagtcttgatgaaccatagtacttgctaatgaagaagttgtctatctaatgatactatcattattttgattaagttctacaagtttgtgtcttgaagtaataataataaggcccatatgtgtcttgcattagttgaattcttgaacattataatatcaatttttttttacacttgctgctatatttctttatgttcaactggtcacaagaacaaagttccaattttctttacgttgtttactgattcttctacttaaaggcggtgtagtgtattcaagttacaatatcattaattatagtggagtttttttaatttattcttgaaaatattatattctttgactctgaaaaaaagtatataacattcgagtgtttctatattattatttgtgttttaatttgtgctatgattgttttgagactcttggtagtattatttataaattttaaatttttggatagattcaatgcaacagatgccgccaatttctcagatgcaacaactgctgcctgtgacaccaatgcgcaaatgccacagatttaccggcagatgtcgaaggtatcaacaaccttactatccatatatgtcggagattgcaaagcagctattcggagagaatgaggatgaggagtttacaaatttaggattgtagtgttctttataattgtatggatttattttttgaaagttttataattgtataaatttgatgatataagttttcttcttttatttaaacacttttaatttatgtttaattgagttgttttagctgttctatttaaacacttttacttattttatttttttttaaaaaaagaaacaatggcacgacaaagtggtgcctataaaagttgacagaagggttattatagattgaatatggacacgacacttagatgataggtacgtcatgttatcgtgcctgaaagaacaacttatcctaatttcatgattcaatttaccgattactcaagattgatcattcaagatttggattaaagagtaagcagaaaagaacacagtgacttacaagcttcgtctacactgagaataaatttcagccgactagtgcttgggttccccgaactagggtaataacatctacaaaattcaaaagattcgtattacaatctccagttcacaattagaaatttaatacaatcttttcaacaattagtaatgtattaccaacaaccaaaattcctagttgtacacacaagattccctgtacagcagctaagttcttcttcaacacttttcttcaatctgaaatcccttcagatctgatgacgaagatgacactaaactctcttcagtctgaactcagcaccaccaggctctgatctttctgctatgaatatccatcaccaagctatacaatcagacctgaaaacagtaacaaactatacaagataccacacacaatacaacacgatatatctgaactaactaagattatcaattagctagctgacccgtttacagaatgaaacaagctaattatagaaaatagttcaaccgacctaagaacaatttataccaactgttaaaacataacagactcacgtggactttaacggaataatggtatgtagttataacagattaataccacatataagactggactcactattaatataatctgtcaaaacaaagaaccttacaatctcccccttgacaaattatgctcacactcacccctaca

SEQ ID NO: 20420 - DNA, 3644 bp, Cannabis sativa
aaaaattaaaaaaaaaattaacacttcaaaccgtctattgcacgcataactcatttattttatattataggaaagaggactatttggacactatatttttttttaatagaatgatacaaatttaattctaaaattatttaaaaaaaatatcacgtaaattgttcggaattatagtagctaattaggtaaaaccaatatttaaccacgaaactctgatccaagaacaacatgattagcagatcgcttgacaaaaattaaaaaaaaaaaagattattcaaactataaagaatttgtctgcaatcagagattcagaacccaaaaacagaaggcataattattgaaacttcgaatagcttggattgtgatcaaactgtcttactccaccaccacatcttcacatattcacgacctgtctctttcaaccagctcaaaacctctttaaccccaatagccttggcaagaacagggtcaaccacatccatctaacttgttgtcccaaccagaataagctaactagaagagtcacatgccaaccaaccatacccatgcttgttcagattactaatgagagttgcatcgacattgattttgatcgtattactaactggtgcaatccaatactcatgcccttcgccgtcttgtaaagaaaacaaagaagaatcaaaagttttatcttgagcacatctctattgatcaaaatttcctttagtcaaagaaattacctctctaatagtcttattcctatcatgccaaagtttatcattgtgcagagactacaatgcccaacaaaacataacagctctatgctttatttcaaaactctaactctcaaacctgtcatgaagccattctctgaaagaattatccccaatctccattatcgaaataccagctatttttcaacatgtgaaagcgaaagaacaccccacaagacaatgtaaaatatactcaacaactcgaaagcaccttggacactacttttgatattataaatttctcaaaattttgcaggtctttaataaaaataacggatacgatcatgaaaaatataaattaaaatattttcttaaataccgaaacaataaaagatgcacaagtacatctttttttgtgtagaagttattctgcgtgcacacaccaaaaaagagtgatgcaaaataccgaataaacagaaataaacagaagttattctccaatctcaagaaattgttaatcccatttcttagtcccacactaatccacatacagaaataaacagagtaatgaaacccattttttattctcattccctagttccataaaataaacaagtgttaaatttgacacaactatcagcctatgcccatatgttgtcaagtgctgtaatatgaaattttggaatgcgattcattatatataagtaaacagaaaaggagagaaaatcaacttcaactcaaagttatgaaccaacaacaagtagccaaaaaccatactttcactttataaggatgtcttgttagcttgcatggatgttggggccttcatacaataagctcatttataaatgaagagacatagagaaggatagtgtataactatttaaaggggattgagaaaatcaactgcattgcatttatagctcagctcaagtttttgttgagggcctgaccaaccccagtcctgaaccactccccaaatgcttatagtctttcgcttcaagatgatctccatgcccagcaaacccggtccctcctttttccaagtttaccagattcctctctttgcatcccttattgcagacgagacaaactttgtcaaccgccatgaacttgtcagcacacttcttacaaaagacatgcccacaagagctaagggctacaagagaaagtgtgttggttagagtaactttgcagctgggacagatatagctcttatccaaagatgacattttcttgtcggttttgtcctctgtgaagattacaggaaaaagagttttcagcttcagtttctcattgccttcaggacacacagtactggtggagggagcctctactttgacagaagcttcaggtgtggcggaaggcagccaaaaagctttcattgtgcggagtgcctcttcttcaaaagatgtggcctttacactatttgccccatgaaagccattcttatcacggctattatttctatcactgtactggggtaccgcaccatggttttgctgatcaaatgcatcaagctcccgagctttctgttgcgttatcttctcttcttcctcttgtttctcttgcttttgctgtgcaacatgtgcagctaacttcctgccaagttgacgatatcttcagtacataattgaaataaatgacatgctaagctagggaaaccaaagatacagaaaagctaaaaactatgaatgaacttagtatgctagtatagagcaaaagacaacgcatataaatgatccaagaatactattggaccaccaagttcaagcaattttatttggtccagtcaccaaattttatataaggcacaagtgcttgtttaactcgctagggttataacctaattttaagtatgaagatcattatgttgagaagaaacataagcttataatcccacccacctacaacccggtagcacactatgtcacctcgaccatatatttgagacgtttcgatctttcttagtaatattttcctctttctatttggtttcccataagagcgaatgaattgtggagacatttcaaatgatgcttgaaaagattcccccgccatgctattcaaaacgcaaataaagacattaccagacaaaccctgcaacattcttcgtgctaattactaaacttcatatgacttaatactaagtcatctcactgaactcttcgctcaactagagggaatacgggccttaatcactcacctcattaccaaaatgctatcactctcggcaacaacagagacgatgttaaatttcctttttcctatttcccaaaatttgctcttctactactcaaaaagtgtatatgtattcctacatagaaccaattatgtgatacatatgaaaactaaacaagtagatgcaccaatagtctttattaatttttttaaaataagatatacatacacacatatataagatataaggttaaaagaatcaacctctgaatatcttttttctgagaaagcatacactcgagaatgcattccttgcaaaagacatggcctttctggcaacaaagggggtcgataaagggcttcaagcaaagagaacaaacgtcaaaaggctttatagagtccttgcccagcctctccttctgagttccataaccaagcttacgcttctcatcgtaagtgaagaaagctaagtcgttgttgttctttgagtgcctctgaggcatttctccctttctctttcttctccgtcagttcgcaatgacaaacccccaattcgaaaccttgatttgaattcagatcgatatggcttcgcacccaatttagcaggaaaaaaggaaaccctagaaatttacgagaggagagtcctgcaaggtcgattggatcgatttggaccgcagtgagaaaaataatcaggtgtgttcgtgtacacaataattacatgtcttacttcattttttttaatcattgattaatttttggtttaaattt

SEQ ID NO: 20421 - DNA, 4460 bp, Cannabis sativa
ggatatggaataaaagaggggaaaaaagttttgaattaggagcccactaaattatagaaactcaaattaccttttctatattctaaaatactttctttataaatgtacatcttaagaaattacttatatttgtttttagtttgtgatacagttatcttgtaacattttgaagaaaagcacttgctcggggtgttcttagtttttcaatcagaagctgttacatttttagttgaacttttctattccaagacttggtcttctgtttgttgatgattttttttgttggttttgatcatgatttcagcctatcaaaaacattcggagataaatttgttcaatatgtaaactttgtctcatcttttgcatatcttttggttagacaataagtgttttagttcagagtttatccctcatttagtttaactctatatcttattcattctaaatgctaataaagtatttctttacaaaaataaaaatgtactagtaacagagaatcattcaacattcaaagtatcatattcaaagtatagcaatcaactctgcacccagagatttttataagccttgaaacaccaaataataaacaccacaatttctctaatattaattggcgaatttgatttttctatgtatttagtaaaacactgtccagcaggcagcaacaacaggatcataagccaaattattaagaccaaaaccatctttattgataataattagacactcactcagataaaccattactcaacaagcatgcagtcatgtgtattttctaaaatatgcaaacacccttagatgaaatcactagcaaaagaagagagatttgcaatacttacattgagcttgttttagtttcttgtcaaaatgatccccaacaactgatgtttgtctttttttacttgtatccaaagctgcagtaattgttgtatcatttgggtttacagctacaccttcaaaattatcccccatatcttcacaatggctatgcatattccaattttttcaatgagaaactccaacgtcctacaataacaaaacgaaatcataaattagctctaaaaagtaaaagtggtaatgtttgatgacaatctcagtggaaaactggaaagcgagaccaaaacaccagaaaatgaattgtctaataattattatacttggggaaaagttaccacaaaaaagatttttaacaaacagtttgagcagactcactcactctctctcatttcatttttcatttttcttttcttcttccttttcagtttatttatgccctaaaacaaaagagcaccaaaatgaaaaataacattgcaaaattaaaaggcatataaaaatcttacgttgtagtagacttgagcgaaggccggagattctgtccgggaaagaattgaatgcaggcagaaattgattatacaaagaagactgcaaaagaatatgaaagaaaaggggagaatggaagaaggggaatgcgtagggaaatggatattttgggtattaatgggtcaggcccattatcggcccattttcttctaaagttctaaaagtagagaacattgtcggtattcttcactggtgagcaggagcacttaattttcttgttcattaaaatacattcttttaatttggtatttaatttcattatgatatttgaattgtttgatccttgaaattattaaagagatcattcagcatatttgataacaaactagaagtaacaagcttattttttgtttcaatatttgataaattttcttcaaatgagtcttcatttttcagtacgtctacctattagtatatattaagaaacacacaaaaatgtccttttggtttttctatttctatttttggtgggtgcacttttttttgtcagttttccaaaactctggtctcggggatatattctatattttcatgaacaaagggctcgaatggatatgtgaaaataggtgtatttttcaataattatctgtactggtgcttaagcaatcgataaaacttagccatatatccctccaaaaatggatatacattgaaaccgaaggttctgataaaggtctctctagctgttcaacttcaagctctttaagtcctcatcaggtcccaagtaaaatagtccaaacttacataatacacacattatatattacatatatatatataggactatatatataatcctcaatggtatccaactggagctggagattctttcaattcttttccctgaaaatgaatatcctgcataacaaaaaccccaacacccacaatcaattttccacacagaaaatttttaaaccagatagagattctcaatgaaagagaattttagtataaacttatcaatggttgcataatacttactgatgcaaaatggttgacatcacggtggtgagcttcatctgcacgaataacagtaatgacatctttaagggttgcatcctttggtaatctccagtagtcgattgcaatggcaggagccgaaacattttcgatcctaccttcattcagatcttttaagtattctgtataagaatgtatagcctcttcttccaagtaaccaacaactctatgagctagctttggtgatagtacataaagcacaaagtaagcattgaagaacactccctgaacggctagaaccagtagtctctcgtaccatttgggttgaactaattccaccattgtcattagatgcattctctcgttctctgcttcttcaagcaaggccttgatccaaccaccgctttgctcgaacttgcggagtgacctcaagtgaaggaggacgcctcctaccataccagggacggctgcaacagtttccaacatcattgctcgacatccatatcgtctctgcaagatatagtattcattatttcttttacttaacaatgaacaatcaagaacagagttaaactcggacatttactgaactagaggacacatacatctatattctatagtatgtaatcattcaaagtgaaaaacctcaccagagatcataaagaaaagatggcatttgataaaggtgttcttaaaacactatctattactgggctagcataatagcatgtcagtaacaaaacattgcaactctctttaactcagctcagataccaaaaaaaaaggcatttttatttgagaaaagctgaaagggtatccaacaccacaaagaggtctcatattcatattggtgtaactcaatatctggtgtaactcagttctatcttcacagaatcacattcgacacttatcaactaaacatactttaaaatcatattccataaattccctgacatgaattatttactctaaatatcaattcaaaaatcttcagcaaagtccctttcagtttgctatatagaaatgatttttattttcttttctaaattaagaattgagaatctaggttccaatttcaatcaatatatatatatattaaatatagagaacagaacaatttgactgagataagagatgaaaccttgaagaacaaatccgttggaatcctcaggagtttgactgtcctataagcgaccttatcggcaaacgtttttggcacatgatgtttgctcaaatcaatcgataaatctgcagcataagtctcccatggcaaaaaaaaaaatcaactcaaattccacacttcaatcgaacaaatcataaaagaaatacacaattgaaaacgatcgaattttaccataaagcaattccatggccactcggtcccatcttcccgagtaatcctctgtctcgggaccccccaataactcgaaaccatagcgttgctttgatccttcttcactttaagctcattcttctcctccgtcaacgacgtcgttttcgccggcgacgaagaagatgaaaccgtactcatcttcatcatcgtcatgattctcttcgccaagaaaaaatcatccaccggattaaaactacttccagtgaccagagaccttgctggaatgaccgacatggaaatatggcggttgaagttgcggatgctactactagtactactactaccgccattgatgagggacctagccactctcatcatcatgatcttcatagtgatttttcttcttcttctgtaaatggctcccagagttttgggattttctagattcggaagttgattgtaagagttgaaatcggtgacggttccactctccaaaggtgttgtctttgtttaatatttattttacaggtgaagagggttttggtagtgtacttcgcgggtgtagggttgagatcatgtgtgtggtttcgatcgtggaagaaggaatatttagacgatcaagattagaagataaatagggatgttgtttaaggaagtggaatgagaagcagaatacttaatgagtcaacggctgcgaatttcggtggagtgtgacagttattataatgaggcggaattgcatgcaacgtcttctatagtttgatttgtggtaccccggtccggtcca

SEQ ID NO: 20422 - DNA, 2095 bp, Cannabis sativa
tatctataaaaacaacccttccctttcttctttagtttggccacctccttctagagcccaatacccaacagcttcactctaaaggcccaaataccagcccattcacccaaccaaataataataataataataatccattttgtgttattttcttcaaatatatactaacaaccactaaagtctaaaaccgcataacgttttatcaatcaaatcaatccaaccaaaagccgacttacccaactaattagccgaagagtgtgataaatatcttttttaaataataattttctataaataaatacattgtatttctatcatcattaattatattagttttgctctcatatttgtgatcatcccatcctcaataatcttataaggtacgtatgattaataatgaatgaaaaatttatcaaccactatatatataatgttttatttcattcgggttatttatgtgtgttaaaaatcgattattattattattattatttatttttctaagatactgtattgattatatatatatttatgtacacagagagtgagagaggaaggagaaggacgacaatgaaagaaggaagaatgattcgaatatctaatcatttaaggaataaatatgaacatattactgtgatgcttactattgtgaacggcaaccaacatgatattcatgatgtttacaataatgttaataatttcaagtatgaaaattttaaaaatattcaaaaacttggaactatatacccacatttttatatagatgtaccttatagtaagctcattatggattgttttccaaattatatgacggtgttacaatttcatgtgagaacaataccgatatcttctcgatgtgaaaaaactttcatgtttaatcctacaatttttacaacaaagacactatcgtcatcatcatcatcgtcatcactacgtaaaaaaaaaattcaattcaattactatcgtcattctttaatagaggacgagttaaaaggttgtaaggaaattaaaatctttggccatgatggaattattatcattcattctgttgtaggatctttgtatcccggaaaaccaccgcggtaagtatacaattatatattttttaatcttatttctgttttgaatttttttttaattattattaggtagttatttatattaattttatgatttgtttgttgtgttgtttatcatggatttagttcaaaattagtagattacttgaagacgaagatggaagaatcatcaccggatcacaaaagaataaataattttttgaagaagttgcatcatctatattgcttgaagaaagtagaagaattatcacctgatcatgaaaaaaataatcaatcctataattagttaagtttgttttattaattttttaatgtagtagcagtgggcattaaaaatttaaattaatttattattttttgtttttggatttttttttttgactcaactatgagtaaaaactagctgggctctctatttatttttttttagtttcatttggttttcattagtctttttatttattaaataaagtgaaaactcaagtatttatttatttttcatataaaatatggctatgtaatagaatttttagtttaattatttttttaatgtttttttttctctttacaaaaaattaacgtgaagttaactcccttttaactctaaaaaaatcagcaatcaatactaaatcttctaaccctaaccaatcaaaaactactcttctccaatatttttatcaatctaatgacatgtttattaataagtaatgagaattaacggtaaagtaatcaatcacttacatttgtttacttgcattattaaaattaggagaaaaaaaagaacttgattaaataaggaacactactacaaaaaccccctttagaggcggtttttaagccatttcagcgtcggtttttgcgaaatttactgacgctgatcaggatgatgttaaagggttttgaagaaccgacgccatatgtggcgtagcaactgacgccaaaagtgagggaatttcagttttttcaaatttaattatagaatttattttaattatatttttattaatttatatatt

SEQ ID NO: 20423 - DNA, 4711 bp, Cannabis sativa
actatgcaagtgcacataatcaaatagtattcacacatgtgaggtagatctcacagaaaaataaactgaataccattaaattatacttatatttctatttggtaaacaataacttttatgaaaaataaaaagtaagactaataaaaataaaattaagcagtaaaagtatttactcaaaggatgaaaaattagggaaaagaatcatgttgttaaattacccaattattaatgctaattattattcttctttctttaagttaatgacagattataaaattaacctaactcttttaagatcttttaggccctaaatcatatgttatctattcatctcttggatagactaatatataatatgcattaaactataatctaaatgtcacaaaggctatgcgaatactctcatcttacatcaaaatcaagcttatccaattttagtattctcaatgcacacttttcagattttgtattgagatcataaatcatgcctaaggtgatcaatctcaaatatgtaattaagcgcaaatatgaataaattcacaatcaagaaagcaaaaatagcaattagcataaactcatggtataatctcaaacaacattcataaaatccctacaaaggagtttagttcataatttccataatcaaacttaaaacagaaaatagcatagaaaaaattaagagagaataaaaaactagttggagaaatcgattcggattgccaccagctgctcttgaagttctctcctttgattctaagtctctaattcgaaatgaatgacttaaaaatcgcatgttctttttgaaaagaactaggtttcccacttaaaattgtgaaagtacaaaactgcccacaaatttgtaatgaaggcgtcgccgtgaccataaaaaccctagtcgcggcgaccgttgaaactcaaaaatacaatgttatggaaagcttcgctgcagccataactcatgctcaccgcagcgagctttgccagagatagcttgaattttttttttttcatttttcccaactttgtctagtctaactctcgtgaatattttctttaaacacccctggaacctaaaacagagagaaacaagcgtaaaattttcctaaaagtagatacaaagagcaaaaacaacactaaaaagtgactcgaaacttaggctaaaaatagcctaacaggtccaggtttggtctcgggtcccgatctggggttcaattcccaggttcgggtccctagtcccaggtccaggtcactgatcttgggtctgggtccccagtcctgggttcgattcttgggtccaggttcaagtctgggtctcgggtttagtctcgagtcttgggttttgccttgggtttgagtttgggtccaggttcaggtcagggttcaagtatgggtccaggtcccaagtttggtcttcgatcctgggtctgggtcttaggtctggtccgggtctagatctgggtttgtttctcggctctaggtttggatcccaagtctgagtcccaaggtcggatctcaagtcagggttcgggtccgtgtccaggttggagattgagattgaccccaaatccttttgtaaatattataatacaagctaatacagactatttgttatgtattaaataatacaacttaaattgtattaaattttttgtcgtaattattaatacaatacattgttttatccaaagcatagtattatttattatgtaatacaatacgacccttatacagcctaccaaacaggccctaaaggaattaaatctgattctttcagaaagcttaggtttcacttattgtatgttatgttcccagtcatccatcttattaagtttccaaaataaacttaataagaatcatcttctttgagaaacttgaacgagtgaattaaaaaacttaaagatcacaaacaagagttcacgaatactcaagatttagatagatctactaatgattttgtgatataaataactcttttatgataaaagacgtgtagataaaagatgtttgtttatatcggtctaatcatgtacaatcaaattatacacaatacatttactaaatgtcactactagttagtgcttagtaaatcgtacttagtaattctatattaaagattccatacttgaatacactaccgactagttttattcaaatggtatgatcttaattctcttgtactcttacaagaccatacactctctatatgaataataatttttctaatatttattaattattttttaataattaacatattcatttataatagtttttgtatttcatatattccataatatattatcctagaatacttgattttaggacataaaccctatcactaaataactacaacgtacatgatcaaaaaaaataattagactaaaaaagttttcgagataccaaacacagatagggaggtctactagaacactcttttttaggaaggtgtactacaaattttctcaattattattatttggattatttttctatttcacgttgccgctataggaaagcaatgtgaaaacaatatttttttttctttcgaaaaaataaaagtgaaaaacttgtcaaaaatagaaaaatgtaaaaaaaaaaaaattcaaattgtaagtactttgtgtaaatttttatttatatttgacaaagaagaagagtactaattagaagtataataataagaaaaaaaaaataaaaggtgattcttttggctagacttgcacatatattgacttagataaatttagaaaattgattcaatacattatggtttggttattaaattcaaaattataaatcgcactacaccttatatttggtaaaaataaaaaccacaatcgtactgtaattggttttaaaccgtattttttatgcgatgtggcgtggtgcagacagtttgtgcagtgtgagtagtttggtgaacactcctaattttcagcaatgttaactattcaaaattttctaaaagatttacatgtagttttaactaattacaacgtacacaatacacaatcataaaaaaaaaaaaaaaattaaaaaactttcatgaataccaaaacagatagaggtgtctaacgaagtacttatttaaagagtgtgctacataattatgcaaagtttgtcactgtcttctttttatttaatttttttttctcataattgcttagatacacttaaaaaatgaattagtgaattttctcataattgcttagatacactaataaacaaactaaatcaaaaatttaattacaacttaacttcaaagtgtgtttgaaagtaattgtgtaattaggctggtaataacacagtctagtcacactatattttaaaatataaagtgtgtttggaaatgagatggtaattacatatgaattcttaatattttatttgacaaaatagttagtaattacacgggaaaaataatatttttgagtagttcatgttttaaatgaaaagtttttgtaattacacattgtaattagacttaattctcacgggggaccatgagaattgaagtgtaattggaatccatcaactaccttcaattacacaatcatcttcaattacacagttactgtaattgtatggttagacaaacatgttaaattatgtaattaccttcaattacatacaaataaaattatacggtgactttctacacgcgttattataagcactcaactttcttattctagttaattaaaaaataaagaaaaaaaaatacactataccaattttattgattattttaatgtagatggtagtacaatagagataaattttgagcagtaaccaattttaactaaatgtatacccttacttttaaatagacatataatagtcttaggatactaaaaaaacactctttatcaatccaacaactcagaatgtttgtggttttgcatccctcatatttggccaataaataaatgaatgaattccctatatagtacttacataaaaaaaatgagtggacggaaatgtgtgtacgtatgcaaattgtgtggactgtggagataatcttgggataataattgcaacgataaacacgtttttgttaagaaaaatgaaaatgaaaatgaaaatgaaaaaaaattaaacaacactctcgttacgtcccaactcgtttttcttaaaattaataatgggaacgatgtctgccaattgtggaatcgtttatagtgagtgatgtttacgaattaaagagtacaaaattagaacaaattataacaaatgttatgctaaacgtttccttactagggacagaaacagaattgatgggatcgttttattataagaacatctcgaaagatatattaaggcgccatttgataatatttttattttctaatttttcaaacacaaaataaaacttaaatttatgtttttttttttttgaaaaataaaaatatatttagtaacaacttttgtttttttattttaaaaataaaaaataaaagtgttatgtaaaatttatttttatttttattttttgattttatttaatacggggtctaggttcaaggtcggattcatgttcaggttagaggttgggtttggcgacaggaccgtaagagagatttgggccaagtctgatttggccaaaatattgatgtgaaaattacatgaaatatgggatttcataacaaagttagaaaaatatggcatttttaggtttgccacttttctatggcattttttcacatttaag

SEQ ID NO: 20424 - DNA, 3657 bp, Cannabis sativa
agatggattccatacaaatatcagtgaaggagaaggagaatagaaaacggagatacaaatcatactgactgttgagatatttatatcgtaattcaggacacaacatggaaaaagtggtgcaacaagaggtgtggttctggaacgggaagagatggaatagtgggcagttaaacagagtcatgggagaggtggagaacaggggaggaagacgaagacgagaacctagaaaaccagggagataaccgctagaaactgcaacagggcaaaacccaactcgggcactaaaataaaaataacatttaaacaatataaaaattaatttacaaataacaaaaaatcaacatcaaaactataaaagtaaaacataaaaatatatcaaaatactgtattttatatacataaaattttaaaaattataaaaacatttataattccttaaagttgtatttttgtattttttgaaataatttattttctttttcacctttctaatttttttaataaaacacaaaaagttacacttaaaactatttaaaatcttatttttgttttgttttggcttttgttttcaagtattaaaatcttgtatttaagtgcgtagaagttttagtctcatcgtaataatgaatacttaatatattataaaaaaaaaattggcagagcaagagattttaatataattccaaaatattgtcatttaagcttatcgtgcataataataaaaataaacatagaagaattgtcactatgttattcaaaatggcacaacaatacatattgttaaaagtaatggtaaatatcattttatattctatattttacaaaaattatcaattgcactttttgttaaataacaattcagatattgtgttattcaaaattgtacaaaataaccctaagcttaacaatatgtctttcttattattttttttatttaataaatatatgtaagaaaatagaaaataataacaagttctaagaaaataaaatttaataagaaaaaattaaccaattgtaaaggaacaaactaaataactaaaatcattgcttgaagtataatgaaatttttttattcaaacaaccactaaactacaaaaatgatgcccaaacacagccaacaacacaacactcacatagtgttaataaggcaagaatgtcctcttctcttttattttcacataccatcctaacaaattttgcgtatggtcttgaggcatccaacaactattacatgagattttgttttcgaaaattataaataaaacatagtagaaaattgctctacatttgggaagttacaactaaaaatcaaattgcagattaaaagttttgatttgatgtttagatgatgttggagtatggatgtaaaaatcaatatatttccatccacttatttattaatgttaaaaactattactaacactaattgattgtttacttagaatcgttgtgtgaacatgattgcccaccttttcaatgctcctgtgggagatgatgaagttgcagttggtgtgggaaccgttggatcgtcagaggccataatgcttgctggcctagctttcaagagaaaatggcaacaaaagagaaaagcagatggaaaaccctttgataagcctaatatagtcacgggtgcaaatgttcaggtgatcatctcaatctcaactaactttctaaacacaatgtgttttcaaaataattatcagtcaaatagtgtctttaacatttatcttttttatctgacaaaaaataaattatactttcttaaaatgaatatctatctttgccttttgttgattggttgaggtggtggaataatcaataggtatgttgggagaagtttgcaaggtactttgaggttgagctcaaagaggttaaactgaaagagggatattatgtcatggatcctgagagagcagttgagatggtggatgagaacaccatttgtgttgcagccattcttggctccacattgactggtgagtttgaagatgtcaaaaaagtcaacgaactccttaccaagaagaacaaggaaacaggttgggacactccaattcatgttgatgctgccagcggcgggttcattgcgccattcctttatccagatcttgagtgggatttcagattgcctcttgtgaaaagtatcaatgtgagtggccataagtatggacttgtgtatgctggtgttggatgggttgtgtggagaagtaaagatgacttacctgatgagcttatcttccatatcaattaccttggatcggatcaacctactttcacccttaacttctccaaaggtagttttaaatttccagtaaagttatttgtttgcttgcttcaatatttggtgctcagatgtttactaatatttttctcataaacgtccacatgtgatattgtaaagtgtttttaatattaatatttatgttgactcttcatgtgacattatcaattggaaagtacaacataaatttataaatcttggctaaaagtggtgagccaagtataatcaaatcaatgaatcgcagaacttccataatctaaattaaaatgaattattctcaacattgatagctattgtctttctcataatttgctgacaggttctagtcaaataattgctcagtattatcagttcatccgattgggatttgaggtcagcttttgttgtctcatacactctaaattcttttttattgagtcttgaatgccttgtatggatttatacatacaaattagtttatttttttattaagttttgatgtcctaacactatacatattataatttcaacagggctacaagagcataatgataaactgtatggaaaatgcaaaagtactaaaagaaggaataaagaaaacagggcactttgacatagtctcaaaagacataggggtgcccttggtggcattctcccttaaagacagtagcagatatactgtgttcaacatagcagacagcttcagaaggtttggatggattgtaccagcttacactatgccagccgacgcccaacacattgcagttcttcgggtggtgattagggaggacttcagctgcagcttggcggagaggcttgtctcggacattgataaggtcttgaaggaaatggacagtctaccaagtcacattatgtcttctgaaagagcccatgttgctttgattgaaaatgatgaccatgtcaataagactgtgaagcagattcaagatgatgtaactaggcattggaagcgatttgttaaggaaagtaagactggagtatgctaagcttccaaaaaccgtcaaacaacaatttatttcgctagaataaaaaaaataaaactactagtactgataaagaactacttaaatcatatgatatggtattagtgtgtctattatgagttttgatatatatatatgttgattgtttgtactgtgtgtagttcatggtggtagtaaagttatgtattttattttataatggtcttatacactttttttagcagttaatgaatgggtttggttatacaacacgtgtaagaaataattaataactcatagataacagaagttatttggtcaagttacaaagtggtaaaacatgattatgttgggattttataccctaaataaaattcattttaatataatctaatttgttatcaatagaagattaga

SEQ ID NO: 20425 - DNA, 2251 bp, Cannabis sativa
tcactaaaaaattatcctacatggaaatattttacaaaataaaaataaaaaatttaagagtaatttgcggcaaaactcccccaactatcaatttacttgcaaaaaagcatccaaccttaaaattttttagatggtattttttaagtaaattgatagttggggggggggggttgccgcaaattactcttaaagtttttattttattttgaaaaatatggctacataggataattttttagtgacttgtcattgccacatgggtaaaattaagatttaacgaggctggacagacgacaccttaaaaatgtaaacggaacagtactttggaaggttttcccaccaaaatatgaagttggatggttttttgcaagtaaattgatagttgaggggttttgccgcaaattactctttttattataatactaaaagaagttaaacgcggttatgttaactcgattaatatagaatagatgttacatattatttatttattatgcttatttaatttatatattatattattcattaataatatgcataattgcatcatattttgaaaaacatttacttacgtatttagtgtaagcgagagataaatttgaatgtaccagaaaaatagtggatcctttatttatttattacattatctcttattattcgcatatgactgttccaaaataaacatcaatatgatatctaaaagcagtgtagatggtcacttttagaaaaattgtagaataaaatggacgatcattctgggaaaagaaaaagattgcatattatatatgataatagtataatcgaggagaatcttctcttctttcctttcttggcttagcaaataagaatatatatacatatatatatgtaagtaaactgaagttttaaaatgaatttaaacaccacttatttagtaaactacgtacacacgtggttattcatgaaccatatttgtatacaataagctgcactggatttaatatataatgtacttatgcatgtatagaatcagaatttgaagaattaatttataattttgtgatgattcatcaattctccagttttgcattgtctagatgcacagcagcagtactcactcttatcaacattgtcagatttcttagtctaaatttcccaactctcttttggaactctcatttgtttgtgcttgagaactatattaatttctgggaacaataattaagacaaacgtatcagtttgtcatggttaacacccagaattaatcaatggtgggttggtgaaaattatatttatataattgttttaaagttaataaagcaatatttgattaaatgaataaaatagtgatcattactagcgatttatgtgttattgggggcctaccacaactagtaagtagttaaagatataaatatatatatatatatatatgtttttagagatgaagagggtattcttttctggtcaactccatgacaaaatttcattattttatgttaattttgtcatttaactattatgtggtctctatctaatcccactttggctccacttctacaccgcacaagaaaagcaatccataacttttgcggcacaaacacataaatatatatatatatacataattattatatccacacgctttactgtatgatcatgttttggtacttacctttccagctttctatccataattcgaattggaatctaaacttacagccagagctatttgttttgcttaaaataatttcattccgatgaaattaaagatgtggatgagtattgattccaatacatatatgcatataataagaccacaacaaatgaacacatttcattattattttattttatctttaaatatatattatatattcaaccttgattaattagttatatttatatcagtgtagcttttgattattttagtctttggtaagttttatcaatagcgggagtaaaaagaggccaacttaatttattattttatccactacgtacacatgattaatgttaataccttgctaagataacatttttatctttattttgaaagtgaaaagactagtggtttgtgacgtgaattaaaaagctctctagttaactttacttaatttaaaattaatcaatcaattatttatagagtataaaaagttgatattaagcaatattatcattaactatgcgtctacttattaactgcttccgttatataaagagcaaatagtcaaatactagctatacatacataaataaatcgagatatag

SEQ ID NO: 20426 - DNA, 4322 bp, Cannabis sativa
ttgatttccagatctatgtttgagcattatttttaattttgtatttaaaagaatttagttgggtttaagttttcaacctttttgatttgttaattttatggtgttgatgaagctgtttgttgttgttttgttgtcgattttacttttttttttctatatcgtcggaataaatggttgttttctggtttttttgtggttctgtttgtcggtttggaaggtggaagcatcctaattcacttttctgtccatgaaataaaatagaaataaaaatgggtcagggcagtatttttgtaaattctgtcatgtggcaatataattgtaatatttacccctaaatctagtatttatgtaaaacctctttcaattttttttgttgagaagtactaattacaatcttataatcaattttcacatccgaaatcatgttagaatattttatttcattttttttataacagtattcaatttagttacaatatcatcaatataaatttgtaaaaaaattcaaataatttacaatactgaaaataaaattcttgatatttcaatttaccactctcgttcaaagaatttcaaacttatttatgacactgtaaactattcaaaattttataaaatttaccaggataatgttgtaactataacgaacaccactataaaaaaaattgaaaaaaaaaatattccaacatgtatttttggatactgaagttgattaagaaattataataagagattgaccgtaacattttttttttctaaggagacatgaagcaaaggaaagtggtgagatagataaaaattaccatgtactcaaatctttccataaaagaaacaactttttttttggaatggaaattcaatttcattaacttaagagcaataaagaaacaaccttttgaaacacttttgcaccatacaattttggccataattaatagtcaatgtttttgttacaagtctctgatcaatagtactgaatttatgattatatgcatcattccttatttctttctttctcttggttggtttttttttttttttgtgtgtgtgttttcttgatcttcttccaaatcagaaaaacttgcatggttccaagtgatctttttgactaagaaaactcaattcaaacatcattagaggagcctaaaacagtctccatatgtttattaacatcactcaaatacttggttgaattgtactcttctgcatcaaaaagctcttctgaatatgtccgccgcattttagacttttgtcgcagttttacaatctccgaactgtcctcatcgcctttcagaatctgcacaacctgcaaatcagaagaaaaagagaaatggctgcaaaatgagtcactgtttttctttctttctttgtttaagtaacatggcatgacaataagttcaagacacataattgttgttattattacttggctcatttggggtctgttggcagaagattgatgaatgcacatcgaagcaatcaagactatgcggctcatttgctcgacatcataggcttcattaaggcacggatcaacaagctctttgaaacttgtcttggagagcagaggtttggcctgcaaagtaaggattgaattgagtagaatgaagatgttttgatattagttgctgaaaaaaatgcttacatacccacataacaagacttttttgtgagctatctaaagcttggcgtccagtgatgagttctaagagtagtactccataagcatagacatcagttttttcatctactataccatgcatgaagaattcaggaggaaggtaactgtttcatgtttttgtaagaaagatttttagaagaagacataaaataagaaaggaagatcatcaaaagaaaaagtctttgatttacaaacccgaatgtgccttcgaatttcgacacaatatgatgagtccattgatcaggtagccactttgaaagcccaaaatctgatatctgaatccaattgaagatgagaaaagaattatttgattcaatgctttttttaagtgcaaaatatgggaattttgagtgttgttttagtgtacctgaggttcaaaatcctctgaaagcaagatgttagaagcctttatatctttatgaataattctcctttggcaaccctcatggagataaagaaggcctacagctgtgcctaaaacgattttgtatctgactccccaatcaagtttctcccttgggcctaattatatgaagaaattagctaaaagttgtgatgatttttaaatagagttagagatttataaaggaagacaaaccataaagaatagatgaaaggctcccatgtggagacaaatcaagaacaaggtgcattccaccttcaaccccatatccaataagtttggctatgttcgggtgatcaacatgaactataatcccaagctcagacaagaaatctgctgtcatttcttcttggcttcctcttgtcaaacgtttaaccgcaacgagttcaccatcttccaattcccccttgtaaacctcagcatagcctccctcaccaatcaaattcccttcacaaacacacaaatgagccaaagccaaatgtattgagaaaaacaaaaatgtaaaatatctagagaccttggctgaagttgttggttgcaacttggagctcggatagtgaaaagttcttccatgaagacttgaagcagctaagttcagcatctaaagaagaagcattggttggaggattcaatggtgggaccatttcctctctaattcttttgctctttcttcttgtgaattttgagacaccctttagaggagggaaggtttggaacctaatgtgtggtcctttcttaagtattccaaagaaaccacgccaatgagtggaagctctgtcatctgagtctgaagtgcttgctttcgaagaagcttcctcgaaatccaagctcgtcggacaatcctcgggacctcttgccacacatgaatcctcatactcttcctctccctctgcagcctcctcaaaatctaatgatctcaagtcttaaaatgcatagcaaaaaccagaacaatagtcaatagtcaatgccattacaaagaagaagagataaaaggaaatttgcctagattattaccttgacttgaaaaggagttagagtaggcagattttagagtcctgtagttggaagaaacttctccaacctggtcctgcttcgctttggcaatgtcacgagagccattgctgcccatgaaaatctccacaatgtcaataagagatgatatgtgacaagagaagaaagagctttaaagaaacaaattataacaaagcaaatggccaaaatgttatcggaacaaatatctcacaataacaccaatagaaccaattgacactttgtctacatatataataataataataaaaacatgtggcataatgtaaataaaagacaaagaaagagacaacgttgtgtaaattcccctagttcaaatgtggtgaaagaaaagaaaaaaaagtagttatgttcttggctattccaagataaaattagtttattatattaagcatgaatttacagagaagctaaaaagtgaaaggtttggagattactgcacaggaaagcgaaatccgccaaaagcagaagcaaagagctgaaaaggattcatccattaaaaaaggaggcgaaaatatcattaccctgaacaaaaagaagaagaagaagaagaagaagaatgagatgaagatgttgaatgttgtgagacattattttccatgaattttcaaacttggccaaatcagataagcctaaaattcaaaagggtattcaaggaaattacagatacaaaaactcacagccaaaccaactcatgacaaggagagaccaaagagccagaggctgggacgatttttctcttcttctttctctaaaagaaataatgaaattttaacatgtaccgattttttatccttaaaaatcgtttattttatgaaatagattgattacattttgcaaatcagtttgtaagaataaataaatgtataaatttagcatgtttaaggagggtatgtatgtcctgtctccattggctttcatgcaagcacgtagggattggtgttatttatctcctttggctaattgctttagttatatgtaacgtatacagcttctttcttctgggtgtttgacacgtggaattaactaccaaccatttgaaaccaaatgtccagcttcatcatcatttcttttaatatatatattctcaagtctaaactaagatgaagttcagcctaatcactcaaagtttcaatttgtggagagccattcacaatcaatatagacattaaacattatataatacat

SEQ ID NO: 20427 - DNA, 9461 bp, Cannabis sativa
ggtaaaaattttaattaaccaaaatatatactatttctctatgtaattattaagataatagaaattcataattaattagcacctcaaattaaaatagatcttatattttgaaatattttaaatatagcaccttacttaataatttctagacttactaaaacatgatttagtttgaatcatagacacattcttaataattgctttgaattccatcatttcaaattataggatggtcttcaaatgttcacttatcactataaaattaccaaatcaaacatacatcgaggtcaattttttattcaagtcaagtgaagtgttagagctaactgaccttaaaatttagtgagttataggaaaaaagtatttttgggcccttgaacaaaaaatatagtattttttaaaaatcagtaaaaaaaatatatatttttaataaaagaaaaaattttaagcccttagactagtagtcgggcttgctaacacttgacacatccaaacatacgaagtgcatctatacataagtctgagagcgtaccaaaggcacctttcaacctatgttcttcataatttcatgcgagtactgtttgtaccatttgtgactgcaccatcgaggctcttgccaaggcttctccaagaccaaccttgtgataggtactcactagccttgcaagcactactttagagaaagggtgaactcacaagtccaatattaatatcttaatttcgaatgataatatgaattggtcttatatttatatcgtctactaatacacaattaatcaatgtttgaataaagattctttcccatattaatacatttcgagaactcacaaaaatctctttaatgtacttacctaatttgagcacctaagaagaaagcctcatgcaagtgctccaccatgcaaccctccgagtgcttcactatacgattatcaccctctaaactaatttaataattacattaaactaattaactcaatttcgattacattgtgattttcttaaataaaatattattttgtaaattaaagtcaattgtatttgtcattgaagatttcgataattggaacaatatattacatgattttctttaaatttaggatcgaccttgaaatataatagttcatagaaaaaaaaatagacccttatttaaaagaaaatgtgatatttttcaaaatcaataaaaaaaattgtataattaaaaaaaaaaaaaatttgttgggcccctgggctaggtgggccctaggcatatgcctagcccgcctatgcccaggattgagctccttaaatccaatatgtaagaaccataacttagtatgtggcaaattatgtatgtgtctcattagttgcttatatgatcatactatggtcctactgagtgtatgttatttttgttggttgaatttttgttagtaatctttcatgcattatggtttattcattaactataatttgctaaaggagaaattgtaagtgccatattttttcagtgtggtaaattatgtgttagtatcatctatttacttgttgttagattggtgcattttgattttttttttttgggtttatacatttagtttgccaattcaacatttaatttgaaaatatctatgtcagttgttatgagctgccattctaatattaagtcggttgtttggaaagttattctatatattttttattttaacggattctaaccaactttcattcatttagattctttgatatagatatttctttgctaggacaaaaaatttttttctctactttttctttgttgttgtaggttcttcattgattgaaaagttcaagcttctgtgtagaagtgaaaattgaggatgtttaatttgaagggagttcatattcataggtggagggatttgaggttgtatttctaaaggcatcttgagtgaagagttaaataatttgattctctggtttcaagggagttgaactaatattcttgagtgggtatacaagtattaaggtaaattgtaatctctatgcatgtaatatgttgatttgatttcaaaattgaaaatggtatataaccttaattttatagtggagttattttattctagttcagataacttaagcacttgccgcctaaaatgtgttttgaggacagataatacttattattaagttagttaacgttgttataattatgttatgttagttagtctttctgttcatatataatgcttctttctgtatcaattcaaggaatcttacacaaaataacaaaaccaaaatttcaatttttctcttctaatatggtattagaagaaaaccagtaaatcttcaagctttacaagctttcatcaatggtgaggacacgagcaacgaattctgctaccactaacgatcccgtggtcgatgcccctgctctgatcgatcccctcccatctcagacttccgctgacaacaacactcgagctccgttactagctccaccaccagtttagcaacctcaaactgatcgccctgcatacgaggacatttgaactccctattatctgagtaatgttgatcatccaagcttaattcttgccactccgatcctcacagatcgaaatttcatactatggcgacgcgacttcaagatcttaattggagcccgcaataaaacaccatttcttgaaggtacactccctcaactccctcctaacgattctcttttcggttcttgaatctgatgtaaccaaatagttatgccttgaattttacattcggtctttcctaagatcaagagtagcattatgtatcttgacactactgtccatatgtggactgtgttacacaatcgtttaaccaagggaatgggccaagaatctttgaactcaatgaaacactcacttatcttcatcaatgggaagattctgttagctcctatttcaccaagctcacaacgatttgggatgaaaataaccaattaagaccaaaactcccctgcacctgtgctgcagcaacacaatatcatgatcatctcaaccatgatcaagttcttcaatttcttaaaggcctcaatgaaagataccatgctgtccgtgaccaaatactccttcttgacccttgtccccctcttaacaaattattttccatgactgttcaccaagaacgccaaagaaccattggccatctcaccattcccacccttgctgttggtgcaacttctacaccaacagcacaagcctctgaccgtgcacctgctgcaaatcaagcttcaagaaataaaaaaatctcccattgccagaattcaagccactacaaagataaatgttatttcttacatagctttcccccaagttatggaaatagaaaactagcagatgcaacaaacacaagaaaaccatacaataattcattcagtcgcaatcctcaaagcatgcaaatttccactcacaacacttatatctcccaatcccatttcactaattctcaatgccaacagatcatttctatgttgacacaacagctccaacctacaacagatgcatccacctctgttgacacacttactgccaataattttacgggtaattttgacttttttttcctttaattcttggataattggtgcaattcaccacatttgtgctcatttacaatattttcaaacaattaatcataaccataatgtaaaaactatcaatttaccaaatggtacctctgttaaaatcaaaaaagttggcacagttggacttaactcccaactgatactttccaatgttctctatgttcctgtttttaaattgaacttacttttagtacctgcattattagaatctacttccaattcactatattttacttccaattcaatttctctcttctaatacttataaatctttaacgttcatcttaatttacattctccattataactattaataatccttgcaaatttattagcaaaacaactaagttttactctttcacaatagaaatttatatcacacttaaaagcaactccaatgtagctttattcttgcaataggggtttttttttttttgagaataggggttgaactttgttggttgattaagttgcttatagccttaatagaaaatagcctacgaattaggaggttggctctctttcaaaaataacattaactagatataatttacaaaaatatcacttttgcattattattgaaacaaaagaaaatctaacaattaggatctatatttttgaaagatttttttttgaatgaagatttctttctttattttttattttattgggttgatttttcatttattaaaatctcaaaaaataaaaaactaaattcagtattctcaaatctcatcaaaatcgtatctttctctaaacccttataaaagtaaaataaatcatagaaaataataacttattattattaattattgtattgaacaagaagctgttactttggtgtggttaaggtaataaagattagatttttaagattaaagattaaaactttaacaacagtttcaaaccaaatcgattagaacaaaaaagggttctttgttctgtgttctgtgctaccaatttcgatgtaattagcatttaccatcgttttcttaaaccccatcaaccccaccaaccgagttactgagtcacccgagttttgaacaactcttaactcagctcaaaatggctggtaataatcaccatagccgctcaagctcacagcttccagaaaacattaataccaacaacaacaacccatcttccatttcagctcttcatcaacaaattcgagctgaagcttctaatgggtcatcctcttatccgactccaactgccacctttgaccaaatcattcaaaaccctgatcttttcttggacaagcttaccctttttcacacttcatttggtaccaagttcacgtaagtctctctctctttttattcatttgaatttaaggtttttacactttgtttattcttcaaatcttattttagggttgaaattaagtgtttaagttggattttcatttttgatacatgcatgtcattttatttactaatctcttctttttgattcatttttaacatgtttatactttatagtgcataagaaaataggggaatttgttctctaattacagaatttaagcttagactttttcttcaaatcttattaacttaagtctttctctctctctctttttgttcttctttcaagtttaaggtttttacactttgttcattctcataattgattgagcttagataggccttttaatgagggttgaaaataagtattttagttagattttcatttttcaaacatgcatgtcattttatttactaatctcttcttattaattccttttccaaattatttccattaattgttgtttaacatgtttaaagagaataagaaaataggggaatttgttaactagtgacaaaaaatggttttggggtgtaatttttgagttgcaggaatgaactttgtcaattttcttttacaaaaacatttgaatttaagcttttcccactttgttcattctcataattgattgagtttagaccttttttttttcaaatcttattagggttgaaaaataattacatgagctagattttcactcagatgatctttagtgtcacttttcatacatgcatgtgttcttttggattcttctccaaatcatttttattaattattgtttaacatgtccatagacttatagagcataagaaaatgtttttgggtgtaatttttgagttgcaggaatgaacttttctgtttacaaaaacactttgtcccattctcataattgattgaatgggaaaattttcagccttgaaaaataactacatgaggtagattttcatttagatgattttcagtgttacttttcatacatgcatgtcttctttctgattatttggttaacatgtccatagactcatagagaataagaaaattggggaattcgggtgtaatttttcgagttgcgggaatgaagtttttcggttaccattatagtcaattttattacaaaaaccctttgttcattctcataattgattgagcaatgagcatagaccttttcttcaaatcttattagtttttttcgtcttctgatatcagattgaatgggaaagtttcagtcttgaaaaataactacataagcttgattttcattcagatgaattttagtgtcacttttcaaatcatttccattaattgttgtttatcatgttcatagagcataagaaaatgtttctgggttgtaatttttgagttggagaatgaacctttttctgttaccattatagtcaaattttacgaaaacatggattgaaacataaatttacattctttggctgtttttcctcataataggattcccactgttggaggaaaggctcttgatttacatctcctttttgttgaagtaacaagccgaggtggtcttgaaaaggtttgtttcttcgattagaatttgttttaattccaattggttactcacttttgattcttctattgttatataggttattacagatcgaaaatggaaggaagttgttgtagcttttaatttcccggcaacaattacaagcgcttcatatgtgttaaggaagtactatatttccttgctttatcactttgagcaggtgtattatttccataaaaaagccccttcaatcacaacgaatggtaatcattcgaaacatgtttcttgggttcttcttcgtttcacaatctcttcggtaaagatggtataaataatgtgtgtgctttttcttttctgttgtttgatgttgtagaccctgcaagtaggaatcttgtcaatgaattcagaacccctgatgaagatgatgctaatagaaaccagttacaagtcggtcaaggtaagtgtttcgattagtttgtttaaaaagcttgaaacttttagatcgcccgttgtcttattttgatttatttgcagagaatatggaattgcagctcggttgctcagttaccggagtcattgatggaaaatttgacaacggatatcttgttaccattaaattaggttctgaacagcttaacggtgtcttatatcacgtccctaaccgcacatctcaaagttcttattcttcagacactcatcatcaccataatcatcaccgaaacagaaagaaatccaagttgtcgttaaaagatccatctcggcccaaatcaaacaggagcggttacaacttcttctttgctgagcattacacaaggcttaaacctacctacttcgggcaagaaaaggcgattagcaagaagatcggggctttgtggaataacctaaccgaagctgaaaaacaagtatgttagcttagctcaactcatgactctcttcaattaaaatcttttctcacttattttatacctaaacaggtttatcaagagaaaggggtaaaagacaaggagagatacaagaacgaaatgctcgaatacaagtcttcgactcctcaataggcgagagagagagcgtgtagtgacattagacaatgacattagtgagtagtagaatgtatgctttgttgtagctgtttcgaaggtttcgggtgttaatttttagctcggtttcgggctgtttaatgcagtttctgttaagtttgttatgtcaactaatgagtttgtttgcttgtttgtttactattgaacaaaatcaagtttttctttttaaggaaaactcatattctgatttcagataggaattataggatcttgtatttaacttttgatttgaaagatttgaaatgaatgagatggattatgtgcaaataaaatcaactacaaaatacataattataagcataaaaataaaatgagaaaagaaaaaaaaagtgattattattcaacaaaattaataaattaaatagctgaaatttttgtaggccaccaaggatgtataagaggaagggctcttaacacttatatcatcttgccaagcttgaaaacattcatatgaccaagagtttcaacatgaatatgattcttgccaagaattccacattggaaaatctcaatagtattctcctcatcataatttgagaagaagaacgcatctccatcatcaagatgcatagtgagtatactacattcaaacttcaaaactattttcttatgaaaatgcacatatttccaagttatcactttgtcatctctattctcatcaaccaattcccatacaactaaagcatatgatttcttagtttcatcttcccaatcatgacagtatgccaactgcaatctccctcgaataactcccattcgagtttcggtattgggagtaaaccctctaagcaaactaatcaaacgaaattgctgcgaataaatattcaacgcaacaataccttcaaatgcccaaaatccttattggaagtatataattctattacttccaacaacagaattttgatgataccatatgtttgcgggcataggaaattggcagttgaatggatccatagacccgttacaaaccaactagtttcgagcctttctaacccctagcacaacataacagtcttcccacacttgtccttactgcacttttgtaaaatttgatcaaaccagctgcaaaaattagcaacaacaatcggcctaacctcaaccaaaagcctctggtagcattgagcaacgcataaatagaaaataagcgcatgaaaaataatttcctcacctttttgataaatcagacacatgatttcagctcgccatgccaaattgagagctttcggtagtaccttcaaattctagagcttgcgctagaactcaaaagaatcagctgtaatccaattttctttctaagcttgcatcaacttgtatgcactactcatcgagtagaaaccatgatgctctttagactagaaaaaaaaacgatcatcaactatactaagactcaatagaactgccaaaatatgttgttgattgcgctcgttaaaaagatctttaataatatctaaatcccattctctcttgtctgtacacatcaacgagttcatcttatggcacactaaacattgggcatctgaagtaacaaaaggatacccatcatccaaaagtcatggctgatgcaaaatatcaaccttcacaccagaacttattgcccaacaaaccccagacttgagaagttcctgagattcacaccagaacttttcaaaatagtaagattgttagatttatgaacttctgcctgatatcgttcaatttaatgttgcaaacgtgacaattatttatatactaagtcaagccccgaattctgacaagtaacaaatgatgtacctaaattttaatatgtacttaattgtgtcccatgaactttcatccacatttaatatctattagtgaaattgaatagatgtctttaaatttaataatcttaacaatttatcaaaaaatacaatttaattaaagttccatagaaaaaaaatttaaattagcaaaataaatataaatataagggtaaatacca

SEQ ID NO: 20428 - DNA, 3744 bp, Cannabis sativa
gattcaagcatctactttgaaaaattgaaagttattgttagtagttagttgttcattcatatgagaaactgtttactttattaggtttgtatctttttgctcgggatggaaaattctttcgtgaaccaggttgaggttgttatggttcaagtgtgcttttgttatttctttaggtgttagctgtacccatgttggccccaagatcctacactcgtgaagatgtggttgagcttcagtgtcacggaagtgaagtttgtctaaatcgtgttctgagagcttgcttagatgctggggcgaggttagcagagccaggttgttcacaacttcaactaaaaaaatatataaaatgcaattttttttatttgaattgcttattcggagcaacaaaaccattttaagtgttgggatatcagtatatacaagattggttttgttgaaatagaatatgtattgtgagttcaaatacaaccaacaatttgactgttatgttttgttgttggagtaggattgatgcaggttcaggtttgctgacgtctataattttattttataatttctatttgcaggtgagtttacactccgtgccttcctcaatgggcgtttggacctctcacaagccgaaaacgttggaaaattaatttcagccaagagtgtggctgctgcagatgcagcacttgctggaattcaggcatgtattctgttcaggatgtaaattttgatggtcgtgaccttttatgttattcaattctgctctagctagacttccattgcaaattgcagcaattgtattttttgcttctattcagtgtaagcttagcttttttggcatctgccatgttaagctaacacatgcattgtctttttcctctttgatagggtggcttttcttccttagtaaaatcaattagaatgcagtgcattgagttgctaactgaaatcgaagcccgtttagattttgacgatgagatgccacctttagatgtggagctagttgtgagtagaataaattctatgtcgctagaggttgagcatgcattagagacagctaattacgacaagcttctgcaatctggattacaggtacggtttgctgtaaatctgacaagttatccttataatgatatcctgtggaagttgtgctctttttagatgatcattgacttattaagctcttagttattttcagttagctttgttatttctatctgaactgtattagtgctatcttttatgttttgtattttctgttttggttctgagcttttctcttgttcaattccactacctacctcttaattattcacatgctctgtgtcatgtttctttgaatttgcactttcagatttctttaaactgtttccatttttatgtgcttctgacatgtgcttccccttattgaaattttgcagatagcaattgtcggtcgacctaatgttggaaagtccagtcttcttaatgcatggagcaaagtatgttatgaaaaaagcttttcttataacttaaattgttggagttttcttcttatataatggaccagtctatcgagaattacgtagcctcaattacatgcattttagctacttaaaatccatctttttcttttctttttttcttgaaaaaaggtacttgaaatccatcttctgaatcttattttgcattcaatcattacttttagggcaatggatgtttttttaaatggagttaactagactatgattagtacattagtttctttgtccataatatcagtgaatattttgtagagggaatgtgaaaatgttttgttttttaacttgtgcttgcatagttacataaattattataattttgtcatcttaatgaatatcatgttttatatagcgtgcagagtgatagagcaattgttacaagtatcgctggaaccactcgtgatgtagttgaggctagtgtcactgtcaatggaattcctgttacacttcttgatacagcaggcattagggacactgatgatatagtggagaagattggtaagctcatcctttttgcatagtctaaaattatgatgttttagtattgattctaagcaaagaagatgaaaccaacttcactcgagattcctttttttcaatagtatctttttcaagtttaaagatatttttaaaattacaactaaagcaaatcccttttgtagcagtaatgatttattttttctgttgtcagcatcatattctattcacattgtactaaactattccatattttagacatccaaatgtgcccaattttctttttccaataatctcgtttggtaagagaaatgctttgctaatgaatgacttgagatttcagaaggtcttcatttttgaacttgtacctgtttcttttgtacattaaagttgaatttgaccacgtatgactacaattttccaggtgtggagaggtctgaaacagttgctatgggtgctgatgtcattatcatgacagttagtgctcttgatggatggactcgagaagattcaacactcttaaacaggattcagtctaacaaggttctaagggggttttacaaacaaaataatattcctttgtgcttcgtgcctttcattccatatgttgatttactatattttttgtttggaattacagaaatcaactggatctttctctccaatgatcctcgtaataaacaaaattgattgcggcgaatctattcctaatattgaatgtatcgatgaagatggaaatacttttactaagcatgtcaaaacgtgtgctgtaactggccaaggaataaaagagctagagacggcaatatcagagatcgtgggtctcaacaaagttattcaaggggggcgcaggtggactgtgaaccaagtgagcacccttatgactttaaaagattcatctttctaatttacaatcttcttataatcattatttttataattgatccaaaactgctttatctaatttgaattgatgaatcaacagagacaatgtgagcagcttgttagaactaaagaggcttttataaggttaaagtcatcgatagaagatcaaatgcctctagatttttggacaattgatctaagagaagcatcattggctcttgggcaaataagtggagaagacatttcagaggaagttttatctaacattttcagcaagttttgcattggtaaataattattagctttagagtaatctaaaacaattcataaagaacaaaatattgtttctttttgtacttctttggtttagctgtagcaaaatatgcttttcttttcacaatttgttaattctgactttttcattatgcaaaaatggtaagaaatttatgttaatatttcaatagtcattggtcaagcttacaagttatatatttctgtgtatataacactaaaatgcatctttaatgggtttcttggtagtagtagggaagtaaaagaatctttgtttctactaatgtgattacttttgagctttttcttcttttaattaaataattgtttgcattcaaagttattcagaatttatttggtaaaaaaagatatagctcttaaatttttttctactttagctaaggaattttttagctatttgtttagctatgtgagattatcctccaaatctttcttcaatttataattatggatattggtcgttaaactattcaaactgcacattttctaaagggaaatttgattttctatacttagaaaatcttaaaattttttccctaaatacatacttaataatattggt

SEQ ID NO: 20429 - DNA, 2319 bp, Cannabis sativa
ttatgtttttttaatgtttttttttaatttaatcccactatccaaacgtgacctaagtatattgattactcatgtttgatgatatcttagtatatgatgtttcttcttgcacttatagacctcttaactcttatggacttgaacttcaatgttagtagccgcgctcaactttgtctactattgacaggttggaataggccataactttcttatgcatgcaactggttggaaatggaagcttagtacatgttttggtggagatggtatatctcgaattcgtaataaaacaacacttggcttgtgccctggtttggattttcgatttgggtggagggctgattatgtccttccagaaattactgggcaagtactaaaactctttaatgagtttgactcttccaaatgtcaacatttatctctgtttatatgtatatgtctccttcccttattaagacataagattcttgtactaatagggcgttgggcaccggtgagccattgttcaacatgaattcaggaaagttccaagcatcattagacagatttgagaccattttaacccattcagataaaatggtttatacttcggatgaaatattttatactgatgagaagaactcacaagactggtatgcattttgttgattttgggaagaatttcagggtgaatttattgtttattgtcagggctagagatatccaactccatcaggtacttatatattttttttactgtattttgcagctgagagtttggagataaagcatggtggaagatgaaacactcatttaacactggatacgatgtttcttcatattcagctaatggtctctacttatgatgaggatgctgcatgcacctctagcaacatggtgtgtactgtttgttgctgtaattttctgtgctgaatgatgatttattttgaatataacctaaatatttaatctaattggcttcattaggatgttgatttatgcctttttagaacatctcgaagaggcgctctctaacttctctttatacccattataaatttttgatattgggaaaggaagatatgaacatttattgaatttttaatagttttttaagttgaatttacttttttaaatgagttatttaataaaaatttgaatttataataattatttaaatgatgagtatggatagaatgagattgagaaaagtaaatctaagacaacactcttggagttgttgaatattcatgtattattttatttaaagtcttcattgtattttcttcttgaattctagtattgtcttttctttttcaccaagtgaattccagtatagtctgttttgtctttatctaaccttttatctagttgagctgaacagagagaatgaaaacagagagaagagaaagagagaaagtgatttctttattcaatgaatgaatcagttatgtacaagagttggtatatatatatatatgactagttacaacagaaaatataactaatctttataacagaatgtacaactgttaataacaaactacagctgtcattaactgtcattaactaacacctaaccatattcactttctatctcaacatcccccctcaaactgaactgggattgtcccagggacagtttgctgcataaaaaattgaatttgggaagagtcaatggctttgtgaagatgtcagcaggctgctcttcagttggaatataacagacagttattttgccttcagtgaccaactctctaacatagtgtacatcaacttcaatatgcttagttctgaagtgaaaaactgggtttgatgctagttgctgggctccttgattatcacaccatatgactggtttgcctactggtttgatccccaattcatttagcacagaaatgatccatacaacctctgtggcagtggttgataatgatctgtattcagattcagtgcttgagcgagccactgatttttgtttcttggacccccatgatatcagattaccacccaacttgacacagtagcctgtggtggactttctgtcgtccaaattcatgcccaatcggcatctgaaaatgcctctagagtaagacatgttgcaggttgaaaaaccagtcctctgttgagtgtacctttaatatatctaaggacccttttgcaggcattccaatgagcaatagttggtttttgcataaattgactcagtttattaactgagaatgcaaggtcaggtcgagtcattgttaaatattgaagggagccaatggtactccggtagagagtggggtcttcgaatggagcactgtcagctgtgtaaagcttgtatccaggacaggctgg

SEQ ID NO: 20430 - DNA, 6289 bp, Cannabis sativa
tttttgttcaaagtgacaacaatgcatgaatcgcattcgccatatgattacaagaggggaaaaagtgttgggagtaaaaagagtaaaatctatccaaaaatggtataaaaattatattcatcttaattgctcttattcttcaattgagcaggaccaaaactacaacacaaaaagaaaaaaaaatcacccttcctacagatcctaacccttttcgtaattcctattgtcgtaaagagtaaattacacataataatttacagtacagtccgaatggaaccaaacaaaaaagtgaacatcaagctgattggagcacagtaagataataaggatacccctggcatgtacctgaagaatcaacatttgtttcaccattaggcagtagaagattccaatgcaactcgtagtttgaaatatcatacgtcccgggtgaaaatacagaaatctgaagaggaatttcgatcgttgacatgggctcaatactggctctagttgaacttgcagcagaccatatgtaaggagaaacagaatcaagagatggtggctttgcagattgagttgcaaggacatcagttgtgactttaatgtcagtaactagtgagacatcgtgccaacctacttggttgccagtagttgtagctgatgttgattcacttgaattgccactggagtcatgagtgttaatgtgcacagatgcagagttgttggacgagttgtatattgtcatacttagtttaatttcgcaaaaggatgcagagaagttgtgatgtaatgttcgaggcccatcaacatgccaagatatagggcttctgctcgtaatcctatatatcaatcataagagagagaacatcagcctttttcaaaagaaataaaaattgcaatttcaatttcagatacatataacgattcctttaaagctggaacttgcctgcaatgacatgaatggtgagagaaaagatgcgatggatctggaattccagagtgaggatcacccttcagcagccgggagatcaatatgaagtcaactgttgagtggctctgttcaaaggtgaaaaaaacgatgaagtcatattactattattcttcaatgtcacatcaccaaagatcatactttgtttgactctataggtatgtagcatatttcattttcaaaaacaccaaaacaaatgatcatgtacatgactccactttttgttctttttcttttccaaaaaatgtacatgcactttgacacttcatatccactttcggaataaataacataaaaacccaaggatagcacagggttcagattattgatagatttgaagcagcgatgatgataaagacgaaagggatttagtgctctaactactgagtttgaataaatttgtcaacctgggatgaaatttcctggtgcattctttcacaattatggaaatcagccagtggagagctcgatgtatcaaaaagttgtccagcattaccctgaggacccaatccgacaacacttccaaagagattggaaacagaagacgtcttgtcctctggagtcgctgttttcttctgatcctgaaagccaacaaagtgattttatccacaaaacttttcttttttttttttgaaaaagagaagagatcctcttgtcttagacaggatcctccctgttaattttatccacaaaacttattaccaaccttaaacatgaaaatgaaactaatatctttagcaccaagtaggaaagtaccaaccttgagcatgaaaaaacaagacaaattttgaccagccattagacactgtgaaggaaattcagtatcagcagactgaagcagggagataacccatttttctcccacagatgataactgatggacctgaaaactctctgtactggttttgttaataatgtccatccgcacaaggaactcttgcaattttgacggacaaggactgacttggaatgagatgtctaatgatggcaatacctatattgacaaatttaaaatatcaccagctattaggtttgtattaatgtaagatgtccaccacaattagtaaagaaaattcaaaagaataacaccacaagaatactaaatacccgttataacaaattaattggaaccttctaagaagcagaccaaacgagaatcttcagaaaacacacgcataatacggaccaaaaatgattgctagcttaagatattcgccaatggtttacccaaggcataattctatttcaagtaccaatgtaaattaatgtaaaatgcaagagagattcatagtggataatacaactttaattcaaagattttaggaataaaaatatttttctgtttttcacaggtatttcaagttgcaaataaaaaatgatgatctaatttttcagatcctaatctctagtttttccttgctatttgcatccatgatttttagggatgttttttgtttaaaagatagtgttttttgtttaaaagagactagtgccctttgatgtaattaaataccctctaatattactgaagcctttgttcattcctatgtcctttttatggtatagcagcaacccatggtatactaggtggcaagacatagtgtagccacctcagaaacctcagatgcatcctccactgaaggaatagtcctatttccactagtaatggaaatttgaaaccctagttttgtcagtcaccaaccactagctaacaagaactacttacagtggtcacaatctggatgctattaatctgcagcaaaagaaatatggttttctcaccagaattgtgaaggcaccatcacatcaaaacaatcgaagttcagagcctggaaaactgagaacgtcatgttgatgcctaggttacactctcttcttcctgactaaatcgtgaagacatttttcttgaaaaagagaaagaggccacttgtcttagacaagcaaccaaatgtgggattctgccaaggaagcatactccgacagcaaaaatacctcttgaactcttggaggtaaagggtctaagtgatctcaaacaaggagaattgactatcactcaatagttaaagaaactaaactggtactggcagcaaccaaatttctttggcagtaaaatccttttgtccaaagtgcatttaaaaaacaataagataaagaaatgatttctgtattcttgtttggctttaatatgaggtcgggtaaactgaaagaaaaagtatacttagcatgaaacctactccttcaacccaagaagccatttcggaggtaaggagaagagaaagcatgctttatagagtttatatttgtagttttaagcaaatgagaatagaaagttagaatccttacattagtggaaggattctaacggtggatttgagagaatttacaatcctacaacctctcccctctttcccataatatctcttgccaaacaaaaggatataacttctccctcctcccctctcctctccatccaaccatttctccctcctaccaaacataacctaaaagtgttgtactcctgaccttcgaagaaaagaaacttacacctgaaatttcatcactcaccaagcttaattcactctgtgttcaactatccttaggggctacatgtcaggaatgcattcctcgagggtaaactagaaagatgaaatatttacagaaattccacaaggcttcgagacaaagactaaattgaatttatgcaagctccgaaagtccttgtaagaacttaaacaatctcctcggatgtggtttgataggtgcaccaaaataactttactctcagaggaaatcatacccccctcaaaattggaatagatatttcatacaaattcggatgttaattcctcaaaatttactcccagagtagcagttgtgataatatcatctacttgaagatgtacagctaatcaggccatatttcctcaattactttgagcttaagatttttgtactcttcctcggcattacttatattcctattttttaaggattatctcgtattcaaacaatgcagcagggtcatatgatgtagttaaataccctagggtattagtgaaatatttatctcgtattcaaacaattctgttcattctattctctttattcgtgtagatataagcacctgcaaattatgatgcatggaaagggtgcggtatctcatagtgcttgatgtatcttctatctcatagtatatggttatatataaggaaatatttccaggaacagcagcccgaaaccaaagaggccacaataatggtctttcccctttgataattgtgtcctgaaacaagaggaaaaaaaagaacataagatcagaagcattggattcatggtataataagataaggcagtggacagggagaaataggatactgacctctggaaacataaacacaggttgagacgtgttaccagaattatattgtacagaactttgtccagaattcgtctttgtttccaaacaagcaggaaattccacattcaaactttcctgactcccaacattcagaaatcttggatgactgaccttcatcttcaagttctgccaaagtatcacatcgcattaaaaactgcataatttaacaaaaagactggcatgcacgcaaaatttagctactaggccaaagtataaacaattggcatgcacgcaaaatgtagctactaggcaaaagtatagacaactgcactatgcgtgctgcgataaagcacactagctagattgtcttgtgagtgcaatggagtgacacaaaagcaagcgatgaatgtacatatcaaaacttccccacagggactagaaaatacaaaagcaattccaaacataaagctcagcgcccaacttcttgaattatcaagaggaatgggtctggccaaatagaagatacttgatagatactaccaacatataaagacaactgaaaataaaagaaaaaggatattgaatttcagtttactttaactgcacattctgattgatttttcaactccagaacaagttgatgtacatctcctgcatatgcacttgtgggtaaaggccgaatgacgccctcaagttttggtagactctgaacattgaaaagaataataaagtgaaaagaagtcgagccaaatcatttcagataaaccttttctttttttcctttttgttatttgttatcactattgggggaggtcgtaacggtaaagggttgagactgggagagaaagtatgcaccttgatcaccacaaacttgaggttgtcaccagaagaacggctagcacttcgtcttctaccctttgaacttcttttctttataggatttgactcaaaattatgaaaaccaacaacaacacctgataagttccaccttataccaacaatgtgtaaaatgccttctactgttggagtaaccgttagttgcacctagaaagtaaaatataagctgtaaatagacagaattgtacaataatacttgtaaaccaaaactgacaatcttatttgagctgaatttccataaatagacatacaatagctatcaaattaattcatcctagaataaacttcgaacatatcataggaaatagcttaagatagaacatggaccaatagttgcagaggaaacaactactgagaattgatcaaattaaaattaatttgtttcaaatctcaataaagcacttaccatgattgtttcacctccttctaatgaaaagtcagcctttgacaaagaaaaggaggaatccttttgacttgtttccctgaaaatagcaaacaagaattatagcttaagcttcctaataagaaaacattcaaggtaaagaactataaagcttgaaatactgaaatgcatacctgctggttgtctcaacggactcatcattgttctgaacctcctgtgctgagttattggcatctgcatcatcagaaactgtttaggtatcctgtttaatgtatttacccattttttttaatctggatccccatctaactccttacaatatttttatttaccaatttttactaatgaaagaaactaaatgaataaatcaaagtagtgaacacacaagaagaaatcaggaaaacatagggtccacttaccagattttgtctcatccgaacttgtggaaagctcacacatcagggatacactagaaacagatatcggaatttgcaaagggtttttaaactcaatatcaaccctcaccgcttctgcaaaaggatgaggatgcattacaagcagccattggatagattaaaaaatctgtacaaataactcttttgaagccatacaaaaactcaagagaaaaaaaagatttctcgataaatagcttttacaaaaaatg

SEQ ID NO: 20431 - DNA, 4407 bp, Cannabis sativa
cgccctaactaactaaaaccaaacggataagactatattgtgtccatacaatatgggttttagcatacatcataaattgttttgtaccttatatatgaaccgatccaattttcgaggacactcaaaacataaacaaatatttcccttacaaataaatattataaaataaaagtagttagcaaaaaaacacaacttgcatataacttagcgttatacgtggatctgcacacataacaatatatatatatatatatattatatacaatttactacttattatctcttcaaactcaacaatcagctgataatgaatgctataaaatgagccaaaaactctcctacgtacatcacttcatctacaacatatatgaaactattatttatacgataattttttttttttttaattttgaaaacaaaatctattagttaataaaaaacatgcaaaatcacgtattcttaatcgccactccaggaatcggccttctaaccccaaccgtcgaattcgctcgccgcctaattaaccgttatcccaaccgtctaaccgccacagtactcctaatcccggtcccacaatggcccaccatccattcctacatccaatcactccacgccacgtcatcaccatcacttaacttcctcctcctcccttttgtggagccaccctcacccgatcaattcccctcttacgtggccaatataactgcgcttgttgaccagcaaaaagtcaacataagagacgcgattgtttccgagtcaaaaatacgacgagtcgtcgggctgatcgttgatttgttctgtactttcgctgctgacgtggcaaacgacttaaatgttccttcttacctattttacccttctcccgcggctgttctcagctacgaactcgagttaccgatttcaaactcgaatctcacttctgacgagtcactcactgagttgactcttcgtgggtttgctaactcggttcctcgacgagttcttctccggtcggagatggagcggtgtaaaaatggtgggttttctgtccatgtggaccatgcttgtaaatttacccaaatgaagggtattattgtaaatacagtgcaagagttggaacctttcgctttggactcgctcatgtccaatggagccccgaagatttttcctattgggcctgttttgaatctaaacgggtcgggtcaatggaatttaaatggagccccgaaagagagagtgattagctggctcgataaccaacccaaatcttcagtggtattcttgtgttttggaagttggggtaattttaagtgggcctcaagtgaatgagattgcaattgggcttgaacgatctgggcttcgattcttatgggccttgcgtaagccgtctaagtctgaaataaatccttcaattgacttttcaaattttgaaggagtattacccaatggattcttggaacgaacggctaagattggcttggtgtgtggatgggtcccgcaaatgactattctcacacaccaagccatcggagggttcgtatctcattgtggttggaactcaattctcgaaagcttatggtgcggtgtgccacttgccacgtggccagttttcgctgagcaacatatgaatgcttttctaatggcgaaagagttgggattatcgagtgagattaggttggattatgaagacggtgtcgatttggtttcggccgaggaggttgagataggagtaaagaagttgatggagagtgataacattttgagggtaagagtaaaagatatgagagataaatgtagggtagccatggaagaaaatggatcttcttactcatttttgggtgatttggttgaggaattaacatcacataattgatgtttaatttaaatttacatgctacatactaatttatgttatataaaatcaatgcatgtcaattgttgttcattaatttatgtcttccatttggtcattttagtaaaattttcattggaaaatatgagagttttgcattctttgaagattgtttggtgtagtaactaaatgttacacaaaaatgtcaaatatgtaagtagtccatccacagtaaaacttctacatctaagaaatcacttacaattaaagttgggccttaattaaatacttgatctgacacatatttgtccataataagaaattgccactttggtgatagatcaatagtaatagtactaggtgaaaacatactttttctataatgttcattgaatattgagaaagaacagaaacatctacatttggctaagtagtttgagaatatactcaaaagccaaaatatgtcgagtcctgtttacttaaagcataaatatttaagtttaactctcggttgtaaaaaataaaaaatgaggagagatttaaaaaaaaaaattaattgtactttttaataaatattagtaaaaaatttaagatatagtatttttttaaaaaaaatgtgggagctttcttaaatatagtattaaaacaattaagcttcttggtgtcacaacaagagagtttaatcaaataaccattaatttttattttattttattataatcacaatcaaacacaaatgtatattgtttcatcaatcttttatacgagtacatacaaatatatatatagaatatataatccaatatataatagtacttatagtatatatatatatataccttattaattataattaataatctacctaattaatttaataaggtctttcaccaacataattccccacaggatcataattacaagtaatgaaaacatcaccatcgtcacaaacaactctagcacacccaatcctcctagtgctccgccacacaacctgcgtgtaatgcccacacatctgcccctcggcgcaactattcgcctcgtaattgtaatacttctcctcgtcggtccacgcgtccactgcgttgctcggcgtccaatccgacccgcttccccaaaatatattctcacctaacttaaaatccccctcgggaaacgagtgttgtaatttacaatcagattttctttgtgaggcccaccactgagcgtacttctggagctgcccgtcccaggctaagggcagctcccatttcttggcacgtgccaagttgtgctcgaataaaaactctagtgactcccttacgcagccccaacataactgcttcgaaactctgtatatcgtctcgttgttaggcattactggtgttttcgttgggtattgttgatttttgttggttatttgagtttgttgggctatgctgttgttggtgatgatgagtagtagagatgtgaagagaatgaagaacaaatggggtttggccattttgagatttgtgaattgtgacactcattttctcaatctcattagctcttttatattactttttttttctttttttgaagaatctgttatttgaattttaccaattatatatatatatgtgtaaattaaatttttggattttattccttatattataatagatgtaaaattattttatgttgatcaccaccaaccacaaccacaaataatatcagaaaatgttttattaattattaggatggttttttttttctttttttctatataagaaataatatgtagtgtgatgtgttggatgattttgattggttggtaaatgaggagaggaggttttgatggggacgtaggatttggaggattttgcatgagtacatgtgattcgtatataaaataatgttaataatatgtatgattggatttggaaagctttaaagtttctttcttctcgtgaaggaagattttgtgttgccccgtgagtttttcatgtttgtattatgggacattagaccccaccatattgatcattccagaatgtgtgtgacacgtgttacttgcatactatgagaaaaaagaatattagagttagtcccacattgctaatgtgtggaaatacatataagatgaatgagctacttcttctttgccaattaattttaaaatgaaaccacatgcatcttattctcaaaaatggaacgccttgtattctgaggggaaaggatggtttcggcataagcagagagttttgtagttgttttggatgagagaagttagaaattgactcaacttattgatagcataagtaatgtcgggtcgagtaatggttaagtagataagtttgccaacgaggctttgatatgaagtaggatcaaataagagctcgccttgatctttggtgagttttaaatttagctccataggtgtgtaggctagttttacaccagtataacctgtatcggtgagtagttgaagtgtgaatggttgttgtgatatatttatgccttctttagaacaagtattttctaagccaaggaagaattgtaaggaatcaatgtccttgagtttgatttgttgtctaaggactctttgaaggagg

SEQ ID NO: 20432 - DNA, 3822 bp, Cannabis sativa
cttctcttttcaagtgttgaaaagattgtttccctatttagtttaaggttgatttgcgagattacactatatatgtatgtgacaatagtccacatagagacacaagtgatcataattaaatagactaaaatgagaaatttccttacaacttctcaatatgaatttaattatttgacttaaaattgtaataataagtaaaaatgaatgtagaagaaaaaagttttgtagcacaccctatttctatgttgatgattacaatttagaaactcccatgaaatgccaataaattggaacttttcatggcacacccaatttctattttcaagcacatctgcatacatcacatatcactaataatataaatgaaatcatcattgatatgtagctttaccaatactagtactatttatcatattattaatatattacttgatatttttcactataaatcacatgccttattttttgtttattttatctatatatatttgttggtggagccatatatttatttacaaagtagtacaataataataatggccatgatgatgatactccctatattatgatatgctctgtatttttctctttataaaatatcatattaacacgtagcctacacggctacacatatcaacttttacatatacaaactatatatatataacaattaacaccatatattatatgtacatataaggataatctaagtgtaattgagagagaaaagtagaagaagaaagatggttttggtgacctataacaactatggtactggtgtttcagaagaagaaaactctggttttgtctcagaacttgcaactcaaagactctatcacaccaacaaccatgtatgtgtgtgcctttattaattaattgactaactttggtcatggattttctttaatattacatttacatgttcaatgtgtatataataataatgtttcatgattcttgtgtttattgttgagaattatgagattctatgattatcccacaatatttctgatggtaactatcagagtggacatagtcactgtctgcatgggtgcaaatcagacagtgtcacatgcccgcaaaaaatatgattctgatacagaatgacgagatttcaaaactaattctcaacaatgatatatagtttcttcttaagtcatataatgttgcaacaatttgaccccttatgtttatcaatatttctttaacacttctcatttttgtttgttttgttattatagaatgaaatgactaaacttcttgtgagtctacctccacttggcttacatcttcgaaaggaatcatctttgttagacttgattgaaacaaggctaaaccctcaacaagtactacttgatagtactattattaatcataataatattaataaccaagtcgagcccatactaaaaaaggcttcaaaactcaatgcttccctcatcaaaatcggctcatggcaggtcagtcaaatacatataataaaaatatatatatatatatataaatgtatatatttaattaattaatgcataatgcagagagtggctgtacatgaagaggacgtggtaacaaaatgttactttggtaagaaaaaactggtgtgggaaattctagaaagaggtttgaaaagcaagattgaaatacattgggagtgtattatgggaatgagagtctctcttcaaaaaaaccaacctgggattcttcaacttgaggtatataaatctatatatctatacattttgaattataaattaatatatattatggttaattatataatttgatcagttaagtgaggcaccgttgttcttcaaagagacagatcctcagccaaggaggcatactctttggtcttcagcttctgacttcactcatggtcaagctacaatatgcaggtacgtacgtatatattaattaactttttcaacactatattatatttttaattatttagttaaaaacaattaattaattaattaattaatacgtcaaaatttgattacacgggcagagaataaaaacaaacaacttatttagatagatacatatatccaataaaaagtggctttataaagattgagacatatatatgcccctttaattatctctctaccatgttaaatctaattaaatatattttaacaaatatatatatatatcaaaatttgattggatagtaagagataaagacaaacaaattagagtcatcactttacaaggattgtgacacataaatatatatatttgtattaattaataaatgttaatattaattgattattgtgttgatatatctcagaattcatcatatggaatttgctcctggtgcttttgatagacacttcgagaagttagtagcttttgaacctcgattccttaatttatgtcgagccccttttccttcttctaaccaatctactttcttctattcaaatttccctaataattataccaaccataataataataataatattaattatggcaccaaacaacttcatcaacaacaacacccttgtcctacttcatcatcaacaaacatgtcttattttccacaacaacattatcaagtttgcaatgaatcatctacaggtatatttatatatatatataaattaataagtgaatttaatttgtttgtttatatagttacttattataaattatttcttgttccaaatttttgggttatctttgtagaaattatggaactttctcaagctaattatgatgatgatgaagatgaggcttgttgggctcaaaaaatggaccaataataataataataataagatgaggcaaggcttatgttctactattgtgacagtaacaccaccacaaaattattacaatgaattaggagatgatgatcaacaagtctatgatgatcaattccaaagtggtgatgatcaattattgagtttcacagatcaggaatatgccattaattctaatatttttacacaacaacaacaacaggtcatgggaataagtatcaatcatccatttggttctttgacaagtatggaggaggccaggattaacattagtcttatggatcataattattgttacaattatggacaagaaaattattatcatgatatatcacaagaatatcatcacttcaagagataattacttgaaatatatgcaaattttgatccatgtaatattaaaacactcttaagaaactctagctgctgtgaatgatttttgttgttttcttcttataattaacgttcctaattataatgatcttataaaaaaaaacaacttcattatagtgggacatttttttttggtggtcaatttgtctaattactcactattataaaaattattatttctgtcggtcttcaaaatatttttttttggaccgtcactacaaaattaaatgagtgtttgaaacagtcaattaaagtagattattctcaataattttcaactgtcatgtacttttctgattggtttaaaagagttacaagccaataaaagaaatgagattttaaagggcatcttgactgtttaaaatcgtcaggatactatggccaagtgtcagccatagtatcccgacgattttaaactgttggggatttttctctcttttaataaaaccccaatgtagatctaagttaaaatcatttccttctcaaacatagccttaaacctaagtgacccacgtactttcctcccaatcgcacctcttctcttcaaaccaagaacacaaactcaaatccccttatctctttcttcgtccttttcgtgtgcctgcctctctctctctctctctctctctctctctctctctctctctctctc

SEQ ID NO: 20433 - DNA, 4495 bp, Cannabis sativa
ttaaacgggtctggtcaaatcgacaattttatttataaaaaaaatcagtttaatttttagatatgaataataaataagtcgtttgaaatatatttataatcaacaaagaagctagcttaaaactgtatgagagcgaatgcataaaataaaaaattatttatttttatttttaattataatttacatgtaattttttaaaaataaaataatttagcttcatcattacttataatatttaagtcttgacacaacacaaaaactatccataaacacaacttatcatcccttatacattgcaccttgaagaaattaggcagatgggacctacatgttgtttattccttttttgggtttaaatgtttttattttagtaacataatactaaatacacattaatacttcttgatcattaaatggccacactataatgtttactattataaaaaatagaaaactcttttctctttgtccactatttttttcttttttttttttaatgggaaatgcagctttattaaccattaaaatccactattcttttctttttttaataaaaaaaaacccacaaatttcctatgagaatgatctgaatttgtggctgatatttttgtcctactcatgtaatttaatttaatgttccttcaagctttgaaactttggtattataataattattataaaagctccaagaaaatatgataatttaagaataaataaataaataaagattgttagatttaattgttttttttgtcaaatttcattcaattttattaatacgacgattatatattaaattgtgttctaaattttaatatttatcaaattatgtctcttgaattttaacatgtaataaattgtgctcctaaaatttttatcacgttagattttatttagtaaaattagataaaaatttttaaatttaataatctcaatagtttaataaaaaattttaacgacttaaaaaattccaaaaataatttaatatatgtcaaaatttaattaaaaaaaaaaccaaaattagccataaataactaaataattattttaaaaaatatatgaattaaattataaacataaacaacatatttagaaccatacatttatagatacaaatacaacaatgaattgaaagtatgaagtatcagatcccataatgctttactacttaacactacactacactacactacactacagtctctaatggcctctgtgtatagtgctgcattcactcatgactgcccatttctcgtgaagcttattacctcacaaagaaaggaattttctttctcaccctcttaactatcagacccacaaatctctctctctctctctctctctctctctctctctttgagacagaaggaaaaaaaaaacacctggtccgtgatatctgtacccaaaaacagtatacacctgttttatatttattcttcttcttcttcttctttttctatttcattcatagaagaaagtcttttgctttcttgaccctcaaagtaatttttttttttctttttctcttgtttggttctgtaattaatcatgtttagttgataagaaagatatgggcattttccaaacacaacccatgttctataatctataatgcaactcctttttgctacccttttgtttgcttcttcttgttttggacctttctcactctcactttctctgatatgtgtatctgggtttccttataaaccattgatttgctaaaaacctctggggtttggggggtttaaagttccattttttatttttaatttttgcccttttttcttattcaagaaaagttcaaaactttctttggtgttttagattttgtgggcatttctattttagccacttaaataattttttttaatgacagaatggtaaaggtggcgtttttttttttctttttagcttaaggtttttcttttactgttctggaaacttgaagctgaggtgggaagcagtgaagagagaaaatttgtcttcttgagagttgagagttttggtgggtggcattgaagggtttttcttcttcttcttttggctctttgatcattggagttttgggtttggttctgaaattgattttgtttcctaaaacagaagcttttccagcagtagaaggcaaagccaagccaacaaaaaatggaaaaattgttatggctatgtcttctgctagttgggtttttgtcaaaatcacattttgttggtgctcaagttcaagatcaaactacattgtcagccattaacaaagagctttcagtgcctggatggggtaacaaaagctcagattactgctcttggcctggtattacatgcggttacaaccattcaatggtcataaagcttgatctttctcaccatgaactcagaggtaatgtcagtctaatttctgagctcaaaggtttgaagtggcttgacctttcttacaataatttccatggttcaattccttcaacttttgggaacttgtctgagcttgagtttcttgatttgtatcttaataaatttgaggggtctattccccctgagttgggtaacctcagaaaccttagaacattaaacctctccaataacttgcttgtaggagaaataccagatgaacttaaggggctaaagagattgaaagattttcatatctctagcaatagattgagtggttatattccattttgggtgggaaatttgaccaacctgagagtttttacagcttatgagaataacttaggtggtaaaattccagataatcttggctcaatttctgagctgcaattgctgaatctgcattctaataagcttgaaggtcctataccgaagagcattttcggtttagggaagcttcaagttttgatcctaactcagaataatttgagtggtgaaattcctgaagatattgggaactgcacaggtctttctagtataagaattggaaacaatggcttcacaggtaccattcctagaggagttggaaacattagtagccttacttactttgaagcaaatgataataatctctctggtgagattgtttctgagtttgctcattgctctaatttgaccctcttaaatttagcctcgaacggttttactggaacgattccacccgagcttggaaagcttatgaatcttcaggaattgattctctctggaaatagtctgtttggagacatacccgagtcgattctcgggtgcaaaaatctgaataagctggatctaagcaataacagaatcaatggtaccataccagtggatatctgtaacatgtctagattacagtacttgctattgggtcagaattcgattagaggagagattcctcatcaaatcggaagctgtggtaaattgcttgagttgcaaatgggcagcaactatcttactggcactatcccatctgagattggtcacattaagaatttgcagatagctctgaatttgagctttaatcatctacatggggcacttccagctgagttaggaaaacttgacaagctggtttctcttgatgtctctaataatcagctctctggtaacatcccatctgcattgaaaggtatgttgagcttgattgaagttaatttctcaaataatctgttcaatggaccagtgccagtttttgttccatttcaaaagagtccaaattcaagttttgttgggaataaaggactctgtggagagccattggattctttatgtgggaatgctgatagccttgatcaacagagccatcacaaggtctcctacaggatcatcttagctgttattggctcgggtttgactgtttttctatctgttaccatagttgttctcctatttatgatgagagaaaaacaagagagacaagccaaagctgctgcaggtattgaagaagaagtggtaaataaccgaccgacgataatagctggaaatgtttttgttgataatctaagacaggcaatcgatctcgaggctgttgttaaggcaactatgaaggattcaaacaagctcatcagtggaactttcagcactgtctacaaggcagttatgccatcagggctgattctagctgttaaaagactcaaatccatggacaggacaatcattcatcaccagcataagatgatcaaagagctcgaaagactgagcaaactctgtcatgacaacttggaaaggcccattggatttgttatttatgaagatgttgctcttctactgcatcagtacttaccgaatggcacattggcacagcttcttcatgaaaccgctaagcaacctgattatgaacccgattggcctacaagactctctatcgcgattggagtggcagaaggattggcttttctccatcacgtggctattatccatctcgacatttcgtctgtgaatgtttttctagatgccaacttcaggcctttggttggggagatcgagatatcgaagctcttagatccatcccgaggcactgcaagtattagtgcagttgcaggctcctttggctatattcctccaggtaaat

SEQ ID NO: 20434 - DNA, 3348 bp, Cannabis sativa
aagatttacttaaaagaaaataaattatatggtgatttttgcaacaaagtatactacatagaaatttttgcctgcaaatatctttttattgatttatcttaatattcttaatatgattaagtgttgcatatttttcctcaaatatctttctttaaattggttttttaattgtattaattaataatttttcctcttccgttcagcatttatctaaacatattttttgaattattcattaaataataataataaaaaaaataaacaacagcccttaatgccctggattagaaaacaaagcatgcttacaagtacactataacttcatatatgtaagcctagaattgccaaactaatacatattacatagtaactttgcattagatttaacaagttcatgttcatcaaagggttttacagctgttgctttgctctctttcgcgctaggaagcgttctttagcggcagccacagcatcttccccccttttatgatgggtagacgactttggtggctctactgcccctgtcccaggctcagcacttgaattttctggcactgttgtgtttgaaattggcttcacatcaggggacttggaacttcttttttcaagagaagcttccctgtggtgctcctgctcgtgctccaccttctttgtcgacgattctggtgacaaccaacttttatctaatgtttcaccagccactccttcgtgtttgcctggattccttaactccacctgcttctctgatttctttttctcgagagcatcatttgcgccaaaagcaacattttttccaagattgaagtaaaaatcggtcaagtcagtcttcttggtaaccttaacacagcaagatgaataaaagttacatcaatacttgttctaaatataaaacaagtcaagagatgaactaaacgaatttcatttgacaccacatcacattaacacatttacctaccaagtgttgtatttccatttaatttctattctgtttaacatgataacagaccaaaagccgatttaaggaaacacctcgaatcaacccttgtcaacaataactcatacctccctttattatccactaaatggcacccaaacttgctttctttttatgcataagtaaaaggcagggcaatggtttgtagaaagaaaatatacatgatatcctggaattttttacttacatcatctttttcctctcgtagctgacggagtcgttcttcctccatccatttttcctgctcagcaagcttcttcttataagcactagtgacaaatttatccttatctgcaaagaggtggtcctctttacttctctcttttgaaagttttctttcatatactatctcctgctctttctgtcgtagttctgctttcctaagaagattttgaatatattttggctgcaacagaaggttggtcaataagcttcactaagaaatcataactggaatcaaattcaccgtactctcatagttaccgagaagcaacctagaaaaagatgcagaagctaaatagaaaacactaaaaaataaataatttaacaagaaaatttaatcacaattggattcggtgatcatgtataggagtgcagggagagagagagagatacggtagattagtgaattgattctcagcatcatggagagaacctaggcctctcgaatagcctatggaaacttgtgaccactttactatttctgattcaataacagctatctctatttcactaaaatatttctacttaattcttgttgttctactgtgtttgtgttactgttctattggttgggttcgtagcatgatccggttcctatcaaaatcccaggcacagtaattcattagattgcatttttaacggctgctcttgtcaactgtctgtctggtaagtataaataatactcatgtgttcgaccatcggaacaaaatctaaattgtcatagtatcttcctaaaaacaccatgagagcatgctctaagacttagattgtacatgatgtagaatacctttctctcttcgcggtcttgtgtctgaaccttggttgtttttgacttcatttcatcataaactccatcataatcgaatgccataggatcctcttcaagggctttcctcttctgctcctcaatcttcataacatagaaagaacaaaaaacaacaaaaatagccattattaaaccagtgaaaaaagaaatatatatatcatctgcaaatcaaaaaaagctccaaacaaaaggtgctaagtacacactaacatccttgagagacttgtttttcgaagcatggcgagatatttctttctcaacatcattgtcatcatcatcaccaaaacctaaagcggcagggcgaggaggcctcgggggcggcttcttttgctgcggcctcaagttcaaaccgtacctgctcatatctcctgcacccccacctcacattagctaacctcctaaaatatatcactttagctaaataagacaatatacatttctaacaacggattaacagttgcattacaattatcctaaactaaagaaagcattcgttaattacagtccacttttgtttagcaaactaattgaattcataaaaacctgtaaaccaattatacatgtaatactctgaagaaaaaaaaaaattaagggcaaaacgaaactttagcaagattcatatgaataaattgtttctaccaataatacaaattgtcctattcagggtcagagctatggaaggtctacttgcccccaatgagattttttctaattgttactttcacttacagggatcaaagctcagcactgaaatttgtaatttaaagacataaagaaattaaagagaaagagtatgatacctgatagtgatgaatcggcgaagtgaatcggccggaggacctaactagatcggcggtaaagtgagaaatttaagggtttctgtgataatttgagaaggaaagaatgggtaattgatatttcagtactgaaagcacaagattaaaaatttaaaataaaaaatttagggtttgtgtgagaatttgggaaagaaagaacaggtaattagattggtgggtatcgagggagaaggagacaggagaagggaggacgcccctggctctgtaaaagagagttacttacagataataaccataccaaatatcaaaattgaaattttactataacaagaaaataaaataatatttaaataatatcaaaatgataaaaaaaaaaattacaatgcattctttaaaaggatacatctctatttatatttagtattggaaataatttttagtcaatttttttttataaattatagttatttaagacatcctgcaacattttaagaaattcgaaaaagttt

SEQ ID NO: 20435 - DNA, 3156 bp, Cannabis sativa
tccccatttaatattacaaatatataataaactaatcaaagagtctaggtgacgagtcacttgcttagtaagtaatacctgattaaataggaacatgtcatgaaaatccataccttcatcatttttatgccaacatagatagaccaagtacatcagtgcatctttttcttatcatcaatccactcctattagaatctagcacacatgcgatgtattttttattcacaattcccactggcaagcggaataaattcttacataagtagaaatggtttgaataaagatttcaagagaacttcccttcctcgaaaaagaaaagcttaaacttaagagtttgttctaaattctatctttgatagattgaaagagattattcatacttttactcacaaaacaaggaagattgagttacttgtcatgacaaagaactagagggatcccaagaatatgcgccaaaaagcacaaaatttgtaagcatactaagaaaaatagaccacaaatttatgtaaattaacaagttaatctggagaatattcatacaacaaaaatatttcttcgaaacgagaacaattggttgaagtttcaagaaaagaaaaagttatcatcagcaaacaagagatgagaaattattagaccggtcttccacaagagagcccaaaccaatctcatgcttaataagaaattatttaaatcaacttctaattactataagtacattaactttatcattagatttttatttttgagatgatgttgtgatagatgcgacaagcataattaaattgtgataaaaattacactaatactcatatttctttagcatcattctaactgtaggtacttaagtgcaacttttagcaaattattttatcacatcggcatctaacaacaaaatttatgacatgtaacttggatacttttgctgttaaaaaataaatagggttattcacaaagtatccaattccattcaattcgcacgattcaatccaattcaatctgtaaaatacaaatatccacatttgtgtggattatactagaacggaaaatttaaaatctgcacttgtacaaattgaatgttgtctaatctcaaaaaacaaccgatccaatctaatccccacttaattatatataaatatatacatttaaaaattataatatatataatattatttaatttctctatgtttagccatttatcattgtatcacttaagtataatcaaacatatatataggactattattgcctatcaagcatatattagctaaaatatgaaatgtgacagattggatgttgtttttgaccaaaatagtattaattcgatcgaataagcaacccttttaagtgcaaattttagtgttagtagaactttctttcacttttttttttcatctcttctaccaaataactttctttcctattgttctactctccaattttctcttcataaaaaactaaagtaaatatctttaacaataaacaccattacattatcatctgtaaacactaataacatcatttttttcgaatattatgtgaaagcataataaaaatccattgtttgtgtcaaaccataggatgcttagcttataaccaaaacaaggctaaacatgctttggtagggttacaatttgtgtctcataggacatacatagatcatttaatgctagtataatcttacatgatatttagtcttgagtttgacatacacaacacatcctattgccaaaagctatgttctaatctaaacactttggcaagtttaaataaataaataatcacgtaaactcctgaattcgaaaactgtaattgatatgtggcaaaggcgccaagaaaaaacatcagagcagtagtaaaatttaagcagcaacagaataagatgaaccaaaatcaactataatgtaagacaaataggctaaccaatttgtgagaaaaacatatttataatctgttttaccagttcttgtgaatctcaagcttttcataatggttatagcaagccaatctaattattaagttgatttgtcattgataaaaccttccttccgaccttcaaatcccggccgcatgagcttcttttccctcttagcgattcggcgcatcttcttatcctgtttcttctgctctatgttctgtgacctcttctgctgtctctctgatttcaatttctcagtcgtttgaatcctttccttccacttctcggcattcttctgttgcctcttcttatccttgtttaagctctgtttcaacagcttgggatcatcatgaacctttttcccagcagctctactcgttgcagcatcccaagaatgcttctttgagataatctctcctttctctggatcattcttcgcttcctccaacttctttgctctctcaagttccctcgcttttgaaaccctcctcttcttcttctcatgctcttcatcattactgagcttaacatgaccaaatgaaagcacctttgaggcttcttcaacatcttcctctactttcttcttcgaaacatcaggtttagctgccttgtctccaaactcaccttcccttttacgcttcttatactcaatgcttctcctctcattcctctcatacctcttggttattctaggctccgagccaccattgctccgagtagactcaaactcttcaattctacgacgcaaccgttgtcttagctcttcatatgtaactgacctattatcatcatccaaaccagacaaaacaggtttagtctcagctttaacttcatcatcactctcaacatcctttttctccttctccaagctttccttgagcaaatcaagggttgttgcagaagacttatcgggatctaatcgattccttcgagctttcttaatgttctccctagcttccttcttggctgaagccttttgggccttgctaagaccctgataccagggcttatccttgtcatcggtaggtagataaaacttagcaggtataagctcaaccaacttatcaaagaacagtgaatgttgatgaattaaagacttcaaatcaacaacagtggtcgattcaccaccagtcttgaccttcttcttcttcatctaaaccagttttattcaaatttaagatttttcagaaatttaacaacaattttcaacaacaagtaacacaaaataaatcacacaaatc

SEQ ID NO: 20436 - DNA, 4754 bp, Cannabis sativa
tctatatatataaaaattctattcactcatatattcttatctattttagtattcagtcaaattttttattatatcatgtaacttatatagttatttaagacattttacaaaattttaagaaatttagaaaaatttaacacccaaaaataaaatttaaacattgtgttgcacacgtgactattctattttatacatgtattgaaatagattgtttaaacactgttttctttctatatcataaattattctgaatttctcaaaaatttataaaatatcttaaataactataacatacacgaataaaaaatcggactaaagagacgtagtatcaataagtttatgcaacaaaatatctcattttcttttatataataatcagattggcagaagctcgacaacctttatggagaaaaatcccagtgtcatcaagcttaatcagtccgtaccgaatagtaatcgttcttcgaatcattattctcttcttcttcctccaatttcgagtttcgactccggttcaagacgcatttcccttgtggttgatttcagtgatgtgtgagatttggtttgccttatcttggattatcgatcaacttccaaaatggaaccctatcactcgtgaaacctatttagatagactttgtattaggtttgagcccaataataataatctctcccctattgatgtcttcatcacttcatttgatcatcttttcaaggagcatgatgatcccattgttatggcaaacacacttctttcgatcttggctacagattaccccattaataagctttgtgtttatgtatcggatgatggtgcttctaagttgtttttcgattcgattgtggagactgctgagtttgctaaaagatgggttcctttttgtaagaagcatagtgttgagccaagagctcctcagttttatttctctgagaaagttgattatttgagagataaggttcaccctagttttgtaaaggaaagaagggcaatgaaggtaagagggcaaagagtattattaattggttatgaaattttgtagtatgtatggcttaggggttcttaaattatataagtttggtaagttgtctccaaatatataaatagatagattgtaatatgcatgacttataagttcttattttaaaaaaaaataataaaaaaatgtgtatttttaaaaagaaattttatttatgggttactgaactaggtggactttgagtacagacctaatttaggcttagctcgcctatacatagagtcaggtatgttcatggataccctatttattagtaaaaaaaaattattttggaatatgagtaattttttttatagggtaaagttgtagaataagcattaagcatagtctatctataccctatttgttgctattcttaattactaaaattaaatatctcattctataaataaattccatatgaagatatggtagtatactatactttacaactatataaattttgaacaatacctcaatatataagtaaactctaaaaatttttagtaaattggtttccctatcttatttttttggtagcactatactcctgcaccattagtttagtacggtgaaggactaatgatatcaaaaaattaaagttgcgggactaatttgcaaaaaagaaattttttaaggatcaacttaccaaactatgtataatttaaggacttgccatccatagtatttatttattttttttttaaatgattgatttagtggtattaatattgcagagagaatatgaggagttcaaagttagaattaatgctttggtggccaaagctatgaataaacaagaaaatggatgggttatggaagatgattgtccatggcctgggaacaatactcacgatcatcccggaatgattcaggttttatatatgctcattcatagaattgcttcatattgttatgtggaaagatcacatgaaagagttcatcacttggtgtgtaggttatgttgggtagtggtggtggtgttgatgttgaaggtaatgaactaccgcgtcttgtgtatatctcgccggagaaacgtcccggttatcaccatcataacaaagctggtgccatgaatgctctggtcagtacctaattatattttgaggaattatttcaagcaaaaaaagaaatataattaatctgtgtttcgcaaaaattactaatcagattaatacctactcttagttcaatttttgtcaaaataaaatataataatttatcacttcaatgtgttatgactggggttttggttatattttttgtatctacatatatgctacaaattggcttcatgttagttttattaaaaaataaataacaaaaattaaaatgttagattgataacttataaaatacagagtcaaaaataatatttatcctgtaattaattatgttatactggtgctaataacttagaataattattatgaataatggtttttataataggttcgagtttctggtgtgcttacaaatgcaccatttatcttgactctggattgtggtcactacttgaacaacagcaaggccatgaaggaagctatgtgctttctaatggatcctcatttgggaaaaaagcttggatatgttcaatttcctcaaagatttgatggtattgatcatcatgatagatatgccaatagaaacacagtgttctttgatgtaagtgattttaataatttaagcatgttgtatgtgtgattgtataaaaggaaaatttgtacaatgaattttaaattttatcttttgttattttcttgagctcattatctagtttttctactttaattacagatcaacatgaaaggtcttgatgggatccaaggaccaatgtatgtcggaactggatgtgtgttcaataggcaagctttgtacggctatgatccagtagtatctgaaaaagggtcaaagataacatgtgagattgaagaagggagtgaaggttatgaagatgagttgggaaacaagtttacttttgaagagattgaagaagggttagagggttatgacaagttagataaattattgttgtggtcacaaaagaatttagagaaacaatttggacaatcacctgtttttattgcttctactcttatggaaagtggtggtcttcccaaagggacaaatagtataacactcattaaggaggctatccatgttcttagttgtggctatgaggaaaaaactgagtggggaaaagaggtgagaaccattctaatggatcgtcctttggcatttagaagaatttttaagttcatttttaaaaagtatactataaatttttgcaataatttattataggttgcattaaaattcaataatgatctatgttataaaatgtttggcagattggatggatttatggttcagtgagtgaagacattctaacagggttcaagattcattgtagaggatggaaatcagtgtattgcatgccaaagaggcctgctttcaagggatcatctcctataaatctatcagatcggttacaccaagttttccaaagggctcttggatcagttgaaatctttcttagtggtcattgtccattgtggtatggttggggaggaaaactcaaattgcttcagagaattgcttacaccaacaccattgtctacccttggacatcaattcctttacttgtctattgcaccattcctgctatttgccttctaaccggaaaattcatcatcccaacggtacgtttacaacatcgaatctcacgttgttcgggccctaagaataacaaattttgacaaaatattttaaagaattcgtttttaaggcttttaagttaggtgagcccttgacacaagcctgatcagtgttactgcaaacctgatcacgctaaatatatacatataagtaagataatggtatatattacaaacaaatttaacacgcaaaatttttgaacatgtgagactgatcttaaataaagatgattttgttgaattagaagttcaaatcataaataacaaaaccattttgtttgatgcagcttagtagtattgcaagcatatggctcttggctcttttgctctccaccattgccactagcattctcgagctccgatggagtggtgttagcatcgatgactggtggcgcaacgagcaattttgggtcattagtggtgtctctgcacatctttttgcagtcttccgaggccttctcaaagtcatggctggaattaacaccaattttacaatgacaacaaaagcaacaaacaatgctgaatttggggagctctacctcttcaaatggactactctactaatcccaccaacaacccttataataataaacatggtgggaattgtagctggagtttctgatgctgttaacaatggctatgcttcatggggtcctatgttatgtaaactattttttgccttttgggtcattctccatctctaccccttccttaaaggtttaatgggaagacaaaacaggactcctactattgttgtgctttggtcaattcttttggcttcaatcttctcaatgatttgggttcgaattgatccttttttgcctaaacaaactggaccagtactcaaacaatgtggggtggaatgctagacttttctcttcaatgaataatttgtgtagtgttttacaatatagtaccatatgggacattgtgaaccaaataggtggaagtgaaagtgtatgcaattatgattttcttgagttttaagaatcaataggaatctactttcatcaaattgctt

SEQ ID NO: 20437 - DNA, 5007 bp, Cannabis sativa
gttcattcatgttcatttgtagctttaggaaattgaatttgtggttttgtttgtttataatgattcttccaatctagttttcttttgattttcaacatattaacattattcatattttgattttctgtttgaaagtcttgctcttttttgtaggaaagtcttgtttgagttgtagtgtggtgcattgtttgatatggcaatacattggttaaaaagggtttggaaagataaaggaaaaagatgaattttctgttgaatatttttttttagtgtatgataatttataagattatttatgttatgagtaataaaaaaaagttataaagaagaaacaattagtgagctattgtgtttgttattgttttctcatactagctagggataaagctgaaactaagtgagtgtgcaaggttatttctttgaaaaagagaaagaggccattgtcttagactagcctccccccgatatagatttatatgctcacttgtagcggaggaaaatcttggtaaacaattagaatgagaataacatgaaaattagacagagagaaatacatcaaacaaaccagcctaacttttaaaacctaatacatccaagatttccactccttgttcggatcgaaaaacgtcaaatgctcaaaatgcttggttttgtagacccaagtggcagttcagaatttaatcttctcccatacctcttctaatgagcattcagtcccttcaaaaactctgttgtttctttccaacacctcaaactcgtatagcagaaacagccaaattctacatgagaaactacagaccaacactacaaggttattgttttttcatactagctagggaactgaaatttgcatcttttttgcaagattagataaggcaagattttaagcgcgttgcggttgtgtattactagtagttattttctttatttactttcgttattttattttgtgggtggatttaatttttcttgttttgtgattgttctgaaaagctgaacagttttttcttttattaaggcaatgctcgctttctgtaagaattgtttacttttctattgcaattttatgaagagtaaaaggtaatggtttttcctctgttttagtcattttgttttttatttttacgatggtccttatggcaatagctcaaaatgaaataaagaagagattctatatattattctgtatgtattatcttgattttatcattttttgggctattcccatatggaccatagtgaaaataaaaaacaaaatgactaaaacagaaaaagaaatgtaatacttcttaataaaattgatatagcaaattaaacaaaatcacgttaacacttcttatagacctgtaattgcaataaatgtaagcatttctcacaccttatgttttgattttcatttctgacttatagaagtaaatattattcataagtttgaataaataaaccaatggagaaattgtgctcctacataactctaagtatggcatttaagtacatatattttttgtttactagaagaaatttttctatatatatatcaagtcatccaacaaataggatatacaataagaactatttaaactaggaagaagaagaagaatacatacctaggttagaaaacttggtgatcttcaaggctcatccctagttagacaataaccagagagaaccttgaaaaaggatatttggtttaacacttcagatttaattctttcattttgctgctttaaaattttcaaggtccgctctttaattccttttcctctttgttttttcccttagtttttataatacttttccgataaactcatatttttgtatttggaaagtagtatttggtgtagtgagagtgacagagctgtcctgtaggtatttgggagaaaagtaaagaatgaacgcacctgatcgatacgaacgtttcgtcgtccctgaaggaaccaaaaagttggttttttgctatctagatttattatttgaaaattataataggtatagggttttgttgtaacttgtaagttttgacatgatgatgatgcagggtttcctatgagagggacactaagatcatcaatgctgcctccttcaccattgagagagaggaccacaccgttggcaacatcctccgcatgtattaatcatcttttttatctatctctctctctctctccatatcttttcttagtacaacattcattatgttttttttttctataatcgaatcaggcagttgcacagggacgaaagtgtgctttttgctggttacaagcttccccaccctcttcagtacaagataattgttagggttagtcattgttatattcactctttcttcctctactccctgttaaagcttatggtatatttaatttggttttaatttatctactctacaaattttcttagtagtttcctgaataaattgaagctaaaacttagagctcaaaatgttccacttagccttgggttaaatagttgatatttactatatatacatacaatttgtaaggtggtaatgtaagtcttgtaatgtgataagaccatgctgccaaattcttaaaccagtagcaaagtagccgaaatatcaatgaaacagtagtagaacaatggattagactgtgggagttgatattgaatatatgagaaaaccaattactagtactacaaactatgggagcccttaggcccctttgatgcaaaaagttttactcgatacattgcataacccccaattctccttagtatcctatatgtatatactattactaacttgggttctaacataatatgtgatcttgtcatttttatgtgaagattcatacaaccagccagtcttcacctatgcaagcatataaccaagctatcaatgatctcgataaggaacttgaccatctcaggagcacttttgaggtatgcaatcttggtccatacatcttttgttacttgcaagtttctcttctaattggttagctgcctcggtcgagcctcacactgtcaagtttatcaatagttggtttataggtgatgaaaatgtgaattcatgatatgcataaaattttcccatgcaggcagaggttgctaataaggaacaaagagagtattaacatgcatcctattcctacctgaagttttttcgtatcgaatttagatgtgttcatctttttgagaccttttgcttctactatggtattaaattccatgtatgtaattagttgactttattatgacctttctactagggtatcaatgtttgtttgtaattctccacaagagtagttaaagactattaaaagtgtaagccatgacagtttgtggaatgacatttgccaaactaacaatgtgaaatactaaactttacaaaataacctcacttaatttactttatagtatggtcgcacagtgtaaatctatagtggtttatggtcgtgtagtataattcatggtcatctctgcgactatacaaggttaaaaaaaatcagattatttttacaaaacactcgtttgtagagtaattttgtaatactgtctatggatgtacttagcattggtgacccttcttctttcccttgcaagttttgctgatacttgaatttctgaagtcaaagttatcttttttcaacacatcaaaacacgatgaagatatgtaaataatacaatttttttatgcatgactatgaacctctataagatctttcatctatttcacttttatgaagaaaaagaagtcgaaaaaaaggaaaaaatagaagatttttgtgtatctttggcctgccattgagaatagtgtgggttgactcatttagctgacttggttgagtttgagcttgggtgcatgagccagccagatagccctatgtgctagcttgcttggcttattggcatttcgactcgtgagctagtttgacaacttggaccgaaggagccttattaggcttttggtaagaccccttaatggatttttactactacaatcttcaagcattgttattgagcattagtggtgctcaacaccttctatgagtggtgtcccacgattgattagttatattttttaaaaactatattcttaagttatataagatttgatatttaattacactaatagcggtataattccgaggagaatactagacactagtggtgctttttaaccattctcacaatctccttgaaagttctttttagtgcctagagataaagagaagaaagtttttttctagataaatgtgtaaaggcttgtttaagttaagtgatctccactattttatagtgaggttcttcttctcttttgtttatctttatttacattacttgtttggttactttgtattgtaacaaattcttactcttctccatttttattaattatgcacacgacctaaaggcgactcagtctattcatcatcatcaccaccaaatgtagaagctttataatacatgggtcccaataggccaagtcaaacctgtagacattcaactttctctcaccttgtaacttgtataaactttcatttatttagttcaacttttcaaaaatagtagtttgattcaccattatttgttttggtattaaaaaaaaaattattctaatttttttcatggttgtaaatattatagttatttaatatattctgtgaaaaatttaaaaaatttagaaaaaagttaacactttgaaaacatgattcaaacagtttattgcacgagtgactcttttattttacaagtgtgaaatagacagtttaaacattgctttttatattgtaaattatttcgaattttttaaaattttacaagatgcctgaaataatttcttaaaattattttagtttctatgtgaattttggttacaatttaagttacttctaggtggtttttactgttttttttttttttttttgaaggagaatggtaaattttattagaatgaactttcaaccattacaatagataaaagatcagtaggagcattactctcactgaaaatacgatctgaatacaaacaagagctac

SEQ ID NO: 20438 - DNA, 4013 bp, Cannabis sativa
tttttcaaataatttttttttgcacattttttgtaattattttgtttttgttgtacatttatgaaaaaagccctttaaaatatatatctagattttaaaagacattgcctctgtcactaagagatctctgcctctgcaacataagtctcttcaggatcatccactcaacgtttatggagcacttttgaggaccacctcaaaaactttgtttttacaacaagattgattattacactacaacaccagaataatgaaaacgaccataagattccaatttttataaagaaaggccaaatgaaatcaggcgagaggcatctaggtttgaaacaagggaggtaaaagcacatggaatgagcgagagacggtatatgtattatgttagtcccaagtcttatgaaatctaaagatgaaatacgacacacattgtatacttgattcactggaaattttaaaaactaactccaaaatctgaaggacaaaatgaacatggtacaatccatattttcagatttcaccttcacaaaacatggggacaatgtataagcgaaaaacataaataatcaatactctcctatctcttcaattgtttgatatcgcctttaccagacaccactgtgaaaaacacaaaaatcactagtttccccatttgcttgatactctgtctttagcagagacacgatcgtaggcttcatttgatttgatatcagaatcattgaaactacttggtgatgtcctccccgaaattctagatgttacggaagtaagcccatttcttgtccctcttagaacatacaacaaaggattgaatacgacggcaagcattacttctccttttgcaactataagatactataaatggaaaataatgagttttactctactcattaaaaatcaagagatacttaaaattaggagctaaacaagtaatttcttaccatgatgagaatacctaacacggcaagacttgcttgttgtgcttcttgccagaaattgtcatcattggaccatccaaaccgtccaccccatccaaaccaacctccgccaccagcatcaccacctccaccagcctcttctctctgctttatttctttgttccatttctcaaattcatttttctttccaccaagtgcaccttctaatgctttcttagcttcatcctgcagccacagtaccacgccacagaactaaattcattcagggaaagaaacgcgttgaaatgattcattcaaactaaaaaatattcttccctgaggatggcttcatgcaaaactgcaaaagaaccttagccttagaatcataattaatttactagccaatttgtactacatgataaagaaaacaaaacaattgactatcaaaggaagtcacttttatgttgcctaagtgtatggctttacaagcctgatcttaattctaatacccttagcatctcaaaaagcagttgtaatatgccaggaatagtgccattgaaccaaactttcaggacaaagtgtgcaattgcagtgtctgagatacaatatcaatcaagtgtttagattccaaaagatacgaggacttctgattaatgtaaacctccattgacttctgtcaagtatttctcatgtatgtatatcacgccggtacaccagactggataaagttttagctctttgcatatcatgccactacaccaaacaggactaaaccaaatgaaatgaacataagtctaaaccaaaagattgttcacaattgcctactttttcaatctcgaccccgaaaattccatgtcatctctagacgttatcgaaaccctcgtacccaaaaacaataggatagattgtattggggataactacatttgcaagaaaacaaatgccaaaatctagttaaaggaacacgttttagcaaactatatagaaatccacccttaaaccattttgtaagtttagaagggactaaatcaaaaataaattagactgcaacaaccactttcaacaattttcactcattatcccctctcaatctcaaactgctatgaaacttggtttctttcatcaagtcaatgcagaaattgaaaacaatccataacgttcagtaccacaatcattaattgtctagctttttaacagaaaaaatcatataaactacaaaacccgtaaaattataaagagggaacgaaaattatagtacctctcgacgattgtcagagaaaaggcaagaaaacctgccatggcacttaaggtttcgctgaagaatggtccagccatgggcgacattccgaggagggcaagtggtgtgggtgagtaggtaacgatttaagtgggaggaagagtaagagagtgttggggttagagttggcgggcttaggtacagaaccggcgccattctcttcgcaactcctcctttgttacgactcggataggggaggtataataatccaaaacacgttatttacacttttggcatttctccgtatatatattctctcgtataccccatttaatatgaaaactagcctatactttgattaaataaaaattttacccccaaactatgcccctagcagggttttacaatttttcaatatattacattttatttattttgtgagataatttattaatatggtcaccagctatacaaaaacttattgaactaacttaaactagcttaaatatagtataatgttcgaaaacattcatacaataactctaaaattatagatatcgactccaattcaataggataattttacatcaagaaacaattttcacaattctataggagttttttaccgttacaattacaattctagtgttgggtttggtttttaaaacattttgaactcgtttagtatgtcgtattgtattgtattgtattgtattatcttggattgtgttgtattatatgtattgttttagtattatttaatgcaatactatgtttggtattaactttttttaataggttgtgtaaagttataatatattttcaatacactcaaccccaacaccaactacgggtccaagtccggagtctaggtctagggtctaggtttaggtgtctgggttggtcttgggtccaagtccgggccccaggtccggtcccggtatggggtctaagtctcgggtccgagtctgggtctggagtccgagtttgagtcctcgtccaagtctcgggtccgagtccgggtctgggtttgggttcggttctgggttcgggtacgggtcccagtccggatttgggtctcaggtcctggtctgggtctcgagtttgggttcagatttgggtctggataccgagtccaggttcgggtcagtgattggtgttgaccctgaatcctttgtaaatattataatacaagctaatacggaccatttgttatgtattaaataatacaacattattgtattaaaaattctggttgtaataattaatacaatccattgttttatccaaacatagtgttatttattatttaatataatacgacccttatacggcgtacgaaatgaaccctttaatattacaatacgaggagtgctactagcagctttctagtataatttttaagtcaatttttgtgcctgatatcgaaatattttttatatggcggtgtttattatacttacaacatcatccttgtaaatttttaaatattttcgaatagttcacagtgccaaaaatacgtttgaagttttttaaacggtcgtgttaaactagaatatcaggaactttgttttgacataataaattattcaaaattttttaaaaatttacagggatgattttaagtgtaaaaattaactgaaaacttataataagaggttataattagcacttatcttacaatataatcacttacatcattatgtcatttgcataaataaggattacatctttattggaaattttatttacacctcaaaaaattttaaagacacccttaataatttttattttatataaaatttatatctttaattatactaaatttttttaacttttttcttccaactcatattcttaaaaaa

SEQ ID NO: 20439 - DNA, 2496 bp, Cannabis sativa
  modified_base (692)..(695): a, c, t, g, unknown or other
tttttcttcttggctttaggtgccttttagtctttcagcttgcgcttgccactgctgttcttatagtctcatttccttttccttatccaaataagaaggaaagttggactttacttcaagttgtttgactaaccttccttggaattatccttcttaaggttttcaaacatagtcaactcattcaactatatcttgttcatcgcccaacatgtggtgaacactttgaaacaatgagtgagcgactcagaataatgttcgctggagtcctcttgtctaccatagacactactcattaaggaaaaattgtgtggttctcacaaaccaacatcacattcaaattagatttccatttatgtaaatattcaccattcaattttataagtgctagtaaaaattaaaggaatttggcatagtagatatttttaaaataaataaagttacataatgattatgcatgaataataaatatcattttgaaattactgtaaatgtgatgcatgagcgcatacaagtaaaacacataaacttatgtttgagttataccacgataaaactctttggcgattgagcgctgcagggtcggtatcgagtcaattttattgagcctatgagacaattttcatctttattattttgaaacctaaatatctcatatttccttttcaaaatataaagtactgctttttgaccannnnaacaactaaccactatgaagcttagttgcactttgtgagtgtaacccattatttcagatttcatgacttaaattagtgtcaccttaagggtcgatgtcacacaaaaatacatcacttcctcttatattagtcaagagatcaacctcgagcaatagtatagacacatacctttcttacggaatgaaaataaagtcgtcttgaggccagtctatactccctcggtgttgatcaataatgtgttagttttatggtactaaatcaggtatccagcagagtttctaattatctgattatcacgtaccataacccctaagatctccatatgtgtaaaatgattgaaaaattatcgtgaagtgataagggtaaaattgataaaatgataaaaaaaaaaaaataaacataataaattttaaaaaatatgataaatattaaaaacataagttaaaagagatatataatttaatttccttgaaataaccttgggtataataagcgagcctggccttaggcctcaagttaaaattatatagatgcacaacaaaatctaccactaaagtattttagcctgtcaaaatttaatttttacattagttaattagtaaataaatggaattggatacaaagtttaacaccattaatatcttttcattattacttccatatattttaattaatataagcactatatcaatcataactatagatatagcttcatgcatcctttttatattattaatgtaaaaatattcataaaccgttttcttttatttttcttacaaatcattgaaatactcacagttgcgatttacaagatttaatttctctactgcaactacatatttttctcccctgctgcactcatgaaccaaatttcatagaaagcttaatagagagaatattagagcaaataataataaaatacatttacataaatgagagagggagctagcttacgtttgggtaggtatagtcttcttgtatattgaaaatgtagactctccgtactcattgttggtaaaagatattggttatgtgaaaacaccaaatgtacgtaataattcaattgaaaaagttgggatttaattcataaataaaataaaattatattaacaagtcttgtccaaaataaagaatcataaaatacatttagtaaaacattactattaatacttttcctattaaataacatccgattttttttatcaagttgtatgcagaaaagtcacacacagttttaccaaattatacaactcgttaagttattatgtattaacttgtacgtggtggttgcatttttttttttccaattataaagccatacatttcatatttcattttttagtttgtcgtgtttagaatatttacatggctataaatatatataatccatcaactagtttctattttattaccctaacaacttcacctttatgattagtctagtttttcctcaagtagttgaggtttcaacgtttaagttgtccttttacaactttatgcattccgtggctccatgaactttcttttttgtccttaatattttccttattctctttttcttttcctatatatatgtataaatctatctatacatatatattctcaccaaacttctcccaagtggatcatttaacaaagaaaaaaaaaaataaacaaaagtacttggaacctctcatctttcacgtgctaccttttaaaacatgacctatttggcaaatggtttaagtagattttgcaactagtacatacattatcgtgattcatgatatctatatatctataaatagatatatatatatat

SEQ ID NO: 20440 - DNA, 3698 bp, Cannabis sativa
  modified_base (3254)..(3258): a, c, t, g, unknown or other
aaaattcggttacggtctggtcggtttcggtttttatgaacacccctagcctaaacttacctaggaaatttaagaatctaaataacatagtataagcaaatgctctttctaaaattactactcgtgaaaatccaattattgcaaatattgtagtgttagacaaagagcctaaataaaaaataaataaataagcaaattgttgcaagagatggcatcctagaagctagaactaaggtacatatagtaaattatgacagaacttcaccaaagtttcagtggcctaaatttaccaaggacatttaagaataaaaataacatagtaacattttcaaaaccacaaacacatatgctacaaaaaggagttcttgaagagtcaagaataaagtttatccaccaaacacaaattcattattgaaagttaattagtataagtttgaagacatgctacaaagaagagttcttaaagtgaagaataaagtttatccaccaaacacagattattgaaagtaaattagtgtaagtttggaaaagtgacacctgaagcttatgtttcaaggcttcatttgtatcattttattcatcatgttgtaagaaactaaaatggtgaaaatacatcttttcttttcataataaatataccatttgggcagggtgactagaagatagaagctcttggagaacagagactagtttttcttctaaaccatcagaaatcaggtttaatgcctccttccatatatcggcatcttttcgagagccgtttcctagagatactgcataaaaatatgagtttaaaaagtagtgtttaagttaagctgtagagggtctagcactagttgaagacacccaaaagaaaaaataagtctctaaagataacagctgagaacttaataattaaatcactcatcatttataacaaacttacaagcgtgcatgagaatcctcctggtacacttcagcaggcattgtcgttcaatgtagtattgtagcaatgcctaacaccaaataaacaaaaaaaaaaaaaaaacaaaacaaaacataaaaagtaatgcaatttcatgagaggaaaaatccattccattcacagagaaaattttccttagaagagaagagtcgaagccccattccgctagacaggatttgaaaatgaatttgataaaatagaaaggaaaaaaaaaaaaaaaacaactaaccacgtgaggaaactcttgaactatagagtcgagaactacattgtacttctcgaaagatctttcgacgaggatataagactgaacctcatctagacactgtaacaggaaaaaactaattaatcagattgtacataaaaagaaaaatgatcataataataactcatttacattattaaaaacttatattttagaagagtcaaacacaaacccagaaacacacttattttagagtaaaatgcgggaggaagaagttgaaggaaggaaagggatgagggataattggaaggatttaggcagggtggttgtgtccaaggatttagtagggaaagatgtgattaaaactgcaatgtagaacttaccaacaagggactaatttgcaaagctttatctttcaattcaggctgaattttcagctggtgtgacccaatttttagttgctgagaattcaaagcctccctggacttctcatttggaggtttgaagcaagaaacggtgtcgacaaaccaatagtgattgtccttcaacttcttcacctaaaaaagaaaaagaacgaaaaaagagagcagcaaccaagttgaccacagttagaacttacaagagaatgaaaatgagaaagataacgaaatgagagagttaccagagaaggtggaagatcagaggagggagaggcttgttcaatttcagtgaggagtagagagaaaggatcccaccaaagagaggggtcgacagacttagggttcgccatggatgggtcttgaaaagcttcgaaaaggtaaagccctctctagtctctgctcacttcaacaagggtttttatttctatgggtttcgcgcttccgcgcctcttgtacgaagttttgtcaaggaaaacggtaacaaagagagggttttatcaaaccgcacaaacagtccgcaccgcatcacactgcataaaaaatactgttgattttgcttttagccaacgtcagtgggtcaattattaagcaattagaaatgtaataaaaatagaacaaaaaccaataaacgataaaaaaaacactagattttgaagaggttcggtccctttaatacggtaatagtctactcccctttgattgtattaatttgagaacaacgaacacagtgttttctctctcaaatctcttacaatgaaatctttgagtaattctcttagatctctctctaaaacgattctttcgatccctttttcagtgaagctagatcactatttataggggcttcatgttgagtgaaggtttcccttttgcttacaatatctataatagaaaagaacattcattacataaatagaatacacaaaataggggattgagacagcctggcgtatccctctaactcaatcccatgattgtggggattgtcttcgtgcttaaactacacgatatcattctgaagtagtcaagtcctgatgaatagtttggaaagcctaacttgctctatgttcgggtagtctgccctttaccctactcgggtaagtagacgttatgcgtgcagatgcgctacatgaagtctgttcaggatattcatctctgccgagatgcaaggaatgctggacacgtgtcacctgcatgtgctgtcatgtcatagtgcaaaaaatgggataacatttgcctcccaagtctgcgcgggacctttgaggtcgcacgtggactttactcgccctgaatccttatttgaacatgtggcacgtgtttgaagcgtctgttggcgatccgattgaccaagggtctcttgctcttaatgctgattgacatatacatcgaaccacgcttaaaaattagcatatgttttaacagttaccattcaggtaattgagtgttccacgtacatttttgggaggaattcgaggcattcaaattttaaaatgataattttacctcactaattagcttataaatagggcagttaacgcagatttttgttaactaaatttgagcttcacaataacgatttcacacagaaaaaataaaagctataaaaatgaaagtatgaacacaaggttttttacgtggttttgtagttaaaattctgcatagtccnnnnntcaatcttattcaaatttctgattgttttctcaggacctcttttgtatgagtttttctcctcccttttttgatcttacttgccactatttatagtcatatagtgagtcgttaattacaaagttgactgtaatctttttacaacaatcatcccctagaatcatgggatttgattacatatcacgctaagtaaatgcagtttttatttaatattcacacagctgtgaatatcccgcttttattggaccaaaatgaacgcgtattaaagatatacggtaaccttatctcattgggatgcctcgttgggaatggagctaagttaactctgatggcgagccggagctcgtcatatatcttctcgaggttcatattgcttttattttaattctgacaactacagtttctggtgtcgagatgatctttctcgcatgcatgccctctt

SEQ ID NO: 20441 - DNA, 2562 bp, Cannabis sativa
  modified_base (895)..(895): a, c, t, g, unknown or other
gagagagagagagagagaatacaactaacagtagtagcaaatgactcttttactaaagatagttgccaaaatgagttggtaaatactattttagatcttgtgtttttcaaaaattatctagtgaatcttatatttttcaaaatgcaacaaaatcatatcttgacctcacttttaacattttcttaagtatgatcatcataacagtttcaggtaagattattattaagttttaatttgacagaaattaagttcaaagtactattttgtaaaggtattcgcggtgcaggtagtacagatttaagttttatgaacactcttactattttgtactattttaatgaaaacttaatttgaactgtcatttaataaaatattttaataattaatttttataaaacacaaggtttaaaatgacatttactcaaatatcttaaaatattaatactttttagcgcccatgtctctctataaattatctagaaataaactcaaattatggagaagaattaattaggtgataaaaaaagagtattgttattaagtaccagtagtactgtgtagtatctctaaatatgttatcttgtgattgactaataatattttttaaaagttattatattaaactatatgagatccaatacttaattgaactgatagcgatattgacacataggagagtactagacaccactaataccttttaatatttctttaaaaaaaattagctttggggactaggtgttgtaactctaatggacagacactccttaaattatattttgttgactacatgcgttaaactatttctcttctgttgcaattaaaatcaaacttaaacagacaaaaataaaataaaactcaaacaccatgttctttcttctttttttttttaaanaaaaaaaaaaaaagttgatgatgactccaataaatatatgaatattttattgtgacagggtgtatgtacgttaaactccatggattttcctgattaaatattagataattagcatataaatctattaaatttaaaatattttggtaacacgtgttataatgttaggggttagtgtggctgtgccaagtttgagattaatttggtcactaaaagctgcatgcgcttttcagtgaactacacgtggcacttatttctacattatgagggcaagacctttttttttttttttttttaatgattacagaggtacgagccattattagagcagatactgttcaagtaaggtggtattttgagcgctagactaaaaaaaatcaataagctacaataaaatttcttttttttttttttgaaagcaagctacaataagatttcttcttatataatattgtaaaaaattaatttttttgtttgaatgtacattcttataatttctttaatcaatagcccaaaaaatatcttcttgtaaaaaacataaaaaatatcttaaaacactaaataataatggcaccattaatcctttttaatattaattaaaattaaatctatagctatatcaagtcttttttttttgtcttcagtcggcttttcttgagtttaggtgcagctttaattcgatttttattacagtctctgtaatatgattttgaatgttttagtcttgtctctatgatgtacttttgagtcttttcattttatttccgtgacataattttcagtgttttagtctctatgtgtgacatgattttattttattttgtttcattgttggtttttctttattcttcgatgactcaccatcaactcgttattaatggttgggaataacaagttctttgcgactgaacgagttgttagtagtgcagttatgtactttacatagctatgaggttgaatgaacctgctgcaacagtttttattgctgtgtcttctgaccgttggatgaatcaaagtataagtattcttaaaattaattgtgatgctgcaaacttttttgatttattttagtttttttgtcaaataatctgagaattaaacatctgattatttgtctcgtttttctaattctaatcctaattctatctccaacggaaagataagtcaattagattggagactattattttaattgattatcattaacaaattccaatattattaattgaaaagaaaaatagcaatggtattattaacatctaaagttgagagaattttagggcacgtttggtatgtcgtataagagtcgtgttgtattaaataataaataacactattgtggtgaatcctcaccctcaaaacaggttgttacaacaataacaatgtctaagaaacacaattcaaaactaaaaccaatcataaaatcaaaacatgaacttaattgaaataagacaaaaaaaacttaactcaataatgaattaatggtggatctttattgaataggaatagccactagtacacaatagaatgagtccaagattacaactcaatacaataaagtattacaaagaaatacctcacattaagaaaaatcacttcaagagtgataatcccttttacatccctccacacatactcactatgatcttgtactctctctctctctctct

SEQ ID NO: 20442 - DNA, 3360 bp, Cannabis sativa
ttttgtcagcgaggaaaggcataactcgtcataatagttttgtcagcgaaaaaactcgccagcaaagcctaccgtcaataactagttgggagaagagtttttgtcagcaaattaagtactttcgctggtaatagaattttcacctgtgagtttcattgtcggtgtaggtgccaccgccgccatttcttggtcgactgaggagttttccaacgtgttttaccagtgaagtaagtcgtcaacaaaacttttgttctcttttttagtttttcgcaaaagttttgtcggggcattttacttcgccaacaaaagtatttttactttttaaaaaattatttttcatgttttaccgacgtaattaacttcatcgaaaaaaacctttttttgggaagttttaaatgaaatataatatacataattgaattaaactaaaacaatttttttttaatataatataatccaaactatattataaaactaaaattcatgtataattacaaaactaaataaagtttccaaaactaaataaagtgttgttagtttataaaaattagtaagatttatactaaaaattataaactaaaaataaaagtacaagtcaacaacatggtcatcgtcaacctgagtgggaggggcagcctgtgaagaagacccagtgccagggggctaaaatggtggaatcggagccatcgggggcatgttgaagctaggaacgatgttaaacagatacctgaactgctcatgaaacgtgctcatgtaatgattctaagtctgtatcatttgtttttgtcggtcgtttcatgtttcctgctcttccaccctttgcttcagcgcctcatattcctctagggtgatagtaggttacccagagggacctgccctcatagttgttctcttggcccccgtcctaagtctcgataattggctcattcctttcaagtggtgtgaccgctcacccaacataataggcatgtctgtcgaaaactagatgaggtctacatcgtactgtcgggagacatcggtcggcacttgttgaatttcacgaatctcaactattttggcatgcaaataatattaataaactattaaagttgaaaataaatgaaataaaaaactagtttcttaaagatataaagttacttacatgtagttgttttgtgtgttcatcgcgcgatttgttgttcttgtagtgaaattttttaaaactgtccatagtgaaatttttatacataaaaaaattagtaatgtattattcaaaaattattaatttttaggtaataatatttataacatcataccccgctgacgatgtggccgactatggtcttagacccccatccaccttaaattttcatttgactttagttttttgcattctgtgcggcacttgcctgtaatttaaagtaagtttattgtcaacaaaatgcgccacaaagtataatttaatggaagtttaattttacaattttcattttctacctgttgtttttggtctttctagtatgcaatgacgtttgccttcacctccggtgtgacccctctagacgtgatctcctagttgaatcttcctctccatatttctcagtattaagcttccatgcctttttcatgtctgctctccagtcgtgtagcccttttgacattaataagtgatcgtagtccacgaacttaggattgttaagtgagaacacaaatttggtctaaaaaaataaacattaaaaatcatatatatttttttgtagagtagttttgtttgatttgttacaataaaaactaaatgttacagcatatcctagatagactgaacgtcctttctgtcaacgtcctcaaactcaaatttttttcataggaatggtgttgagaacaaagaacttgaccatgttgttaaacttgctcccatagtcgtctatgggggacccaatccttgtatgccatctaaattttaactattgccccgcaggcagcttgactagtgcttcttccacattttccccttatacttttctctacctccatttttcttactcttgcttgtacttgtgtcagtcattctatacatagaagatatatttattaatataaaaaaaaagtaattaatgaacctattaataaaaagtacatgtgttttatttaattaatggtggatttaaattttaaaatactttaaagtctacaagtcatcataagcatcatcatcatcataatcaataacggttacatcattttcattatcattatcgctagtgtctttatcattactataaataataaaattatctaaatcttgacggtcaggctgtgaacggtccttataggtcaattcagtcaggttgacatcatcacagacatatttgacatcatccagttatggaagttgtacgactaactagattttggaagagtttctttcttgtatagtcatggtttcttcatcatcctcatctggaaaatcccaaacattgcagggttgtaagctttgacaagcttccaatcaactctattcttcacgtcgagaatgtaatacatcaaattttcttgggatgcaagtataaatggttcattttggtaccattggcagtcgacacatacactagtgaaaaatcattactttgtatcatgctactgtttgtgtcctaccacttgcactttaaaatgataacactacaatgttgattttatggtactaaatctggtacgcaacagaagatttcatatatcttattatcattgtatcatagcccaatggatctccagatgtatatacattaaataaaataataatttactagaaaagaatatatacctcttgatgactattaggatatcctcaaaacttctcgtatgttgtatcctttttgttgattaaaaactcacacgtagtctttcaaatcgatccacaacacacaaggaatagtgtgggctattaggataaagtgtataatttgttcttgttaacatctcaacacatgagcaagaacagtttgagagagaaaaataattttcctttttctcctctgtcaatttcaaaattgtattatgaaaagattcttttaatttctcaaatcagacttctattaatagtagttaaattcctattaattaaatcatatttaattatttaaataaatttctataactgaattcggttactgatatttcacatgaaggaatatctcaaccaacttattaaatatctttaaccacttttgaaaatcaaacatttatctgattgaatcaattaattaattaattaatccaaaaagataaaacctataaggacaccctactatatggcagatacctaccttgtctgaattaaaataaaaatggtgtcttttgttgtgacaacttttgtcttgaaaa

SEQ ID NO: 20443 - DNA, 2048 bp, Cannabis sativa
acacattttcagttactatatatatgaaataaaaaattaaataaaaaaattaaataaaaaaaaaggatatagtgacacattttgcaactctaagaagtatatttcctgacacctacattagtgacacgcattgaagtgtcactaaaacactttagacactcaaaacgtgtcacggaaaggtatttttgtagtagtgatataattcaatgtaacaatttaagaaagataagaataacttatttataaattacatgtccatccatagctagcaacttctagtttcgtcaagctatgtataataaattagacagtccttttcacatgcatgcaggtttgcattgataccttgtttacctatttttttataatgaagaaactctcatttcctctaagcttaaatgaagggatgatcttttagataaacacattgttatcctgaatgttccatcctggaacaaaaggtgcttgagtagaacaaattagtcaaggaagaatcagtctaattctatttgcaatgattttcgagataactatgtatgaccacattctaaaaagaaatagatcggaactaggacactttttttttgaattgggcaccttaagaataaaaatcacattcgttgtgttaagttccttatcaatccaaacctaaaaaaatccactactgtgtcacagaaatccacaccaacagagtacgagtaatatttaaagaaaataacagacataacatctgggcccgaagcttacatatatactaccgataaagaagagcatttgtgatctaatttcatcatgctctgaaatttttatcatatcattgagtcattgtatccggtggtagtaggtgggcatgcgggaacttatctcatacagaggaatgcacgttatgaggaattaattacttaaataatatattcgttaaattttagggtttttttttaacacttcaaaatatatatatatatttttgtatttttatgaaattccacatagcaacccacatagcaaccaacaaaacaacctaaatcacaactaaaatctacatagcatccacatagattctaccagagcaagcccaactgtaaatttgaaaaagaaatgttaaaaaatggtataacaggtaatttcgctaaattttaattctatatattgagagcttagattttataggctcatggtccccacagtatctaagataatatctgaccagtgctcgggttgacattgacccctagtcaccaacatgcaagttgatgaacacaataatttttatactagtattaataatttttataggctcatgatccccacatcttgcttaataatgtattaattgtaatgaatgaagatgatttttatttatatttaattttttatttaatatatacatataataacacccataaatttagagtattaatgaacataataatttttatactagtaatatgttgatgttttgtataaaatgttgtacttatctttttttatacatataattgtaatatattatttgagttgtatatatatatatacactaataaaaagctacgtgcgaggcacgtatactaaattttatgctaagtattttctactttatttaaaagtgatacaattaataattaaagaaaaaatattattaattattaggtgagattattattatgtgtacaaataatgtactttataattttgacaatttaaaataaatactgaatgcaatatattagtgtttaaaaaagcttgataatttaactgtaaactgttctgaagataatctaaaaataaactaaaaattaatgttcaaaaactaaagaaaacataatttaaatgtatgtaaaataaaaaaaaaataattaaaaatcaatctttaaattattgataattgaagataacatctgtctaaaatttgtaaataagaaaaataaagatactcttaatgggtggattttgataatttttctttgcttcgacagagacaatagttatatgtttgtattttacttattctagctgagtccgcatatgttaactctagtgtgcctact

SEQ ID NO: 20444 - DNA, 3566 bp, Cannabis sativa
  modified_base (3509)..(3518): a, c, t, g, unknown or other
ctggtttggtaaggactcggccagatcgagttgtttttggaacaatgttgttagagagacgattcatggttgaatcgggtatatggagggactgaccaagctgagaaccattgtttatagtggctggaacagacgtgtgtatctcagagttcttagtgtgtggatccattgatttatcaatgattgtggtcactggtatatcattggttttggttactggtgctgaacctgagtgtaacaagtcggggatcaatggcatatggttcttggttgtggtaggatgatgttgttgctgcactggtgtgacagtgggaagaacaacatctggaaataatgtatgaacttcagagatagaagattgattgaataggggaaagatattctcatagaaaacaacatctcgagaaataaaaatttgtttggattcaagatcaagaagcatatatgctttcatccctagaggatatccaacgaaaactgaagctctacttcgaggagtaaatttgtgccttgaagagggcaaagtagagccatatgctagacagccgaaagttcttaaatggtcatattttggtggtttgttatgaaggagctgatatgaggtaagtcctttaagcaatttggatggggttctatttaaaagatatgtggccgtttgtacaaagtgaggccaataaaccaatggtaaattggattgaaaaccgagtgctctagccacatttaatatatgttgatgttttctttctaccacggaattctgttgaggtctttcgacacatgaatggtagtttataatgccttttgaggcaaagaaagattgcatgtttaattctttggcattatctgaacggatggctttgatggtacatgagaattgtgtgcaaaccatgttaaagaaattgggtattgtggtttgaacatcggatttatttttgagcatgtacacccaagtgaatcgagttttatcatcgacaatagtgagaaagtacctataaccattgatactaatggtatgaaaagggccccatatatccatatgaactaagtcaaatgagtgatttgcaaaattatggttagcaatgaaaggcaaccttttttgtttggccaattggcaaatatgacaaacatgatcagtaataggagaagaaaaattattctctttattgaacaagtttgtaattgacaaagagggatgaccaaggcgattgtgccattggtttacattgttatttttaaaaaaaacaacagaggctgttgcagcagcagtagtagtagtagtagtagtagtagtagggtagctttgttgtagcaggtagagttttccatgctttctagctatcccaatcaccacattccgaataggatcctgtataatacaagaattgttaaaaaaattaatggaatgagttgtgttgtcaacaaattcagcgatagaaaaaagattgatattgaatgttggaacatataagacattagaaattgtaagattggaattaatcttgacagtaccaacattagcaactggaatgtgttgaccatttgggagaagaacatgttgtggatgattgtgatttgagaaagaactaaagcattcgatgttataacacatgtggtgtgtggcaccactgtcaactacccaagtaaaagatcgagtgttacctgcaagatttgatgcagcaggggtcatgacagcaggttcgggattggtgttgtggctgagttgttggcttaacaatgaaatcagctgttggcatcttgtggaaagatcattgttgagggaggagttgtctccatcagatttgtcactggggcaggaagcaagattggctttgcctttggatttttcttgcttctttttgtcaccataacctgggggaaatccatgcaaaaaatagcatttttctaccaagtggccaggtttgccacaatttgaacaagaagggcgtggtttcttggttcttggtggattgttggagctggaagcagcagcaagagggatttccacagaaccaagggtcctttggcgttcttcttggattatcatggcaaaaacccgagataaattgggaataggttcattgagcaaaatctgagctcggactgaggcaaaagactcatttaaaccagttaaaaactgaagaacttgattttggttatagtagtctaaaaaaattttcatggctccacaagtacaagatgtgatgggttgaaactctttcaactcatcccaaatagacttgagttttgtgaagtaggaagaaacagaaagatcaccctgctgtaaacgtgttagctgggtttggagttgaaaaatacgaggaccatttccctcattgaaacgatcggcaagatcatgccacatatcagtggctaaatcaaaatacatgatagattgagcgatttcaggggaaacggaattgattaaccaagacattaccatgttgttacaacgaagccaagagttaagggagaaattaccattctcaggccgaggaatagtgccgtcgatgaatgcgatcttgttcttggcagtcaaggccatagtaatccctcttttccaagcttggtaattaggtccagtaagaactgttgaaacgagtaccaatccgggatgatctcccgtgctgaggaagaacggacttgagtgatcttctgtgaggtttcgaacagcaggagctgttgtgttgttgtctgcaacagtggcggagttttcttgatttggaaccagatcaggttcttgattctggtttgaaccatgttgatttctccgaggaactgctgaggagttgtgattgcaagctggaggatgatcggaattgatcgcagctgctgtgtgatcagccattgatggaggagcaccatcttgtgaccgagttgtgggtcttgccatggaagctgtgggcaaggtttcttctgataccatatgagagtttgagagagagagaaacagaggaagagtaaaattgtattgctctgattaatctgttgaatacaatgaagtactgagtttatatattactcagtagcaaaggaaaaagttagttacagatgtaactaacatataacagacaaagacttgtaactaatcctaacaacctactgacattttacaattctaagacttaattatatacgtttaaatgactacctattaagaaataaaaatttaaattaataaacaattaatcttatatacacgtttgtgtgtatctaaattaaatgatattatttctataaaaataaatattctaatttaatatttctagatttgtgcttagttatatatttatatgagtttatgactaatatgttagaaaataaaaatttaaattaataaacaaaactagcgtaatataccaagtcggatgaaaaggagtagtagtgccacaaagttgtaagggtcagcaaagactgccacaacatttttagaaccattgatgagattgttttaaggattatattgattaatagtgtaagggctcgtttggaatgtcgtattaggtcgtatnnnnnnnnnntgtattatattaaattggattatacattatatttttatataatactat

SEQ ID NO: 20445 - DNA, 2276 bp, Cannabis sativa
  modified_base (375)..(387): a, c, t, g, unknown or other
catttataagattgaaattggaaaatatggtattaatgaaagaaaatataaattgttgaataaaataacaaaattgtaactagtgaggcccactatatatggccggtcacttaagtaatttttagccattattttatcttttttaatccatataatttaaattctaaatcctggttgaatactataaaaggaataagatgactctcattctcatccaactctaataaccaagttttcattctttgtcagacaactagaaaattgagagcctccttctttgtattttgaaatcccgtcttcttcttcatcatcaattgtgaagaatccaaccaaactaaagaagagaaaattcaagttcagatcttgataatgctnnnnnnnnnnnnngaatcaagggctagagatctaaatagaaggagtcattattattctgctgccatcaatgtaagattttctaaactaaactttatatgtatttttttcatcatattaggaaattcatatttaaggtgttagattatagaattataatcaacatacatgttagtaaatctagattctgataaaacaacttccaacataaggtatccaagtcagccaattgccatcgcccgtcttttggtatcgcattaaccaagataagaccatcacatggagaccaaggagcatttgttaaaatagtgtgagcctttgaagctttgttgaggcaaaacacaaaagtatttttggccaccttgcatcttccatccttgagatagcttccacatacccttaatgacatctctcatctgaaccttaggaaccagtctcttcgcaaagaatcacccaaccaaagatcaggagatgatatctttggcagagctatcatcagtcggtatccataaggaaaaatcctctagagtaaccaaagacgccatactcccagtcctaaacaaaacaccctgataacacctctgttgaatacatttatcaatctcagagccaccacaaaacgagattattaggttagaagtcacgaaattcggcgaaagctcacttttactcaatgggaaaatgaagatgattttgaatcctcacaaaaggaggcaagtacaattgtcttaggacatcgaaatgggtccacatcatcctacaccaccccactcatcaccgtacttaacacagaatgatggacaaaatagaatatttagaatatttttgatagtgtaatagtgtaaaaataaaaaaaataaatatttttttaattaagtagttaaattaaatatatactctaatttctattttataatttatcgatcaaaatttaataatatattattttttaaattaatatttattgtaaccattaaaaatgttccatatatattataacttttacaaatgccaaaaaataaatgtatatttataaaattatgctcaaaacactttttttttccttttgaacaattaactttccattatgctcaaagcattttaatatcaattcttcaacatgaaaatttatgccttgtactaatatcatattataaactagtatgatatgttctcacgattgttacctcatatatccctaaacttaattaacataaagtattagaatgtgctctttaatgatagtgttattattagtgtggttaaaaaacaattatttccttcctacgtgtcaagccaatatgaagataaaaaaaaaaaagaaaagaagaatccttaatgatgtaatcttattattaacaatataaagtgacaatcattatctttatagttatacataatgatcatcttaagacaaaaataaataaatacaaaatttattatattcttttactttctaaaattccattctggaataacacgtgtcacaatattacgatgagtgacactcaattttgatgagctttacaattgtgtccacaattaaagatcaaattctcctaaaattttcctctatatatcaaacctcacctcactccagctcctactcttattcctattcctctctctcttctctctctctctataaatatataaatatatatataccgacgcgctctggcggccggagaaatgggtctcacacgcgccaccctcttcctagctgtctccctaactcttgcagcattttccactgctcaaatgatgatgccaccggctactgccccaaccggttccatgtcgatgccaccctcaaccccttcaactccttcaacaccgccacctgtcagtgccacgccgccgagtaccatggcaagcccaccaacaatgatggcaagcccacc

SEQ ID NO: 20446 - DNA, 1836 bp, Cannabis sativa
tttagcttgggatatagaggacgtagtatagctctatgtaattatgccattaggaaataaagggagtggagactactttcccatttcataagctccttggtaaaaacatcttagataaataaaggaaaagctaaatccatcatagacttattaaatacaaatctaaattatctggcagaccaaaacattacaaaacgtgaacaaggttgttccatacaggaaattatttactgaagtcaaaataactggaactatatatagcatccacaaagcaaacactccccttagttaacaagactcgaatttattcaaataaaaacaaaagataacttgccaaacttaactagaactaaatatagcatcattcatatctgtttttaacttcaatggaccactaatcaagatagctatgaagacttggatctttggtctcttttttgatgtgggctgacgtcttccccaatgacgagctccttagtggtctgtgcaatctccactatggtttcaccaatggctcccaacatacttgttccctttgttcctctctcattgccaagttcttcaactccatgggaacctacttccttggtcatgtcctgaccagattttctgttctttctcacgtctgaagtttcgatttcatggtactctcttgaatcctctttcttcttgccttcaccctgaaacgtttcctttcaaacaaagacacataattaacacaaatatgcaccacatagattatagattaatgtatatataaatcaactctgtatacctgtccttcagtagacatttgtttagtatccaagcctctctgagcctcttctttcttcctagcagtgtaacccttagcagtttcaccagccgagagagccatatctttagcagcagtcaatggcacggcagctatctccacagccttatggccagcatactctgctgcgcccttaacaactctggcagcagccttcgtaccatctacagccttctctgtggagtaatgcgcagcagtccagcccgccgcagccgctttgtccttcacgctaactgccgtcttgcccgcatactgagcagcgtccttactagtgtccacagtaacatctttcgcctctactgctttctgcaaggtgtaatctttggctttgccaccggtagacacagcagcctctttggcctctgccgctttctgtacggtgtagtccttagctccaacgatggtgtctttagctgcagcaccgccttgctgtgccttgtttatggcagtttctttggcagcccgtcccctgtccacaaggtaatgtgcatgttcaagacaagtgtccttagcttgagcacccttttggccaatctcttctctcgcaacttgtaaagcctttttgtacttgtcttcagctgcccttattgcgtcatttgatttttgctgagcttctgctctaagctttgaaatctctccgaacgagtactgctctttgttaccctcatccgtactctctcccctgttctcttctttccccattacattgctcttctctcgattcttatctccagcattggaacttttatccgaagaacccttctcttttcctctagcttccacttcaaacttccccacagtttgaggctctgacttctccatacgccgcttagcttcggcctctttgtcagccaccgtatttgcatgcctctgcttatccatatcagaaagtgaaacgaagtcatcctgatgatgacgatcatggctgatatcctccgtggctttacctttctcagctgctaaactctcgaaatggctagccatctttggtactctgactttttctacgcggataactgtct

SEQ ID NO: 20447 - DNA, 3613 bp, Cannabis sativa
  modified_base (27)..(30): a, c, t, g, unknown or other
tttagtcacaagtaacattttattgtnnnnaaaagtcacatttaatcacaaaaagaaatatattgtgaataaaaagttatcactaaaagtaacagttttttgtagtgtagtcacaaatccaaacactattttaattacaaataattttttattgtgacaaaattatttttaatcacaaaaattaaaatttatattagatctaaaaatttattattcaaaataattattttttgtaaagagtatatatatgtataaaaattgttggttgaataatgttccatcactacaagaaatgtcacttttatcagcacagttcgctactgtgctggtaaaagtaatttttacataactttcactagcgcatttacgcgctgggaaaagtcatttttgccagcgtttttcattttatgttggcaaaaattctaataccaattttgatttgccaaccctcttttgccaacacatcacaagtaaattctattttaccagcgcaatatcaacttttgccagcataaaaatatgctggcaaaagtgacattttttatagtgcattgaccctacttttcacatgcattatgttatgatgagtcgtctatatagctagctaatagctatagtacatatctaactacatcctaattaattaattaattaattataccataatttttataatatgataattaattagccatacttagcaaaaacaatattgaagtaggcctaattttagacaaacatatatgcttttgagacaaaaaagaaaaacaagatcagtcaactcacacttgacatgtacaaattaacaaagacaaaaagagactagaaagaaagaaagaaagaaaagaaaaagaacaaatcctcttttccaatcgatctgccattgtcgtctaatacttaactcaacaataatattatctatatatatatatatatatgactgaattttgattggacataacaagctaagcacaaatttatattaattattgttcttcattgcttttaatatggttcttcatcatttatttccaagtgtatatatataaggtatatatagagtactttgagctcacaaaaacagatcatagaaattagcaaaagctgctaaaaggaattgtaggcgatcattaaaaaatttgaaaccaacacatctaaatttattaattataataccaacttcttataataattataaactacaaacaagactatattagttttgtaatttagggttaaaggacaactagattatatacgtgttcaaatttggtggacttattttggacaaagttttaggagccacacgtttggatggacgatttgtagcccctaatgcaattataaggattttagggcaatttttatactctcttaatactctattttgtatagttaccaataaatatatttactgacaattttttagtcacaatatattgtttttttaatttcagtaaaatttacttgtcattattgcacttattagttgttaataaaatttttctttttcccaaaaaaaaaaaaaatacttatcactaaaaaatattatttagatgtaaattatcactaatttagttttagttatatagtaagtagagccacaaaaaaaataatcttagagccaaagtcaaaaagtcacttgtaattcatgaaaaaacttttttaaaaaaatagctaaaaataccgatctaaaaattagaacaaaagaaccacttgtgatcagagatagtgagctaaaaaagagttgcttatgatcaaattgtccaagatagtgacttagtgagtatataaaatagctaacatcttgaaggaggatgttagattaatagagagtaccacattaattactatgtgtagaaagataataaaatatacaagataaataaattattcttcttattaccaattaattttaaaataaaaccccgtatgtttcccttatttcgaaattcttacactaacaaaatcacaatgaattcacagttatatataatataccccttaaaaattcccaacaatatatatatatataatatatatatagatattggaagagaaagatgtaaagaaaaaactagagcatgatgcatgcatgcagctttaagcatgcacattaatcatatacccatgtgttatatatatgtatatatattgtttgcatatatatatatatatatgaatggtttgggattgaatagccgtctacctttatctgcagctattatgttgtccttgaagtctctccctctctttcattttctctacccataatttattatatatatctaataaatattacacaaacatcaatgttcattataaatatatatacatatattaaatatatctctatctggtgctatatatctttgcagacagtactattttttatttgattcgtatagggaaggctatgtattcagtaaaaatctctctatatatatgaacagttccattattcttaaaaatgaattatatattgtacaaaataatatatgatctccaatattgttggcacgagccatgttataattatatttaagaaaattaattcatatatctttttttttattttttttttttaaatttaaattgttatgtgagttgcgatgtatattgtaatttaaattgggttgcaatttaaattactcttatgaattgcattgtatagtctataaaatacaaaaagaaaatactttaaagtgtataaatttatgtataaccatccatttattattaatcagccaaaatgattaataaatatctattagggtttttttttttaataaattagagaatttattaattaataaactcattcaaaacaatagctagaacgcattttagatgaacaatcctccaactgaagcacacatgtagagaaacaagagtctcttgttaagaaatgagtcaacttgtttgaagatcgtttaacaaaacataactcaacaaaagataaagccaaaagtaaattcctaacatcttgaacaataagaccaaattgtgaggacataaaaattatctattaggattttgacaactaggaacactttaaaatacagttacttttagttataatttttagttacaatataaattttttgtgactaaattattttaagctacaataaaaagttacttgtgactaaaatataatatttaactataagttgtcactaatttagttttaatcacgacaaatattgtgactaaaaatacatttaatcacaataaattgtaattttcgtgactaattaatatttttatagctatggacgttttagtcacaacatatgaataataatttataattagtcataacttttttacttttatagtgatcacaagttttgttgtgactaaaagtaaaaaattttataatgaaattaatgaataaatatcaaatatattatgatatgtatgattgaaattaatattggatcttatttatattaattaatttttttaaaggtttcttaagcaataaaatctcatttaccaaaaagatattataaaaaattaggttaattaggatttttgctccctgaactttgacatgtaccaaatcatgtcttttgaacttttaaggtcgttaaaaatgcctcctgaa

SEQ ID NO: 20448 - DNA, 1826 bp, Cannabis sativa
  modified_base (1380)..(1388): a, c, t, g, unknown or other
aaaaaaaaaaaaaaaaaatcagtccgatggttgaaccaaaaaaaaaattacatatattctttcataaaaataataaacatattatctacatatcaaatagtatttatattgcaaattactttaaataaaatagccctctattcttgatatttccaagattgctatagctactaacaagagaatatgaaaataatataataataatagaagaagaagaaaaaaaaaagtgatgaatggactttatgggcctgataattgatatggaggagttaaagttcggctgatcctaacaaaattcattattaaattttcttttttgagtgggaaaagacttgaaaaagaaaccatattatttctacaaaatttccactttttgtaagtgttgtgctattattaaagcaataagagaaagatttcatgtccttgtgtgaaaaatagaaatttccttacatttttagattacagtcaaagcttaatgtaatcactactatatgtaaccttacatttgactaactataattgttaatagggtgtgaattgattttattttgacctttttttcttcttcttcttctccttcatcatataatataatattgtgtgaagttgaacaaaatcaatagtatacacattattattttataatattttcataaaaaacaaaagaattagtcttttgtctcattataatttgttctatttttcttttgaaacttctattattagattagctaacaacttacataggttaaatttatatacatttttacattatttgctcttttggatgaaataaattatgatatgtgaattaggttaggtgtaataaccatttatccattaatcctatttatttgatgtgatttgtgaaaacgtgctcaactaacaatcaaatcatttcagctggttcacctatttcttaaaccttaattaattactaccactagtactactatactactatagtgtattccataattaacaaaatgtccctaaaaatatttattatagtttaagtatagtgtgtttcacatcacattcatacatttactaatatttttttaataaatgggagaattcccattttgtggttttctgaaataaaaataaaaatggatctgtgaaatatttgggaaggaattattgtgataatttgccttgtattattgattagaagaagaagtcaaaattgtccacataaaatcaaccccaccactacataagatgaatcatcatctttaataatttattattatcctaaacatagcaaacatgcctttatttcttaataatataaagaaaactaaattttagtggatatgtaatgagtgaagacctttacttgtccacaagagtacgatgataataataataataatnnnnnnnnnaatcataataataataataatacatagctaaacaaatattagtacttatgttgtaaatttgtaaaagtaagacaaaagtagaagaagaaaaataaaccatatatgacagaaaataatccatagcaactgtaactatatatgttgtgagataaaaaattggtgtagtgtttgataaattgaaaatttagtagtgtgagttggaataattatatctatttttttttttttgaaaactagattatattgatcataatttttttttttttgaaaattgttgtcctatacaaaaggactaaagtagacatcataattatttttttattctactaaaaataaactcacacctactatatatattgtgaaaattgatgttgtccattttatttatatttgatctaatactttttggtaatgttatatctttttctttataatatt

SEQ ID NO: 20449 - DNA, 6328 bp, Cannabis sativa
  modified_base (87)..(91): a, c, t, g, unknown or other
  modified_base (451)..(452): a, c, t, g, unknown or other
aaaagcccccacaaaattaaataaatctagtaagagtgattataatataaatataaatattttttaatgataaataagcccccacannnnnaaaattctgggtccgtcactgcgagtaatatttttctctggcatggaacgaaacgattcaattttttaaaaagcacaaataaatataaaccaaaccaacacaacactatagatccatccatacatgtttgtattgtgattatttataatttacatttcatgtttatgcgtgtgtggtagtcttacatcaataattactatgaaagaaaaatgcaataatgaattgattttagcaaaatgacaaatgtttaaccacaactttatgcatattagtattgctattaggtataagtagtgcctagtaccttctcgatatgtagcgttgtgattggctagcgatactccctaaaaactattatannaaattatatgagactcaatacttagttggaccaataacgatattaatatatagaaatgtactaagcactattgataccctttaacatttgtctatccatattgagctgggagtgaaatgaataaaacttacaccaattataaagaagacaataagacttactaaattcaatcttaaagtatcataatttttaaaataaataaattagattcttcaaagtatctccttcttactatcgttttagtgcttattgatattaaatattacggtctaaagagaaaaatggtccaatctccaataccgcaaaataataaaatatctctttctcacttgtacatacacatacatagggatccacaagtgtaattagtaaaatacacgtgccttcaccaaatccatacattaataaataaagagcacaaagtaattcgtagtacaccatttaaaaatgatattctgtaatttattatatcaaataatatgtaattttatttttaattatactaataataatacaaaatattaatattagagatactaagctctttaacatttctcttaaataaaaactaaaagccttataaaataaaataagacataaaaagaaattaacctaattattattatttaaatataaaagaaaatagagagaaaaaaaaaaacatacactagaacatagagtttagaaagaagactttcactgtccaaccaagactgtttgtaccattctaaacacgacaatttttctgtataataatataacgcaatgccaattgttctattttgaaactcaaataaaaaaatgtgaaacaaagatacgaagttgaatgttgttttcaactagcattaattaatcatggtgctttgcttttgtccttgggttcacaaatttgaacccaacacctagctggcatttgtttttatatatctttttatgtgtgtggtgtgccaacctatatttctttatcaatatttaatttgtgaattcttatataacaccataaatcattaatacaatatatttctcaaataaaataaaatgtgaaataaagccaaaacgagagcatactatatgaaaagtcaatgcagttaattacatgtttttttagggaaagggagcccactagagggaaagaaagtctctaagattgcaggggtcatcaccattccagattgctacttcatctaatcccaaagcccagtgtgtcagcttatctgcaaatgtattggcagatcgattaacgtgagagatatgggctacagggaggtgagacaaagcttctttgatttgacttataaggtcaccaaaatacgagatatcctctttaggatgatccaacgcgtcagtaatagctttgcaatctgtttctaccacatggactgggaaatgcttttctatacaccaacgcagcgcgagaaggagggactttgcttcaagagtggcaacattctcggctcctgtgtaggggaaagccactgccgcaactacgaggccttcattgtttctaatgacacttccaaaaccaactttcgctctccccttgggaattgcagcatccacatttagcttgaggcgaccaggttcaggaggagaccaggttgtgattgctgaggactggttagagcgggcatgcggtgatgaagcccacgttgataatttgaaatcatccagaaaacttttcgctaatttcgttatggcatgggtctgatcatgtgcttgtcctctaagagctttgttcctgttaaaccaaataagccatgcaatacaaagaaatagttccacatcttccttggttaaagagacataaatcatatgtgcaatatcatgaaaagtaatttcagaagagcaagaaaaaatataaggataaaaaggcgtacctttccagactcttcgaatgctcttacagtagaacagggcgtgtgacatagattcttccaggtttccacatcgatcacaaaccgaagactgaatgattttcctagaagctagatttctgagtgtgggcagggtggaattggtagcacgaaaagcaaagtgtttcaccttgggggggattttaaggtgccataaatttttccaccaaggcgacggtgaagaaggagaggggatatcagagggtgccgtagaagaaaagctgaggtggtaacctgttttgaccgagtaaattcccaattttgagggttcccaaatcaactcatcattagaaggatgaagagggaggggatggacaaaatctcctcaacaacatgaggagggtagcatctcctaaggctaggaatgtcccaagtcatggtagaagtgataaaggtagcaaccgtatcaggaactgaagaaagagggacaacctgacgaaaactcgggatccaataatcaagggtagtggaagtgttatgcccgttaccaattttagtaatgagtcatttgtgcagcaactcctttccccaacaaatactacgccaaacgaaagagggggagtgacctagagaactgtttaggaaagatgagtttgggtaatacctgacagccaagattttggacacaattgagtttggttgttttaatacacgccaggcttgtttagccagcagagccagattgaagtggaccagagaaaggaatccgagcccaccatcctttttggacctacaaagtttttgccaactttgccagtgcgtcttgggccgattattatcgttgaaaccccaccagaagtttgccataatggactccagagagtggcaagtggccgtaggaaggcgaaagcaggccatagtataagtggggatggcctgtataacaaacttgagaaggatttcttcaccccctttagaaaaaactttgttcctctaattatgaagataaccccaaactttgtcatgaagataatggaagaactttcttaagaactttccaaaatagaatagagataaaaactagttaagaactttcttaagtttatataactttctagtgttttcaaaaccaactaagttttctagcttcacaggtggaactaaattatcatagacgatttcttacatccttctagaataattcctccaccccagagtaaccactatatctgatattaagttgtgagttggtgtagatataaggattctaatatacacccctatcttctaacatatatgtcactcttttagattatttcttgattttctcccaatcttctttgtttgattacatcttagatgactcccactcaacagtagaagtctggtttaatgcatacacaagtgtgcatttaacctcttattattgatgcttatggacctcttgttgtgacattttgttccttctagactaagtcatcaacatagcattctagtattaacattaatgtaaaattcttgctcaagactaagtaatcactataggtaccataaaatattttagaaggaccaggaattgtgctttaagtctttcaaatagactttgtaaaatttcctatcttatccttataatactgataagttattactatccatgtaaatggttagattaacatttttttgttttaaaaaaagttcctatcttgaacataacatattaggctatcactagtgtcatccaaataataataggttgtacttttaaaattctcccactaagataaggtactgtgattctatgtcgaaggacttcattagcatccattactgtagtaggagacactggaacatatacaggattaagaataaattctacttgtttgctagttagtttattatattatatacatgtctaatcaaaataggtgtgttatagagattttgtggtgtattaagtatagtctagagttcagtgagtttgaattacatatattaataacttcttccacccttaagtgttatagagattctgtggtgttttgaatatagtttagagttcaatagatataaaagatctttgaactgcattaataatttcttccacccttatcagatgaaaatatctttatattaaataaaatcttaataatttcttatgaaatgaaaattattcataaacatttgaattctaagtgtttatgtagcgttatctctttacagagattaataccttagattttgtaccaataataaatacaaaacacataaaacatgatataaatataaaacgtattggcatacaagttaaggaatatgaagctcaatttcataaaggcaattcatactgaaaacttcttaaagagaaaattttatttatactctcaaaaatatcataatgaattgtctgcaataatatgaaatagggaataaaattcacatactaataattgaaactaaattgttcggtaactaaaacaattaatttaaaaattaaagacgataatgagcttaaactttaacttggacaatctctaccctactgtccaacaatccgtcttaactcactaggatagtaatccaagtttaagcagctggagctgaaataagaagaacataaaacacggatagtagatctagaattaataatgtaaagagataataattctctaaaacacatgaattcataacaaagttagaaataccttatttctttgccaaaaacttaggacactggggttttcagtgacccttttcgttgcaatagaagcattttccttttttctttgcttttggattaacatcctctttacccttattagttgtgttaacagctttaagaggcttcttgctcttcttccatttcttcttctttgcgggttttgaagtagaggcaatgtttgcctcaggctttgtcgtaccagtagtagcattactagaactaggagctttgttttctcctttatgcggtcctccaatcaaattttcaaatgtttgaaggttgttgataaactcgtgaaagtcaaaagtcaacttgttcatgacataatttgaagtaaagggcagaaaaactagagttaaactatttaagatcaaactcacttgagtttcttgatctataatggctccatgatttttcagcttccttgaaataactagccatttggagtaggtgatcacacatgttctgatgaggtttcatccgtgcattgataaaattcttggtcaccttaaaatgagcttgatctaatgccatcccaaacagttcagttaactggttcatgatttctgcagtcgtgagagtgttgttagcattctgccaatgctcaaacttttccttgactgccttggttgcattctcacctggttgctcaggagcttcttcagttaacacaaatagggacttctcacctaagagagaaatattaatattctctttccatttgacaaagttagctccaaagaacttgttgtcagtcaacattgacacaattagtttgttcatagtcattttggaaactgcaaatatcaataaatagaaatcaaataaggttcaatacaaaatcatacacattcaaaaattattaagcatttagcaagtaggaaagaaatgtgaaaatacaaaaacaaacataacctaaataatttctaaggttttcaccttaatgatataagtgtcccgtttaggcgagagtcaaatgtatcaatagtaaatagagttgtcagctcatctaaaatggacactattttagcaaccttttattcgatcaagatgaaaattcggcgttttcccatttaggcaagagtcaaggccattatatcttatgagcttctaccattatttcatactttgtaagccctactctttgcaaccactattggggtgatcgttactcagaataaaagacttacaataatatttatttttcgagattctacaacattaaattgctaatgaatgaacatctattagtgatgaatctcattaaaacaagaactatatagaaccaataatggagatcaaat

SEQ ID NO: 20450 - DNA, 2706 bp, Cannabis sativa
cggtgtcgaagatcatgcccagtcatttgctcgacagtctccctgtgaaggtcatggacaaccctcgtacctcgtatgaggtgagtctgttgagcgtggtttgcttccaatagtggtttttcttcttcatgccttcgatttgaagcttagcctcaataagttcggccagaagggtgtcattagcatcgtgcaggtggtagttgtctgccctagcttgctgcagctctgtaactagcatgccaacctctttagcagccctctcgatcagtaaagccacctattgtaatccgcaaaaatgaaagagctgaatgtcaggacaagcgtcaaaaaaaaaaagaacagagaaagaaaggtctcttgaagctttaccccaaccacctgttgcttagaagaataggctaaaccaaagacgtcaacactgctccatgacgcttaaatctccgggggtagcttagaggcattcccaaccacctagtccaaaattttagcagtaaatgggcggcttctctccctaccttgggggctaggtgcttctccaaggcctccacttccacggttggtcgagcaggggtcagggtgtgaaggccatctaaaatttcagctttccgtatggcggagagcacagtgacccatctacataccaatcctttcctacctctagacgctccttcaaggctttgttcacttccctctctctttgcatgtcatgtggatttaagggaatagcctttcttggaatgtgaaccccacagagggtactttagggagggcaaaaggatagaacgaacgaggctggcccagcctcaatggtgaatcgtgacgtggagggttggcccatgtttcgaaaacactagttttaagccttttccttttcttgccaaggctactgtcacccatagctttagaagaaccagttctaagctaaacgggtcagcacaatacaagatcctttgtctctctctctctctggtagaggccgcatacatagtgccaacattcatagaacaaatgatcgcatataccatgcaccccctcaactcctcaaaaactctacatcaaataaacaatgattaagaatacttagaagtcattaggcggaggatggaagggtgattgtcgtcttgcgtcctgagtgaaactgttagagaggtcttgcaagacaagggaagagataaaaccaaacacaaaaaatttggtgcgatggacgggaaaaggtgaaatttaaaaagggtgttgtaagtatttgttgagcactatggaaagggtgccttccccgaggggcaaatagtttgaatcgttcacccaaagcccgtctgacggttggatgagtggaaagctaagaaggtgtatcaaatcccaaagtttggtttctatcattgcatgcttcgagaaaagtgctcaatgaatgaaaagtctgctcaatcgaatcgtcgctcttttggtgtcccgccaaacacgtgcccagcacgtgcataaacttcaaaagtcggcatttaaagctctgacagtagacaaaaagaaataataccttctgccactgacacttcagttggcagatgatggcataatgtagtaaaaagcttgtatttatcccacatgcctagaatcaatcaagaagaaatactgcaagctcctggatcgtgttacgtctcggaagcttggggggctaaatgttatctcgattttcataattatgacccatgaattttaatcaagaaaggttaagaaaatattagttgaccaactccctcgaccgatcatccggggagatgaaggccccaactcgcagaaagggaccccgtgattgggagttccctatcattgtgagagatatccatgagtcagagtctcccctggtcccaggaatcgaagccattagctcctatgaagggtatgggtttttattaaaaagatgaaggcattatgaaatgcacctaaccaagctacaacctcattctgcagatgctctgcgcatagccgtacatgttagactacggacctagtgcctaggcttatttaggtatgacagttaagcaaaaaatttcacatttagaacattaaaaataaatgcaaaacacaatttcacctatgccaaatttatagcataagagtttattaatttaagttcgacccattcaagattataaaaataatcttttaattacaattttttcgtttaaagaaaatacctttgattctaattacgatgataaaaaatgatttaaaataatctagggaaatttaggataaatttggaatcacgaattaactcagtaattttggctaactgagctgcctacatactttctttgtagaaggatcaagacacttgtattttggaatactgtatttttaaatttgaatataagaatttcggtagatgaccacttttaaaaattctttgctatttgaaaatttagtaaaattactaggtggttgacttttatggaattttgaaatttgtattttataccattttgcggtaccagcgactgcactcaatcttagcaactaagttgtctacgtatctctttataggaatcaagtcaaacgtagttctaattatctttgtgaaaaattaattcactttgccattttgaggtgaatgacctcatttagaacttttgtttcacgacctcatttgagaatttcaatgtgaatgactcgactttgagtttttgttgaggataatgacctcatttgaat

SEQ ID NO: 20451 - DNA, 1257 bp, Cannabis sativa
ctcatgctcctccatacattacaaactcttctgcacccaaaataaactaacagaacgaaccacaaatgtgatccatacctcaattttgtcaagcatggatgggtttgatcgtcatacctcaattttgtcaagcatggatgggtttgatcgtcctgtcctaatggaattgaaattggttcgcacagtttcaatcgtcttctccatcctttctttctaaatattaaatagcagtgtcagcaacaagtatttgtaatagcacaatgaatatccactaaacaaatcaaccatgccaaaatgacttacaacatctttctcaatggacgatttctctgcttctatttcttcaattgtagcagctctaacagtgccacctctgaaattttacacagaaccacacaaaaagatgcaaatttaaccgaccacgcagctacaaacacaatggatactaaacatcataaattttaagaatacgaacccaatcacattcacacttgtttatacttaaaagaagcattttaaacaatgaaacaaatagaacatccaatacttaaaacaacattattatttcatacaagaacgcaactcgaagtttgatgcaatagaaattacctccttttggacacatgcttggtaagaataggctttccagaaaacttagcaataccatcctgaagtctcacgtagctagcggctgagctccatgtaacaatactaactctcttcggcctacatttggcgcaaaccggtcctccaccagatgaatctgcaaaacaaacaatgttatagacatacccacgaagctaaaacgaatgactagtcagttacttttcctaaattgctcaaaatttcaaaaggaaacgctatcgaaactcattcatttggagtagagtaagcaaagaagaaagaaaaaaaggaaatttcatttgttgtcactaaaaccccaattcaaaagagataataaataaggtttaagggttcggctacctcgaaaggagaggatgatttgaagagggttttgcttgggtttaagggtagttgcaggagagaaggaggtcgccatgagagctacagtgttgagtgtaggagtgatgaccttggaagacggagaaaaatattaacgggcttggcttggcttgtggataagaattttcgttctgtctgtttgggtccaagaattcaataaaaccaaacaccggaattttgtatcccgtctcattgtcgaaatattggatttgagaaaataaaaaataaataaac

SEQ ID NO: 20452 - DNA, 6038 bp, Cannabis sativa
cccatgggttcgaccttgcacttacatgaacactatattccgaaacgattcgtgcacttgcgagtataaatattaaaacactcacttttgaggacaacaggatgccttggagtagtctcatcaatgagtactgctgcttccacttgtctctcctactgcagacgtgattgggcaacgtttggggtttggctctaccatgatgatgatgaatcaagtaacaaatggattcctacttattctgtttcagttgactacctaagaaatcttatgaccagtcgccacgtttatcaaaatttattgtggattgaaagagtagcttatcaatacaatttctatctggaacaattaaaactgaacacaaagaattgtaaaagctctaatgaattaagagctgaaccttccattatataggcaagggatttacaagagtttgtacaaagaaacaaaaagcaaactctgttaaagaaacagaagcaagtggacagagataacaaactaactctaacagtaaaataactaactaaactgaaagtcaaagttcgttatttatcatcgcccctcaagcgaaaaaaggagaggaacacacattgagcttggctttgaggtacaagaatcgatctttggtgagagctttagttaagatgtctgcgatttgatcgatagaaggaacatatctaacttccacttcctttgccagaatttgatctctcacaaagtgaagatcaatttcaatgtgcttcgatctagcatgaaacacagggttggcggctaatgaggcagctccttgattgtcaacccatataataggagatgctagaagattcacttaaagctcatgtaaaacagagtgcagccatttgagttcagcagcggtattggcaagagcacgaaactcactctctgtgctggaccatgcaacaacttgctgcttttttgcagaccaggaaatgaggtttccccctaagtagatagcatagcctccagttgagcgacggtcatcaggacaactcgcccaatcggcatcggagtatgcttgtaaaaacagtcttagagtcggtttgatgtgaagtccctcatgaattgtgcctttgagatatcgaaataaccttttacatgcatcccaatgaactgttgtaggagcatgaataaattggctcaatttattcacaatgaatgcaatgtcgggtattgtcaaggtcaaatattgtaaagcgcctaatgtgcttatgtataaggtttgatcatgaaacgactcaccattagtcagagatagaacataagaggcacttgttggactaggacaaggtttagcaccctccatattgagtcttgtaagaagttcagcaatatatcttgactgtgagagatagatgcctgatgcatttcgatgaacttaacacctaaaaaatagtgtaaagacccgaggtctttgataccaaattcctggtttagatcagtgataatggcagcaatagcatctttgtttggtcctgtaatcaagacgtcgtccacataaactaagagcacaatgagattcacaccagagcctttaataaacaaagaattgtcagcctttgatagttgaaaccctttgttgtacagagtgcttttgagtttttgattccaagctcgtggagcttgtttaaggccatacaaggccttggtaagttggcagacatagtgagggtatttgggatcaacaaaatctggtggttgaggcatgtagacagtctcttcaagggtaccatttaagaatgcattagagacatcgagttgggtaatcggccaattgaatgatactacaagtgtgagtaaaatcctcactgtggctgggttaacgacgggactaaatgtctctttgaaatcaatgccgggagtttgagaatagccttttgcaaccaaccttgacttgtatttgtctaaggaaccattagccttgagcttgatcctatgaacccatttattccttataagtgtcatggagggatgatagggaacaagtttccatgtgttattctttatgagggttgtgttctcggtttgcatggatgcataccagagtttgtacaaagaaacagaaaacaaactctgttaaagaaacagaggcaagtggacagagataacaaactaactctaataataaaataactaactaaactgaaagtcaaagttcgttatttatcatggatggaccgtatgctataggcccaaatccttgtgtgatattctttggcactgacattgtaagttgcagtataacttcaatacaaatgagctcaaaattctgcgtacaatctacatgggttattgtaattacttgccacttggttccttctttcctgcagtcttcaccttccgcaattgcctcataccttttcaaggtctgaataacgagaggaatgccatatgatcatgaggccttcactcttgtctataaagcatctcattctttagttaatttattactacatttttcaatttgttagttttggttctataataagttgttttttcaacaacaataataataacaatttatcccttcaactttgtcactaaaaattcatgcttatgaaaaattacataatattgcttaattttagttttctacctaatcaaattgaaataaaattttattttaatttaatctttaatatattttatgtttcaactttttctttagtaatgaaattagtttcaagtttcattttttttttacgttaaaattgagcttttattataaattagtttgaaaaatattcagtatatatcaatagtaaagaaatattggtgttgtaatatatattcatcttttagttcttatattattttaaaattgagttgtaagatatctcaatttattataacaaaaaaagaggatcttctttcaaaatataaagcctagaacagggatctaaacaccatgtaacaactaacaactataactatgaactatctatacaactttaagtgttgttacattcaaaaatatatatgtgtggtaagccatagtcaacaacattactacagtctactgcagtgagacagggactaaacactgtcaaaaaagcatttaatgttgcaaaacaggtaagcacttcatattaaataaacaataacaaacatccaaatatataaattattaaaatagataacaaaaccagatgagaccaaagagataattaatttcagtagaaacaagacaacaagttgattacatttttttgtagagatcattaagattagagattataaaactattggaaactataatatatatataatatgtatataaataaacatatcttaatctaatcctatcttatacatctcaataaccctttgataggagacaatattacgtgtcaaaatacatactatttttgttttatgggttgaagagggaagcaccacacttgcatttccaaccttctggctcgtaattagcaatttggatgccgattcggttagcagtggctggaatctgaacagggtcacaagggaagcaaccttcacatttgtgtacacagtttgggggtcttgaccccagcctactaagtgatctgtactcttcttcaatttcattcccatttccctttaaccaatcaaaaccatatatatgtcaacatgtgaatgtaaatatctacagagtaacagaaatattagagatgtagttatgtaccttagtgaagccaaagccagataatggggtgtgtgagatttggtctgttaagtaaacaagttttcaagatcacgcaaaaactgacataaacttttcaaagtgaaagagaatgaatattacattgtaataataataataataataccttgttgctgaacaaagtgtttggattcaaaaggcctgcttttcgtgttagatacacaactactcatgagaaaaaccattagaaagtagcagcataataacatctttctcttcattttctttttatgatatgtgcaaaaaaagagagagagagagagaaagaagacaaaactcactaaagaagaaaagattgagatataattttataagccggaacagtattattagtaaagaaccaccgcaaatgcctcaacaaaactaaaacctgtatataatgccttgtgggatattgctttttcagacagactggttcttcttctgaattcacttaacaaaaagaatgaggtagaagagacacacactcctatatatatacacacacttaaaagctttgaaagtcattatgatttcaaaagtcctttttctctctctctctttctcttgcactctttacaaaaattatctgaagttgtacgaacaatactgggtcaatcaagtccgttcttcattcttaataaagctgttatttaattatcagaatccgagtttcttgtaagaagaaaaaaagaggttcaaatttcaaaacaccagagcttacttagttacttactccagtaaaaccttgatctttaccaggtattaactaaaaaaatattgacttttatcagagcacaaataacattttaaaatgtgtttaaaatagtgaatgctttggtaatttaagtaagtgagtgagtagtcaaaatggaaatggatgaacttttcaatgataaatctcaatcaaagtaatgagcttcctgactcacatcattatctcatcaccgttttcagttttgtatgctaagtaattaatgagtgtcacagatatcaacactacagaattcacaaaacactgaaacactgtattaattacacattgaacctttagctcttaattaatccattggtttccaataaaaaatctattaactatatatctatgtttttttactattagaaattttgaaagattatgcaaatctgaattgactgcagagtccattgcgtatagaaaacagttcaatgatatatgcaatactctgcaatgttatatacacctctaaaagattttgctaattcacttttttaaagttgaatcagaagatacaataataaaagtcacgataatggatttactataattttacataataaaaaacaggtcttacataataaaaaagataaagatgatagagttcaagaacagaagacaaaatcattgcagaatttattattgttatccttatatatttcttttttcaaatgaaatcattgatgaaaaagtgtgcaatataatattctttgtgggataatgtattattttacaatttattagtagattttaagctaattacaatttctagtcttcaaactttaatttatattaaaatatccttcttaaattttgaaggttgttaaaaaaaatttctgaattatttagattgttagatttaaaaatctttatcaaattttagtaaggaaagtttaatattgatgaaagttcaggagacatgatttgacacttatcgaaattcaaggaggataacttggtagatattaaagtttggagagcataaattagtatatgaacaatcacagaattagtaaaattaaatgaaatttgacaaaagtctttaaatccaacaattttaaaagtttgagagaatttttaacagttaaaataattaaaaggggcataatttggtacatgtcaaagttcaggaagtaaaaattttaattcgcctaaattttaatattacttgctaaattaaaatataatatatgttacatttgttattagaacaagaaatagaaggagaaaaagaagaaaattaatgtaaattgttaattgttataactcaaaacagtaaaaatacatgtaaatagatgtagaacaaaataaattagaaccataaaaggaaatagaagtagtaaaagatgaaacgataatttttaatgtagagtagaagaattaataggtttagaatatttctttgaaaagtgataaggtgattttcagatgacagagagtatattgaacattatatattgaaatcctttttttttatagtcttcaagagtatgagcgagtcaagagagaaagaagaagatcagtactttaattaagcaccaactaattctaattaagagagaacatttgtgctattaattt

SEQ ID NO: 20453 - DNA, 3681 bp, Cannabis sativa
gcactaaccgattgtcctgaccaactgcaataggtctgaagacagtccaaaaaaaccttggcctcccgaatcgacgcttccccaaagagaactatgtcatcagcgaacatgaggtggtttatggcagttccatttcgggccatcttgaatcctttcagcagcccgagtttctccttctcaaagagaagtctagttaatgtttccgcagcgatgataaaaagcgatggagaaagagggtcgccttgtcgtaagcccctcccaggggagaattttcccacaatagaaccattcaatagcagctttatttcctcaactgagatgcaggcctttatccaatccgtaaagggacttgtaaaaccgaattggtataggactttgatgataaactcccaatccatcttatcatacgccttttcaaggtcgagtttaataagcatgaaccccttcttacctatttttctcttcattgaatgaataatctcccgggctatcatagtgttttccgcgatgtgtcttcctttgataaaggcagcttggtttggggacacgattttatgaagaatgttcctcagacgggtggcaatgacttttgaaattactttgtaggctacattgcataaggctatagggcggtattcattgaccatcgctggagagtccttcttgggaacaagaacaattgccgtgtcattgatatacttgggaagatcagtgttggtgaagaagtgggtaaccatctcaaagagatcatcttgaaccgtgtcccaatggtgagcatagaagcttggtgggaggccgtctggccctggcgctgtatcctttcccatttcaaatagagctactgttatttcctccattgtcggtatcgcattcagggtagcattgtcctgtattgtgacaattgtgctattcgactcttgttggaatgaagggtgactgcattgttgtttcttgaatagctccctgaatttgtcgatgaagcattttgctatctccttatcgtctctaatccaatcttcactcgggttgttcttgatacattgtatgtagtttcgtctccgccggactatggtagaagctatgaagaattttgagcacgtgtctccttcatgaagccattgcactctcgatttttgcttccagtgaatttcttctctttttagagcctcgttgagttgttggcttgctagctctattgcaaggtagtcgtccgggttttttgtttcagtgtcttggagatgagcttgagcgttctgcacttgacgatggacattctagaattgaagtttgttccattgctgaagtttctttgttgtggctttaactttcctaaagaaatttagcatgggattactatgttgtctcttttcccaggcctctttcacgatccagaaacttctggggtcccttgcccacatgttctcatacttgaacaatctactcttgcaattggcgccacctagagtatcgaggagaagtggcctatggtcggatccagaggcagagagatggtttatgactgcatttgggaacagtatatgccaatccggggaagcgagtccagtgtcaagtcgagctcttttcattgctcctcccgggttggaagtccccccacctttggcccaagtgaatcgtggcccttggaacctcaggtcaatcaagccaacacgttgaatcatacgacgaaagtcaaaagagtagagggctgagtttctgcttcgagtgtaattaaaacaatcagagtctcgtagagttccattcatgtcccccagtaataggattgggttagttgtgttgagtgctaaatctctcaggtggttccagaaggcctccttttgatctctatgtggggggccataagttccacacaaatgccatagacatcctggggggtccgaactaatttcgccaatgattacatatttttttgctagcttgatgttacaaataacccccttcatccaacagataccaagccccccagaaagaccaacatgggggacatagtgatagtgttcaaagtgaagtctaatacaagttctagagaatttatcttgcggtaggcgagtttcagacagaacaagtacatcgggtttgtgttggcgaaccaaattcgccaattgtcgaactgtcgtggaattcccgagaccacggcagttccaagctagcactttcatggggactcgggagacttttctgggcaagtctccgtagccccaaagtgaaaatcatgtcttccttctattgcactttttccttttgtcgtagtttcctcatcttcaacttctgtgatttggcaacttgtcctaggcttcgtggtcttttcaattacgatgaagtggttgtttaaatccactttcaggtcgaagacgctaccaccaatgtggttatacttccctgactttcctcccatgttgatttttgtttatttgcgacccttgaacgatttcggggttgctgagagtgttgggtaattcttgggaggccgtcctctacgtttcttttccactggttcatcgtggacaatgggagccttttcgcttctgcctcccctgcttctgcgtttgctgctagagccttgttccatacacgtgccaggtgagaagctagagggtggggagaccatctcagtgtcgagccccaattgttgctgaactgtgggagcatttttcccagttgtgttgtctcgagtttcaggttcggaatgactttccttcgattgagaggccggagtgctgtttgtgtacgagttgaaacttttgactggagatgggttgatgagtaatccatctgatgctttacgttttctgggcccttgggagtgttcttggactctaaaatcttctatgtcaagtattgggtttattagagtgggctccctgtagtacttatccacagttagggatccaaagattagctcacgggcctttgggtcggcccagcattcatttgagggccaatcaataagttgggcatgtgttcccagtagtgggttgtaggccagtttgcttgggcccatgtcgaagtcagaaacttgtttgtttgtgggtgattcacctgtctcagctaagtcatcaggctggttgttgctaatacgaggttggtttaggtgtgcccttgagttatctttatttgtagctcttgaaatggaaatttttgtcttccccgtccctttcatcctcaggcttttatcagctttgttcactgtatcattgtcctccactgtattggagctcgatgccccattggctgtgaccatagcgtcctctgtggcagcctgttgcaagtcgagaacggataccatttttgaattgttgccataaggggcaaattccccgatacccggaagataaactaacggaatctgggtaatgaccatgttgggctcatcagcttcggttgcttcctcttcgtcggagacgattcttttcttcgtcgggtattgacgacggcattcgcgtatctcatccaactctccgttttgtatggctctgtgaaccttgaactggtttctaagaatggggtcattccccaattgtttttgcaggactcagtcctggaaccacttggctagggggtggagaaggtcgatttttcagggacctccttttttaaccatgtgccgaacatcggataaaaatttcctttggcgtctttcactaccgtgggggacttgaagca

SEQ ID NO: 20454 - DNA, 2438 bp, Cannabis sativa
ctctctctctctctcatcagtattattggattgaattgaatccatccaatctaaaaaaaaataaaattttaatgttagatttcatatatacagatattttattacatataacaacataaaatctaattagtcattcaaactaaatgaaaatattaattagttcgattagatattggatggattggatttttaaacacccaatctaacaactgatccgatccaattagatattcaaaaataacatccaatccaattcaatcacaattagatatccaacatgtgactgtcgattataattaaatcggtcagttatcattgaattggatcattcatgcaccttgctttattttgatgtacttctgtttatcttggccacgtttcctaataaaattctatgatatttctttcaaaagtcaaaaaataaaaaaaatttactgctaaattatttctgaataaaattcatcatttcaaatcttcatgttaaaagtttcactattacttttcatctcacaactgaattttacatgtacaagttgcatacaattggaggaaatgaaaaacaacaaagtgttcttgcttgttgtacggacccccacaaaaaaaatgaaataaacataaataattttacactgataatacttcactcttctaaaattaaattattcaaaaagaaaaaaaaaattaataaattaataaaattatttgtttttgttttcgtttcggcttcttgaaatttcaatcataaaagacgcgttctccagtagcaaaaaggttccaaaatatggctgcagcgaaatagagagctgctgtgacagttaagaatgcttgaaatgatcctaaccattggacaaaatatccagttcctatggtgctgatgatggccgccaatgtccccgccgaatttgaaatccctgttaaagagaaacaaaataatctaagaaagagtcatagtaaacaaaaatccaatgtagaagatggaaaaagtagaaagaacataccatggagaaatccagcatattgaggagctatgtcctgtttaattcaaaaagagacaagaaaattattcatgcttattcgaacaaatttgtggcgaaaatttaaatttgatgatggaatagcaagggacttacttgcatattgaggaaataaccagcttgggtgaaagagcttaagctcaaagctatggtgaggagtacggctgcagctataggtgttttcgcgtagttcaagcatagcaatgccactccgggtccaatgaaaccgatggactgaattacaacaagtattacataatctcttagtgagttatataaagatgaacaaatagtcttgtactagtttcaagaattaaatgcaatatcagcataacctaatgggaataaacagcgagtcccatcgctcgtccttgttagattgttcacatgaaaagtgttacactactcgtaaccaatcagcattgagatgcgaaaccgtcaattttacttcctatagtttccgttctactactgtctaaaccttcattccactatcttttttaataggcctaatgctaaatttataatgtcattctcattaggtacttagtttggcttctaattcgacaaagagacgttgaagagtgaaaacaatacctgcatgagctttcgaactagtgtcaacgagtatcctgtcttgattaagttatctgatattgtgcctgcaatgaagccagaaaccgccattgttccccatggaacggcactaaaccatgctgcttgcttcaagttcacattaaatacctatagaagagacaaaaacaggtataactaattgttaaggacttaaattaagggtattttgcttgtaatctcatatgattaagttgagaaataacagtttcttttgtgatcatgctaattgtaggaatggtttacttacagtcttaaagtagacaggcatccatgagagaagaacaaagtatccctgcagtacagaccattgataagcaaagcttcatacataagctgtcatttcagccattcattaccggagaaaaaactcacccaattgttggttacattagcaaaaataattgcccatgtcggtaactttgatagtagaaggcgcagaggtgggaatttgtcattttttactggagaatcagttttgcctgcttggattaaaagaagctctgatttgctgatataagagctatctttagggtcatttgatacctttaacgcccatatcatcaaccagactaacccaaacgacgagaagagaatgaatggacccgacatccccattgatgacagcattattggagtaagtaggaaccctgcaacattgccaagatgaaatccagccatagatagtccaactgcactcgctctttcttgcgttggaaaccacctatacaaaaatcaccaattaacacttttcacttcttgaaagaatcg

SEQ ID NO: 20455 - DNA, 2701 bp, Cannabis sativa
atgggcaaaaaggttcatccacaacaaaacaataatgatctcagtcagtatatcatttacactaaaacaaagtaagatattgttttttaaaaaagtaaatcaacagttgctataaaatcctactactgctacttctatcaacacacacacaaacaatttgattaactaacaatggctatctcattttatttccttctgttcacctatcttttcttctccaatattattactccctccatagccaaaccacctgtcttcaaaccccaagctgtgcttatcccagtaatcaaagatgcttccaccaaacaatacatagcaaaaataaaccaaagaacacctctagtcccactcaaactcaccatagatctcggaggtgatatccttatgatcagctgccaaaagggctatgtctcttcaacctacaagccatcgagatgcggctctgcgccgtgcaatcgcgctggccaaatctcgacgagctgtaatgattgtgtggagggaccaaaaccaggctgcaacaacaacacctgcagtgtctccccttacaaccctttcacccttagaagcagtggtggtgaattagcacaagacatcatagcaatccattccacaaatggacacaatgtagggactaaggtattcatcccaaacattgttttttgctgtggcaacaccttcctcttagaaggcttagcttcaggagtgacaggcattgcaggccttggatggagaaacataactctcccttatcaattttcctcttctctcaaatttcaaaccaaattcgccttatgtttaagctcttccaacggtgtggtgttgttcggcaatgtgtctcacaatttcatctacacacctctcattcgtaacaagtttaaattcacaacaaatgttgttgacttgtctcctgattatttcattggagtaaagtccatcaagatcaacaataaggctcttaagttaaacactacgttgttttccattagtgcaaaagatggaacaggtggaacaaagattagtacttctcagccttatacaacattggaaacttccatatacaaagctgttgttggtgaaattagcaaagcattggctgaagttccaagagtgaaggctgtggcgccattcagcctttgttttaactcgacaagcatcggtatcacccgaacagggcctgcagtccctcacattgatttggtgttgcagaacaacaatgtgtggacaatttttggtgccaactcgatggttaaggttagaaatggtgtgttgtgtcttggatttgttgatggtggtaaactttacttccaagattttgatattccatactctcccactgctattataattggaggacatcaaattgaggacaatcttcttgagtttgatttagttgcttcaaggcttggtttcacctcatctcttctttttagccaaacaacttgttcatctaaatttaactttacttctaataatgcttatgttgagtaatagtacttttgaatcaagcctcagtcattggttatagttttcataatctttgcactgagtgctaaatttggtccattaaattttctttttctccactacacttgactttctagtctctagttttataagatggaactactatcttgttttagctatgtaaattttcatttaattaataccgcaaatgacaatgtatgcatgacttggtgttaacgctaatttttgttgaccaataaaagagcctaaatttaataaatatatttccagaattatgagaaatattaaacaagaagacttttacgtaattttgaagttaattcttcataattcataagtctattttattattgggatttgatgaatttagagagtacaaatataatgttttgtatattcacttaggattcaaaatttggtcgtctcttaatttgggaattcttcccctatttataagtgtttgggggtgacaattatttgctactaatcttatctttataactgttcatgaaacatgaataatctctacgtttcatatttacagcacatagataaaagaaaaataattgctataaactgcttttgtctttatccaaaacagttctgttgactaaatttcatcgtgacgtggtattgcatcctactctatgcttcgcagtatacactgtaaagaaaatgactttgacgaactctctttgaccttcttctcacgttagtcgcttataacaaagcctttatataatctttatagagacttatgataagcttttcaaattgtatctcttgtgctccttaggctagagagcttttatattagctcgtctatcacatgaatcatcttgtctcgctctatgcctcccaagatgaacttgtattgttagttgtttatctcgctggttttacaaaatggtagttgatatttatgactcgttgtaatgccctactagattatgtgtgttatcgtgattttatattaattgtgcaatccgttgttaatcaacgggtttcttaaaaatcgtgattattaaaattttatttaattactaataaattgaaaaagcccatacaaaattaaataaattaaataaagtagacctaaaaaaaattttaataacaattacactcccaatgaaaattttgggtccatcaatgctattatctattctttatgtagtataaaagttgatgtttataataggatttttttttttttttt

SEQ ID NO: 20456 - DNA, 3256 bp, Cannabis sativa
aaaaaaaaattatttttatatcattaatttgacatacaatttagttacctctaaaacttatttgtaaatatctcaatacttaattagttatttttaagttatatcatattatcttattatttaaaatacatttaaataactttaaagtttattttcaaaactaataaattaccctgtaatataataaaataaactactatttttatatatttatatacattttgttacttcgaataagcaaccctctttggtttgaagccatattcatgtcgtggagactttgttgccattgctgatctctatttggtaggtataatgaacgggctctcatggatttatttctcttgaatcatatttatttggtctcttctggtagtgatttttgagaagctatctcttttgctatttcacctccatgttcatcattggttgccggttgctcatgtctgtcgtcactttcactcttgcagaatctcatccctaaaatcaggctcattgtgatctttcttccaccatcagttgaatcctattatttttttctctaatgtgatgaatattggaagtaaagtgattatatacttgtgttcatcatctcaaatcttataattaatggggaattttacaattggaggtacagatttaggagacactcccacagatttagtcactagtgtggatgggatggttaccatctatatttttgatgaatcacttttcttgttacttttaatgttttattatttcaaagtatataacaactatgtgtgtatttctaagagtaaaaatttattttcatacatggtttgcttattcagcttccttatcatcaattgtaattttgttattttataagggtgtctaaactaaatatcaaaatgtaatgacctttttcttctcattttaagcaaagtttgcaacttatcctagacaacaagctgctttaacaataagggtttttgaaaagcagaatgaacatcaaaatttgatatcattgcccaatagcatggaagctgaagcaccgaattctaaaaatagtgcacaagatgaaaccatgtttgtagcagttgaagtaccaaactcataataaaatgtagcagatgaaagcatgtccgttgttatagcagctgaagtaccaaaaacaagagtacattgtttttggaactgattctatttggtttatttattttttttttttaattataatcactttttgagttattgggtgttatttaattttagttattttattgtggaattagttctactttaatttaatttatgtctcagctgattttttatttaatcatttcataaaacagttcttgaattattaattttagaaattgatttttgatttaattaattcaaagaattagttttataatttagttaattggagaacagatttttaatttaattaattcaaggaactaattatttatttattgattttgtttaagtggttgttatgtgtaatttttaatcttagttgctttacgaaatcaatttttttgtctcgaatttttaactagttgataaataatgagtttctttatcaaattaattaatatcttttttttttattaattctcatattttaaattttaattattttttgttttcatatttttttattatttatttctactttattattttttttctatatttacgaaaaaaaaccctttaacactattgaaaattcaagtatcacaatctaaacaaggacatgttaataatgaaacaaaaagaaatggtaatttgtctctactcataagaattaatttgtgaacaaatgcgcacgagctaacatttaaatttgattagctcaaaacaaaactaatttaatctcaagcaaagattatacaagaatgttctgatcatttcaaaagatgtcaaggacctcaaggatcgtacggttacaaatggggcatgatccacggttgatcaacatctcccgggagcaaactctacaaaacgtgtgtccacagggaataaaagccgcgcctttacttctttccatgcacacgcagcacacccaatcaatatcttcaccagtcccatttccatttccatttccacgcttgttgttgttgctgtggtccctctctttcttcctcctgctgctccaatccacaccgtccgtttcttcaatcaacgtcatcagcgatttcacctgcccagccacgcttctgggacccaccacttcctctcctcctcctcctgcagcccgagaattgcgctcagccgctaatgccatcgccaggttcatgccagctggcaccgaccccaccaccaccgaaactggctcgtcctcatcatgattatgatgatggtggtagccgtggtgttcttcttcttcttcttcttcatcttcttgaagagtttccatgatagttaaagtagaagatgttgggctccacgtggcaccacagcagcccacaaatcctagccgttgcttaatcctcctccatcttctgcttcgatctctgccaccgttcatttctcttcttccaattctgcactattaaaagtgtcatcatttcagtcacaaactctacatagttctttcttgaaaaatgaataaacccagaaattggttttggaagaaaccaagaaaatcagtatataataagatcaagatcagcttgatcatatatatatatagaactctagtagataaattgtaagattgagtgagtagagataaagtttcacctggaagttatagtctatgatcttcaagttcaagtactggctctgatgaagatggagataagtaaaaatggaggttttgtgttcgaaatggaatgaaaacaaaatccaataataatgaaggaaagaaagtctaagaatgaagagtcattttcttcatgttaaggcaaatgaagtcaatgagtgacagagtaataaggacttaaggagtagtggtaatgtttttaacccaaaccaaaccaaacttttcaagaaaattacaaagacccaaggctaaatataatcgtgatagtaacagttcttcaaaacttttaacttttcttaagtatgtgccaaactctcaaaatatccaaaaacatgacgtggggccctctttattttttttattaaatggaatttccttaatttgaggtctgcttaacatatgagtttttattcacagtcaacatttaatttattttcttcacaaaatttactgttaacatattatgcatgaatatggcatggttttctaattaatcggttaacatatttatttttt

SEQ ID NO: 20457 - DNA, 4116 bp, Cannabis sativa
agttgaaagttggtttaagtttggcattttcaacttagataaggatattctctcaaaaaaaaactatagataaggatataatataaagagaaaaataatatattttcagaaaataaaatagaaagtgtaaattaatgtaccattaaatgtgtgaaagatgaaagctttttttttttttttcattaacaaatttatgagacttgtataagctcttttctctctagttgagagtgttggaagtccaacttgactcaatgtcaacctttttgtcttgaaccttgaaaatcaacaacattctaaacccttagctttattctcatcttttcactttgcacgaccgatactgtttactctacagtattttcatttattagctcttggtgagatgggagacaacatggaagattcacgtgcacaacaaggagcggaaggagattctcttgggacccctgagaatgtaatgaatattgatggttcccacccacctccccattcctctgtcagtattaatgatctaaataatggtgagagggggaaggaaaagatagacaaccaggcatctaaagattcgactaaaggagaagggctggtgggacagtcacagaatactgggaatggccaaccctctgatgtggaagtcctacgatcaaattttctcgagtccatgactttagacctcgaacaagatttcgacctaacagcagagcttgtaagtacaggggttctcgtacgtttcttggataacaaaggagtatctaaatcgagacttaaggaaatcctgaaccagatatggaaactcaaggggcattggaagttcaaaaccatgaaaccaggcatatggggaattttctttgacaaacaggaagattgtacagcagttctacgaaataggccttggataatcaatgggaaacttctcattattagagagtggccagaagatggtgattggtacaatgtgaatatgcgaaatgcggttttctgggttcttgctttcggtcttcccacaccgtatcttaatgcggtcaatatccgaaccattgccgcgaaagcagggaggtttatccagagcgaccttgcaaacaacaaaacagtggtcagacggggatttctcaaattccaggttgagattgatacctccttccaattaatctctggtttctttttggatatcaagagggggagaaaggaatggatacaattccgttatctaaaactcccgaagctatgttacaactgcgggtatctcggccacgacaagaaagcatgttttcgacctacttaccttgcatacccccctctgggtgcagcggttccagcttatggaccgtggattaaggcggaatcggcggtgtttagttgctttaacactcgaaaccaattggaatatttcagagcggaagctaatcggactcctcttccgaccagaccttctccggtgcctgaatcaaggagaaaggacaaaggaaagggacatgtcgatgaaagcctcagagaaccagaattgcagtcgacagtcagcaacaaactaagaaggaaagtcatcagggtgaaaggaaataattcaggtgctactattggaaaaaatttgaaaatagtagaggtgggaaccaattgcccaaaggatttagacaagctgcgcatgccttctgactatcaagctgttaagagtcgattgagagggagacaagctcgttcagtttctccaagggctttgcgatttcacaaacaacgtaataccagtacaatttctgaaaatgacattataaacaatttttcttcaagacctcctcccaaccctgctgataatggaattctcaccactataatggcccaaactgggccctcttatgagcaaatgatagaaaaagcccatgttgaagtgtgtagctctaggcaaccccacaaacaccctgagcccactcatttcccttggcccacttatgctgaagagattgggttagctgaggaattaatgggcccagctcaagttgataagtttgaacctatgcccactttgttccatgacccacatgatgtaactgaacttattcatccatgcccacaacaaagaaaacgtaaagccagtttgactttagtccccttcattcaacataccccagaaaatacaattgaattctctcaagagttacccgaactccctagcttttcacaatctttagataccccgttcaaaatgggatcaggtggatcctcttcctctgtgaaaaatgataaaagaaggagaaaaagttctagattgaagtcgacccctgcttcgagaaggccaaagcagaattcgacaccgaaagagggcgagtcacatagaaatttgatcgactctttgaatctcattgaagtgcaagtggagagtactcaaaattttgtttcgggccaggaggcggcccttatcaagccccctccagccccatgaagtgcctatcgtggaactgtcggggcctcgctagggacccgacagcccaagccttaaaggtttgggtgagaaaatacaatgtagattgtatttttctaatggagacgaaagtttgtaaggaaaagatggagaatttggggcgtgccctgggtttttcaggatgcgtttgtataggttcacaagggttggcgggtggttcttgcttattgtggaatagcaacatcaacctgcatataaattttgcgactgaagggtactatgaagctacggtgtgggactctaactctcagtttcagtggaagttggtggcagtttatgggactccttatgctagagaaaaagaacttttttggaactgtttggaggcagaaatcaacctattccagttaccatgggtggtaataggtgacttgaactgcattgggagcaaggaagaaaatattggaggctctaaagtgacaatgtctgacttgagatggttgagaaattttcaggacaatacgggttgtgtggatcttcgttatattggaaacaaatttacttggcagaacaagagatttaatggggggttaattagagaaaggttggatagagctttgtgctctggagattggatgaataactatgaatttttgggagttcttaatcttcctatttccatatcggaccatgcacctattatattggatacacatttgtttgctgccaaagggtttatcccttttcgattctttgaagcttggacgtgggaaagctcttgtagggaggaagttgtcaaagcttggaactaccagagtaatgaagcctcaaaggccttggttaggaatgtcagtaacacaagaaaggccctccaagtttggaagaaaaagcttcaaggagtctctgagaaagaaatcaaaggaatggagagaagacttgaatggatacaacaacagcctatctctgccgatttacaaaaggaagaggcactgattcaagatcaattgattatctcttggtctaaacaagaaagtatgtggaggcaaaggtcaagggaaacttggctagctctaggagatcggaacactaaattctttcacacatcgaccaacttaagaagaagaaggaatagtatctggtctattaaagataaagatggaagaatatggaaggataagaagaatattgctagggtcattaatctccactttactgacctctatactactactactccgatccttgacgatgagttggaaaagttagaggtaaagtgcatttctccatcacagaacgaagttctggttcacattcctactgtcgaagagattaaaaaggcagtttttagtctccatcctctcaaagctccgggcccggatggtttctcggggtgtttcttcagaaaatattgggacatagttggcccgtgcctctgtgctactgtccaggaagcttttctttcagggaatattgatccaaggattaacaatacatttgtctgtcttattcctaaagtagagtttgcgatgggagtagagcagtatcgcccgatcagcttatgcaatttttcctacaagattattgctaagatcctgtcgaataggatgagacatctcatggaagaattggtctccccgttccaatcggctttcattcccggtagatggattgccgagtcctctatcctcactcaagaactaatc

SEQ ID NO: 20458 - DNA, 1711 bp, Cannabis sativa
aggccgtttgttccacatttcacaatataatacaagggacaatggcatgagcagattttcttcattataaaagggagtttggtgtatttacaatattgaattataaaaccctctgttattcaaaaaaatgcttataaaatctctaacaattcacatttaagctgcaggatgagttaccgctgtacatgaatcatactccaaaaaaagggaaaagaacaatctgttttggtgtgttagggtggcctgagtgtgcttttaggagcacttatccaaggtgtaccagcaatagcaaatctccacagtgcatttacatgttctggtaaagcataatcgatgccaacacgcgggccgaccaaaatcttttcaggctccggaccatccaaaatttccaatccacctggccaaaaaccaacagtgaagagatcaaaccgaatagcttatttgagaactcatagttgtactcattcagtaagttggtaatgtcatatttggttaaaaacataccagcattgaagagtggatggttggaccattctgttgaaaggcccagtgcttgcccaacctaaagataaagatcatcagtcacatgttcataaagaacacattatagtttccaattcaaacacaatgatctatgaaagaagacagaagatgacacacaaacctttccgggtccactaagaagaacaggcttatcagtcttctgacctcgacgctgctgaataatctcgattcctgcaatcaaatcatcatggcataatgataaactctcttttttgaagataatcccttttaacaattcatccaagcttatatgaaatgcccacaaaaaggaacatattgctgccaattacaagaacaatttcattttgctaaattcactttccaatattgtcattttgacaaactcgaaattttatttctcccactggaattggagaatgagcaggattacttaccagaaattggagcacaagaacgaatcaaaacagcagctccaacaccttccttgtcagctacaacattgagcattgaatgaagaccataacaaagatagacataggcatgtccacctgctccaaactgtcaccattgtacagtgtatattctcaattgggtcactcactatatcaaaatcaacttcaaaatattttaaccttttcttttcaaatgttaattaagtaaaacaaattcaaatcttacaacaggagctgttcttgctgtaatgccaaatcgaccatggcaagctgaatcattgggtctataagcttctacctgaaatagataaataaataatgagtcaaacagacccacattaattcacacttgctaagataactgaattaattattttgaaacaagcagagaaatgagaaaacaggagacgacctcggtgatctgaagaatgacttcatctctcttgagaaattttccgagcaatcgtggggcaaggtctagggaatcaatttggaagaaggaaaagggcaatatcggtaatttatgaagggatagctgaggtgggttggcgtcggcttctaatctctgagacgaccgaatctggtcggcggtggggatgggaatggatttcttaggtttgggtgaaactgcaactcgcttgaattgccgacttcttttcatgtcgccgatcaaaccaaaaagggagtcagtatcataccaagtaatgttcgatcaagttttttttttttttttt

SEQ ID NO: 20459 - DNA, 5048 bp, Cannabis sativa
ttgtttggacatttaccatagggcttcgggacagcttctaaatccagacaagtcggtaatgtctttctctcccaataccactttagctagccaaatattctttcatcgacatcttgcaatgccaatcagtgagtgtcatgaaaaatacttggggcttccatcttattcgggtaggaacaagcaacaactatttggagagatcaaagataaagtgtggaaattaatgaatgcttggaatgagaaaatattttcagccgggggtaaagaagtcttgctaaaagcggtggttcaatcgattccaactttcgccatgagttgtttccaacttccagttgctacatgcaatcaacttgaatcaatgatggctaatttttggtgggggaaaactgaaacgggcaataaaatccattggaaaaattggaagctgctatgcaaaaccaaatcgcatggaggtatgggatttcgttcttttgttcacttcaatcaagcacttcttgcaaagcaagcctggcgaatactcaatcacccaacatcattgctgtccaaaattctcaaaggcagatacttccctcggacatcttttttggacgcctcccatggccattcaccatcgttaacatggcagggaattctacatggccgagagcttatcagagctggtctacgttggaaagttggtgatggcaggcacattaactgtggttcggatccctggatcccaggatgttataatttcaaaccaacatattataatggacctccagcagctatagttgctgattttatttcagagaaccgtgaatggaatgtacctcttttggaaagctgtttttcaatggttgatgtggaaaaaattcttaccattcctattagctatttccagagtactgatactttgatttggcatcacaccacctctggaatttatagtgtccagtcgggttatcaccttgccactgaacttgaagaatgtatacaacctgctgctacctcctccgcacctgcccaatggaattttttctggtctttgaatcttcctcaaaaaattaaaatcttcgtttggcgggttctccaagatgcgctgcctgtagctacttctcttgtccgcaggaaagtaataacagatgctacttgctctctttgtcatcaagcttgggaatcgattggtcatgcattctttggttgtaagtatgcccgttcggtatggcgttctgcatcctacaatcttgattggacttccacttctacaatgatcaagggtgattatctcctacatctatccaacatcttcaccaaaccagaaatggaacatataatttgtgttttgtggtgtatttggactgagcgaaaccgtgtggttcatggtaacaaggccaaaccagcaagatctgttgctttatttgctgctaattacctgctgcaatttcgcacagcccagcagaaattcaggccttcatcgacaacatccacttcacatcaggagtcctcggctgcagcaagtaattcccaacacaacctggttgctcctctttctataccatggcgacctccacctcactcatccctcaagctcaacgtagatgcagctgtcgacacacagcgacatatcattggtgttggtgcagttgtgcgagactccacaggttctgttgttgctgctatgtcaaagcctcttgttggcagctttgcttcccatgaaatggaagccaaggctctcttccacagcataaattggattctacaattggaagtaccaattactcacattgaaacagatgctctcatggtttccaatgctctaactgtttcttgtaatgcaatttcttcttttaaggatttaattgtagacatttcttgccttctttcctctctccctaatgtatctatttgtcatgttaagcgtcatgctaatatggctgcccacgggttagctagatatgctttagggttggaagaagcttgcttttggatgggtattatccctcctccgatttacgatgttattgtaaacgatatcactttggttttataataacatagtatttcttctcaaaaaaaaaaaaaaactaaaattaaacttcatttaattcccaaattattataattttaattttatttttgccttgactttgtctctttcctttgtttcgcatatgctaagaagaaggtctgaactgtgtttctttgaggagccagccattgttggttcaaagaaagagtcaaaaatggggaaaaaagataagaaattgagacaccaaccgaagcattctcgaagaccagcctttaacgatgatgaagaagactatagcaataacactagtctcccttctaagctcaatctctcagaccaagaagaagaagaagacattgatagtgaagttgaagaagaagaagacgatgaaaatgatgaatacccatcaacggaaactccatcaaaattccttctttaccaacaatctgttcaggtttcaccatttctcactcattttctttgtttttttttacatgggtgtgtaaaatgtttgattattgattttgaatgaataacagtcacccaaaggagatatcagttatttgcagaagttttttcttatgtatgtgggtgggaggttacctcttcacttccaggaagatttttgtggtactgctcttctcaggtacatagcatttcatattaagagaaaaagattcttgctttgaattgatttattaagtttatgtagaaaagaactactttagcatattaaagttgttggattcaaagactttctgggcacgacgattcagtacatggacaattgctactttaggagtctattggtaaaattgaacggtgttggacggaagtccttgaatctaaattcaacggtttgaaaagttcgaggggcatgtacggaaaaataatcctaattagcatttgaagaatgtggttagagtaaccaaagctaaatccacttgtgttcttatagtactcagttgagttttgggttcatggtttgttagtgcttttgaacttgtgtgtgtttatcaattcaagctggttaagttaacaaatcatatgttgttctagtattttgatatagtcttgtatcaaagctttggaggttattttattgataatgaatgtgcttcaacttcaatcactacataatgatggggttaattttgagtttgatactttcttgaggttgctaggtcttcaatttcagtctttcatagcataagagtgttttgatgatttctgagtttgagaaaagaaacatcaccttgacaacatgttttgcattcttggtattggtttggtgttgatttaaatttgttttcggggtgaccaataggagtagctcaaggtttgaggtttgagcacctcctggtacctagatagcaatcgctatagtttcctgattcccaccgaatgttgtagggttaggcaaggattctagtttcaaaaaaagaaaaaagttttcggtgtgggacttaatcgataaagtttagggtcattgtgctatttctcagttggtatgccatctcaaccttatcatctaattactggttttgtgtttggcagtacagagtggctccgaagtgactcgagaaggactgctgtaggattggatttcgacttggaagcactaacatggtgcatggaaaacaacataaacaaaatcggggctgatatgtactctagagtgtctcttttccatggaaatgtattgaatccgaatgaggccaaattagtcgagtttgagtctcaggagcaaatgaggaacgtttcgttggaagagaaaaatgatgaagtcgaatctactgttccagagggctctacttccttggctggtggtgataagtacatggggaatgtgacacttcccgatagggacatcgtctgtgcatttaactatagctgttgttgtcttcattcacgagctgatttggtgcggtatttcaagcacgctcttgctgtgttgtctaagaaaggcgggatattcgtgatggacttgtacggtggtacttcatcggaacaaaagttaagacttcagaggaaatttgccaattttacggtatgttgaaacttgacatgtaatactgttattcggggataatttttgtctgtgaaaggattgaaaacacatcctaaaatgactttctttattaaatttgaaataacataacagaaagatcaaaagagtaaatattaaacatgaaactgtatgagtaaaaattgttgatgtaattatggtgctaacaccaaaggtggtgtcttatgagtggaattcgatattgaattgcactaataacgatgtagaaattacttcggatgttaggcctttagcatttctctataattatagtttaaattccatctttttatgtttcatttcagttgatctgatcaatcttttcaaatcatttgctgtcatgtgcagtatgtatgggagcaagcagaattcgatattctcgagcggaaaacaaggattagtctccattttcatttcaagaatcagcagaagaaactacgccacgcgttctcctacagttggaggctgtaagttagactctagtgtttgcatatgtattaagctgaatcatttcgggtttgaaagttctaaaaacataacgaaaaacttcccatttgtgtgttatgttattaggtggtcgttgcccgagatcaaagactgcttagaagaggctggatttcgatcggtccatttttggctcaggcaaatgccaaacacgggagagaacaaaagcacggttggatttggcgcaggccgagacataaaatacgaggagatgaagcacttcgaacaacaagatgcttggaatgcatacattgtaggcgttgcatagccgtcgtttatcttaaatggtcagacatgtgatttgcttacacaaaactcggaggtttcgagtcccttttggggcacttatataagcgttttaacttaaatggtcaaacatgtgatttgctctcgcaaaacttgaggttttgagtccctttcggggcacttgtataagcgttttagttttctgatcctcaaatatta

SEQ ID NO: 20460 - DNA, 3417 bp, Cannabis sativa
catttgcgtttttttaaacattggcttaaacattgtctttacattttacatatataaaaaagcatatactttctagttttcataagaacagcaattgaatcaaactcaaatttattgttttaatctgctatatatgtgtatttaagttgaaaaacatattacaacctctacaatataatcccaatctacctagtaatattaacaacagaactcaccattatgataaagttacaaatactatttcaaagacttaacattgaaaaactaatcatagaaaaacttgtgtctcatctcacaatcaatcaaaatgtaaaaagctaaaacgacattttgtcacaaaaatagagtgagtgagagaggtatacctggaactggaatagagtagtattagaatatgatattggagaattggagatagaagaaagatgaaaaattggtgcacacgcacaaaattcttgggacagtttattatgaaagtaagtggattgattattacaaactgtgttatgaaaagtgattgattaagtaatattaatggtggattaattggaatttcgaatgtcttctctcaattcttcatgtaacgagatatgaagagtatcatatacaatgattacaatctaatatttttgtcctaatttgttccaattggatttcgaaaatcattctacaattcaattcaccctacttattttttatctagattttaatttagttagtgaattttaatatatacattattatttttttcttaaaatgatttacataaaaattatatattactaatcatataagttaaatgctacataaatttatcaatattataatttttatttaataaagttcattaatattataaggtacaaaataaagaaaaaattatgatgtaaatatgtcacataaaacaatttgcattataataaataatatagttttatatttatcattttgctatttttaatattttttattaattttagttaacaagttcttttaaattaaataatttgtattattattattattaaattttatatttatctttacattattagtattaatttatattttttaataaattattaaatgaacattaaatgacatattcaattttgtagatttacaattatacattaaaacacaatagtaaaaattaatgtaaaactgtcacaaaatcactttttgtactaattatagctcaacttttacctctcccattgaagagaaccttattccaaacaattagacaatcacggctaccaagtggctcaagaaaaaaagctaaatatacaagagaataaggtgtagcatgatcctcttacaatgaaataaaataataataataaaaaaatccaaacccaaaaaatataacaataccaaatttagagaatttttttttactacccacactttgaagtaggcagcaacaattttttttccttttgattaaaaagggagtttttccaataaagaaaaaaaaaataaagaagaaaataaattttcattcaacaagaaaaaaggtagcaatcctatgagagtaaaaactcaaaccttttatccttttatataaacgcttattatttatatagttttttaaagaaaaaagtaaaaactcaaaccaacaacaaggaaacatatctgaaaagcttctagaaaactaaaaagaaacctagaaacgaaagcttcaaaaaatgattttaatgcataaaaaagtcggcaacatttagactgtctccaacaaaattcaacataaaaactaataataagatgcattttttaggttttatataattaagtggggaagagcatagtacaaaaaaatagacctccaatattaatggattataaataaataaatagatatgtaacacttttcaatatataagtatatatcttttaatgtatattgtatatataattgagttgtgtcatttttaactagattttaacaacgttattcgccatttaatttaattaaaatctaattatttaaatttaatccaatccaattatcataattgaattggattggttttagttgattactcatcttccacatactagagttgagttgttacacaattttccttgacaatgttggcttggttggcttgatttgaagaataattggagctaaaataggtagatgaaggaaatggatcaacttcttgaattagtaaactttatgttgagaaaccttagtttttacacaattaaggatgaggcttatacaagagatggattcatgtattaacattggaattattaatacttgtcatacatgtaatctttaaaaatgagttattaccttcattagttcatacgatatgaagtttggaaactgtttaagcaataaggtatttgaactagtctttttttttaaaaaaaaaaaatccacatttagacatttttaattgctcgtactcttaaattctttataagagcacttcttttttttttttatttttttattgaagcatttataaattacattacataatttgggacttaaacttaggacctcaaacacacatgcactctcttatataagagcacttcttaaatactctataagagcacttttgacccagtaattaactttttaattacttcatgcacaacattaaactttagtggtttccctaagattacttttacctgtatttgacctagcttttttttttgtgtgatattaatcaactacattttatttagatggacatttacttatttactttttttttttaatcaagtttttgatggaattctgtatgcgtattttatttttaagtgcacatgttataattattgacttattgtcctatttttttattttatttatttttatttttgatggaaagtgttattgtcctaattgattgtagaggttgggcgccaagcttagaaccccaccctcgtacccttcctcttctctgtttgtcttattatttgttgttgccaccttttacctcaaatcatcaatccatattctttccttgtctcatctcatctataatccaattcgaactaaaaactctaaaatacaaaaataaaaaacaaaaatttggagctaaaaatagaatccaatccatccatggctctttcagccttcaaatcctcatctagaagaaacaatatcacaactcctccttcttcttcttcttcaacaatccccaacaacaatggcagacgcgcccctgatatttcagccaagagacaagccgcagctcggagatccagaagcgtcagcgccttatccaggactacctccgacttctcaaacgcctccattgatttcctcaacaagagagacaaccctctattctccgccactccttcccctccggacctcgataaccccgctcccaccgactccaggccgagcaccgtctccgccgatagtcggaggggacgatc

SEQ ID NO: 20461 - DNA, 2014 bp, Cannabis sativa
cctttgtcaatttcaaaatacaagtagaattacaattaaatgctaagatcaaacttatacgacctgactgggggtaaatatcaagctttgactagctttttataggctaatgacatactacacagagtatcttgtccccatactcttgaacaaaatggtataactgagcgtaaacatagacacattgtagagagtggtctcacattgcttgctcaagcctctctacctctcgaattatgggatgaagcatataggtcaattgtttttctcattaacagaatgccaacccctcaacttggatacatttcccttttagagaaacttttccaagtcaaacatgattactcttcactcaaagtgtttggttgtctatatttcccaaatcttaggccttacaataaaaataaaatgcagtatagatccaaaccatgcacttcattagctataaagttaaaaaatgcatttctaaagatggcaggctttatatctctcgagatatgttgtttaatgaaaacatctttccctttgctgctgaagcttcatctcacatctctccattagttaccactattgctcactctcttgcatctccaccagtattgaccttcacttccccatcttccaatccaccacccttcccacctgacctaattcccacccttctaactactccaagcacctcctcccaatctgacactcttcctgcacctattgccattcatgttcaacctgtgctacatgttcgcattagtatttctcttgcagatcgtgatgttcacaggtccactactgctgctcactcagatattgctacagcaagttcaactacacatcctatgcctgcaccagcatctcaagttgttgaccaacattagtggcatctgagtctcttgttcctgaatctttaaatgctaatccaatgaaaactagatccaaatctagaattataataccaaagggtcttctgtatgagctcagattttgaaagttactgagcgacagttttttatatgttgtatattgagatttttttttcaataaaatggaacaagatctcagaattatgaaaccttatgtatttagtattatttattaaagtttaagtttaattataaaattttaattaatcacatttttttaataaattctttgattaacaaagaagcacacaatatttaaaatagcacggtagcgtgtttaaactagtagggtgttacaaccattgttgtacgagccaagtttcatcacagtgaagaagagtcaagcttctaaggtgagctctcaaggatgtagcctaagttttagggtgaaccttaccaaaattactgtgtttgatctccttacttctctgtattttacaattctagttttatgttgattgatatgcatctataatcttgaagtactttgattgttccaaaaaaaaaaaggctaatacaattgtggttcctgatcaaaatcatgatttagaatttaattacgaaattacaatcatagaattaagtgtgtgcaaatgacaatatgtttttgaatggttttcttttgttgaaagataagatcaggattgatctgtctgtgtgtctgttcactgaatttttagtcaacaaacacataatcataataaatgaaatataaattaaaaaacgaataataaatgtaaataatgataccagaatttaaagagtttgacccgaaatgtcgataatagactattccccttgtattttattaatcagagttgtaggatcaatgacagactcttgcatgtaaaagataacaatggtagagttcttttttctctaagtactcaaacttttagatctcattcccaggtcatgggtgaccccttatataagggaagggttggtgcttctcgtttcaggagacgcgaccattgcagagatatctcaaccgtatttttggttttcagaagtggttgaagtctgattcttgtgataatatcccactattttcgtgggtttgtaaccaccgttaaactttttgggagatttta

SEQ ID NO: 20462 - DNA, 4333 bp, Cannabis sativa
ggattattactctaatcttgaacctcatattttctactagctactgatttgcttgaagaagaaaatgaagacatgatttttgttgaaattcgaagacaaataaatgacacaaaagcaagaacaactccagtatatttttttttggaggatggttgcaagttgcagaaatttgagagagagaaattaaaaggtttgaaggatgaagaagaaataaggaagaagttgatgaatgaaaaagggcgccaatatatgtcaagggtattaatatttcaacaactatcattttataagacgatatgaaaaccgttaaaattttagactgaacaaaacggaagatagacttctcaacgtgatggggggatttttgccaactaaaaaagttcaggggcaagagtttacacctgtaatagttttgggggcaaaaaatcattttgtcctttttttaattatatttaaataatgaatgtgatctatttttattgtttctcattctaatattctatatccaatctattcggcacaaatgtattttttaatccaatttgatttggattgattggatcgtgtaaattcctgatgggatcatatattttttgaatatctcaagcaagcacctctcgtcaaagatcttaaagtttgaattcagaaagaaaaaaaaatcctttaatttatgaataatcaagcaactgaaatcacaaaaacagaccaaataaaaccaaaatagatgatcaatgaagaaaaaaagaggaaaagacagagagaagttaaaataaaataagagtacataatcacctcccctgaaaattacccatttgagaaaacataggaatatgatcaccagagccatcaactgttatactagaatgatcttcactaacatcttcaacatcatcaaccacactaatcgttttgttaccttgttcattaccattcaatttcttctccatagaaataaggctctgacccttaatattatcaacgtcttcaacaaccgcagcctcatgaagttgcaatgaatactccaaattccacaacacatctcccattgaaggccgatccacaccgtactccgccatgcacttctctgccgcctccacgaacttcttaagggactcgctgctgatctgtccggagatgaaagggtcaattatcgtttcaatggagccttttctatgccaatgcattgcccactcggctaaactcacttgctccctcggcaatttcgggtctataactggtctagcgcataaggcttcaaataagacaaccccaaatgagtaaacatctgatttctctgtcaactgttgtcgccgaaagtactccggatcgagatatccgaagctgcccttcacggcggtgctgacatgggtttgatccagagatggagccgtcttagaaagcccgaaatcagcaactttagcaacgaaattctcgtcgagaaggatgttcgtcgtcttaacgtcgcggtgaattatgccttgagctgctccggtgtggaggtagtgaagacccctggcggctcctatgcaaatttctaaccgttgtttccatgataattttgataaatttgagtcgtacaagtggtcccgaaatgggccattagacatgtattcgtagacgaggatcatctctgattgttcgtcgcaaaacccaattaaggaaacgaggtggcgatggcggagcttggaaagcatctcgatttcggttcggaactcgttaattccttgctctgaactcgggttgcctcgcttcacggcgagctttgtgccgtcttctaacactccgaggtagacttttccaaaccctccaactccgatcactgccttttcggtgaaactctgcgttgccacttgtaactcggcaaggctaaaaactctcccgaataatactgtagacggagatatgtagcttgagtagccacttttgctccggcgagagccgaataggctcaacgtggatcggttagtactacttctggagtaactggattggagaggtaaaagccatgacgaaaagctctttcgtttctcccaacctttaggctttttcttccagctgacgcaagccacgcataacaataccatagctgtcagtgacattgccaaccctgccgcggcaaagattttcatggccttttgtcctgaaggccctttgtacttcccactaactgtaaacaaaccatccaagctattagcagaattgctcatcttcataatctctagcccattaagaatagcatctctaatcccggaatgaaaattcgaattacaccccacttgaaccataatcttgttattagtaatgttcatcgaatggagaacaaaatctttgtaataagctgttgacagagctcctgtaagggtggaaaggtcaacactttccatggccataatctcattgatgtaaacattgaaaaacagagtattaagagctgcgctcacaatatcgcaaaaatggagtctgatcaagtaagaatatccctgatcgacattaaaaatccagctgaggttgaaatttggttccatggtaagtgggtcttgcatttcttgagccgaggcataaaccaagcttggagcaatcaatggagtcaggcctttacttttctggtactccacagtttcgggaggaactgaaacgttcctcgacccctctttgaacttattgaaagttgcatccgtttcccaaacccggtaaagggtgtcgttttccgagaccaacgtaggccctccaacgttcaaacggtaagaaacacggagcgcgtgaccccatgcgccggtgacgctctgcccaggtggataaacggcaggcacagagtccgaaataagagtgtttggagcagagactaactctatggcgttgacgaaggcgaccgtcttcttcttgggcttgaagacgagggagaatctgtctccggtgatgttgacaagaaactcccggaaagcaaaggtggtcgccgaaaaattctcgagtagtacgtagttgccggcggagactttgaaaatggcagcggttaggttatgagtcgggtcgggaacagggtagaagtagaggcggatccagtgaggaccaggttgggagatgtggaagctgtaggtagattcatgagagaagatacgaacagttgcatataaaggcagagacgaaggaggtacaatgctaccattaatggaggaagaagaaaataaagaagcagcagctttggctgagttggctatggcggaaaactcaaccgaagcctggacttcatcttcggcagataagagagaagcagcatccctctcggacttaaaattccggccgtcggagagccgagtttgctccgacgagccacagtcgatgagataattatcaggtggtgagaacgtggacgaagaagttgtgtttgggaagtggaaaaggaaaataatgaggaaaatggaaaaggaataagttggtgggggtaattttgatttgggatgttttctccatgtggcctttcttgcttccaagtaaagctccattgtcgtgagcttggggtgtttatggtgaatacattaatggcggagtagtagcaagggtggtgatgctactagtgatgaacatgggaattattattattattattattattattttgggtgatctgtttggagggagggaaagttggagagaaactgaaaatgtggggttttccgggaatttgtacgcacagaaatggttgagttaggaaaaataaagaattatggcaaatgttagttgggagcacgtacgggaaagggaaatacgtggagggatgtatcatactttgttgtgattaatgttaattatccattacgattaagaagaaaattgaacttttctcaaaaaaaaaaaaaaaaattgaaaccagaattaatttgtttttatatatttttaggacagcaccttacaaaatatataatatatatttaggacagcgaatgaggcgttgctccataaaaatcaacaatcttgtaacaaaaacaatataaaaacttgtgcttgtacaaatttttgcaaacaaatacaaaaccttaatatgtctatagcgttagattctccctttggatttaatttttgataatattagacagttatgtaaacattttgatgctgtgagttttttttttttttttttttgcccagaactactaatttagtagttaatatactcttgccaaatttgcttcacatttactgcaaatactgtggtagtctgattatccaaattgtatttgtgaaatcttatttattatcttcagctctcaactccttagttgctctttgcagtttgcacttcgatggtgttttctaaagctattttctcaaaaaaaaa

SEQ ID NO: 20463 - DNA, 3159 bp, Cannabis sativa
  modified_base (3127)..(3132): a, c, t, g, unknown or other
ttttgaataattttttttttaaaaaaaactcacccaataatttctcataaaccaagaattcggttatatagccacactttatatagaatagatatagatatttgtagactatctttttactttaaaaaagtagctcaaatatagaacgtttaatgaaataaaatcatatatttatgagttgttgaatctagtcgtatattaatcttgtttcgtcaatttgttgaaaatttgatcaggtatcaattggagaaaaatgaaatataagtttcttttactataaaaggaaacttgctcttattgctcacaattctgtaggtgcatatgagaacttatcaatacaagaagtatctgggatcaacgaatacaaagaacttaaaaacttgtaaaagttacaagatttaagagtgaaggcctttatttatagagataggattacaaagagagtagaaccaaaaaacaaagtactgttaacaagaatagtttatagttataacagaatgctaattgaaaacactaactaataactacttgagtgtatcagggcagaacagaaaatttctggacgaattaaagatttcttttaagaaaatttcctatgagttgtggacacgtgtattcgtgtatgagctgtccgatatgagtatatcatctataaatactcatattggctactacgttatgtcatctctttgtatttaattctatattttgtaagaaataatggctttattttgtagcggagagtgagttttactctaccttagtgtatatgtctttgttattgttttgagtctgtaattaagtcaacaaagaagaagaaaaaaagtgaaaaccttcaggaaaaggttagcttttgggagaaaatgtttgaactcttgcctcgggaggaagcaactactctttaaatagatcgaatggagttcgaatacttgaactttcatcaaagggtcatttgtgaaggtagaatacatcaagcttaccacatataattagaggaagcctatttatgcataagttaaatactttgtatttttgagatcttactaacgagtcttatctctaagcgtgaccccatggacaagtaataatatgtaaggattattgatgccacgtataaaaatttatgtgtttttatttttttgcacttttactctttgctagctttttattctgaagttacatagtcatgttctgtcgttacaaaatatcttttgagtacatttattattctgcatttaattaatgactaattaaataataaattagtaatattattcaattggtatcagagcagatcactaaatttttattgagatcttaagattattttattctatttactttgttttgtgtgagatgtcgttctttgtagaagaaagttctgtcactcgcccacctttgttgaatgacacaaattatctttattggaagatcagaatgagagcatttattagatcaggagatgaaaagacctgtagggttatacttttgggttgatcatcacctactgaagaggacgataaaggtcattctaaggtaaagcctgaaattaagtggactattaaagatgaaaaattatctcattttaataataaagtttttcgtgcaatcttcaatggtgttggtgaatattttattaaattgatgttatcttgtgaatctacaaaagaggtgtgaaaaatctttcaaacttaatttgaaggtaccgttgatctaaagagatcacgttttaccatgttacaaactagatttgataaattaagaatgtcagaaactgaaacattattagaattctataaaagattgtctactattgctaatgaattctttgctttgggaaaaaaaaagatgaattagtgttggtatttcaaaaaattatttgtgtgcctccagataggtttgacacaaatttttttgctgttcattttatttttgacatatttaattgaaaaatattttataatttatttatatatatttggttgagttgtatagactttccttatatatatttttaattgattttattattaaaagaatacatgtggactagcttttctattttaagaaagtaggtcaaatatagtatttttttaatgaaataaaatcatatatttgttgaagatttgatcaggtattaagtggaaaaaattaaaatggaagtttcttttgttagagttttatgttctaaataatttttttttaatataatcttatttactaacaaataaaagattaaaaattattttaaattacttggttcacataattacttccatgattatatatttaatagtttaccaagatttttggcaactgattataataaagtgaaagctaagaaagtaaattcaaaataaagaagtggagataataatttttatgtggttggagcgttgaagagccttggtcacgagtcagttgtattgggctaaatagcctggaatgtattacacaagtattcttagaatggcttaactaccctagacgttggctatattttttcaatgaaaatcttacaatcatttgcatgagggtataataatgtatttatagactatgatccaggtatgggtatacccatgatccactagagtttgcattaaaatcgacccactaatggagtaaatacacttaatacaatgactttggacccaagaaataaggcccaatccgtgtggtttgatctactgtatgtatggggaccattttatgttgacagaaggcatgcatgcactatttttgtacactgttgtattaggtggccatcggaccgagggtatcttccccttggtggtacatgcaatccttcagtttgacgcaaaggacaaggccctaatcttttaggatttagtgtcaaaggattgacacatcaataggggcttttagtgtgcctcttaggtttcccttccaaatgtatcccttccgctcatctagaatgctatcagagaaccttctttgtcttgggtgagatgcccttccagattcggagaggttcggatcaaaatatgaatgattttccatttgaatagatatgactccagttctcttgatagatttatcccatgaactttatgttggatatattttactaggatctagatactaacaagtatgtttcattaannnnnnaatatgaattctaaaacaatgacataa

SEQ ID NO: 20464 - DNA, 2321 bp, Cannabis sativa
ctgccaccatctaatgcaactcagaaggtggcctctaccccagcgccccaaacaatcaataggctcgaaccatctctgccacctagttttacaaaagcactgccgccatctaatgcaaatcctctacctcccgttgatcaaatacatgcaccagccactccaccaacaactcctcaagaaaaagcaccagttacgaagcctcctgtctcagtaccagtaatgttaactcctccaccactttctcaaggtcatgcacccactgttccaccaactgcttctcaaagaaagaaaccggtgattgaggctcctatttcactgccagttgctccaggtagatgatctatttggaatttaggggtgtacggggtgcacatagtttttatgtttttttaatctagtgtatttttcagctgaacaattattttgaatggctgctttcgttgttccagttccagttgcaactccttcaatgaatataccacatgtttctccagctttccagccaagtatacctgcaacttcgccaataaatataccacatgtttctccagctttccagccaagtatacctgcaacttcgccagtaaataacacccgaagaaattccactgataataagggtcctatatcttctactactccaggtacatgattactggattttctctttgacatactaaatgacaagtagattaattctctttcctgcgagtacatcattaagaaaaacttggacaagatcagtgggtcacttgtgcttcttaattcatataatattttaaaataaaggcaaacatcaccattttacttgacaatattgattcttgttttcttgcagtcaccaatcacgcagttccagcagtatctccaacaagtcaagcgccacagagttcacctttcatccatccagctacacctagaggatctccatctactgttattcctggtaactttagttttttgctcaaaagaaacatggttttaagttcatatcccacatgccagtcaaaatggttaagaatgtttgctgttagattgtggttgttcctcagaaccatcttcggtttatatacctctatcttctgcattgaggtgagaacccacgactgaaggaaactcacaaatgtgaaagaccttacattttttatgtattgagatgtggtccagcaatacatatctgggctttaatagaagacatatggttattgtggaatagttatggtaattagttctttctgtgggtaggacaagtaaattcgtggatgccatcaaattgaacgactactccattttcttaaagggcatgttgattcattacttctctataatatagctactatctaacattatttcccttgtgattgcagaccatgaagtctctcctgcttcatctcctcccaggagcattgaatggaaaaagaagggaattcctgcttctgcgcctttatttgaaaagcctaaggcagtaccacctgtggaccatatcacagctaacggtatactgaaacctcagtttttgctgtttcgtaaactgtccaacttgaaatgatgttatgaaagttgctttaccactgctcacattaattgtaggtccttcaaaacacaaatctgtgcgacattcttatgttgctcctgcaccatctacatggcatcccaatcctcctaataaaggagatactcctgtctcatcaccttcagccccattttatgagcatcatcattcaaggaacaaaatcaccaatcctgctccagcatcatcatatcctgtttctcctcctcctatacaacatggtgagttcatacatttcctaaattattttcttctccatgcacagcccactcacccatcttgagagaaaacatatttaagaaatatataattccttttatcctactctccccttagttgggtgttatttaatctgtttttaatgcaatggcctaaacgtggagtcccaattctaacaccttcctgtggcaggtttttcaggttcaccatctgatactcgtttccctccaccattgagctatattccacctgcacctgctccatcccagaaagctgcatcgggcaacaccaatagtaagaaggccatgttgtatctcttttgttttctcaaaatgttgttttggaatcactcactatatatttcatttatatcaacagctcaacaaatgattctctttttcacttatacatacatacatgtgcccttttcttctcacagaattgtttccatctaagcctccatcagaaagtccaaaggtttcacttgcaccaccaccaaaggtttcacgtttaccgccaccaaaggtttcac

SEQ ID NO: 20465 - DNA, 5368 bp, Cannabis sativa
agtgctctacactattagaattaggaaaatctaacaatggcacctgcttgttttcttgagcacgtctttagtggtcaaaaactattcttgtcgatagaatcacatttgccaaaggcaatttcttgcttaattcattcaacaaccaaaacaagttcttatatgagagtatttatactcaaaaacaaaagccaaaatggctaacataaattagttacaattcttccaaatcactttatgagccaactgcaaatcaaagtctttgagctagtacttgttgctttcgctagtcgttcacagattgtaatgttgttgctaaaatggccaaccacatcaccatggccttattgaacaaactcaactcaggaagtgggaagcagtcaatagttgtgtttttggtttgaacagtgagacatgaaaggtactgacttcctaaacgctgttattggttattagtggcgagaattcgttaatattatttatatttttattttcatctgttaatattatttaagttgggtctggtatgaagtcgggatcgaagcctagttcgggttcaggtctagggcctagttcggtccggggaccaagtctagtccgatccgaggctcgattccaatctggctcggagtccaggtcggggtttaggaccagggtcaaaattcgggttccaaagtctaagttagggtaagagtctgaaatatcgattaaaaagaaaaagaaaaatcaaaaagaattaaaaataatttttttttttcaaaatttgattcttaaggaaaaaattgaaaagtgaaaacagttttatagaacataatttttaaaaatattattacttttctaattttaaaaaaaataattaaaaaagtgttagtacacacgctaagttaatttattgtatcaaatttaaatagtaaactttaaactttttgttatatattagatattaaatattaatttttgttagaaaaatatatttattattatgcttttttgtggttgaattatttattattatgttatgtagtagtggtattctataggaagtggcataatagtagtgtagtagtggaaaatgagtttgctaattgttagttcaaagcctacttcagcatcactctgttagtggggtgcagtttgtttttcggaaagcgaatgtagttgctcatgtattagccaattatgctttaacaaacaaagttagtgctatgtggattgaagtttctcccccttgtgctcattacgagattgagagtgacttgctatttccttgtaatcgtttaattgtttaatgaattgtccgttcctcaaaaaaaaaaaaaattgttagttatcctatttcttaggatttatctcttggttattagctctatataaagagcaaggtattgtactgaagcggtgggaaaaaaaaatacaataaagtactattagtctcttgtatcctaggtagtgtgttatatatacataaactatttaacaattttgttttatgaaagttaaaattaaattataataagaaagtatatatcacaattagttaatggtgatgaaaagaaaaattaatctaaagtaaccaatttaatttgtatttttacagattgtaattaaaatctatgatcaatagtacagattcataattttgtatcctataaattggacacaatataaaaaaatcttttgaaaacacatccatccggggagagtgatcgagggacatggacataaagatctttacgagacaaacaacaaaattcatttttgctagctaagtgaaaaaagacactactatcatactattattagtataattaagtatcagatctcataaaatttttaaaaaataactttcaacaaaacctgctgtaaatattttatttttttaagaaatgttcaggattttgtttgtacttagattttctttttaatcaataacttagaaagtaagtaaaccataaaagtaagaacacagaagaagtcatactcagaatgtaccaggtttcaattaaaaataagagatggtaaattatgaccatcataatcatctcagttagcattagcaacatgagaaccctaactcttaaagactgcacattaaacaatcaacaaaggagtaattaataagtcatcccattaaagtgaaaaaaaaaatgataaacaattacagttgaaaggaataaaaattccaagagaaaatctgtgcacagctcaatatagccttccatcaaaccacacagcacatcatctgcaaattagtcatttagctgcaatttatggagaaaaagatcatcagtgagttttcaaagcttcttttgtttcagtttggtatattatcaatcatgtaaactttttaaacaattaaatggacaagtctgaagccccagacataaatttgttcaaatgaagagaacaaacctttttttttaagtttctgtctttgtcaattcactacatttttcatgaacccattctaatattagactgattagttacaactattaggtaaggattaagccttcaaagcaataattaatagcacacatacataaagttaatgaattcgaagttgttgacttcaaacattttgagtgaatagccagtgactaaagccatatccgaactaggccaacaacatacaattccaaatctacacacaaagttgtaagatgcaatatctgaaaactgttgtcctagtactaaaaacctttatattatgttttagattagcatcaaaagaggtttgcaatctataagaaacctaagaatcaatcccatgtgcttaaataagtacagaataactcctggcctctttacaataagtacatatgacatcaagatgtatgcaatatctataacctcattcacacgatccacagaatacccatctcaatgcatctgcaattcttcaactgtttaacccaagacacaaagatccatactaaaaaaggtgatgaaattcataaaatatataatcagtgtatgactatgcagtaagcaattatgcattgtagatgatcaacatgtttccaatacaatggacatctattattgagctgatcaatcaagttatacaactggtcaaacaactgtcagaaaaaatctacagcaaagcaacaattgttgttaagcaattaaaaaaaaagactttgggttggcatggtatggtattggcattgctaaaactaaagaggtgaccagaatggcacattctccgattaaaatagtgttcatagttagcaccaaccaatgtaaccaaagcaatcaccaaagaaagactttcctacttctacttcaccaatgtaggaaaatacaagaaccttcctatcattgtcttgagaccaaaaaaagtacaacagaaaggtaggtaaggagacgtggaacacaaccagaaagcaatccatgtattgcttcttattcagtgatttctatcattaattgccacattgttccaaacctcaatacccaattcaaaacaaaaggaaagaaatacaaatggaatggaaaaccaagtgtagttccacttctacacagtcctcctaatttactcacccacaattgacaagaaaattgctaaaaggcactactctagcaccctcctcggtgtcatactgctattagtgtaattaagtattggatttcatataacttatgaaaatagcttttaaagaatatcgctaaccaatcttgaagtgccacttatagaagctgttgggcactggtaacatgattggaaatataaacacaaaatacacacatacctaaaatccactacattgtctcaaactcaaacccaatataatcaaatacatacatacctctggccatcaagattgccctgaccactgctccctccgctgccataggatccatcatcagcagcactctgccacactgattgccacgcctgagacggaggttggccatacacaccactggggtccacagccggtcgaccaatcatcatcccacctggagcaccggccggctgacccatcggaggataatagtaaggtacgccactggccgtagtcccaaccatcccacccaatgcagcctcttccttgatctcatctctaggcacaatatcaaccaagaaatcaaagatatcagtcctggtaatggccgcggcgatgtcgttcttctgaagggtccggcgcttgttctcctcggcgtgaagccacgacctgattgtgagttcgaggatgaaaagctcgcatgccttagcaaacaagatgggtgcctcggcagatatcatccgtacatcttcgtcggccttcatgatcttcttgatgcgagcgagaggaagctggtggttcttgaaatcattgacttgttcgatctcttggcgctggtacgtccagaacatctggagatgttgctgctgttgttgaaggaggtggtgaaatggcgccggcgccgccgggacaactccgccggctccggtggcgggataaggagaggtttggaggtgttgttgggtgttaatggatgatgatgggttggtggtgttggagttggagttgttgttcccgtccatgtgggatgtcgacgaattgggattgggaattgagattccggtgaagtgatgggatggaatggggaaatggggtttggggtttgatttggaggaaagggaatgagagaaagaagaagaagaagaagatgggataaggtagaagaacaagaacaacaaacaaccccttcttcaccaaagtgctttctttctttcccttcaaaaatttaataaatactttttctaacacaaataaaaaataaaaaaaaattattaattattatatcaaacaaacgaacaaaattaattaattaataagtataaatataaactaaactagacaaaaaaaaaaaaacaaattattttaccttatatactattttttttttaaatttacggtttgaatttttaaagtggtttcagagagaattcgatttttttgttacaatttaagttgttataataggcgtttctatgtaaaattctgtaaaaatataaaaaaaaaataatattttaaagtgtaaaaataaaaaagccccttattattattatttagaactaagctaacagataactcccctaataaaaaataaacgaaaaaataactggtaactctacagtacataatcaaaaggatgttaattcttcatttgcaaaaaaaaaaatgtttattctagaaagatttttcttttagttatttagcttttttatatattttttaaataattttttttaacataaattcacatggataactaaaatttacatagcctaaaaattatcggaacaatcaaaaatataaattttaaaaaaatagggaattttttatttttacatatcaaaacagtttttttttttttt

SEQ ID NO: 20466 - DNA, 1970 bp, Cannabis sativa
gctgagacaaggcaacgggtttgtcagtgcatgatgggagagttgccttagtggttgatctattcttcttccatgagaaaaatgattgttgcaacattgatgggacctacaatgccaaatagagagatctaagtttctgtatcacaacaaattactgtatgattaatatgatggaattcatttaaaagaaagtacaaatttaaattagaactcactcctgaaacaatgctactagtagcaaatgacaatgaagatgccgaaaagggagatggcctcggtttgcttccctttgggtcattcttacttgggccctgatcaatattagcggaaccaaaactcgatggagcatcatcgtcctcatcatcgtcaccatcttcatcatcttcttcttcctcttcctcttcttcgactaaaaccttcccatcttgtttagccgatggtgtagtatcttctgtctcctctgaagccattccccccttttcctcttctttttccctctgtttcagttcatcctccatgtcctctatagcttcttccagaaacaattcggcatcaatcagatccatttcttttttaatcacctcaacttccaactcactagtttgtttctgctcttcagcccatttctctactttatcgaaaattggcttgaaagtgtttccaattccagacataaaacgagccaaaggaccttccttcttcacaccagtctctcttccataaaactcatcaaaaccatcgggtagaaactcaaccttattagggtccacttccccatcttctggctgccaaaataaacggactccgtgttccttgtcctcaacataattgattaaacgtccagttggtgtgtgtaagatgaggggatcttcagttctcccaagatcggatggatcttcaggattagactcttgatccttggggttggggttaaccactacgaattcgggagtatcatctgatcacagaaatgccacatgaattagaaaaacagccatttttgtacttcagtaaccggacaaatctgaagcagaagattaaacgacagtaagatttgtcatttaaagtgtatgaaatgcttgagaaaacaattatttgttcaacagaaagaaaaagtgttaataaataaagaaaatcaaaatatgtcatttatagagataaatttattaattttcaaaaattcaaaatgtgtcaattgtcctctccttgtgtataaacaagaaaatatgcagcaagagctaaagagatgaatatgattgagcaatataagtacgagatactgtgtttgtgagcaaaatgatatgattttgtgtttgagaaggaaaaccaattaacttaatcttcacccacttttgtttttggatgacagagaacgaaaaaaaaaaaaatgcaaatataggataggaataggatggatggtatcatataccttgtgcccaccagtactcaagctcagcaggcataggcaatctcaatggagctttataaaaggagtttaaccacatttctctttccttatccacttcatgcacatatgttttccaataatcagggacctgtcaacagaatatatacattaataactcagcagactcctaattcccaatatacatacgaatatgttcacgagttcctgcactataaagctaactgtgtgcatttaccgaaacagaacttacttcatagaattggtttataaagcctggtgccatccacacatcttcgtcctcataaaaataaggatgttggggatcactgtatggacctctctcttccctaaccactgtaagggagaggaatacagaaacatgaataacaaaatgcaagctaagtctgtcccgaagaacctttagttatggtaatttataaaatgcaagtttcacaatacaagtttgagaaagcttgaacacaggttaaattgtgaaatggatgagatggtgcaaggaagacactaaacaaaacagcataat

SEQ ID NO: 20467 - DNA, 2812 bp, Cannabis sativa
  modified_base (826)..(829): a, c, t, g, unknown or other
aaaacttattgcgtctagggtcaggtctataggcccttatattggaaatattttgggatcatgcagcattaggaattagaaaggatgttaaattcgatcagttgcccagggaaagttcagttggtaccctcctaaatgtttggctcaagataaaggctacatcaccaacaagcctcttaaaattggtgtatggagtgttgaacacatcggggcctgagcagtccttccctttagggactatttcaaaaaattctacaactatcttggtattgcaccattttaattcggcccaaatatttacatgattctcgctagtcggaaatctcagtaccatatcttaaagtgggagtgtacaacacccctaaaaatcttatatttctactctgccaaggcctgtcctgcgaggaagcatggagcaggaggcttttattatcttgggacccatactaattaatgatcgtaagatcatcgtaaggctaccctagtttcagaaattttcaaatttcatgaatgataaaatcaattttcaatcaattcattcttgaaatacataaaaataaaaataaaaaaaaacacatataatcccacttctatacatgctttaaaattaaaaatcctatgtcatatttgtaagagtaatttacggtatgaaaatgtaagtttaattcctaattaattaaaaataaatacctcaatttatttttttgtagtaataatacctacgttataattataaaacttttgtaggtacctggttgttaagtgttaagtaaattattacgtgagaattcatgattggtctaggtcattaaattttttttttttnnnnaaaaaatagtttaaatatacaaataacaaaatgataaggggataatgacataacatttaacggtcaggtacctatgatgttctaaaaatattatttataggtattatatattacgccaaaaattaaataaaagtatttatttatactcgagagttaaacataagtatttataccgtaaattactctatttataacctttgctaaataaaataagagaaagagaagatatatatgtgatgagcagaagtaccaatctaatgtaatagttgaagattgttaattaatgttataatttttcaagaatacactatataaatatatattttatgtagttttttcaatggaaaatgagataatacaagaatttagtgtttgttaaggaccattacttatttatagacagattataattaggtttatttgtactgcagctccttaaattatatacattttgccaagtattggtcctaaaattttattttttggtaaatttgtccccaaactatataagttttggcgcattgatctcccaaaattattgtttggtaaattggtccctaaacttttatttctttagcaacattaagtccccactattagatattgacaattctattgatttttatttactttaaataatttaatttattttctgttaaattcaaataattttattttctttttttttaatactttgagaaaaataatcatattaatattttttatttttatttttaaagtattcatataatatactaggtagaagattcgtgcaatgcacgtactacttagtcgtatgatcaattttttttaagtaatatattaatttatttatattatgaatacttaatataaagtatgatattaatatttattctccttgtgtaaggaagcttaattctctttcaaatgttgttctaagtgttactacatcaattttgttgactttatgaactgtagcgagagtatggttcaactacaaatcgtattgagataatttgtgttcaataaattagttcacaacaatctaataaataatttgtatccatttgttcttgtataatatctgcagacttgttttcatacactttttataatctccacattcctctaagctactaacaagagagataaaatagaccttttcaaaaataaataataaaaaagaaagaaatttggatagatataaattaattttttttattcgaaacatatatataaactaagctttgaaacaatatcctaacaactaaaggaaggtattgtcaaatatgtatatttcatttacattgaaaattgtatatattacacatccaatcaactatatcatcttccatgtgtcacaaaaatcttcatttataccttctaacacgaaaataaaataaagtgtacccatttcaacttcaaaagttaaatataaaaaaaaaaaaaaaaaacattcatttgtataatttaatttaatgcaaattgaaatgggcaaataaaaataaatactgaaatattattgataaatgagaattactaataatggttctctcaatgaagagagattaacacctacctaaagtagagagagaacccaagaagcttcatcaactaagtatacgtgccaccaatatttttaataatactatgtgaaatatctttagtttatagtgaaaaatattgaataatactctgcatgaacaagtcgattattgaatttagatgagagaacctaaattgagtatggtggaatattaatagtggaatgtgatacttgcagttcgcttctttcgttaatataacaaatatcaagtattattgatattatttatttcaaacttaatattaatctactaatttaattaagaaataaacaaaaaaatatttgtaagatgtgattaaattagtttctttgggtaatataaacaaacataactattattatacttattattttaggctaattaggatttttgtctcctgaactttgacatatac

SEQ ID NO: 20468 - DNA, 3154 bp, Cannabis sativa
aaattgaaaaacaaaagtagttacagaacgcatttttatttttcaaaagcaaaatttttaaaaataaaaattttactttcattttgtgattaaaaaattagaaaacaagagtgttaccaaacggcaccacaattacatatttatcatttttcaaactctatgcaaattactaataagcccctgtagtatttaatagtgtaacattagatggcaaactaaataagattaaatattgaatcttgtacgtattgtatccataatcataacttcaccactgaacttatcttctttccattccttcatcgatgaactccatggccatgaatcttgttattcttcccaatctgactctcaaatgctcttattcttcatccaaaaccaaaacccaacaaatcccagctagggacagacccatcgacttcggaaaacacaagggaaaattactgggaacactcccttcgaattacctcaaatgggtctccaagaatctaagagctcgtgattttgaacactgggctaaccttgctgatcaagtcctccaagacccactttaccaagatcgaatccaatgggaatttgcccagaacatcttggaaggtaataataggtcgtcgtcgatttcgaaaccagtttcggagttgttattagagatgagtgagaggtttggttgggataatgaagataaggttggttggagcagagtggattttgagcttcttgggacttctaagggtggacggattcccagggtgggtggagggaaaagtggagggaaaagggaggatttgagagtggatggaaaagaagaaaggaggaaggaaagggtgaggggtagtttgggaaattcagatattgatagtattgggaatgaagtgatgatgatgggattagatgaaaggagggaagaagggaaaattggagggaaaagggagggtttgagagtggaaaagggtggggatggaaaagaagaaggggaaggaaggaagatgaagaaagaagagaagggtaggggtagtttgggaaattcagatatgatgatgatgatgatgatgagattagaagaaaggaagaaagaagggaaaagggaggatttgagagtagaaaagggagggggtggaaaagaagaaggggaagagaggagtaggagagaaatgaggagggaaagggtaatgaggttgagtactaagaaagaagagaagggaaagggtagtttgggaaattcagatgttgggaatgaagtgatgatgatgagattagaagaaaggaagaaagagagtgaagtagaagtttacaatccattccctggaagagaatcactcttgaaaaaggtactccaaaggagaaaattttcattgtaataatttagcttgaattttgtagacatttatgagagtattattaactacatttatgtactccaatatgacatagtttagtgaagtagagtagatttgatttgattttgaacacaaagatacaagttgcaatattgttttaaatcaattactcaaattgttgataaataaaaacattaaatgtttattacaccgtatttaaaattggaataaaaataaatgaaaaataattaaaattaatatttataatatattgtttaataataacacgcttactacacaatattcataattagaataaattaataaaaaaatgtaacaaaataaatgaaaaataatcggaatcaatatttataatatattgtttactaaaattgtgtaagaatttagaatgaaagtgaataaggtgcgtggagttcaatctcaaaacaattaacaatgaaatgagtaactcattcattttatatatgacaatttatttctacacattagtaatgtgtaggactaactctaataaattgtttaaaaatacaataataataatttatcttgtttactaaattaaaaaaaatataactgaaatgtttaaattaactaaattgtttttatgaattaaattatggtatataataattattttataagaaatattttaaagttaaaattgtaattatatatttaatattaaaaaataaaataaataataaataaaagtcattaccattaatattctttaaaaaatcattaggagaagtattctcgaaatcctacctttcctaataaatactttttttaagcttttaagggtgtcaaaatttttgaagtgatgttagggaataataatatgatgctactatgcaaagtgtatcaagatttttagcataaacatatttttagctattatgtggtacatataatatcatattttaaattgaataggatccaaaacatgtgaggagatattattactagaattccaatctacaaattatttgtataagccaaaatgacacttatactaaagaaaagatttgaatgttggaacaatttcaatttgccccttttctataaatctcaattctacactgctaaatcaaagttttcttttatttatttgtatgagactgaaattgcatgatcaaatcaataggatcatgaattgtgcgaaattgattccgattctgagagaattcgcctcacttcgttcgcgagaccaattacatgttcatcttcacatcctaatcaagaaatttagaccataaataagtttaactcaaaaacaatttatggaaagaagattgttttaattgaaagaacttaccaatttgaagaagagccttttcaagctgaaataggtagtctctgttgggtcccgaggggccttcggcttgaacaatttgcctacgaaatagaagatgtaaaacatgttaagattaagttttttttctgaaatatttattagtaaaaatcaacttcaaaagtatttgaaactagtatccccactaatatttgagaatggagaaacaataatcattgctatgtaggtacctaaaaaaaaggacattacatatttcacatgcctgaacaagctaaacattttcattgttgttcagtttaccaaaaaaatcatcatctttgaaattggttattttaggagattcattttttttcctataacataactgttaagattacataaacagcaaagcaatggattatcattcagcccagaaaaagtaacctaacataacatttcaagaaataaaaaaattggcaatgcagagattaaagatacatac

SEQ ID NO: 20469 - DNA, 6010 bp, Cannabis sativa
gagtaaaccctagttgaaggcttctgctccaagatccagagatgagaagccaggttctcatggtgaggaggtagaagaagggagtacatgcacaaggaaatagaaagagagttagatcgagaacaaatcacgtgaaagaataaaggaaaagtgtaaaagagagaatcgagcttacctgatcgattatctgcgacaggaagctccaaaaaccttgtaatcaaccattgatgatagtggatatcaagctaatctctgagacaagcttgacagagacgtagcccagttttgggtgaactctgaaataaatttctggtgttttctcttccatcactcttgtttttcattcactaaatctaaatctgtgtgtgtgtgggtgtgattctgggtttcatacttagaatcgagcaagttcttgaagagaacttgctctgctagggtttcgattcgtgaggctgagagtgtgtgttatgttcaagggttagggtttctagactcttctgtagagtctttaaaccaaagcttcaaacgacactagagttggtgtcgtgttgtttaaaacgttgccgttttgtctaaagttaaagttagacaaagaaaggttgattttgaccttgatactgatattaaatattcttgttggtgcagggtaaaagggtaaaaatcctacatttaatttatcttaatttgagcaccaaacagtttattcataacatgaaccatcattaagaaaaatctctcaattgtcatgtgattaagcctaaactttcactcttgatcatagcttggaaattgtgaaatataaccaagctatgaaaatggctgacgttcgagggcttttgctcagctcgccattgtcgatagctccccgaccaccatttatccaaaaacctccaacaaggattaaaagttattaaacaccattttcaaccattttaaactccaaaaccaatttctcctattgtaataatttaccacaaatactcttattatgttttattcgattaatctaaacatttgaaaccaaaaaagtgtacgaaattttcaaaaaataaattattgaatgtgaatctcaagaaaaaatttagggcattaaaaaaaaattggaaaaaaaagagaagattaaattatatcattttgagccttaaaatcagggcaagctcttaataccaattattaaataataattgagcatcaacaaatattaattaaagactaacaaataataattatgttatcaatttatcaaagctaccatcttatttaaggcatcaaaataaatgaataaagcatgttatcttagaataatggctatgaatttttacactccgctttgtacaccttcgataccaacgatctatacacaaaagaggagaaaatagaacttgagtatgatgaacactactctaatattttctccacacacacttggccatacacttcttcactctaccatctaataaggcaaagctcttatttaaggagtgaaatgggcctattgaatgtagatgtccaatgtgcgagaattaattgtcttagcttaatgggttgacgaaggacgttttagagtgtgtccataggtcccgaacatgtcagtgagttatgtctatctcattatggcctaatggtaacactatgcattatcaattatatagttatcattaaatattaatatcgacattgaatgagcaacatttaatatatgttactacacataaaaagtttaacaattttatgccattttattggtttgacacctagtttctgattattttagcttgattgttgtttttttttttcttaatgggatgtaagttttgggttcttattttttgtttgataactggtttctatatatttttatattgataaagatgatgaagaaattatgaagaagagtaaaggtagcagtaaaatgattgttctaagaaaaaaattattggtgttcatgagaaaggtttttctgttgtatatatttttgtttctattgcatttagtttttttaaaaaaaaaaaaaaattaaggtggcgtttggttgggaggaataaaaatataaaaataggaatgagaatgtgaataggaaaggaaaatgaatgaaataacatttaaaaatgcataaaaaattgaaaaaaaatcactaaatttttttcttgttacattgaaatggtctttccttcttttttaaaatagaatagtcattctactaaaatggtagaaagagaatgccatttcgatactttaaaatgtaaccaaacaaaagaattgaataaaaattgtttcctttccattccattctatttcattacctccaaccaaacgccacctgagtgttttttttttttttgataagtaaaggaattttattgaaacacaaaaaaaacgaaactacaacaaacaagggattacaaaaggggccacatccccaatacgacctgaacgattcacagagttaattctagcccactttgccaatttatcagcaacaacattcagctccctaggaatataagacacatttaccatgacaaacttcttacacaaacgaagacagttacaaaacagaggataagtgtcccaacaaaaaggcaaaaaacccgcctggaaagcattgacagcagccatggagtccgactctatacgcacttcctgaattccagcctccaaagccaagtgtaaggccaacataataccccgcaactctccttccaacacactataaacttttccaaagttcacagcagtgagcatattttccataggagctacgacggcttgattctctaagtaactccccgaaaaaatcactgcagcaaagcccgcttgctcctggaaaactgaagcatccacacgaatacaacatacatcaagaggcaggtgttggtgaggtttttccccgcccaacccaggattaatatcagctaaacttgaatagtgagtcgattggaactcactatatctacgcatacaatcggcatatatatcctctaaactgccacttctgtcattgtgcaccatttcattgcgccatctccagatcgtatcccaaacgcaagcaatgaataaggccagattatcatctttaaggccgcaccaccactcaccacaatccttgagagaatcccacttcagaccatcactcctcaaaccccagaagcttctgaaccagatgccgcgaaccacatgacacttgaaaaaaagatgaagggaagtctcatcacaggccaaacaaaacctacacttcaattgatctccattacataaaccaattctgccctatgtaggaatacaatccgagaaaatcttccagcataaaagctgaagccgaggatgaatttttgatttccagaattttccccacaaatcacttgtttcattgaacctatgactctgacttaaccaataggcgcttttcaccgagaaaatgcccgacttcgaggctttccaaaacaaaacatcagccccttcaggaaggggtttaatccgaaggatctcttcagcactagtaggattaaagcactctttgatcaaatgttcattccaaacacgccttcctctaacaaataaatccttgatttgctagcaggcttggttacgactcaaattaaaccccgatttcaactcctccatcctcctatggggcacccacggcctatcccaaatctcgttacttccatccgcaacaatcaaaccagcaccttctagacagatttggcgcgtagccagtatactcttccaaccccgcgaatcaacctctttcttttccactgaccagggagatagcagcctgcaatatttatcagtaagaacccggacccacagtttatcctccccttttagaaccatccaaaacaacttggcaagaagagcaacattcacatccgccattcttctaaaacccaatcccccacacttcttaggctgaaaaagctcattccagttctttaaagcacagtatcttgacttctcaaagttacctttccaccaaaatctagcaaggatcttgtcaagctcaccatagaaagtttttggcaaaagagaggttgacataaagtaatttgggatagattgtaatacagaactaaccaaaacagacctccccgcttgagccaagtgtctcgctttccatccttccaacttgttcaaaaaattttccttcagaaaactataatcacgtcgtttactagcagagaaaaagaacggatttcccagatatttctcacttgaattcaaacaattgatgcccaatctttgtttaatctcctcgcggcaagatctagcagtattaggagaaaaaaccaaaccactttttctgtttgtttaccatctgaccagaccagccctcataaatactgatacatttcatcaagttatccgaattggcaacagtggcattacaaaaaaatatagagtcatctgcatacagtaggtgagaaattgggatcgaatatctagcaatacgcaccccagaaatttgaccattgctctcggctctgataatgagtttggatagcacctcggtgcacaaaatgaaaataaatggggagagcggatcgccttgtcgaacaccccttttaggattgaagggagctagaggagccccattaagtaacacggaaaagctgaccgtagtgatacactgcattaccagattacacactttatcgttaaacccatttgcttcgaggacatgacgaatgaaatcccattccaagcgatcgtaggctttactcatgtctgtcttgatcgccatcgccccaaccttccctttcttcgatctaatcgaatgcatcacttcttgggcaaggattgaagcttcagcaatccaacgcctcggcataaaggctgattggtaaggcgatatcaaccgatctaacactctcttcagacggtctgttaaaataccagaaataaccttgtaactgaagttgcacaaactaatggggcgaaaatgatcgaacctggtagcctgcgaagtctttggaatgagacatatgaacgaatggttgatctttttgttcaagaccccagtttcaaaaaagcctttgaccatctcgcagagctgagggccaacaatatgccagtatttacgataaaagattcccgggaaaccattcagaccaggcgccttgagcggatgaattttaaacaccacatccttaatttcttcgacttcaggaattctgcctatagcttcgttttcagcttccgaaactctatctccaaaaagagaggaaaacttatcatcaatgctacagcccgatgattcaaataaaattttgaactgttggttgaaataatttccaatttcacctctctcactcaaccaaatcccagtagcgtcctcaacacagttgattgaattccgacgacgcttgatgatggttgaagaatgaaagaacttagaatttgcatcaccaaaacgaatccaattttcacgggattactgtctccaaatccggtccattcttccctccatttcaacaatttccaattgcacatcagcctccctctggatactgctatgtgagataccagcatttttaatctctgtcaattgacgtctcaattccaccaatcttctatcacagaatccaaaaacctcttggttccatcttttcaactcgcatttggtccttgtgagtttacccagtaagtactcacctctgctccacgcatcattgattacattctcacactccgggctagatgtccacacttctaagaagcagaatggatatcgaagttttggcatctccccctgtaacgccctaatgctaaggcatgctacagtgctttttcaattattgtgcaatctttgctaatcaaagaaatttctgtaaaaacgtgtcaaattaaaacttttgatttaaatactaaactttgtaatataatatagtatttacaaattccgggatcccgtttttcaaactttgtcaaatttacttttcaaactatccatttcaaaatacacaatttctaggtggcacagtgactttcaaaatacaactcccag

SEQ ID NO: 20470 - DNA, 2351 bp, Cannabis sativa
  modified_base (1410)..(1428): a, c, t, g, unknown or other
tctctctctctctctatctctcaatcttttctctctctatcttgaaactcaatctgatcattgtgtctgaaatgataagtgttggtggtatttataggcttaggatcaagatcctaaagtcgatggctgtaagaagcaagattattaagttagttaggcaataaataacttaaccaactctcttttaagagagatctccatgtcagtataaatataagtgcattcaggagcgaatatgagggctttcggaatcacggaccatggcactcgctgaaggaacttccctggtaggaaagagtcatctggagccgactatccgtaactcctttttaggagaaacaactagtcatttggaacttctttttagaggaaggctagctttcttgaggactacacccggagtggacatgatagtcatctgggaactcctttccggatggcaataatcattccacgagacttcttctagatggacatgttagctgttcgggaacatacttccgggaaacaaataactttttaggaataactttttaagaccttttcatttggagaaactataccacaaaaatattttcttttaaaaaaatattatcatgtatcttcacaaaggtatattattcttttattttttttatgaagaagtatattatatattgttgttgatatttattgttacgggtgcaatttagcaggaggatttcacaaaaattagtttagttaaatgaaaatatataggatttgatatttatttacaatgtagtttttaatatttttccaacaaaattacaaatattgtgttaaatgtaacatttgttcatattttttcttctaacatccattcattgacttatttactactagtgccacatatactagaagcaaacaaatttgtatgtgttgatatcctttaaattatgcattgaagattgtctagtaattaagtaagcaccatttcatatatatagaagtaaaattatggtgaactaatttctaagaatatgcaatagtccaatcccacttgtaatatatttgcatgttttttcttcttaacacgcaatatttacatgttgagtactagtagtagttactagcttactagtactttcaaatctaaggaaaaaagagaaataatacaatgggcgccttggctgttttttgtgatcaacaatccatttttttttcttcaattcaaagacactaatttagttacaatttcaatcttgtttttggaaaaagtagataagtaatttgcggcataaatatttaagtgtaatttttagttgtaaataaatacataagtttaaatttcgacagtaataatatctaacttgtatttctgaaacttccgcaggcattgttaaatgtcaaatcattatatacgtgttatttttattggtatatttaaannnnnnnnnnnnnnnnnnnaataaaaatttaatgacctagaccaaaaattaaagattatcgcgtagtaatttacttaacacttaatagtcagatacctacaaaagttcaagaattataacttaaatattattaccgttaaaaattaaatttatgtatttatttacaacttaaaattaaacttaagtatttataacgtaaatcactctgcgtaattataatcttgttgttttcttggttttggaggagggtcttaattttcttttgggttcacaaaagtgtgaaaagttgatgacaccaaaaaatggtataaagaaaaacagatacaatggtgaattatttggtagctttacaacctttcataatcagtctccaaatctcaaagataccatccaatggaagtatttaattatttctttttcattcctaaaaaataaaataaaataaaaaaaagtgattgacaagctcgtgacaacataacttggatctattgtaaataaataacaattttggtagctattaaatttattgtattttgttgacaattttttaaaatatatatcttttgaagcagacaattttaatattattatattataaaattctacaccatttattaaacgagaaaaattatcaataatttcttccaaatttaataatggctaattttaagtttaactcaagtacccatcatcttactaattaaggacaaagttgctttttgaagtttgaaatttgaataggaaatatcccattcctttcatattattattattattattatagctaaaagaacaaaaaaaagaaaaacatgtgtcaaataaacaaatatattattgggaaaaaaacaaaaaaatacaaaaaaagaaaaaaaattacaaaaatactttgggccggcccattaaacatttatacagtccacatacaaatatttacaaaaatac

SEQ ID NO: 20471 - DNA, 2631 bp, Cannabis sativa
gaacgtgtatgtatttttttttttagagtaacgtaatagtattttacaatcatttaatagcttaataatttcaagatcctaagtttgaacccatgacctctccttttttttcatccctccctcaccactaagttagccttaacgtgtatgtatctcatatatagacatgatttcctacttttactttttatggaaatttctcacaaaaattattatgtactttcttttcttctttctgtgtcatttttttggtagtaaaaatttttatattgtttattaattgattttttagggcagaaatttttatgctgttatctttagcaagtttcaactgttacacatttaatattgatacaatattaattcttgagctagtaacgacaaaagaactaacattgtaataaaatagctatatagaataacaaaagtgagatttaaaatatttcacaattgaaaaaattagtttgtagggctaaggattaaaaaaaaaaaaaaaaaatcctaccaatatgcacaaaagtgcctattataatcctctttaataatatttagtagaatcacaacttattttttacttttatagtttgagttgttctaataagtactatgtgagttgcaatgtagatttatattttaatttaagttactttgttgattgttatgtggatttccataaaaatactgttttagaaagtaaaaataaaaaaaaatattaaatattatatatgtttatatcgtgtatataaatcaatacacagttctatcactcgtcttttattgttgcattctcgaagcaccatttgtgtaatatgacggctctggatgaggcccaatccaaagtttatttttctaactttgtatacataatggaattttgttcaagagaattagagcttttttatatgtaaaaaataaaatttattgcaaattggggtcttattaagtgaaggctctatgcaagtttgagccgcttttatttaataagtaggatatgatattaaattttgctaatcgaatcgtgtcacgagatgcttattggatatctaaacataccatgtactaacttgaataatctacatgtgcaataaccacaggtgctaaatgacgagatgtttgctattttggttatgatggccttatttactaccttcatgaccacaccaacagtcatggctatctacaagtcgaagtcgccatccaacattattagttcatcattgaattcaaagttaacaaaagccaaggagtctcagttgcgaatcatggttgtcatccatgaacccgaaggcgtaccctcacttctcagcctcattgaatccctaaaaagctcacctatcaagctttatgttatgcaccttgtggagctcactgatcgttcgtcctccatcatgatggtccaccgagctcgcaaaaatggctttccttttgtcgaccatatctgcaaagatagttctacattgtactaccaagaccaaatagttgctgcatttaaagcctacagtcatgtccacagccaaatcactatacgacatacaactgctatctcagggttatcttctatgcacgaagacatacttcatgttgcccaagccaagagggtgtcgatgataattttgtcatcaatggaagtctcgggacattgttggaaagtgataaatcagagggttctaaagacagcaccatgttcggtatctgtgtttgttgaccgcggcttcagattgaggtctgaatctgatcaaatgcttattgcttcagctagtacatctactaataatactacaacaacaatagcaactaatattccaaagaaggtgtgtgttttgtttttgggaggaccagacgatcgacaagctttggagttggctgggaggatggctcaccatgcagatgtcatggtgactgtcatcagattaaccttcagatgttatgataaccatgatcatgaaagacattgttgctcaatctccatcgtaaatgatgagaaagagaaggtgcatacatatttgtgaagtaatgttttcactcccatgtataacattgtaactaatttttatgatactttttaggagcttgatgagggtgcaatggttgaattgaagatgtcaaaagaagtagagttcatagagaaggtggtggacaatgacataatggagacggtaaggagtattgggcagagtatggtgtacgagctagttcttgttggaaagggacgatttccattaagcatggcatctccattactgaatcacaacattgatgaacaagtcgagttggggcccttaggagacgcattggcttcttctcgagatgtcatttcttgttctgtgcttgttgtgcaacacaaagagccactccagtcaacgtcatctgaattacttttgcccaaaaaggatggaattctagttgccgaaaatgacgacgacccttctcatgtgtgaaactagttgtttatgtgtacttataggtatcttctatacaccattaatgcttttaaataaaatagtttgctttcgtttgatagataccaaagttgtgaaaaacctctccgggagtaattttgatttaaagggacattactatcagatctgtttggaaaaatgttagcccattgtcagactaatttccctcctc

SEQ ID NO: 20472 - DNA, 2353 bp, Cannabis sativa
  modified_base (2307)..(2318): a, c, t, g, unknown or other
gctatttacccaaattaatatggtcacgcatgattttgtgaagcactgaactctgacattggatggattcaattttgtgaaattacttttttgggtctcctacttccagtcctacaccatatcaccctaccctactactcactagtgatctgtgtacggcaagcaaagacttgttattcacttctgggacccacttaactctaatttatatttatgtatgatagtcgactcatttaattctttttttatttaagttggtcttatctcaaattaatgacaatatccctcattaagagaataataattcagaaaaaaatgtgtagtatcctttcttttggtatttctgtaaacactcttatttattttgatttttagaacactttctttattgaattttattttttataatggtatacagttatttagttatttaatttggattaaattttaaataatttatagtgttataagtaaaatttaattaaatatatttgtgtaataaaatatttaaatattattttttaatataataaattatttaaatgtttaatactaaataactacaaaattactcgtgcatataaaaaaatataatgaaacaattaatttatgacataaataattaaatttaacttttctttgtaaataaatatttaagttttattttttacagtaataatatttaaattatattttttaaaaaataactgaccgttaaatattaacttattatcaatgtcattttttactagtacatttaaactaaatttttttaagaaaataaaaatttaattatctgaagtaattaataataataatttaataaaaattctagaattataagttaaatattattatcgttaaaatttaaatttaagtatttatttgtaactataatttaaatttaaatatttatagatatttataggataaattactttatttaataataaaaaagattaataaataaaacaaagggtgaagagtggcattatgaacaaggaataaagagcaacaaccgaggttggtggggaattttttgaatgtgggttggtccaccatctggagaatagagacgagaaatttagccgtcgaattaatattatttggttttcttcaaattcacttgttttttttttttttttaaagtaaaaaagtaacattttcttcgttgtttcgtggttgtattgtattgagtaaacgtggtgttcgggactcgagagtcgaaagtggagagccggtgccgacccattgagttagtgtcacgtgactaaattttccatttttgttttgtttttttttttttttttaattttgagatgagccaattttagtgttcacatttactttttcttgaaaaaaagaaacccagtaaaagtagcaaacattgtatttagctgcagtatcaatttaggtaatgacagaagcaagtgattttaaaaattgtattgtgttttggcaaacacgagtgtagactgtcgagttctaagaaaatataagaatgtgtgagttttttataagaataagagtgtcacgtgttcaaaatatatgggcatattcaatgatagagtataatatgggggttgatccctaattttttccaaaaatgttttaatacattattatttttaataattgacattcaaaatttcgcctttttcaaaaaaatctgattaaagaaatgaaaattctacattttgaataatttaaatgagctaattatttcacatacatttgcatgtaataaacacataacataataaattataatttgtttgtaaatagtacaaaatagatatattttcttttattaccatatcatatggttccttctttaattaagatttccatcatttaaccttttgttttctttttaccaaacatatacctataaaattcatttcatcatcacgaataatttttcgttcctacacatatataaaacatgctttcatctcatgattaattaagacatgattaattaagatttagctagatatatattagctagatatatatatatatataaatatatatattaattgtagtgttcttcaactttatcaatcattgttttttatgttggtggtaggtcaaattcaaatatgctccacatctcgcattatcttctttttcttttctttttttaaggtaaaatattattcacgaacatatataatatatacatatcaattctcaataaattaatatatattatataaaatataaagacttgttatttctttcattttttaattcaatcatctatgttctatctttttcttcattaaaaaataaaaaaaaaannnnnnnnnnnnaagaaagaaagaaagaaagaagaatatgattcagc

SEQ ID NO: 20473 - DNA, 4667 bp, Cannabis sativa
caagataattgcattttacttcgttcagattttaaatcacaatcgtatacatatttttctccgccgaaaaatctccccttaatgagtttggctgttgcagaccaaatcgacggtagcgattccgacactaatctcgatgaggacgacgctcccgaatactacgagccgatttccgccgtcgctgatgatgacaacgacgatgaagaagaagatcgtactcgaaccagagagaacggacacgtagacgatacaactggatttcactctaatggtgattattacgcgaggcaatttgagaatggagtgtcgtccctcaatctgaataacgacgatttagaacttagcaagagcagtagcgaaggcgaagatgaagaagaggagagcataggagaagatgatgactcagcagcgatgagagctttcagagaggacgagattcggagaaacgcgccattgacgactgagaatgctacgagggttatggaggctatgcgcggtatttcgttcagtggtgtggctccagattgggcggacagcgtctctgggaaccacttgatcgaccaccttcgcagactcaggcagccaccaccgcaaacttagtgcttagaccatattccttgtagttcgatattcgggttctcgattgtgtgtgtgtttgaagttggctaggtgattatgtctacaatgtaatgtgttgtatgttagagctcatatgatttgattacttttttttcttttctatgacatgatattcaagtagaatcaaactatttgctcaagtaaaagtaatcaattgttctgtgatcgcccaaactaaatgcaaaactcattttgtaaaaacttttcttatcactcataaataatgacattatatagattctttaaactactttattctacaaaatgattacaatacaataaatattagtctcactatccgaaagaaagaaaataattcattcaaaatgccttcgttggttggccgaacaagaaaattctcatctagacagacattcaaatacaagtatcgcagtgtcatggtggtgatgcattatcaagcagccacattctcaatgtctgcacctttgttaattctcttgacaatgcccgcaataacctgatacaccataaaaacatttgaatttcttacattgtactagtgttaatttgcgttcaagaagtattagtatctaagtgtgtctcaaaccaagccttcttacctttccaggtcctaattcgtaactcttctccagtcccttgtccataagagtcttcactgttgtttcccatagaacaggagatgtcacctgtagtattgaataggcggagatcaatattcctgccaacgatttgggtgaaatgaaattctgagtatcttacctgacgagccaatatcttcttaattgtctcaggatctgcatgtggctgtgcatccacattggagatgactgggatttttggagttctgatttcagttgctgctaatgcagcttctaatctcgatacagctggttccatgaaactagtgtggaaagcaccagcaacagctagacgtacctgagcagagaagggacaagaaagggagatgacttatgccatttaatatgaagaacagagaaaatatgtaagctgcagtggaaatgtccctacggtcatgcgagctttaaatgactttgccttggcttctactgcttccacccctttcaaacctccagacacagcataatttccctgacatgagagtagtttagatgcatttactattgtggttgagtacttaaaaagtgattaattaacaactattggctttattatggtagatagaaagtccttacaggacataggtagtttgcaatttgaactttgtctttatcatcgacttcctgattagctgcatcacacaattgttgaaccttttctgagtccagccctatgatactgaccatagcacttttcgcagcatctgcagcttcctttgagaaagttgggaataaagaaattcagtgtctagggtaaattaaaaactcaagcatgcaaagagtacaaatgtttagactgctactagtcaaactataaatacctgcatggcttctcctcgtagtttgaccagcttgagcccatcctcaaaacttccatattgaatcaaatcgagaagagaaaagaaaagaagggatataagaaccactaagtagttttgttgacagtttgtataccagtgaaataatttcctaaaaacataagcacttaaaaaaaattcgaagagcaacattttgatgaataaagctgtgtcatcacttccatgagcactgatgaggtcccccggtaatcaaacaaaggtatggttgtaccttttctttacttactggagatgcccatacatgtatggttgtacacacattcaattctgccttagtgtaaattcagaaactttctagctttgataccatatattgaaacatagacgcagctgtgaaagtcatgtttatttgttgatcaactcacctaaaagcctctgaaaaagctagagcagtatattctcccaagctaagaccacatgcaacgtcaacagaatcaatgatttgctggcctccctcacgtgcacgtagtagctctacggcagccaggcttgtgacatagatagcaggctgcaaagatgcagaattaaatgcaaaccaatgccaatcagtgggaagtatatttgaaaaattataatatataatttaaaacatataatgccatttccaccctaaaagaaaactctttaggtaaggagagattactcaacagggctccatggggaattactgaaaaaatttagcatgtctcattaaaaagaactaataatcatcctttcaaagaaaaaaaaatgttatatttatataaactttgacaaaattgtttttcaaaatcagtcatgaaacaaaaatcctggcagcagatatctattagccaaaaagccaattgttcttctatctcatgtatctgcaatgcatatgcaaattgcctttctatagtccatggaagtataacagagatacaaacataaggagaatgatactccaactaaagcttctacaggacaatgctgtcagaatcacaaatgtgcatttcacctcacacactcacttaaacatcctacatcttgaagtgggaaaagaatgttcatatggtcaaactcaaataagtgactaatatgatgattgcattacctggcttataatagttgaatttagcttctcttttggtccattgacgcaaacatctagaagatcaaatctgcatgtaaagaagatataccactcagaaccaaaagtttccctgataaggcatcaatatagtgaataaaattatacgaacaataccctaaaatatcatttgctatcttgtaaagctctaaagctgcaggtagattttgtgcctcctttcccattccaactgcttgagcaccctgaaataagaaacagaccggatacaaaatatagctcaatataactcataccgaatcaacatacaacaaacacaatccaacgcacactacaaacggattcaagaattatgtctccgactaattttactcttatgtcaaatccacaaatatacataaagcaacccctgataagtttagaggagaaaacaattgctgataattaacaaagccatacaagagttaaccccatgattcattcttgtgtttgcttaagcaaattaaaaacaacgtagaacaagttcgtatctgatatgattgtcactacgaaaaggaatatcacatcagtggatttcttctcattactttccgaaaccactgttgcggatttagacattgtagagccacaatatacctcgagacagtttttccgtacattttggagcttaaacttcgacccagttaatatcaatccggattcacagtttctcaatatcattgaaaccaaaatgccgattagttatagcttaaactagatcaacaattaaacattttgcatgatatataagattttcaaattaaaaagaaatgataataatagtaatgaaacaaaattctcaatcaattacaaattgagcaagaaagaatgaatgtggtacgtcaactactcacttggcctgggaagaggaaagcgagtgcaggtttataatcagaaaacaagccatcgttaaccacagtctgcgatccaaccgaaacgctcatgaagaccctcgatcgattgagattcctgggaccgaagcttcgaattccatttccgaaactagaaaatgaggagcaattgaagcttctcctcgacgaaccggagagagtgagagaaactgagggaagagtgagagaagagttcatggtgttggaaatggtggcaaccgagagagtgcgcaggataagagggtggtggtaatattggtgatggtgaaagagacgagcttgcatatatatgaaatgaatgagagtggagtggtggaggattataatgtgcgccgggggtgtttaggttagcggagtttccgaaggtagacgttggagatgggcattacaattaggcaaaaccggccaactgcttttgcctcttatttatcaagcgttgtcgttttattctttctttatttttttatttacaccccaaaatttgtaaagacaccacattttaataatttaatttaatataaaatttatatattta

SEQ ID NO: 20474 - DNA, 7856 bp, Cannabis sativa
agctattagatccgccatcatgacaacggcaaaccctttagacaatactggaagtcccattaaggatgccggaaactttgaccatccggccagtcccctagaaatgggaactggattcatcgatcccaataaggccattgatcctgggctaatctatgatgcagaaacagaggactatgtcaagcttctctgctcattgaactacacagcaaaacagatgaaaatcattaccaaaacgaatactagttgcaatgggattaaaccgtcttctgatctcaactacccttcgttcatagcttactttcccagcgatttcgaggcccctcatccgggtccgaaagtggtaagggagttccagaggagggtgaggaatgttgggaaagagaggtcgagttacatagcagagttgagtggcatgaggggtttgaaggtgaaggtggagccaatgaagttagttttccggcggaagaatgagatgctgagttacaaactaagtgtggagggtccgactaatttggaggaggaagttgtgcatggctcactgagttgggtggaggagtctggtaaacacgttgtgagaagtccaattgtggccactaatatggacccaatgaacctttaaaagcaactacgtactcggactaggaaggagtatttcaaagcaagcaagctagagtttctaatttttatgataggagcattgctggcactttaattggggtttttacttatgatttattaaattaaaatgtgtggaactgaatattaaagtagaattattttgaattttttatttttgaaaagtatgtttgtttgaatttaaccatttatgagtcaaactttgtgctgttcatttcaactaagctctcgcagagggaaaaataccaaattgtactttgctggtgatcacaaatgcacaaataccccacagcaatgcgcaggagaatatataatcacatccaagcagaatcatacaggagagtttcaatgttgaatacaaaaagattatataccacgatgatgatcaaagaaactatatatgaactattaacattttaatattaaatcacacagcaacagttagagccagcaattagcaactaacctgccctaaaacactgataaaagaataattatggacatgaaaatgatactaggtgaaattttttccgcaaaagaaactgcaatagacagcaaaatttctgcatctggtaagtcttggtatgttcatgttttcaatccattcgattcaatcgttttgcccttcgttttcgtttggaacgcttctgactctcagttgaggcatggactccattctcagttacctgcttttataatgaaacttataatgactttgatattctatgttgaatttgataaaaaatgaaagaggaactgagcaactcactccttttaaaaccatgcacttcagggcagcaataagctcaaagagatactcaaaggcacccttgtaaggctcctgcattgaaatgaaaaccttaggaatgacctcaaaaagctacatagcatgagaacaggccaaaaaaagtgtcaaatacctgcaggtgtgagggtagaggaagcccttctatcaaaggagcccttggaacttggagaaattttgttcggcctgtactgttattctccatcaaaatattccaggaaggaggactataaatgcctaacgcctcaaagtcgaccctagagctcaaccaatctggaatattagtttgaggtgaagattcactacttgtatactgcgtgcatatcacaaaagcaagtagagttccattaatgctaatcttgttaaacatgctgtatttaatactcaaagttcttcaaagaaattgtaaggagaaagcagaaacaaaagtctcctagtcccagatgggcatcaacctactccattctcaaagttgacactcccataacattattaaaataataaatgtacatttaaaaatattgtgatacatttaataaaacagggaattgattagtagataattaattttttttttcaaaaaaaaaaaagataaagaaaaaagaagctagcaactcacaattgatgtcaaatcttcttcgctggcataactcccatcttcatcagcaacagcctcaaaaggatctatcactatctgtacagaaagtccttaatgttaatggctataacatgagttgcaggacagtcttgtatatttaacaaggtaactattcaaaatgccttctcaggcactttccagtcattcaaatgcattaaaacaaagaaatggctcaaagtcaagacacattctctcctgttctactcttctttgctaacaaatgagtatattgtttctggactacatccatacctctggcctttctatggctttgaactgatggaaagatggactttcaaaattaggaggcttcaatacagcatatgctccttcgttcttgtagtttatttcaccgaactgtaaatttttataacgtttaacataggaaaaatgataagaacctgcttcagcttataccaaaccagtaactaacagagaaaaataatgaagaattgcagcaaaactcgatggaacagtagcaatttgagattgaaaaggtgagctattaataggaaagtagactaaaagtctctacagtaagtgagagccttagctctctattgatgctgataaatatcttaatactagcatgaaactacactcactcaaacaagcacatagaagcaactcacccatacaagaattaccaaaagcccctttgctcatctagtttaccaatgtattgtatattctacctattcaccttcctagcataagtaaatttcacccaaggcctataatgcctatcaaaaaaagacgcctatgacaatattaagatattcaatttatttggatattgccaaagaaaagcaaaatttaatcattttaaaatggtgcaggtgtaaaaatcagattagcttttatctttccaacaataaaaatgttataccacagaatttatttatttttcttttttaaaccacagaatttaaattgattgtataaacatatactagaagcaaaagatgttccaaatatggctaattatacaagaagcagaatttaaattgattgtatgaatatgaaaatattgaggagcaaatagacaaaaaagagtataggcaaagaaagaaccaaaacctgtggataattgggagcactaaataaagtatacaatttccctgactcttcaacatgatctgtgctgtacccacttaacatatcttcaaagccatcacgtccatctctagcatcaggaccttcatgtgatctgataatcaactgtttagcaaaaaaataaaagagtcaaccttgccttggcataggcccttttatcttcaaacaagaataactatcacgtggttaagcaatgtaaagaggtagattacaatagagaaatactgagttgtttttgcagagacaatatacaaaggttcatcatgtctcaattgaatcttttactcctaaaaaatcaaaagaaaagaacccaacaaattgagtaccacacttaaaatttacctttaaatttgactgcttcaaaaaagcctcagtgcaatcaggaccccatgttacacctactcctcgaactgcattttcaattataccacctttctttgatggatcagaccatagcacatcattcaatatacttggatcttcatctggaacatctataaaaaatctgttcactctagacaaatcttccaaagaacctaactctaatttttgtggcttgtttctcttagaccttctaacagggccacaactcaagcttcgaaaaaggcccccatgtgcagtgtatacacaacttgatatgattgaggccaaaggaaggtctttgaagcattctaagcatttcttgtagaccaattcacttttatcagcaaatttggtcttgacctcttgcttaaaaccatatattgatgtgcaaaatccagtttcatgatttcctcgcaatagataaactctctcaggcatcaggacctgaagagaatgtggagtaaatccgcacaaacttcataaatgatcatacttaattctagaaattcatattaaaaatcatttcacaatgaaatacaaactgcagtaactacatctattacaaagactacatgctacatattaggaaaataaatatgtatgcaccaacatacataaaaaacatgacaaaaccaataaatactcactacctttcccttaccttccaagcaaacaggacaataattacttccaaaccccaagctcctctatctacataatcaccattaaaaacataaaactgcttctcagatggtaacccagcaaggcgaaaaagattgagcaaatcatgaaattgtccatgaatgtcaccaactacaacaacctttgaatccatttcatgacaatcaacttccacacaatttggttcctgcgacatgattcttgaagccgcatcaaataatttatccaccacagatattggcacgagagacctaaaattagatggtggttcgttctttgaagagtgttcaagtttaaacatcaaattcttcacccattcgagggtaattatatcatcagaaggccatataacagagggatgaaggggcgacattgccactgattctttcccttcatttggatcatcatccctttctaattcagatgatccagtgaaggtttcttccatctctttctgaccctcttttgttcttaattcatctttcactgaaaattgggcatcttcaaaaatcaactcttctggttgaaaagcctgcaccgcactgcaagtagatgtacctccagaaagtgttacacattgttcccttccaactagagtttctccatcgcccaaccggagtggctcatccattaagttggttttcccctcaatatgaccatcttcatttaccacatcaactaccctttcgacctggatacccgcattacccatatatgaatgttcaaccacaatattattattctgttccaccgtctcaaccacaacattattctgctccacaggcttatcatgttgatttctcaactcagcttctgtttccacagttttatttgttaatactgtcctttgaatcccttcaagttccacattcccctcggtcccaacagcaatagtatttgaattaacctggtaggaaaaaggaaaaagattatgacttatgattcagatttaggtttaggttcaggttcagcatgttcataatgccagactactccaaaccttagctcctttagtgacaatagatgacacaatctccttcatccgcgacactgactgcgaatgcggatcatcaatagttccatacccaatattaatcaaaaccttcttgacagccttgcaagaacccacctgctcaattcttgaaaccataagccaaaccaaataatccaacaaacaagaaaaatatgaagaacaaaaaaaaatcacttgccattttgtcaatactatgggattgtgcttttttaacatcactagctgtcacctgtaaaaattagaaatttatcaataaaaaaatttacaatgccaacctttgaattcagtaatacgtaaactttcttccaaccttttcaattttgttatgaactataccacgagctagttcctttatcatcataagagaatacacttgttgatcatctaaattcgcaagagacatcatgtttatggactccaaaatcttcttggactcatttaccattatctctttctgaagctccatctctgtacgcaaatacgtataatattaacggtgtaactgtaaccccaaagcatctgaaattctgaatctttcaatacagcagaacatatatactataccaagaaataaaaattacatacgatattcgtatggcatagtaattgggtccccaattcggtacttgtagcgagaattgggtctcactctcagaactccattttcatttttttttttgcaggcacaagaagactacaagccctagttcgttttgaattcgaaaaggtcacgcaacattttgaaacgatgacgtttaatttttaaagtagtagcgcgccatgctttttttaattttttttcagcaactacagtccaaacatgtttttgactaatttatatggtttttttttttttgtttttttttttggtatttttatagtatttggtatgtcatttacatgtaaattaagtttttaaagtccatatttaatgtttttatttatttttagacagttttatttgtcactagtattggaaaaatcgtcagaatttactgtcgaagatatcagagtagctgccagtgtcagaaaaattactggaattattgtcagtgccaaaaaaatcatcaaaattggcattatcgccagacaatcactggaaaatcattaagaaactggtttctcgatgaagaaattagtttctacagattagctagcacacttaactgtagattcgggtgtggatttgggtaagaagagtgaatacatcatgaacatgttgtatgatatgataattatcatctataaaggatagagtcaatactctataaactctatgtagggtacaattgagagttggttactatattaacaactggtaattggttatcttaataggtaatattgggtatgggccgggttgttgttgaggattttggaggattattatgattctaacaatatatattaatggagtatgaacacataaaaattaacaataatgggaatagcaataaatagagtttagaaaacaataatgtaataagaacattattaggaaacacaagattaatccaaaagagtgattaataataaaaattgacacaaatagcataaagatgagtttggaaaagtcaccattgatttctatgaaatcaattctttgatcaagaagagatgtcgggttagaactacgcatattcaagaaatctttactccaagtcccagttggattactaatggcttctttcatggaataaaatctaagacttcaagcatttgatttgtttaggattagcaaaatcctaaacaaaactaattagtctcggagataactactaaagaacatttagataggtttcttgagagagtagaaatgagtggtcaattcgttttactctcataacacatttatagtgtaggaacctttattagtactaacccgtgattaggtcacttaatgaggtaatttgaatcatttcttgcataaactttccatgcaaagtgcaagtagcatcgggaaataaaaaaaacgtaaaactcgaatctcgtcttgttttcgatgagattttacatagtcttgaggtgatatatcacctaaaattgacgacatatctcgtgggactttgactgtggttatttttttgcaattctagaaatgtttcaagcaacatgtcgccttatactgtgcatttcatctgaaacatacatttgacatttctgaacgatccaaatagaacttcacgggcaagtttaatcaaaactaagttttaggatctaaaaataagttctaacacgttctacaaatataaaacttttaatgtgttttgttcttttaacttacgttaaatatatctcattgattcgggtttggcaaatgttatcactagctatttccatgatttattctcatcatctagtgttaacttgggatcggttttggatggtattcggccaactgttagccgtgagcaaaatgaagacctcttgagaacaatttctgaggaagaagttagaaacgccctctttcagatgcatcctgataagtcacctgggcccgatggtatgacaccagctttttaccaaaagcattggggaatagttgggacagatgtggtcaa

SEQ ID NO: 20475 - DNA, 4542 bp, Cannabis sativa
ttcttaatcatctgataagcattgcagataggtgtatgggcacctaaatgcaagtcgccaatatattaattgttgtatgcttttcttactgaggctcttggctcacaaattctactttcatgtgtaggtaaaggaaaggcggaagctgaattggagtgagttccgagctcaggtgatgattgtacatgtcaagacggcgtgacctggagtgttcgatctcgggacatcttgagctatattttgtagtcgttgtgcgacaagttgtaaaaatattttgctattacttgtaaaagtttaaatacaagattacagtttatatatataaattaatatatgtttatcaagttttttaaattaaattaaaagttttaacctaacacaattttcgagaaaaaccctttgattagcaaaggaggcacatcaattagaaaatcattgtagcacgcctaagtatcagggcgttacatcaatgctcctattaaccatctccgtccgggcattactttggggatggtacgaagagctatgattcagctgcaaacggaaaagttcagaccaaaatttgctcaagaagaccttgccacggtcagaaacgatagaacagggcattccatgcaagcgaacctcccttagaccctaggattagtatggtgtcctagaaccactatttatacccaatccactactgttgactcgcttcttttctctctttgacctgtgctgccacatcagcagtcaaaaatgggaaaggtgtattttctaattatgatttctttatactgatcgtgtatataaagataagagtacaaaaaaagaaacaaacccaagaataaagagtaaaatgatccctttcctactatattacaacttaagatttattcctaatatatatatatatactaattttcctacactcccccttaagctggtttgaaaatatcctccatagccagcttgctattaagaaaatcaaattttttttgcagttcctttgtgaagggactttacagccttccacgtccttattaacatagaggatccccaatttctctaagaacactccttctgcgaacctaacaagcgaagggtacacatcaacagtgagtaatactcggtggtgtccttccgtgactgccacgtatcagttgtccaggaatacgaataacacctatcaatcctaattaccaagtacacgccttcaaaaaaaacaaatctagtgtactaaggtctggagagcttggatacatgggttttggaaagaaaatcagagaaaataactctaggtttactagaagtgtattttgatattgtttcttagtgaaaaacttgctgataatctcttgggacataagcaagttttcctcgaaccacgttacattattaggtaatttatatttagtgtctcattaaatctacagtatacaatttcaagcaaattgtgtttcgagataagagtgtttcaacagtaaaaggttaaataaatgtaatgtttatacaacaagtgaaaaactattatggactttccctataggttgcttgaataaataaatagaatgtgcagaattgcataccgcttcaatcccaagattatccggtgtatcatcaagaactgttacattctcctccacagcaattataagtggctgcaacaaaaactctaataatttgtaaatgatatcaggtaaattgctatgctagataaaacaaaaataatccattaggaagcaaaaaacattacaaaatattttttgatacttacctttgttcttttgtttctagcaaaagctagagcaccatctcctccacaagcatctattggaaggatgacactatcaacatcacttgccaaaatacagcccttctctaatgacgcagagttcatttctaagtattgtggtgcattaataagcccagcaagtacacatggtaagaatgtgtatcccaactaccattgaggggaaaaagaagaagaagaagaagaagaagaagaaaagaatgtcaagtatgacttgcgttaataagcaaaacatttgaaaaggttggatgtagacttgttcaaatattaaggatgtgtttgttataagttttgatttgcatgaggatgtggataaaggaattatgaaactcaagtgtagaaatgtatttatattacccactaaaagtttgtaggacctaccacattcccacatgacaaaaggcaccaaataagaggttcccttcaaaagccccacatcccaacacttctccccataacaaacacccctaagaaccataaatactgctaatgctattcaagttgttttccaattctcacagcaaacactaatgcatctacaagcaataagttctactctaataggcaaagagactaagttaatttaagagattactaacctcctcagcagctgattttgggcaaagagatggacaaagggaaggaggtgataaagcaggagcatgcgcgcaagggatacagaattccctcaccactaaatgactaataactgcctcgactcctgctaaaatatcaactccctgcagagagatattgcaagacggtattagatatgaagtttgtggtacaacatttaataaacaaaatataagtcccctacgtaataaaagatatctgccagtaactcatgtaaccataatagaaggccttgtgtgtacttaatgaaaggaaatcacaaggcttggtccgtgcagcataaaaatcttcacatgcttttgaattgtgattatataaaaaagattgcataccaatccttgtcgatagtcatctgtttcttcaatatcttcatccgggaagcgtccaacaactgctatggcattcactcttgatcgattaactagattttggacagctctcaatagtgaatcagggtgcctaatcctccccgtagattgcccaccctttggatcaacccacatttctacctgtaaaactagttcacttcaatctactgcagtagtagcaggaaaaaaaaaattaataacctcatttctctgtgctacactatatcacactagaagatctattccatagtccatattgatgacacactactccatttctctgtgctacgctatatcacactaggtcctgtcaaagcttctacagatcaaaagcccatatgttagttatcaatcaagtaaaccatgttatcaatcatgtaggccatgactcttgaagtgcagtctaaaaggaggaattggaatttcattcttaatgtctagtcacagatttgtcactccagttggatatgactcctgtttttagtagaccaaaacgattatgttcaaaaaggattggcttaatagcataaaaataaagcctcttgagacttaaattggtctttcagtcttccaatcccacaattcaccagaagtggtggaagtttaaatcatataattgtctgcaaaaataaattatcaagatagcatctcaagtgagatttttaagaagacttcttcctaggagtagcttttaaagatgtaatttctgctttttacgacattcaacattcaagggtgaacaatttctagctacattaaattaatttattcttaggttattcccactctatgaaccttcaagtactacaaaatctgaatgaaaagagggagacaatgcaagctacaaattttgtctctattcaaagcagttcagatttgcaatggtttggaggacagtaagactgggacactaaaaaaaaaaagttgcttccatttaaaatcactattgaaattccatcacttttagcttgtgggttcttttgtacagatagtccccagcatttattctggaaagtattcactccaccgaaagctaagttattagttagttggcatcagtgctccttatcgtaatgtaagaataagaagctttggagttcagctaacttagcaatttgtgaatgatatgacaagaaaggagaaacgaagaatacatagaaccgggaatcgggcaactttatggataatctttccaaaaatagtttgaaatatgttttgtgacttgttcgttagggatttggcatctaatctgtagtaatttgttgagaaccgttttctccaattgcaattcatttttataagaactattttgtttcttatcaaaaataaataaacaaaatacaggctgacatctatcactatccaattctatagatggataaacaaaatacatataatgatggatgaactaaaaatcagtgtcagttatctacaagttatccaataaagcttatagagtttaatcagtcaattaatttggacaataagaccagctcatatattattagtttacattcatctcaaaaacatgaattcatttgaaactagaattctaataaacgcgtgctctgtttttatatttttattcttttttgacagataaaatgaatatataaatacctctaaaggtgtatcagtcacaacatattccacaacattcaagccaagagaagcccttgcagcatcagccacttgtaaatggcgaagcctaagatcttcctctattccagcatcaagaaccag

SEQ ID NO: 20476 - DNA, 1590 bp, Cannabis sativa
ggagttatggtacttggattcaaactatcaagaaacgagaatatctatgctactaggttatgctaaactgttttcatgagagttgaaactttgtccatattaagcatatcttatgttcacataatgatttttagtaacttcgatacctctccatgcaatggttctccaagtacacttggatatgtaattggtgaatatctcaagcctgctactggttcacctggactattgggaataatctgtgaaaaaatccgttgagttccaaatgtagggcaatgaaggtgttgatctaacatttgcatgtgcatagccatcatatctcgcctcctatggatctccaaaataagcgtaaacaaggcttcatcatcaggtatattttctataaactgcaagccactgcgcagtaactcgtaaaagggaactcgacatttatcctcctcaaccaaaagccaaattacatccaagcagctatgcagccactctattaaagccttgtcaagtttccacgatttgaaaccatcagatccattaatcccctgttgtctctgatcccaattcaccagccaattcagcatatgagtaaaaatgtcagcaagagtcactggtttaaggttaaattcaagaccagctaagataatcttgcaacagaattgccgtagactgctaatagcattatcccttatagatgaattcacccttgatgaagactgttgtatcacacaggaaatatcagatgatttgattggtgataaatttgcaccaggagctggttctaaagatgattgaacaggagacccgataccatgcacagaaggtaatggagaggcaggatttgaagactgaaaattagatgaattggagattgcattcgacgatggaagcaccgcaggctgtgatgaaactgaagcaactgtttgactcccctgacccaaagtcgtttctgccgtagaaactgaagaaagaagtgatggcaaaaaagtgtcccagttaatataaccaatactgcacaagctacgtaaagcaaagagaagaaattctgctcgcggtacatgtccactacaatgcacaaccaaagatataagaacagattctgtcacagctcgcagctgttcttgatcctgaaaattaaggggcagcatagacatacaatacaaagattactaggaattcaaatcaatgtagaagatgatatcgatcaaaaaaataagcagctattaattagactacggaaagtaaataaataaactggaaaaggctaaattgataatcaaagtatgtagcttacagaaaactggctctgaatttgttcaaaatccgaaaggaactgctcatttctaggagctagctctcgattaagcgcgactacacgcttttgtgtcttgttactgtacaagatcatagattcattcaaatgccactaaacaaagacttgataaagcaaagtaaaaacaaaacaagaaagcaaaaataaaccccaaattcaaagtaagcaaaataaaccccaaaattcagagtaagaatttcgtatccaactcaaaatcacaacttatatcattctagcagtaaggttcaaacttcaaacacttcttt

SEQ ID NO: 20477 - DNA, 4146 bp, Cannabis sativa
atttcctaaatttgaacataggacatgattgcctattctctatgaggtgcttaggtttgtaataggcatttggtgagactagagttgtctcttgctaatgatttgatagctaacaatgtagccgtcaaatgatgtatgggacattgtgaaatgagaaaattatgattttaaaccttcaaacatgtttttctagagtaatgtgtaagatgttttttcccatgccgcattacattcatccacaataatttaacctcgagcaacatgccatgctccgcctatccttccatgtcttctcctggtcgagttcacttgcagagagaagagataaaactatttatcctcttggtggatctttccgaaagtgacaaatctctcgaaatacttgtaaattaccaagctccggaagttaatttacaagccaataaaattgcacaaactagctaataaaaggcataaaaagccaacctaatggctaaaacctaaccaaacaattaaacatatgacataaactaagcacaaccaaggatagattctagtttgaatgtttatgtggtttggattcgcaggagattgaatgaggcagccgaagccctaagcttaccgcttgggcggcctccaccagttctaccggttttctttctataagggatgtagaaccctttgtttctactaactctattatgtgtggactcaagtttcgttgaatgaagtgtgttttaagatcaaaaagaaaaaataagcacaatcaaagacttaaatgtcaacgataacttacaatggctctgctgtaaaactcggccataaccggactgtggtgcactccatcgaagatgcaaccgccgaagaatggcctgcaaaaaacagtgaagcgggtggtatggtgatgtgatggatgctatgtataaacacacacacatatatatatatatgcatagaaacagtaaatgctcatcaaacaaaaatagtttgtctactctaaattcaggtaccaagatgaatacacaagtgtttcttctgaaagaaaagacccttgagaatctcattaagaaaagaaagaaacagttacaatgacaaacacaatgcagagagaaatgtaaggaaaattgatcgaagcagcctctcgaattagttttgatcatccgtaaaattaatagcgagatcccagtaatgaacaactcctgcatcagcataaatcttccgggcagcagcttccgtcatgcaatcatgaattaaaaatttagtgaatgtaggcttagcaacgctgccttgccaaactaacacacatttgtttggaggtttatcatcttcttcatcttcgtcctcttcctcgtctttcacagcgttttcccagtttattcgcctaagcataagcttcccgtacctcttaatggatttacttccaccttcgacaacaactactgtgataccatcagcaataacagcgcacccagtcaatcggttctgtcgtgcaaaaatgtcaaccttaaatcgagtctgaggatgcgacaagtcatttatcttgtaaactgaaactagcgtctccactgtgtttggatcttcaaaaagcttccgctctttcttctcgcggcgctcagcgggagtgagcttccgtgcagtattccgatctatgtgagcttgttcacgatcggcagctgcactacgaatttccttctcaagcctagttggatcttgtgttgcttcagaaccaagaaccttcatcaaattactcattttaactttcggttttggaggttctatcaggccttgtctaatcatctcctgcctttctctctccctacccaatcgccgttgtgtacggagtttcttttgttctttctttgttaacttgagcggttgaggtgggggaggagctggctcagccgggggctcaataggacgaggatgctcaacatagatggtgattttctccagccttaatataccatccgaaatattaccatcagcaacatctccataaagaccagagtgcaaaagaggcacatccctgatacacacatagcagttataattagaaatgagagcactcaaccgaaattgatgaaattgatttaattcggttgccaaatcgctaaaatctctaagaaatgtagtggaaaagggccaaatcttgtatatgcaacacagaagcatctacaatttatatataacaagaatcatcaagaaatgactcatttttaagccaaaatcgaaaaaaaaaaaggggataataatgccctaaatgtaccattatgcataccacacgaatgcatgagaacactattaacttaccaccactcaacttcaggaataggttcctttggtttttcttttgtcataactctctcagatacttctatcaagtttggatttatatcaggagctgcctttgccttcgctaactgtgcctgctttgctctgtgctctttggcttgtgcatctccaaatttactctgtaagaatattgaataaataactattagagagcacagacatcagaatgtgaggtctcaatgtaacagagagtagtacctttaattttatatgctcagcatctttagaccacttcccttcctctacaaagaggaaattcatcctcttaggccgcatgattttagctatattcaaacccatccttgaatcaaaatgaggatttgattctggatccacatctagttcaggtttaagtatctgaaatgcgtctttcttctgtttgttaatgttaacctgcaattgagagattgtattaatatgctagccaacaaaatgacctagaatttcaattaacaattcctccaaaatgtcgatttcaaacctttaaggtgctgagattgcttggtttagtcagattcacgacatttccatgctcatctatttccctgccgagagcatcaaggcgaagaacaggagctttagtaggcttctggggggcagcagctacatctgttgtagcctgtcctggaaacaagtttattaaaggagcaaactctgggtcctggcgaaatcccatcctggcagctagctcttgtgcacgttttacagcctcatagttgggaatggccgtaagaccagcagaagtagccaagccacttgcagggttcccagaagcatggtttgaggaattcaatgttgcctcggttatagctgtagcagaggttgatgatgatacagatccaggcttcaacccctcctttggaccaaagtttcggctattttctgaacttgcaccaacacccttgttcaactacacattggaaaggaacacacacaatcaataaatgatgggactttgagaaatggaacattgattttgattcactgaaaacttacaaggggaattctcttcatcttctctgataattccttctgcatctgtaaagctttcttagcttttgctaaagcatcaagagacagacttgtactttttccagcagttgaagatgtcccatctgtactagattttccaggaacctcatgagatctggtaatactaactcccttattttcatgtgttgtagaaatcgaagataccttggtaggaaggggatgactaggggtgaaagaggtttcaggtaaactccctgatgacataaccagtggttcgggcgcagcaacctatcaaaatattatgtaaaaacacatcccaacatgcaaacaatcaaaatgatatacaaaaaaatccaggataacgaagaaatgcaaacgagaaggaaaatgaaaagcaagagaatactcacattgcccagtgaaccattcccattctctttaccattcccagcaggggtttgagaattatccaaatgcacatgagcaacttcttctttcacttccttcaactgtcgatcctcaaatctccggcgacccccattatcttcttgctcatcttcttcagccctatcctctaaccgcctcttctccttcctcccatcatcgtaaaccttagccctcttctcaccatccccatccctattatcctcacttgtacccctctctttcctcttatgtctcctctccacagacgcctccctctcttcagacatctcgcgctttgattcccgatgatgattagccttttcatcaatcctcggctcatacgacctctcacgcttcgattcgcgatcgtagggcctatctcgactcccttctctt

SEQ ID NO: 20478 - DNA, 4601 bp, Cannabis sativa
attttctctgtctttcttttcttctctgctttctttctctacatggtatcagaagtcttgactcaagactatgtcttcgtctacctccgatcctcaggccctgccatgactcctgcaacacaagctcctcaagcacctgcctcacaacccactcctactgaatcctggaatccattttcaaattctttgtcctctctttaacaatcaaactcgatcgtgtaaacttcctttcttggaattcttaggtcattcccactgtgattggaaataatctcgataagatcttgttcacaggagttcctcctcccaccacactgctcaatggtaactcgaatcctgaatatctccaatggagacgaaaggatcagttactcttatcctggttacgttcatctatgtcagaaaccattcttgcatctgttgcaaattatggtacatccttttctgtttggcgcgcacttgaacagaagtttgcttctcaaaccaaagccagacaacttcagcttaagggccaattctcacatgtgcataaaggaaatcttcccatctctgatttcattgacaaagtgcaatcgattgctgactctctggcgattgcaggatcccctgttgatgatcaagatttaattcttcagattctaaatggtctcggaccagagtttgattcagtggtttcaggtataacatcaagaagtgacatcttgacggtcgaagatgttcaagcccttcttctatctcacgaaagtaggatcgaacatcatcttgctatgaatgatatcactgtcaaaatgcaggcaaacatggctcttggccaaggcagatcaacaggtgttcgatcatttgccaacaacaattagctaacaacatcaactggtcgaggaagaggtttttctaaatttcctcatcagaaagttctgtgtcaagtctgcatgaagattggccacactgtagccgtgtgtcattatcgctttgataaaaactggacagccccaaaactaggtaacaatcatgcctttcttactgagattgactgtgattgtgatcctcaggcctatacaatcactatgatccaaaactttggagaagacaactcctggtactttgattcaggagccactactcatgtcacctttgattcaggcaatcttgatgagtccgaacccttctctggccctgagactcttgccataggtgatggtaagatattgtttatttctcacactggttctgtctctattccctcttatcataaaaattgtcctttacatatgaaatctgttttagctgtgccttcgattactaagaatcttgttagtgtttctaagctcactcaagataatgacatttttcttgaatttcacaaaaattattgctttgtcaaggacaagacaacagggtctgtactgctcaaagggaaagctagagatggcctctaccttcttggtgattcctcaagtcacacaagctcttctctgcaatgtcaccttgctacttctgagtctttttctactgattgtgtctgtaataaagattgtaattgtaattcccagtgtgctattagacaccaattttgtaacacacattcaaccaataaaagttctttttcttgtcccaatgagcaatctgtttttcatgcctcaacaccctcagatatcagcctttggcactacaaattgggacatctagctatgtccacattgcagaagctactaccaaccataccacacactgacactttaaaacaattcctgttttgcaatgcatgccagaaatggaaaagtcacaggcttcccttcaccaattcctcaaaaagagccacccaaccactttcccttatacatactgacctctggggtccttcttatgaaccctccaaagaatgatttcaatactatattcatttcttggatgattatagtcaattcacttggatttatccactgaaattaaaatccaaggcatttgaaatgtttattcaattcaagagtttggttgaaaaacagtttggcttaccaataaaaagtgtctaggcagattaaggaggtgagtataaaccatttgctaggttcctagctgatcaaggtatcttgttttctcacccttgccctcacactcaccaacaaaatgaccgagcagaaagaaagtatatgcatatcactgaaacagggctgacacttttggcacaggcaaaattggacttcagctactagtggcatgcttttcagtgtgcaacttacactataaacagattgccaacccctgctaatggtaatattagcccgtatgagtgtttgtttcacactaagcctaaatattctatattaaaaccatttggatgtgcttgttggccacatctaaggccctataactctcacaagttagagtcagatctgagaagtgtttgtttctggggtactcacctgtccacaaaggctatatctatgaaaataaaaatggacaagtgtttattgctcaaaatgtcattttcaatgagacacactatcctggcatgcctcaccaatcacagactgaacaggtaactaaggcagctccttcctttactcctactgctacatttttaactaactcatgcactaatactacgcctgttggtcatgtttccccaaatactgagacaatggttcccccaataccaactgtgtcaactccagcacctcttgtgccccatatcttacaaccaataccagaaaactatcctttgtctacactaaaccctgccacaaacactaaaccattgtacctgactctataaccccaatagacactaccaatgctattactctagccaatgttgaacctgtaccctcccaaacagacattccacctacaaacacaaatccttcaccctctcatctaacccaaaccattgtctcagtccccacaagtccaacaattgttcagaactcacattaaatggtcacaaggtccgaaaatggcatcactaagccaaaagcctatctttccacaaagcatcctctacccgagtctttactgccatctaaaccaaaatccttacaattggcactcaaagatcctcaatggttcaattcaatgcaaaccgaagttattgctttaaaaaaggctgtcacatggacattggtacccaaacaacctggcatgcacattattgataataaatgggttcataagatcaaattaaatgcagatggatcactcgacaggttcaaatcgagattggtggcaaaagggtatctccaggctcttggaattaattatgaggagaccttctctcctatggttaaacctgttacagtgcgtactttattatctttggttgttaattcacattggaaagtaactcagcttgatgttagcaatgcctttctcaatggattgctaactgaaactgtgtgcatgcatcagccaccaggctttattgatcaatcaaaacctgaccatgtatgtcttcttcacaaggccctttatggtcttaaacaggctcctagagcctggaatgacaagctaagaactagtcttattcaatgggatttcactagttcaaaatctgatgcatccttgtttgttcatggttcgggataccgacttattatactccttgtttatgttgatgacatacttgtcacaggtcccaacaagaaccttattacacgattaattactgatctcaacaaggagttctctctcaaagatctaggtgacgtacactattttcttggagttgaaatattcagagatagcaggggcatgttcttgtctcagaccaaatacattactgatctattagttaaggtacatatggagggtgccaaagtgtgttcaaatcttataagcaacacccctaaattgttcttacatgatgcagaattgtttgaggatcccactctttacagaagtactgtaggagctctgcaatatctctccttgacaagacctgatgtggcttttgtgataaacaaacttagctaattcctcgaagctcctattgtgtcacattgggaagcttgtaaacgattactcaggtaccttaaagaaacaatttcagatggtttattgctcaaaccaaccaaagtcttggccttgcaaagctacgtcgatgctgactgggctagctgtatagatgatggaaaatccacgggaggctatgttgtgttccttggtgactatttaatctcacggtcagctaagaaacaaagtcttgtggcacgttccagtactgagagtgagtttcatgctctagccaacactgcagcagaattaaaatggattgtttcattactcactgagctgcaagttcgcttgccccactgccctattatttgggttgataaccagagtgcgtctaccttagccgctaacccaatttttcatgctcgctcaaaacatatagagatacattttccctttatcagggatcggatattggccaaaagtctatcagttcgatatgttcccagtcatgaccaagtggctgatatgctcactaaaccattaaccaaggatcgattcatatatttgaagtccaaactgaaaatggctcctacccctttttgtttgaggggggatgttaacacagctcactaatcctagttagttttcag

SEQ ID NO: 20479 - DNA, 3770 bp, Cannabis sativa
gttactacttggtgtaatatgattttgacatcaactgaacttgtagacagcttaaagttgttatttcactctttggctgataggaaagtagcttgatcttttaaaatgatatttaactagtatgaaaacttcaggttttgcaaatagagtatcgtagggttgggaatattagtgttttgaaattcacaagcttccgtttaccaatactagaatgggaatactcttacatgttatatgaaaattgatttatgcacgcacaatatggtaaaggaaccgaagcttgttagtcattccgtattgttgttgtcattatcagttagtgtactgtgatttatattggacatgagattctgctggatgctaagacaacatgccatttcatgcagtattggcacgcttagtggatttatctcaattgaagagttgggtggatgctatatgaatatcgagtaacaaatttctgagcatggataaagtttcttctgactgtccatacccgggatgcttcttttgtgtcatgaaggaagggaatccgagcaaacgtagagcaagcatcttgaaattttttagggacctcccggcgcaggatgatgatggtcaggttctccctatcagtggcctttggaatactgccatggcacatccaaatgatcccgagttcattgagttggggatatttgaatgcatggctgcacttatatggaaaggtctaaagaatcgtcgctggctttcacatgaccagaatatatacattccttactatgcagcacatatcattggatcctataccatgaacatggaagaattcgctgaaaattctgtgcacgcaggggttattcctcccttggttgaacttttgaggggaaggttaacttgggttgagcagagagtagctgttcgagctttaggacacttggcaacttatggcagcaccttttctgctgtagctagtcatggtgaaattcttgaactttcgattcaactagcaacgagttcactggaaatagtatactcacatttctaccaatatgttgatagaaggttaagctatcactgtgatttgctcacacgcggcatgggtggggtcgaaatggaatccaggaaggcagaggagtgggcaagccagttgcagtgctggtccctgcagctcatcaactgttttgctttcaaaccagagtttcttcctaccatttgcaagcctgaattcttgataaagctacctggcatgtggggtggacttgttaatgagaattcaccagctggtataggtttactaagaacaatttgtcatcataagctggggagaggacctgttgccagctgtccgggtatgattgaagcgttatgtaacattgctcggtcgtcagatgattggcaatacatggctattgattgtcttctttggttgcttcaagatccaaatacatgtcataaggtgagtgtcatgtgctaaatgagccgtttacatcatctcttagctgtatagcccttcatttttgttatgtttttatattgttttcttagttttagtagtaagttaacatattttttatgtcctgtagaagtttgctgttattcacaatgtatcttactgtcactgtaattgtgccctcttttgatgttgaaaagacataacatttttgtttgttctgttcccgaaacaacagggaaggaacatagtagtaaaataattatttaggaaacccatataatattgccagtgcaagattaaaggttgtgaggcaaattatttatgtgtattgtgcctcactaaacatgacatgagtaatgctttcttaagcttatttttttgttgaagcaggtgactgttttcttagatatattcttttacataattagataatgctttaatttctctcctatgtgtttgacgaggagcggaaggaaagttttgagcttgctagtttcattcagatccatctattgtgtgagatagtgtagtctataaaccttctcatgatgctttaaaatgggaaagctctattctcattgtatgaaaacatgtcactaaagaattttttcaatgttattgtttgaaatgggagtgtcatcttatttaggctaatttttagcaaatatttggcatgcggcatactgtggccaagtacttgtaatatgctcttaccaaattttcacatcatacttagctaataacagatctgactgctggattgtttttactacaaactctgctataccatcctgatgctagtacatttattgtataggtgattgataaggcagtaccgacacttgtagaccttgctgaaatcacaacactaggtgatcacaagaaacttggagactccattgttaatgttcttcaggaatgtattcagtcatcagggacaggtcgtaactctctaagcagtcgcactaaagaaattattgaagaactattaagttccagacagagattgaagtgggaaaagactatgcccaaagaggatctccatattaaacaagcggctgcactagtagtcaagcttgaaggaaattctatgttctcctcgggaaacatagctggagctgcatcaaagtattcggaagcactgtcattgtgtcctgtgagatccaaaaaggagagagttgttctttacagtaaccgtgctcagtgttatctactgttacaacaaccggttgctgccataagtgatgctacacgtgcactatgtcttcacaaccctcttaaccgtcatgccaaaagcctttggagaagagctcaggcgtatgacatgcttggtttagcaaaagagagcttgttagacgccattctgtttataaatgagtgttctcaatcaaatgatcctgatctgtcactgaggcaaaataaggttcctgactatgctgaaagattagtcaaaaagcaaatgcgtgctgcatggctgtttagagaggcagccatcaaacatggcggtgtgcactgtgagggtgatgctggtgagatttatgggcaagaaactgatgattctgaatgggagacagccagtgaaagtgatataggcaatgatggaagggatgaaatgggtgacgacgatgatgacgatgatagtgaatggaagaatgagggtgagaggaaagataaatatgacaaaccatctgtgaaaggtactgtttaataattcagctcattatatctctatattttatgggacacatgaataaattcttaaatagtaaaattatctaattgggtactgctcatcttattcttatcaaccatatatcggctgatcaaaatctatttccataatagcattgactacagccatgttaatattgtcgtcgaagataatagtacttgtctcttttttaaatcaaacgaaaaagtctaaatacctgttgtattgtgtttaattttatagtcatagatgtctaaagactatgctaaaatactttatttgtacagacctaaagcatggatacaatgtgcagctcgttgaagatgaacagtagaactcgaagcttatatcgaagcatgttggcaacaacagaacgggaaagatgagcaaggaaagcgttcatcaacaagtaccccttctgaggttcaattgtcaaatatcctcccctttgtcatatattgaagaaaatgaaagatatttgtgtcaaattcaaacttaacttttattgtgaattccttttgagacattattccaatttttttcatgtttagaaagcccaagtgtagaaaaagtagaaaaacaaaaaattaaaattttgagtgcaggagacctttttttttttttttt

SEQ ID NO: 20480 - DNA, 3185 bp, Cannabis sativa
atacacacaaatctaattattgtagctttccaaacgcacccaaaaatttcccaactaaatttccccttggaaaaagtttaggtgagggcatgaagctataggtgtattttttatttttggtatataaaaaattataaactatctttctatataacagaatgtattacaattatagagttgcacaagtgtctgtttaattttttaattctattttttatgttgtaaatcattcaaaatttctaaaaaatgtgcagaataactactataattatagtatacaccaacatcataataaaaataatagaatacaattttttttcagtgtaaaaaatataaaacgcccttggttatagcaaaatgattctccttattagctacttataataagaaatgaatcttcacacaattaatcatgttgtataaataaacgtggtgattactgattagaataaaagtgatatgattaagtcatgattaatagaaaatgctttgaatgaaagaatgtaagctccttgcctaaatatatgtgccacctagctaataattaactcatgtcgtcctagctagctacacatatggatctactccaatcaacattcaagggtgctacattggtgtttggttactttcagacacagattttaaagtcatatatatgtgtatatatacttagttgtatctttcttcaattcctataataaataacaagtaggcaagtataaataattagtaaatgatgatctctaaaatgtgtgtattattattattattataataatatatttagagaaagagagagagagagagtacacacgacgaatgggaggggttctaataggttgatcatgctttacaggttcaactgtggcgtgcttattcttgttggacttggaagacgatgatccatactccttacctgaaccttctgagcttacaataatctgtttattattctgtgacttttatacaacaacagaaacccaacaaactaatatcagttatgactaattaatcattcatttggccctagaaacatgatgaggagtgattaaagctagctttatagtgttagccaatttcactataatatatataaaacaaaaatcaaatcattagaaataacctcttacacagacaaacacccatataaatggaaaaatgttcttaaacaaaacaaacaatttatggtttctatgaatatatatccccaaattttccatctaaactgaagagaccactttccccaaccaaaataaaagaaagaagaaagagagaggccccctaataatatatatgctaactctttataatgggctgaaatttcttgttcttttctttatatgtagattattaataatatgggaaatacgagtcaaagggaggtaagctttatatatttgagaaaattccttatatatttcagagtatatgtatgtccaagaaaagaatgaaaatgtgagaatgaatatatatatatatagtaattaaattaacctggggatgatcttgaggagccatagttggcattgaagttcccatattgacagacaacagatttgcacaatgcccacatctcactgtcacgatggtaaataagctgctgcatggaacactcacctgccatatatttcccacactttattattattattattacatcatcccccaaacaactaaaacccctctcatttcatttctgtacttgtttttctttttcccataaccgaaatcaaggtaaaaaagaggaatatatataactagtaaaacagctttccatataataataagaacaaaaatagattagatcatggtctcatcaccatgaaaagatgaagattaatgaagaggaacaagaagtttgttctttgggattctttaattatctatgtaaagacataaaaccttgacctttagcaagctatgacatcagagttcacagagctcacatggcaatatatatatataaatatataactaagaggtgtaatactacaacaactacaactactactactactacttctcttgatttctctctctctctctctttgatttgttttcccaataacaataacaattttaatcttttccttttggtgcacttgggtggcttttatgcctgacaaaaaacccagccaggaaagaaagagagagaaagagagaaatatattgcaggtgagatgagagagagagagacgaaagcgacatgactggaacggaaaccattaaaggccatggccagcattaaacacagctataacaaaaataggccacaaataaagaaagatgaatcatgatcaaagatcagaagactatttcagtgtactctactgtttcttttctgcactaacgattaaagatcatcaaaaacagacaaataattatatatagtacttttaattacatgatcttaattataataatggaaaaatgagagaagttgctaagttatacggccaatgggcataatttttcttttggctttgttaatattttcttttgattttgaaaccaaaagatagatcagttttggttatgatcagaagggaaagaacaacttatgttttactaaaatcatgtacaaaccaaaaatatgaaacaaacttcatcatcatatatatatatggtcaaagcttctttctctctctctctcactactgccatggcatcatcatatgtgagaaataatagaagaagcaccaatgtttgcccaaagagacagatcaacacaaacaaataaaagggaaaccagacggtgatttaacgatgtcagttactgtcactataaaaatataataatatatatatatagatcactaaataaattaaattaaattaatattaattatgatgtagtgttataaagtcattacgaatcacatgcatttatataaatagagtttgactaaagaaaaagggttgatcgaatttttgaattgggatcaaccctagctagcaagaggtattaaataatcgaaaccctagctttttttttttattattatttttataaaccctttagaaaatttgtatcttctttagaaataagaagaaatgtttttgtgtcactgtacagatatgcctagctgttctctttacctaacttctttttgtggtctgcttttcgtgatgatttggaattcataccttcctgtgcagattattacactcttcatatatatata

SEQ ID NO: 20481 - DNA, 4627 bp, Cannabis sativa
ggtggctatggatgtttaaatcataataaagtgaagtgaccattgggctgattttggagctcataaattgttagcgtaccatggacgatttgcgatatttaccatttagtagggctatttgcagtgtgagtagtgcaatttttaactattttttcaatctaatttgtatatgtagttttttcaatttttcaaactgcaccgcaaaaaaatagtacgctgcggtacaatttttgcagtttggactattactaaataattaaactatcacaaatacaacaaaactttagcaacacctcacaaaaatattataaggcttcaaaataaataagaaaaaaagtttcaagttacaacagtagaataattagtaggctttgagttgagcctttacatattggacataaataaatataaaaatttgtatttttataatatgtggtgcagtgcagtttggaccgcatagcaacaattcaaaacaacaaactgcaactcaccacgcagtttaggaaaaattcaaactaaaaccgcactataaagaatttcaaacaacattttttttttgcagtgtggtacagtgcaagtggtttaagcgatttaataaaaaccctaccatttagtaaggaataaaggagagaatagaacaatataaatggattgaagtagtggtcgttctttccattcattggcctttgacttctaccaaaaataagttggtgtggggccatgataattcatgtatctataatctataatgtcaagagtggttactggttcattctccaaaatgaggggcttgataaagctttctctgctacggggtattcaagttggtagaagaaacttttgaatcttaacattccttgcaaagtaaaaatatttgtttggcgaattttttctaattggattcctactaacgagaatttcattcaacatggtcttttgagtggcggaatttaatatgtttatgatgattgaatggagaccacccaccatatgtctgcatgataaaaataaaattaagtttaaaagccacttagttggctaaattgtatcaaaaataaggccacaggccgaagtacgtacaaaaaatcaaagatagagacatttttatatgtttatgggggtcgatgagttcagatcttgggcggctaagttgttgtcgtcctactcctagatggaaattttcgggttagcagcttcatgggcagcattgctctctagatgctcgacctcctcctcggatttctcctaagcagcttcagattcgcaaaaggccaatagtttgactagttcatccttagcaaatatgtgaattattcttttggattaaccttccagaactcgtaaaagaccataatgttgcctatggtatcatactttttgttgtccttctaatgggcctcttccccaaccttaagagacttcgccaactcatccacctggtcagtgagattgtaattcagccgacgaaagccttccctttcgtcctctagctccttgactctcttggtttcaccttcaagtgctttctccaacttgtcaaccttggcctggtcgacaagttctttctctagcttgaccaccttattgttaacaatgctcaaaaatttgttcacctcacccaactgtcccactttcttctcaagctccttcatttctccgtgagcaaccttctagagttcgttggaggaactctcaacttgagacgccgaatacttcacttgagagtagtaatgctcaagcttgaggaaacctaaagagagaagtagttagaaattaccgataggcatatattgagctaaaataaaaagacttgtaaaatttttaccttgatcaactccctggggagcccccgaccaattttttaaccctaaatttaacagcccctttaataagatatcagtttcaaacattacctagtcatggtaaaatttcaccatctccttagccttttttgcctatggaggaaaggggacatgcgcctgaaaatacctcctaggtttggaagtaggagtagtgtgaggtcgggtgctagagggagtctcagcagtctgctcagtaaattgtggagttgggtcgtccaagtcaacaatatccctttgtaggacttgagtcccattgatcaaagcatcaaggaccgctcccttggccggaggggtctttcctccctggactaaagaagcttgtctatgagtcttatctagatacttctgggtggaagaattgccttccttcctctttctagttaggttaacatcttggacgacatagccgcacaagtaaacaaaacacttagtaaaaaaagaataaaaaaagaagctaagtacaacatacatatatggcaaagcaagagaaagtaaaaatccatgttgtcaactccctcgattatctgaggagtgtcatcataaagaataacagtgggtcgttcgtcatctgaaaaattgtgagtcggctcttcttccaccactttcttccatttgcccttaacaacgggcgtacaggatcaactagcctctaccactagttcgtttatcctcatatttgaatgagttggttgggcaggaggcgtaagatctcttgggatggccttttctttatttaccaatgcatgggcagtagaggacttccctttggcctatttggatttcttcttacctgtaatggatggatagagttcgtacttgtaaaagttttcctctctggcatatatgtagagtgcactagcctccttggaaagcctgactatcttttgggccctactcctcaactctaaggtgagcaatgggcgaaagaatggcttgacagtttggaacgaatggtggttagcttggatgtccatcgctataaagtaatcatgagcataacctcccatctttgttatctcttttgtgcccgtcagccacgagtagctaagaagagtaaagtagaagtacctcgaattgtgattgcagcggttggatttgagatcaaaaaaccaattaatctcatgggcagagggctcccccaaaccttgttggtcgtacagtacgtacaacgccaacaaatactttaactccttggggctaatctacgtcgggcagatgttgtaatagttggctatattatattcagttttatcgtagaatgagtcacgtgatggatgttagttaataaataaatgcaaattaaatactcttcactagaaaaataaaaatataatttgaaatcatatgataatttttttttatagagatttatcaattaaaaaaaattattttgtgtgaaaatctctaatcaaaaaaaaaaaaaaattagtaaaatagttacacatactaacaaaaaaataaaaaataaaaaatatgaagtatgatataattttatgacttaattatcactaaataaaatacaatggcatgattgttcaaaaaaaaaaaaaaaatacaatggcatgcgaagcgtgattttgttttctagttattataaaaaagaaacaatcttttattttgttatttattaacgtaaaatgagtaaaaaatatttaatttgcatcaatttattaattatcatttacaatttttaatttattttataataaaattaaataaagtatgttagaaagattacgttactataaaattgtatttaaagatatattattaataaaccgtatactacaatgttacaactcggtagcctaaaaaaatcaagttaattattttttctaagtattgcataagactgaacataaaatttagaaaactgaaaaaacttttcaaactaacatatcgaacactgttggaaccaaaaccgaaaaatcgaaaaaccgctaacggttaaaactgtcagtgaacggttgatttttttggtaataaacctactgaaaaaaccaaaactgaccattatatatgtatattaatttattaagtttttttttttgcatagtagttattaataatatatattaatatattatcattttattaatattaaagttaaaagaataagataattaatttttgaataattaattagtatatttgtaattgtaaaatgtagaataatgtgtttgtaaaataaattggatcatattttaaagaaaaaaaataaattcggtttgagcgatttaaaaagatcaaaccaaagttcaaaacaatcgatagattcttgattaatcagtcggttttcagattgcacccatcaagactgaaaaccaaattttaaatttttatatagaaaaaactgacgaaaccgaccgatacttaccgctaattagtcaacaaaatggtgttagaaagtagcaaaaaaacaaacaactctcgtaagtttggttcccccaaaagaaaaaatagtaatcagcagaaaccagaaaacgggaaaagaagagaaaccccaatgtggcggcacccatcgactactgcggtaacaccctttcacctctttctctttctctgctcttccaggctccaacaatggtgttgttttcttacttaagggaattccttttcaggccaaccctgattctgatcagagcatttctggtaaatccctcaattctcatatattctcacatacctccttttaactcactctctcaaggtagctagttatcacttttcagacgaagaagattttggtcatgtttcgcctgaaa

SEQ ID NO: 20482 - DNA, 2947 bp, Cannabis sativa
agatttggaacacattggattttttgattttaggatccaatccagtcatttgtttatttcccatgatcccatccaattttagctgaatttgttcatcttcttgggccttagtctgacttactaaaagttcatactttgaaatatactcttactaagctaaacgtggagggaaattcattggaaaaataacatagccatgtaaaaataagctcaatacttaacatcttaaacaaagagggtattgtgttagaaaataaatagccagtgtaagcttcagttgtttttgagacttgagagagtaacacctacaatacttaacatgttcagtaagtggggttgaagagttgaaggtatagacagattgatgtgcatggacgactttattactattttattgagaaatataacatgtaataaactatgtgttaatattagtaaattaacttgtaatagaattatatctttaaaattaagctggctttggtacatgtaatatgctcaaacgtattctgttttctgttttgtttgttattgtgggtagtaagttctttgtactcccatacctcttgtattatttcccatattattaatactagttctgatgttttgttttataaaaaagaaagacattgattctgctgtaaagttcatgcataaattttctctgaaaattacacaaaatatgaaaaatactaatgttaatgtctagtcacaatggttgagtttgatttatattgattgaaatttatcttgctgtacagatatctactggtcctgaagctcggcaagtcgatgatcctgcgacttcagcacaactcaaaaactttgccctgtgtcagcacctgcaagaaattcacgcacgtgtgtcaactatgattgcaggactacctgctattgctgtagaggtgctgtctcccgctttaggtgcaatatatgaggttgcctgtgactcagtgacatccctattccaagctatggttgatcgtctagagtcttgcatcttgcaaattcatgaacagaatttcggcatgcttggtttggatgccgcaatggataacaatgcatcatcttatatggacgagttgcaaaagtgtattcttcacttccgaagtgaatttttatttaggctgttgcctccaaagaatgctgctaacattggagtagaaaatatatgcactaggcttgttaggagcatggcttcaagggttctaatattctttatcagacacgcttctcttatcagacccctttcagaatcaggaaagctgaggatggctagggatatggctgagcttgaattagctgtaggccaaaatctatttcctgttgaacaactcggtgcaccatacagagccctccgagcattccgccctcttattttcttggaaacatctcaactggcatcatctcctcttcttcaagatctgccaccaagtataatacttcaccatctctacacacgaggtcccgaagaactgcagtcgccacttcagaggaacagacttaccccacagcaatattcattgtggctagattctcaaggtgaagatcaggtttggaaaggtataaaagcaactctggatgattatgcttccagagtgagggccagaggcgacaaggagtttagtcctgtataccctcttatgcttcaattaggatcatccttgacagaaaatgctcttgtaccccaaaagcataagcattgatatggctggtacatctgtcgagtgctattgtgaaaatggactgccaatttcaaactcttctatttcggaagatttaactgttgagagagtagtagatagatgggcaaattccattggcagcttttgaggtacattactagtcctttccacatttcagttcactttttcttcaattaaatttgttttgcagctgaaattacttcttatcatcttgtcaggtttttggttaatttttacaaatcagtgataccctatcacatacacggtcgatgtttgcggttgatgaaagaaaaagattcgtatgtatggtcactgaaaatttaaattttgttccttgttttttattcattgattgagactttctcttcccatttgttaggattattctcccaatctgcatataaattacatagtatagcaataaagtttttaaatccattatcccaaagttaatcttcttataaacttgcatttccttttactaacaaaatgattgttaaattctcataattgccaccttattcaattctgaatattgacacttttagttggaaaagtttgagtaggataatttgtcattgtaatcttgtttgaatatcaggagtggtacaaaatgtaatttttttgttgaagtgaataataaacttcttattttgtagttaggctttacattattgttattactgtttagtgtgtatggtatctgtatcacagttgtgagctgaaaaagaaatttacacttgttaccaacttagcaaccacgttggcggcgctttttgccatttgtatgccaaaaaagaaccatttgctttttattgttgcaattattaatcttgtaattgtcttcttattgatctgtccaaaaaaaattaaatatcttcttgtcatataaaataggaagaagttttttgctccataaataagtaaaatgggggtgtaagttttacttgtaaatcagtagattcatagatgaaatatcagaagtaaacaattaaacgcaaaatataaaattactagtgtaaggagctttcattcttgctcctcattttatcggaataattgcggtatagtgtataataattttcttctgttttgttagtacaaatttcattttgattctattaaaaaaaaaaattagaagtaaattaattgatattacatatttttgttcaagtacaaatgatttagaatacaagtttcacgtatgtcctgttaagtgttagaatgcgaaagtgtatggt

SEQ ID NO: 20483 - DNA, 6947 bp, Cannabis sativa
  modified_base (5458)..(5458): a, c, t, g, unknown or other
aacggcaaaaaaagttcagggggcataatttggtatatgtcaaagttcagggggtaaaattactatttagccaaaaaattaatttaaatatacttataagaaaatgacacgtaaataatagattgacatttaacagtcaagtacctaccaagttccagaaatacaacttaagtattattccaaaaatcaaacttaagtatttatttacaaccggggttaaatttaaatatttatgccacaaattacgatgcaattttaataagaaatttgtgatgatgagacaaagataagaattaaaattcttaatatggatagggacaaggaaagtactacccgccaattttttaacccgtgttcaataccataccatgtttgttcatcattcaaatagatgggttcatctttaatctttaagtgaataaatacataaaaaaagaaaaaaaaatctctattagatatgcacatataattttttttattgggtgaatgttggatacactctgttgtgattcttcgaattatgagaattttctatcttgtcgggatcttccgtcctatttttaatgagacaaagatagaagttaaaattcttaacatgaatactggatagggataaaaaaagcacttcctgccaattttgtgacccatatttgttcttcattcaaatagatgagactagttaaggattcttaatgccaatggttttcatacacaataaaatgagggaattgcttagatttttcctttttataatgatatgacaaaattattattaattattttattttattttctaaaaaaaatgaatttttatttacattaaataaagaataaatatcaaatagcttagaaacttatctttctttttaactggttcttccaatcttaattgggtaccgcttggtaggagaactataaaaatgttcttgacgtttttaatgatagatgtagttttggtatggtaattcgtgactccacaagtgaggttatagtttctactgtttaacagattttaggtacttgttttttttaaaattgcaaaaactttaactttaaaaaatattgccatcaaatgtcgtttgttaggttttcagaatgtgctttttgaatttaattgtttgaatgtggtaatgaaatttaataacaagtttttgttggcttctttggatttagtccttgcatatatagacatagttttgctgaatttcattttgctatttttttttttgttttaaatcttttaatgttgttattcattctttgaaaatatgtcttgttgggagttattaataaggtttgatggtctccttactcctcttgtatctataatcttattttttatgagataaattaatataatcaatatcccttccacattttcttcaagcgttttgcttgaaaggtagtcatttggggtttcttctcaaaaagaaaaagaaacaatgcctcctgaatcattaacttaactatattaaatattcccctcaactttttattttttttttaatttttgtggtaatattcctctcaaatttgaatgttaattaaatatgagtgtttttttttgttatataattctcacactcttactactgtgaagtcaaaaaaaattagaagaatattctaattttcttgtataagtataataatatggttttaatcactatatagatgcacattatttcaacacattaatttaataatgtgtaattattagctaatatataaatatctacttggagtgattaaaaactaaaaatataacttactaattttcttagcacaatatttatgaaaatagtgtaatttatattaaactataaaaaaattatataaaaaagataaaagttaaataattaatttaatatgaaaaagccaaaaaaattatggcacttttacatagttatagattaaaatagatttaaataaataaaagtagcttgttttatataggatatatgataacatgattcatcaataggttcgataagatctatttacattttgtcgttttcgtatttccattgtgtagttaatatcattgaattatgtggatttatgtgagtaatgacatcgaatgtagcattgttattattaacagtggtacttattactattttgaactaaccttctctcattatttaatgatattttatataaattatattagatttgatatttaattatattaataataatattatacttaaaaaaatactaaataataccgatgtattttagtatttctctattgaatgggtactataaacaaatttagtactatttataaagtttgatactaattatatgtaatatagtaaaatttgatttttttatgcatcaagatagactctaattccaaaattacttactacttaactcatgataaaattatgatattttagcgtattctcaaaataacagtatcatttgaaaagtttatttttcacattaacctaatgttgttccacactagccaccaccaccattgtggtcttccctctccgacaaatcactactgggcttactctctctgaggaaccacctactattgtctcattcaataacatcaaatcataatccatttacgaactcttaaattgtaattctagtggtgaacccacaaattgtaatctcaatcgtgaactcccaaatcgtaatcccaatcgtgaactcccaaatcgtaatcccacgcttcagacccaccaaacctcggcagtggtggatccaggctcaaattcatataacgactctattttgttgatataaatatgggttttattgtgtttttttgagttttacgcatcaagcactatcaaatttttacgagcaaaaaatgcaaaaaatgcaaaaaatgcaaaaaaaaaaatcgaaaaaacacagtaaaatctaactccaaaacttttacaaacaagtcaacaaaataatctaccacaactgctgaggtccagtgggtctgagttgtgggatcacaagtcgttaggaggttcacgcttgagattacgattcgagggttcttgacttggggtttcctactaggacaatagtgggtggcttgtaaaaaagggtaggggttgtagtgactgatgttgggagaggaagggaagactaaaagagagtgaaaatggatgaaagagaatttaagttagaaggaaagagagacttttcaatcagcaagggtattttgggaacacactaaaacataacattaattttgtcatggattcaatagtatgtcatttttgaatttgggtccaacatagatgagtatgatatttgaatttatatgtatacatttggtgcatatcaaatttttaaacataagcttaccaaaatttaaaaaatagatacactttatatttaaatcactaataccattttcctttcttttctcttctaacttcactatccatactccccattcccattcatactgatggtggtcagatgggagtccgatggtgatccgggtagcccgatgctactcattttttaatttttttttttatatttttgtacataagaaaatagtagcatcagactaccatcagaccatattctacatttatagatgttaaactccattcattaagctcgtcagggagacatcgggctaccttcggaccatatcatcgagctatcataggaccaccatcggacctttatcttcaatctttactcattttaacaatagaaagacatcaggctaccatcagaccaccatctagcctggccaaaaaaaccagttttctgtccgaaactcagatccgaccgttttttatcctaaatctaacatctactcactaataacaaatattaatcatacaatttattcttttgacaacattgtcaatagagaacccgtggttgatggagaagtcgttagttttgtggtcgtaatggtcgtggagagaaatgatcaaggttgtgggtggtgggttgtgagtcgtgcccttggggtgagttcagagagcgagagagagagagaagggaggaaaagagagagctaggtatttaaaatgggaggggtagaattgagttttataaaatgttagcctattctaccaatatgggttagtttaggtttaggaaaagaattttaatataataaatgtataaaaagtcaaaatttcctatgataatctcatgcatctcaatttcgtttacataatacacagttagtgcttacggtttgtgcattgtgagtcaacacaagcctggaacaaatgagcccaaaacgtacaagtatgacccgacataataaaatataaatttagacacaatacaacataaaattacaaattggcacaacacaaataaaaatatataaatttaaacacaacttgacatcacaacatttcaaatatggtacataaatacaaatagattatagattagatgacatgctaaaaaatttgataataattatagtaataatagtaacaataacaataacaataagggtaattcgcggctaaattttttaaaattttaagtttaatacgaaaaattatggctaaagttcccaacctccacaattattttggtcaacacttcttgattccactttggaccaaagtggactgtcacgttgtacagaagttacacatggcatgttttgattagtctacatttttttttctactttcttcttcctagactcatctctttctctcttccttgatttccctcaccaccatgtccaccacacaccacccaccactcaacactaccacaaacagattcaaaataaaccctaaagtttttattcaaagtagaaaaaaaactccaaaaatttgtaatttatttgtctagaaaccctactcaatccaaacccaagagaacctctctgccttcagagaacccctagagccactgtactgtcgtcttcaaagaatctgggctcactgacatctgggtttctttgcgcagaggtgacgtatgggctgagagaggtggaagagagaaaggaagaaattcaacttcaatttctattttgagtttttttgttcttactttagatttgattctttttttttcgaatttaatttttattgagtttgaatctggtgttgaaagtgtgaaataaagatcagtcgttgttgttgttatggtggtagtttggtttggtataataatggtgatagttgggagtttcgagattttctgggtgatggtggtgaggaaaaatcagaaagagagaaagatacgagtttaggaagaagaaaaaagaaaataaaaaaactatcatttttgtttatttttcttaaaaaaatctgatttttaaatattttaatttatattaagtgaactaataaaaatttactatgtgtaacttttgtacactgtggcaatctattttaacatgtaacagaccaaagttaccaaagtggacagaaaaagtgctaaccaaaacaattttggaggttgaagattctaataatttatatatatatanatatatttatatatatatattgtgtgtaagtacaaatattgttgaaaaattattgaaaaataattgaaatggtaaaatacatacatagttgagtagttagttcattaattgtaacaaaaatgtgagaacatggaacacgaatacgaactcgtataaatgtataagctaaaaaaaggtagtttaattaaaatacgatacaaaaatactagacttacaaattgagtcgggcatactctaaatttattgacacgatacgactcataattttttatgactcggcacaacacaacttatacttttgcttgtttttcaaaatatatttcgcattggtaggtacaatgcacatatttacaactctacacactgctcacatgttataattttagtggacatataagagcactcacattattagatgagctataatactcttttcttcaaaatagagaaaataaatgtgaaaaaataacaataaacttgctccatcaaatgagctattttaccttaatttttaaagaacgataaagtgtttctctacgtgtagagaagcactattcatttttaaaataacattttaataatatttacttaatattttattcatacttcattattgtatattttttatatttaaaaaagtaatatttaaatgaatatctagaaaaaaaaaataaaaaaatttatgtattatctaatataaaaatttgaggtaaagttaaaaacataaaattttagtgagatatttaaaggatagatgagtgcttcaattccaataaaaatgcctatatgtgtgcttaagaataagtggtgtcaaataaggtcctaatataaaatattttaatagagaggagaatgcccactattagcatcattgtcaaaccatttttgtctatatatttttttcaaggggaaaagttaaaaaatattttttttttatatacattaattacatttactttcaaatcaaatttcattcaaatatacattttttttataaatattgtacccaaattgaccttacaccctcacataactaagagataatttcaaacataataaatttatattcttaggagatgaatgtataagtttataaaaaagttagggcaaaattttaattaaagaaaaatagagagtatggtgaagtgataacggcaaataaaattgatagaatgattaaaaaaagaggtaaacataatagattttgaaagaaaggataaaaattaaagatatcaatttaaaagagatatgtagtgtaatttccttaaggtacctccgttaaaattgccctaaaagcccatgattgggactcttttccaaaatcctatcaaatacagactatatataaataaataaataaagtataatttatcttaagtgcagctaatttaacattaagaaaaaaaaaactagctgctttgatttttctctttcttccaaccagaccagccaagggtattggaaggtcctaattgatttcattcatatt

SEQ ID NO: 20484 - DNA, 2027 bp, Cannabis sativa
taaaatagtttaaaactatatttagaaagccgtgaaattggaccagcgcttatttagtttaaccgaagtgaacagagtaaatttgtaatatttgtatttattctctttactcacgctcgttctctcttttctctctctctctctctcactctctgaccccatcttcctttctctctctctcgctctgactgaacccacccaagaaaagaaaaaaagaatgaagatccagtgcgatgtatgtaccaaaaatgatgcctcagtttactgcaccgccgatgaggctgctctatgcgatacttgcgaccaccacgtccaccatgccaataagcttgcgtctaaacaccaacgtttctctcttctccacccttgttccaaacaaatccccctctgtgatatttgtcaggtacttttgttactctatctctctctcgctcactcttttttgatcatataatttatgtataaacatatataattgaatctaatatgaaattgtttatgtacataggagaaaagagctttcttgttctgtcaacaagacagggcgattctatgcagagagtgtgactatccgattcacgcagcgaacgagcacacccagaagcataataggtatcttctaactggggttaagctctctattacttctaagctctacgaatcttctcccacaaacgccgtttccgattctctttcttgcccaaacaccaccactcagtgctcctccgtcaaaaaatccttcacttccgtttcgcctccaattccaaacccaacaaataataataataataattataattcattaccaaagactagctcaacaacttccacaaacggtgatgtgggcactggtacggctttaacaagcagcatatcagagtacttgatagagaccctgccaggctggcacgtcgaagattttctcgattcttcctcagccgctttcggtttctctaaggtgggttctctctttttcatgcaatcttcaataaagatttaatctttttaatttttgctttaattaatttgtagggtgatgctggattagtatcacagttttgggattgtgatatggaaaacaaccagctgggttcgcagaatactgggctttgggtccctcaagcaccagctccttcttcctcttccatgtacaactacaacaacaacaacaaccaccgcctttcagagataaaggaggctacaaatatcaaaaccaacgctgccactaaaaggtgggccgacgatgcttttacagtcccccaaatcaatctttcctatagcaacaataatggcggttccaccaagagatccaggcaactttggtaattccaggctatctatactcttctcttttgggactataactagagaagaacacgaagaaggcctctctattttcttactgtactaattttatttgctttcgagtttgacttttttttctgttttttttttttttttccttctgagagtatttgggtttgtgattgtgtgttttttagattctcatgaacctggtctctttcgctgtctgaaatacaaagatcgttgtatgtaaatatgaatttattttttttccaagttttttttttttttttaaaatccatcaaatttctttttggtatgaaataatttacatatctatatacatatttaattaattttatagagggaaagaatctttgatagttagtagttgataagaattgtcaggacatattttttgaattcttatggaaagaaaataagaagtggtattttctcctaacacattatttatctaattattaaaatcttatcttgataatttaatgtttggtagctgattaataatcagattaggcctctctctctccaaaaaaaaaaaagtcagattagtgaaataaaagagtgtaccagtacttggtgtgggggcacaagtgttaatcatttttcttttcaataagaaaatgagaactatctctcggcccttttgggcgtgggcatagcaaaattagctgctgtctttgtctaccaagtatttcaca

SEQ ID NO: 20485 - DNA, 2990 bp, Cannabis sativa
ggtccgatctaattatatgttggatgttagattttatcatatgattcgaaccaattagtttcagttatctagatgttggattggatctattctgtctattgtacgcatttcttgtattttaattggtttaatttaagtttattcaatattttagacttagtatttattagatcggatcggatccatctaatattttaaatccagtactatctattgaattgaatttgatccattcaaattaaaaaatattataatgttaattttcatatagtcatgcatattattttttatgactaacaacataaaatttaattactcattcaaattaaatgaaaatattaattagtttgattggatgttgaatggattttaagtacttcgtttaacatccgatccgattcaattgaatatttaaaaataacatccaatttaattcgattacaattagatattcaatattacggtcgattgtaattgaattagtcaattatcattgaatttgatcgatttatgcacaaccctaagcatattctttggttagagttgccaatctttctgttttgttaaatggtaatttatttaaactgttttttttttttttttgataaatgagtaagttcattgaattatcaaacaaaactacacacaaagtctttacatagcaaaacagtcatgaaaccactgtaaatctgcttcacttatatttttttgttcctgtgtgtaatatcctaaggtcttgacaatacattaaggttttatttgaatttgcttacacccctaaggtcttggaaaatcccatgataccaactttacaaaataaaataacatcaggagcaaataaatggatgtgtaatcatctttacaaactggaatcaaatcatttgcaaaacaaagatgactcaatttcaaatccttgtacctatgatgaaaccgaaaccatcttggttgccacctttgccaaagttcttgagaggcactccatccctatgacaaataataacagtgataaaatgttaccttgccttaggcctttctttgattcaaagaagccatgaaaaaacccattcaactttgaagagaatttaggagtgcgaacataaaccataactaagcgaatgaatctctcaggaaatttcagagcatgcaacatttcctcaataaagtctcactcaactggatcataggcaccttctatagatccattttatcacacaactaggttgcatactttttcgcccacatcttaacaaatcatgatattgtgagctatgaatcttccataaatcgtgaactcaccttgattttgagaaattagatctggcaaattggatttaagacgaccacacaacatcttcgtatagctactttatagaaaacatcaaaacatgaaataggcctaaaatcgccaaccgtatctggacaatttgtttttggaataagtgtgatagtcctattattgtcttgtcttagcaaatgacctgaatgtaaaaaagacagaatagttgcactaattttctctgccttatccctcatcttattaattacccaacaaatcctggtaataagattaacaacatgaatcatttatagttctttaaacttgattacacattgttatgagctctaggagcctttaaacattgataaaaaattcaagtgttatcatctccttcctttaaccaatggtctttgctttttgctttaaaaagaaaatggtacattgaatttaatttgggtataattgttttatgattaggattaaattagaaactaaatcatttcattatcgttaaggttagggaaagaaaaattaacataacatttttaaaaaacaaccactagtctcaatttttatttatttattttggttgagaaaaattgaaattttcattaataggtaaatcgaacagagtctaatacaattacatgatgatattgctaatagagcaaaatcaacagaaataggctaatcacgcctcttgcaatacaaagagagaaagccctaatagcacttttaaccaaaagtctaccaataaaccgctagtggtgaagcatcaaaagagagcaaagaatgcaagattttcaacctgaataaatatatgacaattcacacatattaatgattataactcaaagatcttccaataaaaattggataataacaacccgactattcaaactcatatacaagaaaatagcaaggtcaaccatgtctataacaattctaataaaggttatatgcacataacatggggtcaataacaatctaggaatcccatatggagagtggtagccatatcacccacaccaaattaagtgccttaagccatttgagagcacaccaacaacccaacaagagacaaaactaacaaacatcaccgtaaacaaattatccctactacaaaacccatagtagagtggtgatggagcaccattattataagaaattaaaagttaaaaaaaaaaaaaaaaaacaaagcaaagaaaataacaagacaagaatatccaatattgatacaacctagtgagcattccaaaccctccatgcttctctcaacccataccagtgcttcctgaactcgatcctccacctccaaccaccaccaccctgacctactcactgccccgatgaccaatctccctcccaaacccagatcatcgcctacaagtcattagaatgaaccaactcctaaaccgtatatggagtttgccaaaaccatatttgaagagcaaatgaccatctgaacccacaaagaagaccacatcctagcgaccatgccctaccaaaatagctacatttagtgatagcattttagtcacaacataaatttttcgtgattaaatgtgacttttagtcacaacaaaaaaattatttgtacttaaacatagtatttaaatacaagttgtcactaatttagttttagtcacaacacgcattgtgactaaaaaatacatttagtcacaacatattgtgatttttgtgactaata

SEQ ID NO: 20486 - DNA, 3457 bp, Cannabis sativa
  modified_base (1030)..(1039): a, c, t, g, unknown or other
atagtaataccaaacgtatattctagtatttttattttaagaaatcattgctattttatttgtagcaatcaactatataatagtcttcaacctaatcaggacatctctcccgttaaaaacacaattaagattagaatcaaaaaaataaactaactaattagttacctgattctcagatagtttggcgaaagaaactaaataaaattagctggaaaagattgcaacatatttttaattttctccaactctcaaaagatacaacagtaaatctattgcaataggttcattcaaccctttagcttgagcactcaattattgtgcaaggtatataactttgcacaacaactccttcaaccgcagagaacttgttatttccaactactagattatagtaatttgatggcgaggaattaatcgaagaacaaagacgacaaaccaacagcgaaataaaacaaaacaaaaccatgtcacagagacatgactaatcagagtaatctaaacaaaatacactcaaaatcatgtcacagagacaagactgattataatagccaaaatctaatcgcagtagcaaaaccacaaaccccgactaagccacacctaaactcaaggagcagaccagtaggtctggctagagaaaaaaaaatctcaagttgctaagaatttaggaagaaaaacctaccagacaatacaaaatatttagagaaaccctaccatgaggtaactaacttagggtccgtttggtatagtgtataattaacatcgtattgtattgtataataatattatgtaattaaaattatattatatatcatattttatatataaatttatattgatattgatagagtgtttgtgcatataaatttataatattttaatataaattaaaatttgacttccacactttaatataatataatacgatttgatacgacatactaaggtagtatttggttggaaggaatgaaaatataggaacagaaatgagaatgagaattagaataagaatggaatgaaataaaatttaaannnnnnnnnnaaaattgataaaaaaattattaaattttttcaaaccttgcatatattggaatggtctttcttttcattttaaaatggaatagtcattacaccaaaatgatggaaacgaacaaaggaatggaatgaaaaattatttcctttctattctattccattttattacctccaaccaaacgctacctaaatcttttttgtataattttaatctcaaacatccaatgtgacttatattagagttagtctcatattgctaatatgtagaaataaaatatcgtatataagatgaatacactactccttttattatcaattaattttgagatagaaccacaattcaccataatcacactttagacactttcattccaaattaattatttcaactctatgtaaaaagtgtataatttgaaagggcatttgcaattactcattatatatattaatttgtttttatgtcatgctaatttggaataatggttctaaaatttagtgttggttattaataaaatgtatttggttctttaaaagaaaacaaatatcatgagcttattataataactaattaattagttatttaaaacaaggttggtatagtagcctggttggttggtgatcttgattgaggactatatatatagctttagaattaatgttggaaataaatcatcatactacacgtggtcaaatccatatgatagaaactttttgctttttaaacttttttttttttcattaatttacattttctcagataatttagtaaatcctcaagtgtgtgaatactgaatattaatattactcctttttaaaagtcttgtaataaattataaaacctctttatataaaaaaagaaaaatcaataagtacgtacaagcaagagaagaaagatttttgattatacatatgttgttttattttctccaatgttttttttaaaggaaaaaacataaacaaaacatatataataatagtactagacaaatatataaaacaacacttacataataaacattagccaaaagaagagaaaaaattctcacattactacaaatccaaacccttctcttataacacttacattttatatattactagatctacttaactagctacctagctatagtaaatcgatccaacaataacaaagaaaaacatgagtacactcaaattttttttcatgcaattttttttttcttaacttcatgggaaaggaacaactccacccgggagaataccggtgccagcaccaccaccaagaccggcaccaccaccgccacctagtccaccgaagccaccaagtccaccacctccaccaagtccaacaccgccaccaatgccagcatttatgccaccaccgcctccaccaaatgcaccaccgactcctccaaatgggagaccattgtttccaactccagagtaccctcccatgccaccataggtcatgaagtttttctggtcgtcgagtccaactgcagcatcttttgatgctgcagggacatttctagctgtgacttgatgagccacagctagggcaataaacaacgcaatgcaccactttgaggccatgtctctcttcactatacttgttttttttttctctgtctttaacttgttcttaactagtttgtttgacctgaagggcttggttggcttttgaacgcttttatagcctaaaatgagcgttatgggacagttgtgagtagtaaatgtagctagggttaaataagtgatcccaaagagttatttttctctattatttttccatatgttctcaatattttctcttcacataaataaaaataatatttatttatttattaagttgtgtattattgtacagtaataaaagattatttagcagctgaaaagttattacatgaaacccaaaatatgatgaagacacattatacatagtatatatatataatacaccacttaaaatgatggttaggtagattctttatctgtttcgacacttaaaaaaatttagttcattttttttttattatcttgtatgatatagttatttaagatcatctgaaattttttaaaaatttcgtgtaatatacaatgccgaaaacaaaatttacatattttattgtgtacgcgcgactattttttattatacttagtaagtaattgtttaaatttatttagattttttaaaaaaaattccaagtaatcctaaataacgcaacatatgtaattatatataaaaaaattaaactatgttggtttaaacctattttggttttttttttaaaaaaaaaattacaatttgagtgttgttccgttaattatgatttggattgtgatgtgaattgcggtttcaattaagttatgatttatatatattgctctcacattatatctgtaaaaatattaaagaaaaattaaatgtataaaaaaaaaaaagacc

SEQ ID NO: 20487 - DNA, 11468 bp, Cannabis sativa
attaatcaaaagtagttactattatttgtactattactttctcattccttccttttttctttgattttacttgtgccttcttccccccaccctacaactttctcaactttaccttctattattgcactatcataacagaagttgtactagcttttcaaagcaatataaatataaatatatataataagcaaccccaaacaaaagggaggcaaagagaaatagaaacaccaagagaatagtttccaaattaatattagtttaatggatgacataattgagccagtttcagagcaaaattcaaggtccagttatgttttctggaaatctcttgagcaacattatccacctggatttcttaaaaaggtattaatctatgtaattagctagatgaaagatcttttatgctacttaatacttcttctatgtattaaattatttggtgactgcacaggtggtagcagagattgtagcaacatatctattagtgtttgttacatgtggtacggctgcactgagcatgagtgaagagcacaaagtttcaaagcttggtgcctcagttgcgggcggactcatagtgaccgtgatgatctatgccgtaggccatatctccggtgcacacatgaacccggctgtcactttagcttttgcagctgttaggcattttccatggaaacaggttcaaattaaatacacatgacttgatttggtttagtttaatttgtaatggtgactcttaacaatagcaacacaatcccacttgacatgaccacatgcccaacatcccatgacatgaccacattcttaggtccaactgacccaacttcacctagtccttgattgaacagagagagacttctcaaaatatacaccaaaaaattacacttagacatggttttctaaccaatcacatggaccttttttcaaaaaaaaaagtgttacaagaatgagtgcacatattattactcaaaaatttggtatcttgatgaagaaaaccacatgcatttcacttcaaaaatttcagtatcaggagtctttacttcttttctctttctttttttttacgaagttagtcatattttcggaaatacatgagcagagcattttaaaaagaacaaatagaaaaacggtgtaaaagtttgatagagttgcaggtgccagtttatgcagcagctcaattaacaggagcaatatctgcatctttcacgttggtcgttcttctacacccaacgaaagaggttggcaatacattgccttcaggaacagatattcaagctctaattatggaaatagtggtaacattttctatgatgttcatcacttcagccgtggcaactgatactaaagctgtatgtatcactctcaaccactcactttatcaaaattcatcaaattctttggagtcttaacttataccaaaatcatttggcatcccagataggagagctagctggcatagcagtaggatctgctgtatgcataacatcaattctggctgggtaagcaaaaaatcacacttcattttcagatattaatatgttgtttcttcttttgagttaagagtccatccacagacccatatcgggaggatctatgaatccggcgaggactataggaccagctattgctagctcatgctacaaaggtatttgggtgtatatggtgggaccaatcaccggaacactaactggagcttggtgttacaatctgattagggtgagcgaaaagccagttcatgcactatctcaatcttcattttcattcaacttccggcgaatgatgaccaatgaaggccaagttaccaacaaggaagctctcaattcagtttgataagagccttttacctgatactaaataaggctttcttcagccaaacccaataccagctcatcacatcttgtaatctttagattagcataataataatgttataataattaagtaatgttacagtacagcactagtttgtaaatctgtcataatttagccaaaaggaaagtgcagttgattcccgtgagctttaaaaagactgcaatagctacctatctgcactatacatcatcacaataaaattacagagctcctgaggggcatacaatgtgccacttaagcttgttggttctacatatatttggtaaacatatgataccggccaaaatatcaaaatatacataaataagcgaaaaaaacacaagcacgtaaaaacattgaattgatcataggacaataggacatggagccaattcatgcaaccaggcaacacgaaaacagatcaagcagccttttcacagactacaaaactccctgggttgatggtaatgctctttgtgcaattatccgttttgtatatcccgacaagccgatcggctagctcaaacatattgtttctaaggctgtaaaagagacaaagaaaccatcatttttactcatatttacaagtgagtttgggtatagtccattggcagcggataacctaccttatgattatgaactgtgcatcctttgtcctgtccttcacataatgccccactatagaaacattcttgaaatctacaatgccacgagccatataaatgagaacaaagagaacatatttaattagaagaagtttaaagttcaaaggaagtacccaacgcagcatcgatttcatccattacataaagtggtgtaggcttgtagtgatgcagtgcaaaaacaagagctaatgagctcagagtctgaaaacagtaaagaggcaacgtgataagagattttgaaatgctatatatgtacaggaaatatttctcttcaacaacagcagaatgtatatatttataatgtaatttgaaaatgatgtgaaaagaaccttttcaccgccagataagtttgcaatattcttccagctcttctttggtggtctgacactgaaaacaacaccttcagagaagggatccaaggagtccactagctcaagttcggcatcacctccaagcgtgatcatctgaagaaagtaaattaagaggaaaagaataattacaactcaaatacgagaggttagaaaataggaagaacgggatgcaggtagcatctggtgtgcgagtatcacatataagctgtgaagaaggttcctccaagtaacaaaactaggaaaaattgaagaatatgtactacaccacacaagtgcagcagcaatgttcgaggatggttacagaaaaagctaaaacatgagcaagaccaattgttacgatcacaaacctggtacatttccttcaactttaaagatatagcattgaaccctgccatgaactcgtctaacctgaaacaacaggaatttctctttatttagaaaagagctttgagaagtacaacaccaacgtgcaagtgcacaggtatgtatacatataagctaaaggaaaccgtgcctcttttttctccattcgtcatactgcttcttgatatcatcacgttgttgagtgactgtgttaaggtcctcaactcgttcattatacaacgaaacctttcttcgatacctataacagcaaacagttagaatataaacaaggtagtgaatttcatacaacaaaacctctccaaacatactctgcaattgagtcaagattaggattcatttcttttagttgtgcctccagcaatgtgactgtttcgagggctcttttaagatcacagtccttatgaagagtttcatctgtcaaagttgcttgaagcttttcagggtccactaaatctttttggattctgcaaccgacatggttatgatttctttattaatgaaaattttgtaataatacgttattttgccaaattcagaagcacaaaaatatagctaaaaaaaatcaatcaaattaacatactgttctatatgctttacaatagcactttccaactcgtcaagctttttcttgtatcccttccccttttgttccaactcaccgtatagcttcttcatgtcttttaatttatagtctacatctacctgtaacatttttaatctactgctcaaaacaatgaagcacaacaatagtaacctgatcaaatatgtaacagaaggaaaagtctcaaaagataagaatcttgatatcatggtacctctgtcgctcgcaattcatccactgtctttttcattgtattatactctgattttgattcgtccaaaacatctttatgttgatcaatcatctacacagacaaaaagataataagataaaagataagacaattccttgtagtttgcaaaatccataattaaaaaaacaaaagtgaataagaatgctagacctcctgtgtctttttataattctcttgaacggcaaaagccttctgttctatttctttgaatttgtctctcaacttttccttctcctgagtgagtctttctatctccgtctttgattcctcaattgtctttgttaacttctttatcattttatgagcagtctctatttgaaccttgtgacggttgatgtcagtactatttttgtcaatatcctacaattggtagcataaattaggagctacactccactgctataaatagttaaaattgatataccattcatatgaacttacagactgaatcttgttgacctttgccttttgggattttaatctttccccacctgcattctctatattcttctgaagttccaaggcctaaaaaggggaaataattaaacgggcagaatctagtattcagcctaaagtaaaaaagtaaaactcaagatactcaagtaagcggaaatatcaatatcccaaattaaatcagcaataaattatttctaaacctatactaagttctcaaaacttcaaaggaagtaatacgaaaagcagaaaatatggaagtatagctctctattcaagatctagattgtagaactggcaatacttaatagagaacataaaacataaaatttatcactcaccttctccttcaactgcttagaccctttagtgagtttatcaatctccttttcctcagcagaaatcaatttcttgagctcctgaagccgattaagctctgcctttcttggttgtgaagcagcttccagggaatcccgttgcttttcaagataattatgttgtgtattgagactgtcaatctacacaaaatgaacatcattaatttacaaattataccgaaacccagagaaccctcaaacacactgaaaatacctctttctgagtttttgctaattccatctccaactgtgaaactgctttctctgaggcttggtatctccgctctgcatcagaaattcttccacgtatgcttttcaacttttcaaccatggtagagagctccttctcagcacttgcaatagcttctgcagacacacttgcagctcgaatagatgtgcccatcttaccaccacgtggcttacctcctccaccactcatagtaccagatttttcaaacaatgcaccgtcaagtgttacaactcttcggaattctttgtttgcactatatgcaatccgagttgcctgcaatcaatcattgtattttctgaatcattagtaaaacatttgctaaactaaaactagttgattatacaataccaaaaaacagggaaaagaaagacttgacatgcttagcacattggcagtttataatgttattgtagcaactgatacagaaaacccaagactgaagcaagaaatttaaaagccctactatccataaactgaatcatgaagaatatcaacacgcttctagtactatagaagtattactagtaatcaacatgtgaaagtactagcacatgcatatgaaggacaaacatgaaacacataaatacaaaaaacacacctgatcaagatcttttgcaacaacagtgtttcccaaggctgcaaagaaagcgagcttcattcgttcatcttgaactttaactaaatcaaaaagacgtggtaccccctctggagtctgcactttctctttcaaccttggtaaattatcaacttgcttttcctgataatattaaaaaaaaaatggtcagaaaattaaataaaacccagacaagttattttcaacatatgcaaactcatactcaaaaggtcttacagctttaataaaataaaagcttctaggaagcaactctattgatagtcagagggttagaatgatgttaagctatttcagaggctcaaatatcatgacttgaacagaaacctgttccattcttagagacactctgaacaaatcaccaaaatttcaaatgtccctctacaaacagctaagccgactatttatagacaattatcacagccgatttacaacaaactcaccgagaaactaacagaacctgtaataagagtacagattatagagccattaagaaaattacagctggaaattttacttagtcctttttcttaagtatttttaggccttctcctagagtatgccaaacgtcctagcacatgaatcaatgaattgggaagaaagttagtgaatttaacttttcactgttaaatgtacaagtattaacctatatcagcattcaacaaaacaatcaactcttcaatgcaagagggttgcagttaaaatatttgaaaactacacaaaaatgggtgtggtcgtagtaaatgccacaacaaatacagcagccatagcccccaaagttacctttctctagtgtatcaaaggtaccattagtggaaattagctaagctatctagaatatcatctattgcatgaattttattacgtaataattaagcatcaaagagactaatagcatatcaaattgcacatgaataccaatatcatgaaagttgcaacaccaagattctctctccgtagtagctcgacacatgcttgtgctgcaccagttgtctccacaacaatgtaatcaagtccatggcaagctgtcgatattgcgacatcatattttgctgcaaagatggtgtcatttcaagaaagaattaatgcctccacataatggcagattataaaatgtggttttgcttattaataaataactggataaagacatcatgtcagtatttgagccccaaatattagaagcacaagtatactaaagtaaacaagcagaaattattgctatgctcccgacagctttgatgaataagagcacaaatatagaactagccaagaaagctaataaagcaatattgccactccagacaaacttggaatgaatgcataaatacatttttatttcattaaatgcaaggcaaggcaactaaccgtcaatagctcccaagtcacccattcgaccatatataccctgaatctggttagactccttagcctgcaaaattgctttaagaactgatccctgactcctttctgaatccataacagacttgagctctgtaaccttctgtcttgctgcttgttcaagaggaatcaattcttcttgctctttgatgcattcctacaacataccaaatgtcatcatcatatcctgtaatagcaatgaagcaactaaagttcaaatgtacatcaataaaacacgaacttgttccactttatgagcttccaatgcttcaagtttgttcctttcaagatcactttgaatttttgtgatgctctcagtttttgtttcaatagcacctaaaatgttttccatctgcttttgagcatcttcaaaagctgcacgagcagcttcatgctagaaaaattgagcagctctgtcagctaaaaatttttaaaaacattacaaagcaaagggccatgtgaacattttagaaagagaaaaggtaagggtacagtaaaaagaacacaataaggcgattgtttacctattagctattagtgtcaataagctgatgttcaaagtcctaatataaactattaaagcctcaccttttcactcaaaagcttgttctcggtagatgcaacttcaagttttcccttgtgctcaataagttgtttttcccaaggctccaattcagcacgaacttttgaaagctcagagcggtgtctctctgtttcaactgcttgtcaatcaatcaaatagaaaaatatgttagacattgagttacccagtcacatcagatctaagcttcactactgcatgatgggaatacgttcttctacactataatatctgaggtccaaacacaaaatcgtatacaaacaatagcaaaacctaaactcttaaaggttgagaagtacaagctccaccttttgaattctctttaatttcctctagtactttttcttcttccaccaaaagcttttgcagttttggaatattttcctcaagttttggaatcaaatttgctgagttctcactctctttcttaaagtcttcaatctttgatgaatcctgagatgaaagacagatttgagacgtatgtatatgttcacaaaatataataatgtatataacctaccttttcaagcttatccgttagtttcttgatcttttgcttcatgtgctttaaatcttctcgatatttaacatcctccctttcaaactgcttaaattcttctttacattttctgagagtattatcaagatcctacgaattcacaaaaaaaaaaaatgaatccagtcaggagtaacgatgactgacaaatataacaagtgcgctagaattttgaattttcttttctgaagcaagattatctcagtgtcaaagatacgtagtctaacctcttgatttttcatatgcttattgtgcttagattcaatctccttcaatctattatgactttcacgaatcttctccctggatcaagagattaaaaataagctctaatactttttaattagctattcatctttcattaagaaaattacctttctgtttttaaatttttttccaacctggagattaaaaataagctcgaatacttttaattagctattcatctttcaataagaaaattacctttctgtttttaaattttcttccaagctggcaacttgttcttttaactcaaccattttcgtagtggtaccttcatgagccaatgctgccgctttctcttgccatttcagaagtgacaactctttcagcatgtagccttctgcttcattttttacatcctgtttcaaaaatgtatgttagcaggtaaacgaaacatggttaaagaataattctaaataagtaaactactcatacttccaagccatccctttctttctctgccaacttaaccatttgcaccactccagatcgtttctcattgagggattctaacctagcaaaaccaattaaacaagactaaacataaaaaggtgtgaaagttctataccaattaattcaagagatttacataaacttctaaacatcgaatcataatcggtaggaattaaaaattataatcactgttattagtcaaaaaatctgaaattctcataatagccatgttgaaagtaaaatcaatagcccatcacatgttgagatgaacataagaagaagaaccaagagtacattaacttcaatcgaataagagagagaacaaagtacttactccttagaggactcatcaattctttctacatatttattagttccaataatgtcctcaagatactcaagaaagccttcatcatggggtccttgagcttttggcttcatcaatgaaatttgttccacttcaccctgataacaaccaatgagttaaatattataaaaaaaacatgttttaaactcatgagtcatgaaataaagaagagcaactgtgtgagtataaaaacctgaagaatcaaaaaacggttattatcaagatcaactcctttccccttaagtttctttgtcacttcagtaaagttgcttgaacgatcattgatgtaatatttagaggaattatcacgaaaggccaccctagttattacaaaatcgcttcctggaactgtttcatatgttccctcatcctgtaataatttaaaacagaattaataatgtaaataaaattggataaagaaaattgatgtcaaaaaaaaatgttggaccaataataaaatttcacaatgtttgaatttctaacaggaatgcatgttgacaaaattcaagagagccatttgcaaaggtcaactaaatttttcacttttacaaatactgtgacggaacagataaaacttgaaagttaaaatttttcctcataatcaaactgtacataaaaatagaactacatgtaattgtaactaaacaaaatttaccagatcaataatctcctggaagtgaacagagacccctgcactgtccagattctgatgattagtagagttatggataagctctgacaccttatttagtcgcatctacacaattgacaatgtccgattataaaaagcaacaaaagaggaaaagtataaatcaatgcattgcactgtaaattaaccattattgtcttctgcaattctcaaaaactcaactacatcaacacaatgaggaacataaatactaataaccccttcacaagataatagggaaaattccaatcaagaatgtattctagcttagtcaaaagaaaatatgtcactatcttaagtaacaattaggtgtaaaataacccaaaaaagtaaaatttccatacttgcttagctcgctttccgaatacgaacagcattgcatcaataacattgcttttcccacttccgttgggtccaacaaccgcagaaaagctctgattccacatacgaaaaataaaatcaagtcagtgataatggatataaaactcaacaaaactcaatttttgggcaacggaaagacatgaaataaaatctaaacttcatcctctctctccttccctccctagtaatccttcatctgacacagtttggctttcattttcttctcaattacgctacaatcaaaagaagaaagaaaaaaaaaatacatacccaaataccataatcacccaaatttcgtcataaaccgagccaaaacccaaccttgaactagtgaaaatcacaattaaaggtagaacaagaagaagcaagtgaaaaccctaaccttgtgaaaaggaccaacacgttgttcaccggcgtaggacttgaaatttctcataaccatttccttaataaacaacctaggggctctggatcttccggaagcagagtcggaggcgtccgccattaactcgtcctgagttgccataccggaatcgagttctgtgaaattagggtttatcgagaggataaacaaagcaaagcacgataattgggaatttcagttccacaaaacagaacccagaacaagttagaaatgaaaaaccatagtttcgtctcactcgtagtcaagaaagaataattttttattactttatatgaaactaataaaatggcgggaactaattgtaaggtgtatttgactttaaattttcattcatcctacttgggccattagaatcgaacccaatataaggcccatttatgttttcaagccccctaggccctaactcataaatagaaatgggataattttaaaaaatacaaaaacaacaaaatttacaaaaatacgatctttatgaaatttttttagattttatttacata

SEQ ID NO: 20488 - DNA, 5246 bp, Cannabis sativa
atatatatatatataaatacatcacatatttggtaagtataagaaagagaaagtgataaaaaaaaatcaaagcaataaaaaaaaagtgtgaccattggtacccaaatactgtactatgttatgtagatgatgttggatgaagctaagttgaacagataaaaaaaaattaatgaattaaaaaaaaaaaatcccaactaaatagaaattctaaacttttataataatctataaatatcatatattttaaaaattcttaactatcattaatctattctataaatttaaaagatatatatgctaatagtattttttattattaaaataaataaaacttttgtagttttataattacgtatatctctaaaacttttttttttacattcttatgcgatactctttttacattatttttatttctcatgttttaattgcattggtatttttttaaaaaaaaattattaattattataaagtaaaaatagaaaaccaacttatatactttaatccattagttatttgttctaatttttctaaaatttaaaaatttaaaaaaaatcaaaatatctattataatataacaaatatattttttctttcgaaaaatcatcaaaaatatctatttgaaattgtatgtatcatatccatacaaaaaaaaatataagaatattaaaaagtcttacaattttatactaaaatactatcacaatcttatatgacactattaattaaatttataaacaattgaaaaaaattaagaatcattgaaaaaaaaaataacaatgttttattagaggcttggttagcttaccgttaagttacttattctgtttctaactgtattagaaggttgttaggtttctgttaagttctattttccctttcttgattcatgtaacaatatcatgtatatataccttgttttgagtctctcaataaattaattcagtcatttctaatatgttattagtcgcttaaaatactctcacgatcgctgtcatggctagaactcgagctactgattccaagaactccggccaaactcccttgccaaacaattcatcctccataccagatgctcctccaaatcatctgatcattcctccggtctctgctgtcaccggagacattgctcctcctctgcccaatgcaacaacacaacatgttcatgaagatattcgagtccctatttcttaaattctggtgataatccgactcaccttagtcactcctctactattcgataagaattttcaatcatggtctcatgatatcgaactttccgttggtgcgcgaaacaagaccgtcttcctcaaaggaactctacctcaacctcctgtcgacgatccactacatcaccattggttttgatgtaatcagatggtgatgtcctggatcctccattccatctcgcctgacattaaaagtagcattatgttcttggacatagctgctgagatgtggcaggagctcaattcaaggtacaatcaagaaaacggtccccgtattttcgaactcagagaatcgctcatcactttgcatcaaggcgatgattctgtaagttcttactttactaaacttaagtgcatgtgggatgagatcaaagaacttcgtccacggatcccttgcacatgtgctgcatccattgacaatcttgtgtttttgaatcaagaacatgttctttaatatttaacagggttaaatgaatctttttaccctgtcagagctcaaatattgctcattgatccctttctatccatgtccaaagttttctccatggttatccatgaagaaagacagagaaaactaaaaacccctcagattccatttcttgttgcatctactcaagattctgccactaatccaactcttgcacacaatccctctgcatcagctgctaatgcaaatcaaaatcgcaataagagaatgagaccttactgtacaaactgccacaaacctggtcatttgaaagaaaaatgattctttcccattggttttctaccaagctatggagacaagaagaaagaaacacaggaagctgctaatcaagcatctacctctactgatcctctctcactcttggccaatctgactgaacaagaagacatccaaaccctcatttctctactgactctaaagctgcagccaactacttcgaactcagaagcacagccttttgcttcaaacaattctagaataccaaacataactcaaattctctatggattgttgacagtggtgctactcaccacatttggtgtgacatttctttattttctcaattacatgatatccctactgccacatccgtcaaattaccaaatggcttgagcattaaaattcacaaatcaggcaacataaattttttccaataaactctacttatgcaatgttctttatgtccctgattttcaatttaatttgttcagtgttcctactttcctccaaaatcttactaacagcatatttttcacaaaatcttgctgcattttatagggttcccaaaacaagaggattgggattgctaaacgcatcggtcacttctattttctggtgcataattcccctactgtccaccataatactgtttgtaacatctcttgtaataattctcattcatggcatgctcgacttgaacatccatctatgtacactacaaatctaatcaataaaatgttacattctaaagattctaatgattcttctccttgctccatatgtcatcttgcaaagcaaaagaaattgccctttatttcgaataacaactttgctgcatctaactctgatctcatacacatggatatttggggcactttccatatccaaagtattgaaggatttcactattttcttactattatagatgaccacagtcgcttctgttgggtttatatgttaaaaacaaaagctgtggcacaaatttatatcccccagttttacactcttatacacacacaatatgctacaaatatcaaagctattcgttgtgataatgcaaaagaacttaatatgacatctttctatgctcaaaatggtataaaaatcaataactcttgtgttgaaacacctcaacaaaattctgtagttgagtgaaacaccaacatatcctaaatgttactcagggtttggctttccaatcatcccttcccctagcatagcggccttacttcataaacacatttgtttatctcatcaataggactcctactcccctattacatcacaaaacagcctatgaactcttgcaccataagaagcctgcctacggtcacttgaggacttttggctgccttgcttatgcatcttctttacctagcaagagacgtaaattttccccgtgctcatgcttgcatattcattggttatcccaatggcatgaaagcatacactctccttgatttagccagcaatgctattttcaattctagagatgttattttttatgaaatcattttccctttaaaaggttccttaaattctgatctcgaccaattttttgccaaacctgctgccatttttcaccctactcctattatgccttcatagcatattgatacagcttcacatactgatccccctaaggttcctctcacccctcctcatgttgtaatctattgaatacaaaaaaaaaaaaactaaaactagcagaattacttcaaaacctgtccatttaaaagatttcatatgcacatcttcaactgcatatccacttgaaaattatatcaagtatgacaggctccacaaatcattttgaaatgccatactccaagcatatctcgaactcgagccaacttcatatagtcaagcttctaaattctctcaatggctaaaagccatggataatgaattttttgcctcaaacaaagaaatacatggtctattgtttctcttccacctgactgccatgttattgaaaacaaatgggtatgtaagattaaatacaattccaaaggtgaagttgtacgatacaaggctcgacttattgcaaaaggttacaatcaacaacatggcattgactatgttgacacttttgcacccgttgcaaaattcaatacactcaaactcttgcttgcccttgttgcccttaacaaatggtctcttcaccaaatggacataaataatacctttctacatggtgatcttgatgaacaagtctacatgaaaattcctaaaggctatatacatgaaggggagcttcctcccaatactgtttgcaaattaaataagagtttatacggtttaaaacagtcatttaggcaatggtttgctaagttaagctctaatctacttagcaatggttttactcaatccccaaatgaccattccctatctaccagatcatctaatgacacttttcttgctcttcttgtctatgtcgataacatagttattgcaagtaacaatgacttggatgcatatgcttttaaaacctttctaaactcaaatttcaactcaaggatcttggtccacttcgtttcttccttggattagagattgctcgatccaaagcaggcattgctgtctctcaaaggccttttaccctgtaaattctcactgaaacaggatcacttggcatcaaaactgtctccactcctatggaggccaacctatctctcagcaaagacattggcccccctgaatttgaccccacttcatatgggagtctcattggaaaactattatacttaacattaacacgacctgacatcacctatgctgtcaactgcctcagccaatttctcagtgatcctcgacaacctcacatgaaagctgccaccaggatcttacaatatttgaaaggtgcacctggtcgaggtctcttctttagctcctctgcctaaacaccaaatccatttcaacttcacgccttctctgatgttaactggggagcttgtgcctttacctacagtaagctctcgaaccaggtccaaggtgtccacaccaaagaaaccttaagtggttcttcccaaaggagattccaaaggaaagaaagtggtgccttcatcctcaaagggcaaaaacctcaaagagaatcctccttcccatttcatcatcagattttgaaccagaagaagagatcgaagatgataaggactcagagggtgtgtctgattctagtgaagaatttgttcccaaagaacgaccctttgttgatgattctaggtctgaaagtgaagtgcctgaagttgatcctgtcagtgcagaaccagttgttgtccctgctgcagttccaaagaaggacaaaggaa

SEQ ID NO: 20489 - DNA, 1840 bp, Cannabis sativa
cctcttatgctaacttttgggagtaagttctacccaagtgattgtatcatcttactcttctagaattcatcgatttgcttcattaatatgtcttatagatttctaaattaagtaaattttaacctccttcatcattttctggatagatgcggttatattgcttaaaggcacatatgctcatgtattgggaaaaggataccaatttcttgtttctcatatgattttcacattcaagagttattttaatttttcccttaatataattttgccacgcagatcattcccattttgagtcagtgatcaagagactacaagaacttgctgctcaagcaaagcaagaggccattgggaatgagtccaattggcacccaggggaggaagaaatggaggagcctacccataatgctaatgtatgtatttgtcattttctgttaagatgtcaatgtatgtacatttgtccttttattcttttctgctaagattcttatatgctgccccatgaaataccataatattatatggagaattatattccattattgtctccaattataatagacccctacaattagtacaaaaggtacactaaaagtccataaacacattatgcattataattttacagctacccaaatagggtttttaacacatggctttggttttggacatagttcgactgtgtcacatgtagacaactgatcttgttctttgtccttttcacaaactttggtggtaacaacattctatgttactgttcttagtttctcttgtttaaagaacatggaacttttataatccatttagggaatttcataaatatcactataattcgaatgtgacttcagcattcttttttggatgaatactcaacaggagaaattttatacatgtttctcagtgaatttcgctttaattacatctggcctgtaaatatctgatcttacaggaagaacgtacaaaatctgagttggatgtggttgttaaagatcaagaacagaaaacggaagttaccgatcttcaaaatagtcctttgaagtacgatgaaggcgacgatgacccagataggtggaacaattatgatgattattagttaccaaacacaatcatttttcatcctaaatctctaaccaccaaaaaaaaagaaaaactaattaggatcttgattctttattttttccatttgtctaactcttcacatatcatatcattatgttgtatttcaatgtgacaattttccaattatgccaaatacattattcacataagaaaacattgtttattattagcattatttcctaccaatgctatttattcttaattttaaaaatttaaattggtagttgtatttaggccagctaattataaataatatagggtgtgaaaataagctgtcctgaagattaacaactcttctgactaatttcttgcttattaattaatgagtatttagtattagcattgtacggtcaatcattgaatttctacttttggtaacataatgtgtatttaagtcattgagttgtgttgtgaaaaaaatttcctatgcttgagaccaagcgtgataaaagtctcacaaccaaaaatgataacatagcatactatcaaattcaattatttatgataataataattgtttttttcttttaataatacaaataattagtcaaatattaaagaaaaaatggtagcagaaagaaaattgacttttgggtttggatattttttgataattgtaatgaaacgcgtgattaaatggcagattctttgtgggctcttagctggtgagttgggtaccaaatgatgaaacataaacaaattaaattaatttatcaaaaaaaaa

SEQ ID NO: 20490 - DNA, 2463 bp, Cannabis sativa
aagcacattaactacttgtaagcagatcaactgttaaaactaatttactacatgaatttttttaaataaaaaaaataacttaaaaaggatgtatcttcagcagtttaagcaagggtaatctcagtaaactaaaatatagcttgaaacagaaaacagaacatagtataacgggcagggacctgtctaagacaaggggttcctcgccctttttcaaaaaaaaaaaaaaaagaaaacagaacatagtgaaaacaataataaaaaacataggaaacagaaaagtttcccaactaatatgtgcaattgaattagcaaaggaaaacttgtccataacatttgaaaaaacataattagctacatgtggtccaatttcaagtggtgcgaagtacctaatgagtgaatattaaagcatattttccattgttttctctctaatttcagatatgagaacaaaaattgttcttattgttttcaaactgagagagagagagagggggggaaatcgtcagcaaatgttttatgagatgaaattctaattgaaataatatatttgaataataaaaaaagacatttggaagagagtcggagagattgagaaaggtgaaagtcaactgagaaagtgtggagacataaaaaaaaacaggacaataaggggaaaaggtcatatgaaatatagataatgtactaatgagaacaagggagtgactaattagaatcaaaagagacaaagtaatgagagagattaaatgtagaaaaaaagtcatgataggaactaaatgtaaaaacaaagtgatgagagataataaaaagagagaatcaatattcagtagcgagcaaaatcctagagttctgataataataatgataaaaaaaatttagagagctcaaaaagagataatgaagagagaaaccatgaatgagaagttgaaaagagagagaatcatgagatggtacaaaatacaaatagtgaaaagggtgcattctctcaagttttataccagttctcagaaataattctaatttcataaacagaaatttttacttttttagtcaaaatgccaaagcactctagaaataataatccgatgatatgtgcaatttagtttaacacgtgacaacataaatcttgtacataataattataaaataaaaacattttcttgagggatttaagttatttgactaacaagactaaataacccgtcaaatatttataccctgatctcaagtattgttcttcaacatacaaaacaatgagggaaatacgtaagacacttcctaaatcaaatcaaacaatcaatcagctctagagaatccatatacaattcaattgccaacttaaattctacaaaacattatgcaaagttttcaaatgttgatcatcaatgaatcacccgttaggaaaagaaaataatagtatcaatcaaatctcacattgaactcatggctattaatcacaagtattagtctaacagatctgtaattacctgcaaaatgcatgatcaatcgaatcttaagagtaaaataaacaaacagtaaaagaaaatttaaagttcaaaccaataaatttatttaattcaaagctcggtttagtttaatcataaacatacgcagctttgatacaaaaatcgtagacagtattgaacaagcttgaagtgtgataacaacaattttaataaataaataataataaaaaaaaaaaggttatcattatacggtaggcattcaaataatcacagaaatccacagacaaactaaaacaaaaattaaattaaatgtcagcgatgaaaccgaccagatctgatcccgaatgattccaaacctcaatcaacgaaaacatgatcggactccgtctaagaaatggcaataaaaaacggaacaaagcagtcagatcttgaagagaaagaggataattagaagtttacctcggcggaactgccacgagactcgcgtaggatgatcttatcgaggccattgacgcctttagcaaattccacatgcggtgtagtagaagtcatagccgatgaaggaaccttctcgctactcatagctagctccgtagcctgtcttctttaatatatcaaccttttttcttctccttaagtcctctaccatataaatatatataatattatttggcagtgtcttcgtcaagacctgtgactgtgagtgtgtgagagtaatgttttctttttagtattggacaattggagattggagtcaatagcaagagaccaaaagctgtcgtgaaatttctaagctaagcggtatggaactttccctctttctctttattcctcgctgtcctgaaatttcgtttgcccttttccgattttgttggcacttccgttatccggacccgaaatgttcggcttggctctgcctgttctgtccccaccgcacccattttcaccgtgggtgcacgtgctcttatcacccgacccgttattaattgatgaaaagttt

SEQ ID NO: 20491 - DNA, 3988 bp, Cannabis sativa
  modified_base (46)..(53): a, c, t, g, unknown or other
aaaaataccatataaattggccaaacttaaatgtgccatatttatnnnnnnnncttttaaaatcccatactaagtgtaatttcctctaattggatttacaacctcttgtaacttgtaagtgggctgaaaaagcccatataccgaaaaggagaagaagagcttaggataggacagtgtaaatgagtccaagaaaacatttctcaaaacggtgcctcccgctcgaaagttgaatacaccaaaagcaaaagggtttcgcatttcaattctctgcgaaattcagaccaacattttcatcttccacaatgttcggatctcagtcttcaacgccggcctttggcactccgtcttcagctccggccttcggcgctcagtcttcaactccagccttcgccactccgtcttcaaccccagccttcggtactccatcttcaaccccggccttcggcactccatcttcgactccggcttttggaacaccatcatcgggttcgcttttcggtaccgcgtcttcggctccagcttttgggtcttcgtcgacgccttctttcaacactggcttcggttcgttgctctcgactccgttttcttcgcaaactcaggctcagcagagctcattgtttcaacagcagaccccgttgtttcagcagcagacacagtcggccggtggttttggttttcagactcctttctcgacgcctcagacttctttttttcctaattcgcaattgactactcaaatggctcctgttgctcctatcccgttctctctcgctgatcgtgacattcaagtactgtatctatctatctatctatctttgttcgaaaccctaaacctgtgtgatttcttattgttttttttttttttttttgaatatcaggcaattgttgaggcctacaaggaggatcctgggaaccctaaatattcttttaaggtccgtttacattttttatgttatgtatatcgttctatatacagtagtattagcttccaatttagacttacattctctgttgtgatgctttaatcctcgtatttaatgtttgcagcatttgctgttcagtgtaaccggtgcccagtttagagtgaagcctgctggtgtatcggatgtgagttttttctttctctcttgtctctgcgaaaatgtgttattttatgcttgatggtatatacttctatggttttatctttcttttccgactaattccggacaatagtttgctatgccagattatgtgggcagaggctatgagaaagctcgagggtatggaaagtacagatcgagaacggttatggcctcagcttgttcatggtttcaaggatctttcacaacgcttaaaggtacttttgttagtcttatacatgttgaggatttactttacctaggtttgctttgttttatagttgatttaaaataagtttgattgatgtacttttatacgatggaagctcgacacacaattagttaatttagccacgaaactattttagctagtaattttgagcaagagaaaccaagctctaaaatttttatcgatgtagagagctgttggatttggaagataatcattagctattttgtctaagaagtaagaacaatggctttcaaagaaaaaaaaaaaagaagtaagaacaatgtatagctaacatggttgaagatgctcttaagatttttgttgtctctgaggtttgagcaattgtatttatctttagttacttaccaagtttattacaggttatactgattaatatacaagtttaaccaatttttttactctattgtttgctagttcctcgtaagaattgcaatttttgaggcttgtaatgtaccatttggactgtagctaaatagtactagtaaatattaacagtaatggcttatggttggatagatacatgctagttagcatgaagttatttaaagttatagacatttagtgaaggaaacctcatctaaagagggtgctaacacttctatttccaacattgattggatcaatgttttaatctgagtgaaggttgtggtatttcttgtgttgattgttgcttttgacaactaattaatattaaggttaaggatgataaataagtgtttagagaagtatttttgtgtggttcagtcgttaacaagtcttagtctacgagttgattgtatttatgttgaaagttacaacaatatcaaaatctcgaatccctttacgatgataatggctctcttatttatagaagtagagaggggcctccttggaaagacgcttgctctcaagaaaatgacctaaagatccttcctttagggtatatttacttgttaaaatggggaattaccttcctttgggctcaaagtccaagcccaaacccagtggtgggtgagcgaggacaggacttgtccattggtgatgtgttaggtgatggtaggagttgcttataggcgcatgggaaagatctatgtcaaaaaggtagtgtgtaaatcccaatgattattttgctttgtgggaaactagttttgccattagtacagaagggtcaagctacaatgctttccctttaaatgcgctgacagatggggttcacctctctcgtagaggtacctggagggttaggtcctctcggaccccttcttcttagagacaaccctctgggccgttggacctggcgagtggtacccttcaggcctgtgaggagctctcaaagagagttcctccggaccacttctaagacaacaagtatcttttgcgtgggccctaaaccacttggcatgaatcttgatggtgccacttgtcttattctgaattttgggtcaacaacttatttattagcggtaaaaaagggagaatgtagcatactcttgttggttgctgcctcgtttaggttggcgtaattgttcaataattccatctttgattcgtaatttgggtggttttgggtagccatgttacattgttacttaattttttcttttggctatctttggtaatgtcctttttgcttggtgtgttggatagtgatgttccaattgtttgcagctccaagatgaagtaattgtttcagatgctgagagattgagaatgactcaaagcaatgtgaagatggtatcatcctcgatttcttatatatatgtatctagtgcatgtaaactttaaagtctctcaattttgtttttgattttactgcagcttcaaagacattttcaagcagacacccttccaagaatccaaagaatgagacaaaaagagcaaggtcttcaaagacgccttttaaaggttgacaatttatatgttgtgtttgggattgttattatttgattctgcgtcttaagcagttgctcacatgttttggatttatcttgcttcttttggtggcaaaaggtaatgaaaataatggaggcattggagggaaagggttgtcgtctgcctttaacgaaaggggaagctgaacttgcggagaaattagctgcaatcgctagacaggtggcgttttgcagttctttttcttttaaatagtatttttggcaaccttgtttggttgcccttttttattggtgagttataactagtactatatgcatgttcagttaaaaggatctggtacagagctttctagaagggtacaaaatctactcaccatatcccgtgtccaagaatgttctattataggtggtggttctgtctatcttccaggatcaacgaaaatacatgaccggagtcttgctgatatgcaagaggtgagttaaacaaatatgatttcattttaaacaaggacaaattttgtagttgtgagcattataaaaggcattttagggtaatttgcataccgttactgatgctgatgttattaatgcgtagcctctatgatcatctgacattaattaagtggcattttaggtgctatttggttggagtaacaaacaaaataatgagaataagaataaaaagtttgggacatgtttgtgtagtgttaaattattatatataatagggtaaatactatttt

SEQ ID NO: 20492 - DNA, 1781 bp, Cannabis sativa
atatatatatatatactcatgatcacttgctgatcttaggcgagaaagtgtacattattaattggtattaatttatatatatatttatatatcactctttaagtccgaattatttatttgtttatataaattatgaggtatagaagtcaatccaatcatcatttaacgagcatgtaacacacatctttttatataatataatatagtaaagtttgtcaacttaccttcctctgtgtttttcttcaagaggtggcatgcatattcttttcatgtatctccactcttcgtaatcaaaagatatactacatcatgtttattattcctaaatatatatatatatatatatagaaaagtcaaaacaagctactaacatcaatcatgcaagagcgcatgcatgcctctgaccttaatccacactaacgtcaaagcatatatataaaaatagctagctaggcatatatttgaactcgatatgatcgcactccaacttcatgttacatatttaggctactaaatatacctcggacttttttccaattaacgcgctagatctaaatctcaatctaaatcataatctatatattatttatataaattataattaatttgttgagctcatatgtctttgtcaagataatatgattatactttattaattctgcaaccaatataatatttaaattcccagagattataattaggaattaatgcttgcttcatatatactctatattattgactagtactatgtggcttttcccatgcatttgtgtaatacagcattcatattacattttctttagtaattaattttttaatgacttaatgttaatcaataagctacattaacgcttttggtaattttgtctcaggacggaatcaccaaatggagaatattaattctacctagctaattagtttcatacactacatcatattaaatccgccattcctgcatgtgtcagttcgatgtggagtcaactatatgagaaaaagactttcaagaaaaaaaacaaagtttgaaaactcaactcaagaaaattgaggctgagagaataagaattgattagcaaataaggttacagtcacttaaaatcacccctggatgttgtgacaccgagcttgtcagcgaaactggaaccaagaatgagataggccctctgtaaaacaatctgctatttggtctgttgattaaaatccacttataaccagtccctttacaatatatatccacatcagcaaaggaaaataaatacaagtaaataaaacagtccctagggtggcttcgcctctagtggatcaaatcttagcagttagttacaactgaaagtgtaactaactcctaagatcttgatcaaccgactctacaaccttataaatacacagatcaaagcagaaaaaccgatatctacaatattgaatacagagcagaacaggaaaaagagagagagaaggagtaaaccctagtttgagtcttcagctccaagatccaaccatgagaacccagatctcatggtaagaagctcgaagaagcagtacatgcacaaagaagacaaggaagagagttaaatcgagaacaaacacaaaggaaacaacaaaaacataaactgtaaagaaagaaatcgagcttacctgatcgatttctgtgacaggaagctccactgtttgtaaacaaaccttgtgatagtggatatcaagctttcatctctgagaagagcttgacagagacgtagcccagatttgggtgaactctgaaacaaattctggtgttttctctcctt

SEQ ID NO: 20493 - DNA, 2733 bp, Cannabis sativa
tacttcatggaattcaaaatacatcaaaagaaattacttttgtgttgagatggcgaacttctacttaaaatctacgaattaagatttttggtttgaacctgaatctgaccaagtttggattaggttctgacttggttgtctctgactaggttttcaccaagtttgaaataggcgttttttacccctgttgttttgtccccgcttggttcaaacatggttcgaatcaggtcaaaaacaggttcaaataaaagttcgtcgtttcagcttaaaattaaattttttgatgagtttcatgatttgaaagaatgagaggaattgtgtatttcaaattcgatgaaatatttccatttcaaaagaagaaaaggagaatccatgaagtattttcatgtttttggtgttaagttatatcttagaggtagttatgtcactttaagtgggttagagataggcttagtattatggctgttagggagaatattttgtggagttttcaagctactttttgcttcaattcacatccttagcactaatggctcctactcaacactatattgtttattaacaagctattaatgacagtgacaccttattgttttcttttttgacattgagggagggatatttgaacttgggacctcctttttatgaggtctagtactattagactatgcctatgacaactttgataccctatcttctaaaggcttcaggccatgatgcttcatgtaactaatacacagagcaaatgaaattgaacattatatgcattttcaacccccctaactttcatgagttttacttctaatgcttttatactataaacaccaactaaattagcaatgctaacctttttctcttttttcttttctctacgttggcgtttccgctcctcctcttcctgctgctgctttagaatccgctcatcaagatctaaggaaaaagaataatcaaatatccatcttagagccttaatattaattaacatgacgtaaaattctaaagaaaatgaatctttttattcagtcacaccttgctctgagaaggtcccagggactctcctcttcttcagaacttcaaatcgatcttggacctgcaaagtatccataaattcagaacttcacacaaaaataacagatttctagcaattttctctcatatttacaatataacaagaaccatctatcaatctccatatctacataaaacgacgtcaaaatatatcaatctccatattatatacctgttgaagtgaagcacgttctacccgcatggacatacctaaagctctttgatctatacaataatgaaaacataaaatattaacaacaataagaagaaaaactatttcataaaatagatttaggacaacaacaacttggatgaccacatacgcttctttccattgatatgatccaggtagtttgcagaatcttttacaacacattcacaaactgaacaaaaatatccagcctgcaaaatcacacacaaacacaatgaacaaacagagaaactaagcaatcacagcagatatcacaaagaaactcagtttaaacaaatggtatcataagcatagttctttcttgcttatgttactttagtgaatcaaatgaccttctttccctcccacaagaattacatcatgtatgctaatctatattatatcagaaatcaactacttcactcatcataaacagagatgtatactcattttcccctttaaaaatcaccaaaatcatggtggtggtttatttaacataatgtggaaaaagtgaaaactaagtacaactaagacaacacggtgatggatgatacttccaaattctgagactacctcaagatttaaggaccactaaaacaccatattaaatttaaaggtttttatcaagcaaaaacatgagctgcaagaactacaaatagtaactaaatcaacagagcaattaaacagaatagtgttcaaacgggaccaataactaggtgaaaaaaatctacctgttggctgagaggcgcaataggggtaacaacctgcaaggaacataattaaatggtaaataataattataacaatgaaactcaaaatataactttgtagcaaataaaaaacataatagcccaaaaacaatgcaaaatacagttaaaatatcgacacaaaattgatcatatacaaaaagtacatgtaattatatgcaaacaaacatttcagtttatagcatgccacaaactcctaattaacacacgatagcatccaaagggttagattattaaccaaaaaaaaaggaacaacttaaattcacatgaataggctaacatctgtgatagtacacaagagacaacatcactccattatcccatgtccactggtggtagcagaactatctgtatgacagttgagggggggagcccccaatttttatttttattttttcttaaaaaaaaaaagaaaaagaaaattaataatatatgtgtatatatgtttgaaattaataagttaacttattattaaatactttgttaatagttgttatttgcccccatctattattggtttcaagttccgccactgactatgtcttcccctaccacaaaaacatcacatcttatgcctgaacatttacctcaaagtattcaagacaacttcaatggatggtgttttagtttttccaactaggtattacgaaatagaatccagtagaaactttacaacattcatcgctgatctcatccaaagccaccttg

SEQ ID NO: 20494 - DNA, 4008 bp, Cannabis sativa
  modified_base (27)..(31): a, c, t, g, unknown or other
  modified_base (3939)..(3972): a, c, t, g, unknown or other
actaatcagattgtaaagagttttatnnnnngcataaaacccaacaaaaagtccccagcaaaatcagaatctacaaaccccacaacccccgagtcttcagtatttggtccatagacaagtcccacatccgaagtaccctttaagtatctcataatccatttgacaactttccaaaacacctggttttcccataaacctgctaactacactgactgcatgacagagatcaggtcttgtacaaaccatcaagtacatgatgcttcccattacacttgtgtatgggacttccatgtagttctcttcttcctttgtacagggagcttgatcatttgtaagtctgaattgttggctgattggggtgcttactggttttgaattagtaaagccaaatctggacagaatctttgaggtgtatccccgttgagttagcttgatttttctcttaattctatctctggttatttcaattccaagaattttccttgttgcacccaaatctttgctcaacaatttcttgattttttcaatttcagtgttgctcttgcttgctattaacatgtcatcaacatatagcaacaagaatactggtccttttgtgtttctcacatagacacaataatcataggcactccttttgaaaccaattttggtgacaaattcatcaaatcgtttgtaccattgcctaggtgactattttaggccatatagagacttctttaataggcagacatgatcctcgtttcccaattcttcaaagccttctggttgcttcatgaatacctcttcctctaaatctccatgtaggaatgcaatcttcacatctaattgttcaagttccaagtcatcacttgctaccaagctcagcagcggcctgatagatgtatgtttcacaacaggggaaaatatctcattataatctataccttccctttgagtgtacccctttgcaacaagcctgcccttgaatctagcttgtgcaactccttgaatcccttccttgtacttgagtacccatttgcatcctacaaccttcataccagcaagttttctgattaggatccatgtctgatttcttttgagtgaggccatttcatcttccatggcttgattccattcatgcttgtatgttgacttcatagccttagggctgcacacgggtcgggtattcgggtttttggatggtcgggttcgggctttcagattttgggtgtttaaaatgtgtaaccgaacccgatttttgggtggtcgggtccatcagatttcgggtcgggtatggcgggtttgctatggtcgggttcggattaacacccgaatcaatatttgcataaaaacttgtatggtttggtgtcatttcactgtcaatgaaaagtacaaatatgaaccactaccactgtcaaagaacaaaaaaagtacaaataataatataataatatttttatttttattttaatgaaaatataatttaaaaaataaatagtaaaacaaacttagtttcccaaggaaaatgaattgaacttttttcagcagctatttttatacccacgtgcatgatgattatggcctacttttgtaggtgacacagttacaaaggtgaagatagataatctctcttatacatttttatttcataataaatgaaaaaattgtaccttcagctttcctattacgaaaatctatgcgactatgcctaatttttgggttttggattaacacccgaattaatatttgcattttattaaaacccgaacccgacacccgtgtggagcattttcgggttggacccgacctgaccacacgggcttttaattttttggctttttttggcaacgggtcggggcgggtggctgggttttcgagtttgcgggtataaatgttcagccctacatagcctctctataactcggaggctcatccactgcagcaacagacaaagcatagtgtacaaggtctgaaaaaccaaacctatttggtggcttgacaactcttctctttctgtctctcactagttggtagtcctgctcctccttttcatcttgttcatcattacttgcaccatcttcattttcaatcataccttcttcaacttcagttgttccctgttcttagatctctccctgattctgtgtttgatcattactaggctccacctcaaactgataatccttttccagttcaagttcagatgatactggtacatgttgttgggatttgagagtatctctatagaccctgttctcatcaaatgtaacatccctactgatgaagtacttttgatgatctccaccctcaatgctccacattttgtaccctttgactccctcggggtaccccagaaaaatgcatttcctggcccttggttcgagtttatcctgcctcacatgagcaaatgctacacaaccaaatacccttaggtgtccatactgtgcatctcttcctgtccatgcctcaattggtttcttgaaaccaattgcagaagaaggacaatgatttatcaaataacaggctgtagaaacagcttcagcccagaagttctttggaaatccagagtgaatcagtagacacctaactcgttctaaaattgtttaattcatcctttctgccaaaccattttgttgtggtgtttttggtactgttttgtgtctactaattccaaccttcttgcaataatcagtaaaagcatctgagcaatactctaagccattgttagttttaagctttttaattttcttaccagtttgatttttaatcatggttttccattcaatgaaaattttcagagccaaatcttttgttttcaatatatgaacccaaacaaaccttgagaagtcatctataagggtaagaaaatacctggcaccacctctagaaactgttcttgaaggtccccataggtctgaatgaatgtagctaaggatgcctttggaaacatgcttcccagttccaaattttatccttgtggcctttccaagcacacattgctcacagagttctaaatccatgatcttgtcttttccaaacacacctttttagctaagaatcttgagtccaccattgctgatgtgcccaagcctcttgtgctaaatttctgtcttcctttttccttcatcttctgatacatttgcctgattcatcatagtatttccaagtaaaatgtaaatcccattctctttggaacccttcatcactagcattgatccattgacaattttcatcatgccattttcaattttcacagaatggccctcttgatccaacatagccatatagattaaatttcttttttatttctagaacattcctgacatgctttagctctgcaactcctccaccttttaattgtaacttgacagtgcctatgccagttatggggcatgatctgttgtcaccaagcctggccatgccaccattaatctgcttataactactaaattgggactgttctggggaaatgtgaaatgaaaggaacacccagaattgagtacccagtcagttcttgagctttctttagacactaccagtacccctgcacttccatatccatcactatcacagtcagaaaccagatcaacatcaccagatgactgtttctgattataattcttaaggacatgacaatctttcctcagatgagtggtgttgttgcagacaaagcactttctcttgaactttgagtctgactttccttgattcttccctttccctctgtgttctttgtttcccttcttgaaattctttcctcgaacaaacagtccatcaccattgctgtcatccttctgctctgatttcttctttaattctttagacattagatcattttgaacctcttccagagtcaataactctttaccatacatcatggtatccacgaaatgttcatagttttctgtaggaagagaattaaaaataatgatagcttggtctgttggaaattattttacnnnnnnnnnnnnnnnnnnnnnnnnnnnnnnnnnnaacaacctaatatgaattctaaaataatgaaaataa

SEQ ID NO: 20495 - DNA, 2650 bp, Cannabis sativa
taaaaagaactgaagataaaactccagggaactgcaatatgtcaagtgtgtttgggtgctataaagaactatataaaggaaatcaggaagaccctagaatactgcaaatgtcaattacaggatactaactcctcaaaggctgaagataacaggctaaagggatagcactctgaggcttaaaaattattacgaccatctttccatcccacatggcagttgtttggaaggacaaagaataagcaacatctgaccaaacacttcctgacaacatacagtgatcataggtaggtgcaaactcaaattttaaggtttaaaaaatggtcaataaagcataattttcttactcaaaggaactctcagaccacccgtgaaagcatccctaacaggtataggaagttgctgtagggtgtttgctgcctgaccaagtgcaccttttagctgttctggcactgtttcttcaataaccttggtgtctcaaaaaccccttctgcatattcctctctcattcgaagtggtccttcaacagtcaatttggttgacagagtaaacttggtttctatctgaaattcaaactaacataataaatttcttttaaagaaagatatctgcagctaagtgcccatgtagttttttttttccttttctgtttttgctgagggcccatgtagttagcaaagcatacaaatcgagtcagcagtaagaaaaaatgcaaacagggctatttcccatttgtaataaattttcagcatcttggataataagtaaaagtcgattctgtgaaattagctgagaccatatgctctatcaaatttagtttgaagaattggaaaaagatggccaaatttgtaaacacatactatcaaacacatttgttaagaaatttcacgtcattaaagagtagaataccgagttcaaaactctcatgtttgccgtaactcttgcatagccatccttgattgccatatccattttcgacaagttagccaaatttgagggaaatctcctgcaaacagttcaagagttgcaatatacatcaaagacgatcaccggttatctatcacaatccgatttcacaccaaccacgtaattttcaacaactaaaaaccacatttcacaaagttgaatagcagatgagagtataaattactcactcaaatatgaatttggcagcaaataatcccgggcttccagatccaaaccattcgaaactccagcgaccctccaagaatggcgacctgattagcttaaacaagtaaaaatcccataaaaattgaagcttggacaaaatcttcagctgaaatgagcgcttacgtcgttggacgaggcgtcggattaagccgctcaaggccggtaattctttcattcacatcaattctctgaaaatcactcgtctttccagatactaaagcctcaaaacccccagaatccttaaactgaatttttataataataattaataaataatcccaaattcaaagctcaaatggtaggtcttatcaactaaactacagtagatagaatcttaaaagttaagactcactgcgagaagaagggactctttagcggatagtctctccatttctttggcataagcagctggagctcctccttgtacagcttgctggaccattgccgtgcaagtcaatttccgtcgggatcggcggccggcgaaggaggagcttctccgatcggtgtcgggaaacatggggagggaagttgtggctgatgagatggaagaagaggaacaaccagaggaacggattgcagagagcgcggatagagaaccttgtaaggatgccattgataaggatttgagtcgagacggaataaaatggtttgaacaacagaaataataataagaataatgatttgagtattaaattgtatggggaatagtatagggtagttagttattgttagaatttacaaatgctgtggattttgggtagaaatagaatatgagtgtttggtaagatgcaatgcatgctttccatctcataatcaggttaatcaggttttttttgcctggctcttcttttcttggatttcgatgcgatattaactggcgtttagttaggaggaatgaaaatatgagaatggtaaaatgaataggaatggaatagaataaaatttaaaattcataaaaaaaattgataaaaaaatcattaaatttttttattgttacattagaatggttttccttctttttataatggaatagtcattctaccataatgtcattccaatactttaaaatacaaccaaacaaattaatgaaatgaaaattgattcctttccattccattctatttcattacctccaaccaaacgtcacctagagttttatttagttgataccatattaaaatttgagattatatgataaggtgtatggtgttatgttttaaaattaattggtattgagagatgagtggtttatgtatttaatgtagaacaattagtaattttagctttgaattttcaataatattaattttgtcccttaaaagatagggcttcttaaaaattctttcttaatttttacatttaaagaatttagttcttctgttaggttacatcttatttaaatgttgacgtgtcttcgtaaattaacaattttgtcgcttaattttgacaactatcaaatcgt

SEQ ID NO: 20496 - DNA, 6299 bp, Cannabis sativa
  modified_base (3271)..(3278): a, c, t, g, unknown or other
ggagccgctggcatgggcttttacctactcggtctgacagacgtcatcctcaccgatatctctccagtcatgcccgcactgaagcgaaacctcaagaacaataaatccgtgctcgccaaaaccctaaagcattccgttctttactggaacaacgccgatcagatcaagtccctcaaacctccgtacgacttcgttttggccaccgatgtcgtctacatcgaggagtcggtgggtccgcttatttcagccatggaggctttggtgtcggacgacggcgtcattttgctaggataccagctcaggtcccctgaagcccataagctgttctgggaaatgtctgagaaagtgtttgaaattgagaaggttccccatgaagatttgcacccagaatacgcgtacgaagaggctgatgtatacatatttaggaagaagaagaaggaggaagagaaaatggaagatatcccatgagtctgatttcggtaaattatatatgaaaattgttgtatgcttgtatggatttgttgaaaaaatgtggtttttgccatttttttttgggcttggattgcaagatctactgtttttacttttgttacaactatacgttactggtatatgttttgtggaatatatttcaatgaattttgatgtggagtaattgctggtacatatgaaatgtttttgtggaaattatttcaaatatgtatgaattttgaggtggaacagagttccatatcctgttgttaatttaattagctaaagagattgaatttgttatattgcttctgaattcattcatttttttgcttctcaagtcataaccgatcccattatgcttaaaaaaaataaaaaaaaatatttgggtcagctctgtatgcacataagaaaagctggaatataatataagattgattatagctaatatgctgtcatgcctgtttgcagaggaaatttattgactaactattttgtttactttggagtttgtttttcgtttttttactcaacttttgttctcattcaatctttcttgattgaatgaaggttcttatttctcttacgcaatataaagttatttctgttaagttttcatatactttctaatccaagcttaatcattcaacaaccaccatgttctgtcatggactttgtgtaacgcagtcatatcaagttgtgtgattatgatctgtaaaatggagagatggattggcataattagttattacatcaaaaattctgaatgattaagcttggattagaaagtgtatgaaaacttaacacaaaaaacttaaaatgataaaggtggtcaaatcctagagtactctttacttaatattggttctccccatctcagattctcctactttgaactttaagtttgctcctatcttaagaattatgcatgtatatttagagatttggtgttcccaatttgcacatattcaacttagaattcaaattttggatactaatgactcccttccagctgcaaattgtccccgcagggatacatttcaacggaagggcaaggtcaactttggatagtgttgctgaaaagttatttatccttttctttttcacggtagaaattgttgctccaccaatacaggttcttacttgtaaatttcagttggtcattaactcttgtctgaattggacgtacatatatggtctttaggtacatggaaaacgtctatattactcccctagatctctattataataagttatattttgcactcaacttgatgctcaacttggctaagactttttgagtcaattgatggactttagaagagcttttcaatcagatataaattcattttgtctttacttcgttttcagggacccatgctaaagattaaatatagtgaggaggagacctgaggccttgtttggttgccatacaacctggaacaatggatcccacttactggataagcctttggaagtttccaaagtacagattttgggacccctggcacttgaaaatgcatgcatttctttaacatttcttttgtagcccagtagcttagctggagattgctcagtaatgatctgaagattcatgcattcaagtttatgaaactctgcagtctcttttcatttccaagatattgcagtatgacttgctaagaatgattaaatctttctacagttctacacaacttttgtaatttcgttagtgtgaatttagtttataaagccaaatcatattttgatctttgtgcatatatttcgtgtgcatagctcaagacaaggcataacctatatgatgatgtttttacatttctcttatgcaacattaacatgtttatagactctggagaagtattttactattgtagttgaccctttttcacaaacaaaactctattcttatatatcaggtaaaaaaaaagggcttatctataaactttctggacgtgctgaacgaaagaagttgctttcagtagaaaatttatgaaactctctttaacagaactattttacattggtggtcactggtcagtatacttattgtcttcaaggccaaggagacaagcaagtatacagctcctccgccggcaactcagttacattttctgttccatagttataataattttgaagcgagcttgaactaccacgatcatccacaccagatggtgctgaaatcacagaaggaagagaagccacgggagacgagcggacaccaccaccatcgttggctgatacacgaagcagcatctcttgagccctgttcagctcgtgtttaagcatcccaacctctctctcaagccttctcttttccaccaagacgtcctccagcttcagttggatacttctgtaatcaaactctactgtctgtgtcttgtgtcgggctcgccggttctggtaccagatggcaacctgtcttggggatagcccaagctttgaagcaagatgaagcttgcgttccgattggagcttgtgatcattggtgaagctcgtttccaagagccttacttgagcttgggttagccttctagttctgcgctgccctgtaagtggtttagacaggtcttggttttgttgtgtctcctcaataagtatgtcgaagcactggaaatccatttctttttgtggaaaacaaattagtttcatatcatttctctgttaaaaggtttattatatatagatttttaagcaagaggaaaaatgaatgctagtaaggacgacctgtcaaatctttagtgttccccacttgtgaataaatgcttgtctcattaagaacagagagagagagagagannnnnnnngagagagagagagagagatgtgcatttcagaaagactcattataattgatatagttttatatgcatgtgtatgactttgatagtgaaaaaattacaatatatttgggttcgagagagagctaatgaggagagaggggcggcttataactaagccgattgatttaacgtcgtggtcctacaatgtgagaggcgagggtgaagggtcaaattagatgggcagttggtccatgtgttctttctttgctttttgacccaagcttaactcaaggatcatcttcagtcatttgtttttttgtgttggtcaaatgaggttaaactctactcagaaagagaagaaaactgtggatttactgttgtctggatttacctatagtatctcaacaataattatggattctaaagtcaataacttgtgattcaaaagtgtattcatcatatcagttatccttctagcctagttatcgcaatggtgaaacacacaaaagacaacaaaactaatgaagaccacctctccttcatcaccaaatctctgaaccaacacttactgacttcagttatttctcaaatgattgttttctataatattcaacagttacaatagtatttgtttctatgtgagcttgttttacaaattggtaatctctagccttagtaatgtgccaattagcatgggctaggtataaaggtagaagaattttgagagtatggaacttgcaagccaaagggcacacattaggcaaaaggcacatacgaggcaaaggatgagcattgctagaaggcattcatggtttagtaccatgataaaatgtcaccttataatcggtaagcaattttttataataaggcagcttgaatagcttagctgctaaaaaaatacttttttttttaattacttgaaatgatttatttcagcgcaacaaatgatacaacattattaagtttgaataatttagcatcaattatgtcatttacacacatatatatatctttatatatatatgtacggtattacttattggatagtacgtataaggagtatttgtgtttctaatatgcttattttgctatctataattaaaagaaattaatttttaattttgtattatatggttgtggttattttatgaggccaggagaaataggaaaataaattaagtttgaattagggatagagattaaagtaatgctaaatataaatatatttttaatatatagtaaaaaaaaacgattttttttaactaaatagtaaaattatgtaccagaactataatttttttttttttttttatgttattggaaatctcattttaaaaaattaatatttttaaaattaacaattaattattgttattttttaaaagttgccgggtaatacccattaaaaataatcccttatataaaatcgtaaaatgaagaagaatggcataagagtttcatttttcttacacttaaataggaaatgaagaagagaatggccgttaatcagtgctaacaaacagaaaattaaacagatggtaattaactgcgtgagattttggatacaactttattaatttaatcacactataaaagtaaaataacaaaattatatatatatatatactacttactaaagttaggtaaggaacgtatatagatttcatctttgtacagcttttttaagaaaaaatacaaccccaacccacattaaagacggggtcatggcccacgtgaaatgtaattattcacatttgtataaagcatacataataagaacttgataaaaaaaaaattgtagaagactagaagagtcacaaagcttctatattgtgtactataatagaattagaaggtgcaagttctcaggaactaaagttacctttcctcttttttattcttttccccttccttaccccttctattaaataactttgttactataattcactacttgatcatcatcttattttattatatatatttatatatcttgactccaagtactacccttcttatctcatcttattctcgtctccttttgtacctttggcttcaattattattatataattacctatacagatgttcatgaattaaggaaagaaccagccccaaaatgggtgacagaaatttcaggagtggtccctccattttgggcagcgtgatcaaatgatatgaaagaattaggaatattgcatgaatactcaacaaaggactcgtcgttttgtcgcaagttgttattattcttaggtgggttaagcaaatctttgatgaccgaaccacattgtctaggctgcgtttgatagaagactttggacaccactaactctccttctttctcctcttcattgttgcccaagtggtattggtgcataacccaattggtcttctcaggctttctttgcttcccatagtttgtgtagagaacaagtatctttttgtaccctttcacccttcccccaacaaaaacaggtcgggtctttccggtcttgtgccaccgcgtctcgccaccctcttcgtccgtgtggacctttcgtctcttccttgttccggtcgtgtatgccttggaaggtctatggaagaagtgacgcactaggccatctttcctcactcctgcatgcatgcacacccatatatgtcattaattaattttaggaaaggttatagattatttttttttacattagaaagaggtttgaatttaggacattctctttgtaaggagatgtatggaattattaagctaataatttttattgatattgaattacagacattattgtgctaataattctataaatattatttttaaatattcctaaatcattcagttagttcaagtgtccttttaaacacgagatgcagtggatatatttagtatttaataaatataaacgggagcaattccttatacgtgggtcatataagaacattttttatgttatttttaattttatataagggtgtagtcatcccacaagtttctaaaaaaattattaaatgttataaaataatataaaatatataagaagaaaaaaaaga

SEQ ID NO: 20497 - DNA, 2066 bp, Cannabis sativa
ccatgcatatgaagttgtccaagaactttattaattaaaaattgaccactcactagaatacatgatgagtaaaacaacaacctataatccaaacaaactaagttatacatgatttaacagatgaaaaccaaaatacacattagccttaactacaacaaaacgaataaactgaagagcaaatgtgacacaattgaataaaaaagattctgactaagaaaaccaaccttttgcgggtttatgcactacaaaatttacaaattaagacaattttaattataaatagtagtttaataatttgatctatagttgaacattaaattattaatattttatatttaataattacatataaatatcaaataaattcttattaatatgttaatcccgaaaattgatagagtggattttcaagattagtcaacaattagtctcgacgatcgagagacatcgcctgtaagagttggtcgaggaatgagtgaatcaatgtgtgtggcatatggctcattaatatcaaggatcaatgcttgcaagtctctgggtacatctaagcaactcggaggtcaaccccataacaactcacgagtagagctagtaagatcaacttactaaattacaattgttggaggattatgataataatacgttcggaattagatcttgtcataggcataaaatccataaatatctttctcagctttccaacgcattttgaatcatccaattttgacatatatcaatagagttatggcaaaactactaataagaccactaaattgtgacaactgggtgtgcaagcccatgagtcattgtgcaagcccatgagctattggaaaagccaggaagcatttgggtgagccgtgaggcatttgtgtgagccgtcgagcctttacgcaagtggtggagtcgtcgagcattataggttcatagtctctgaatttccatgttataacattgtcaaggatatagatgacacaatataatgatgtttagagaatttattttgatttagaaaaatagtaatcatttattttgtaatagataatttattttaaatttattatgtaaataaattggagagagaagaattatcagacatgataatatgtccaaagtatgtgccacagtttaagacaagtgtaagtggtgcctacactgtgttcctacagggtgataggcgcctatcacttgtagtggccccattaggtttatttttttgattaattatttaattcaaaagatatataaacaattatttaaatttaaatttaaaaagtaattacaaatatttaatatggttgagatattccctcaaagaggttgagagattttctctagattgttggaaatattttcaagtggttgagatattccttcaatcggttattaaaaatttagtttaaacttaatatttaagtttaaaataaatatctataccataattggttatagaaatcgatttattaatgcgaaagggagaaaatgaaaaaagtaaagtctgtatattgattgaatgagcagtacaagtgaaaaaagttatatatagcaattacaatagagaaaacaacctatcctataaaacaggggaaccgacttaaaataagctccactaaatgaggaaaagaaacagctaacaactaagataacaaaactgaaataactacctactgacaccagtaacagaaataacaaaaaggactaaactggactaatattctaatatcccccctcaaggtggacggtatatgtcatggacggacatcttggtaatgtgagaagagagagtagtagaaggcagcggtttggtaaaggcataagcaagttgaagagagctgttgacaggaatgagccgaatggtggagttcttgattttgtcacgaatgaagtgacaatcaagttctatatgtttggtgcgttgatgaaatgtgggattgttggcgatgtgaatggcggagcgattgtcacaatatatgaatgctggaccgttttggggaatttgaaaatcttgaagaaggtattgaagccatgttaattcgctaccagtggcagcaagggcgcggtattcggct

SEQ ID NO: 20498 - DNA, 3258 bp, Cannabis sativa
tttctgatcttttattaattagtaattatgattatattgaaatggattttatttagagcacaaacccaatagaaaggtgtagtggtaaagaaactttttattggcaaccttccttgcttgggtattaaactttcaagatattgttaaacaaataaacaacaaagagaaagaaaggttgagaaagacaaagaagaaagattgagaatcaaagacgtactgaattatctcattaagctcaagagtacaaagaaaagtttatatataatgagattctgtgagctagcacaatcgctcactaattagctcttaacagaaaaagaaaaatagttaggaaatcagacccaattctaaccaacattactaacataatttgtactctcaatacttactctcaaattgagaattgaagcatcttcaattcgaagtttgtgtctgaactagctgaatcagctgctggagacagctttggcgagaccattttcaattttgtcaagagttggcacatgtctcacttcaacaaacttttgtaacactttctccctgaaaatgtacaagttaagctcgatactatctagaggcttagcatatggaatctctgtgcaaatctatgtgcacttcactgataccctgatatgctaatctgatggccactaattttcctagcatatatttattggtacctcggtgcaattctatgtacacctcactgataccctgatatgttattctgatagaaattaacatgtatgctaagcatgtatacacatatgcaatcattatactaatcttatctcattttcaaatttaggtgtgtcggtcaacctgagggaaactactgctcgacgatttacaggcccctaaatcacaatattcgtaaaactgatgagtgacgcgctaaatcactcttcgggaacttaaaattgaaactaaaagttttcctatcaattgataacatggcaataccctaaatattgtaaaacgtaaaaataaggctccttaagctgctccaaccggcagaccgattttccaatcaaaattccagttcagaggggtttcttagggaccaaccggaattctggttcctacaggtcccactgaatcgatcgaccagtttagtgcaggaaacacaaaactccatctaaataattcaatttgaccctaaattgcacaagaacctccacaatacctaattataccataataagtaaaaatcaagcaacaaaaccaaccaacaacatctgaagcaaaaatcaccattagagagcaaagcttgagttcataaactcaaacctttctcaaacaacacaacactcaccaattcaactatacaacagctcaaataatatccaaataacctcagaacgctcaaacaataataaacaatatctacaacaaccctaagtccaaaatcatgcatgaaacttaacttaaaacttagaaaatcataaagaaaagagagcttgatggataccttggatgaatactctaaaaacttgctacattcccctgaacaagttgagaaaatccttaacctaagctggcttcttgggaatgagagagagaggaggtgaaatgtgatattttttttttttttcaattttgaaaaaaataataaaaaaacctaagcattatctaacttaatgaagtgtaatctcagattatacaatcaaataaaattccactagaagacataaggcaaaaagacctttttacccttgcacacacaaaagcatacatgccacctaggggtattttggtcatttctaaatcttcaaataatctcgacattctcgatgtctaactatatttctccgcctaaaactaaaataactaaaccataaaaaaatgtgattctatcggccaaacgtctcgttctaatattgtcgggcataaaatataaaaaatataatatttcatatatagcatacataatacacttataattcaaataaatctccataaattcataattcataaatcgtaattagaaatctaatttcatgattaagccctaattatttgctaatgtatcaaataaaaacaaccgatctttacaccaagaattcaacattctattcaagctccaagcattttgatgttaaatatcattagattcgtgatgtgcttgagatgaaagtgttacacttagaaaatgtgtgtaccagtgagaatggttctgatatgttgataaagactctgcctaaggagaagcttaaagcttctaggcaaagagcgggcttagttgagcccattaactgagacagagggggagatttgtcgggtccaccacatttagtgggcttggaccaaaataaaggatagcaaccccaaactaaattaaaaagagcgattaaaaagggaaaaaaagaaagaaagaaaagaaaagaaaggagttggtgtgtgtcgtggagaataagaaccggcatagaaaaaaaaaagaaggaaaaaaaagaggaaaagaagagaataaagctagagaaagaaagtggatgttgctactttgcattgaagattaagaggttgattctcatctattttagctcaaattttaggtggtgagagccaaacattttttctatttgtgtatctatcttttgagatgatgatgattgaattaatgattcaagattgtttattcttgatgttgttgtgagtctctagttatactagagaagactttgaaatcctattattaaacattgatgatagtggatgatttaagcgtattacaatctgtgtggtttttcccacattaggtttccacataaaaattttagtgtcctacttttatgtttgatttatgtattttttattatttgtagtgctttgattaatatttaatattacttattatagtttttaataaatattctattttgacataaaaaaatattgtgatttgttacaaaaagttttcccaatatattaataaatttacacttatctacataaaaaattatgctaaaacctaaaaaaattaacaaatatatttagaataataaataatattgtataatctatatatctacataactattaaattttaaaaaaactttaaattaaaaaaacaatttagagtatgtaatgtaaagaaggttccataccccaaaaaaaaatgtaaagaagctttaaaaattcctatatatctcatttttttaggaaccacttgcttaagttagttagggttgttagggttgttttattatgttaatcagtttgttaaatgctggagccaattcggttgtaagttagttatgc

SEQ ID NO: 20499 - DNA, 4481 bp, Cannabis sativa
  modified_base (2216)..(2218): a, c, t, g, unknown or other
ccacaaatgctggcaaaagtgtcatttcttgtagtgatatatgtgatgactttttgttttggggttattattttaagagctattttaagagcattgctattaggcaccaatagtgcttaacactttctcgacatgtcgcgttgtgattggccagcgatactccctaaaagctattatattaaattatatgggacccgttacttagttggaccaataacaacattaacacataggagggtgctaggcatcactggtgccttttagcatttctcttattttaagcatcaatttataaggcttataactgatgctaagtacttagcattcattataaattgacgccaataatgtttaatggcatcaatttaaaaattcattcattttcaatagcgtcaattctaaaaagaagggaatgcttttttaaccgaattgattagtctagctcactatgtatattattggaaaatcgatcgagacaattggtgcaattgcatcagtttataattgacgcaattggtagaatatatgtcattttttttttattgttgacacaatatatatatgtcaatttaaattgacacaattaagtatttttgtagtagtataaaaaatattattaaaataaatttgatacaatatttagtatgagtcattagtttttggagaaaagattctctagagttgagcaagcaatgtatcaataattagcaccctattaaaattaatattataataaaagaggttagcatggcaatatatgtagatcagctctctctctctctctcctcttataaatgtgtatatatatattatcgatattagtattcaacctcacatagatatatatgactttgaattttattttgttggattatatgttcttagaacacactagacttaataatattcgtccatccaatatatttcgaggtattttcattatttataaatatatatagttttattttcatcttatattataattaatttgttttcctctaaaattatggcaaagaaagaagccaatacagatttgttttcaaaaagtagtgagaatgatggatcatctgagctacccaaagcaaatggttggaaaaaagatggtttagtcttataccaaaattgttggtttccatctaatatccttcccaatgtcatcaccttccaaaaacaattcgaagccaaagatgaagacataatcttggcttcttttcccaaatcaggatgcacttggctcaaggctcttttgttttcgattctcaatcgtaacaaacatgatcattataataagagcattcaccagcagtgtccagcaccatcatcatcatcacgaggtaaccaacacttgctcaccaccaccacccctcatctcctagtgccctcttttgagttcaccatttacgccaatcctgaaatgatacatgagttgagtactaggtcaccaagccctcgtttgatgtctacacacattccctatgcatttcttcctgattctatcaagcattgttcgaaatctcgaattgtttatgtaagtcgaaatcctcttgatgtgatagtgtctttatggcattttgcaaatggtcatgcagagcgccgcttgcatgattggagtattgaatattttgtggacatgttttgtggaggtgacattaatttcgggccttattgggaccatgttttagggttttggaaagaaagcttggagagaccagagaaagtgttgtttttgaaatacgaagacctaaaaaaggacagtgttggtcaacttaaaaagatagcgaagttcgtaggactgcctttctcccaagaggaagagaatgatggtgtggttgagcaaatattggagatgtgtagtttgagtaaattgaagaatttggatgtgaataagtatggtgaagtaaggccaaacgttcataataaaattttctttagaaaaggtcaagttggcgattggattaatcatcttactccatctatggtagagcgtgtgaacatgataatcaagcaaaaatttagtggttcaggtctatccttttctaccttaaattaattattatatatgtattaaataattaaaagaataaaatttgacatgcatgcatgtatgtgtaataatgtctgttgtatgccattaatcagttatttaagttatgtttgctttaattttgtaatgttatgattttgagaacatcatcaatgtatatatatatatatannnatatatatatatatatatacgtgccaaattatttatattgatattgctcaataattatatatatattgttctgattgtgcaattaaattcgtactcaattactaaaagaaattgactcatttggtatatgtaactaataattagaatctcccatacaaccattacagccacaaaggaaaataaaaatttaacttaatgaacaatactgttgcagcaatattgaagaaggttggatgattggttaagtgtgaagcctactaacacaatcaactaataaaaaattattcatataccgatctttttaattacaacaatttagatatactcactactacaaaaaatattaataattaatgtaatttttagttacaacaaaaaattacttgtgactaaaataaatttagtcacaacaaattgtaataaacttcttagtcacaatataaaaataatattttataattagcttttacttttttacttttagtcataatttttattatgattaaaagtcatttttttatagtggctactgacaccaaacttgtcatccaatatattctcgttaggaaatttatattgtacttattccgattattatcagactcgtagaatccggtgtgatttattgtattatatgtgtattattgatagtaagttttgtcatttgatttttttttgttataagatttttaatttcgtaattttatgtgtaaagcgctttatagacaaaataaataaataaatgcataaataatcatatgtgtggtagttaaggttgtaccaaatactctaaaaataatatttttgaaatgaataatgttctagtttaggattgttctagtgtatttttctctacctaatacatagttaacaatacaattctccatatttttatttatatgataagaaacttctatttataatatatatcatttgcaaaaacgcaaaaaacaaaagtttgtgaaggaaccacctaattaatttaataataacgttttgtttggtacataattttattgtattatattgtataatattagattagattgaattaaattaatattatttaatcttccattaaaaaaatattatttaactcaatactatatttagtatagacttatactaataagttatgtaaaattataaattctttagaataaactcgaccctaaccccaactatggcctcgactcagatttggacaccgaactcgaatctaaacccagaccttaaacccgaatcgggacctgaaccctggcctcgaaccccacccgacccgacccggaaccgcggccgggtccattgtccaagtctcagttcgggtcatgatatgggttcgagttcgagtctgaggttcagattcgagtctgggttcaagattcggggtccgaggtccgatccaagtcttggtttgggtttcggggcggggtctaggtccgagtagggtccacggtctagggttcaggttggggtcggggtttgggtctgggatcagggtcggggtttgggtctgggatcggggtcgaggttggggtttggggtccgagttagggttgcggtccgagttcgactttggggtctgggttggggtatggggtccaggtcggagtccgggttctgaattcgagtccgggtctaggttcggggtttgggatcgagtctgggttcgggttcaggtctgagtccagggtctgggtctgggtccgagtttaggttcggggtccgaatttgggttccggtccaaggttcgggtccagggtctggggccagggctggggttgaccttataaccttagtaaatattataatacaagctaatacgggttatcttctatgtattaaataatacaactcatattgtattaaaatttatggtcgtaataattaatacaatataatattttatccaaacaggcatattgttaattattttttaatacaatatatataaactcttatacgacttgtcaaacgagccctaatactatgttttgccactaattattactttttgcaaaagtaggatgaagttttataatattatattctccatattttaaattgtgttcaagcaatgatagttcgacatgggaaatatttaattttcttttaatattttgactattttttttgctcaactaattctatttaatttttatgggcaatttaaaattattttgtacagttaaattcacttgtttattctcacaaaaaaaaaaaatcttacttttagtcccaacaaaacttgtgactaaaagta

SEQ ID NO: 20500 - DNA, 4271 bp, Cannabis sativa
aacattgggtacttatgccactaaaaaaaatcattgggtttatgccgcttacaaactcaaaactttgggtacttatgccactatttaccctttaaaatactatacgtttagctaatgttttttaaaatactatgcgtttagttaataatttttaaagattgtttttagattttttttttcactaaaataagaaaaagaactccaatatttcacaccacaccacgacataaaccctaccccaccccggccccaaaacccgtgaaccttggccccagaccctagccccaacccgagtatgtgagagaaaatataaaaagaatgttagacaaaaaaaattatttttgaaatagaaaacaatatttttcatgttttcttattttttgtattttttaactcaaattggtcgaacacccccttattagttttaaaaagtgaaaacagtttttaagttatgaagtcaaacacctgcttaactctcttccatgggaattagaaccggtaaattaaatgtatctatcatgcaactctttctctagttgcaaagtgttcatgtacttccaaattacctcaaaaatagttgtagcacccactactactgacttatggtatgcaccaacaagcccggtgttgatgttttgcaaagtttccatcaaactgtctcaatgtatcatgtaacgcactactagtttaggcatgttattgtgttttcttaattagtgtgctaatctttactaaccaaaggctttaatataaaattatgtttaattaaaactttataataataaaatactttcataaaattacatcataaatgcaagttgtttacaaaatacgggatcccgaatctacttttcaaacatgaacataatgcaatataataaaagtgtcgccaagcgactaataaaactgaatttatgttgtcctgaagatctgaacactctaggtctaaccatttagatatgtacaattttcactaagttccaaactcattgttgttcagatttgaacctgcctttacctacacatgaaaatatatttatgagtcgacagactcagtaagaaaagtataaaacataatcatatattctgtaagggtcattgttttgacagattatattaatagtgagtctagtcgtatctgtggttttaatctgttataactgcatactaatttttatgtgtataacttgtaattaggtgcccatacacctaattaccatgagtctataacttgcaccgaacgtgtataactgagtctcgaacattcttgattatagcatgattgaccataatatcagtcaataatgcagcactctagtcgtactaatgtcatagcattaatccatactaaaagtacaactagccataataccacgtgcacttaatactctagtgttggtaccactagtttatactctataaaaattactaaacatatatccatcgatatctaggtgcaactctatgtactccaatatcgcttttactgatatcttatctaattggcaaacataaaacatatacagtaaacatgtgcattaaactcataatctgaagtttccttattgataaatagcgtggaaataccctaaatattgagaaaacacaaaaattgaggtacccaaaaatcatcacaaaaggttaatcagatccccaaaaggtaacccatacactggggttttgcctgatgaaactgttcactgtttttgtgcaaaaatcctaaactcgaacatctcttcctcaattatatcccaaatttgctcaaacttttcagaacaccctaacatcatgttctaaacatattccaacacttaaatgcatcaataaacccctaaaataaaatccaccattaaagaccaagttttaagtttccaaacttcaaaacttggttctgacaactacatctgctactatacttaaaaaccagccaaaaataatcaaaatcaagttccaaaaaacgttctagcttactcaaactcacacagaatcaaaattacaaaacatacaaaaacctagcttcttacttcaaaactatcaaaatagagaaatataaggtttaccttgaattagctacaaattccacctcaattctaactaaaacccatgttaaaaatgaatttggtctaaacttatcttggtttctcttggttcattctaggccgagcaagagggagggagaatgtgattttagtttttattttaagttatctaatatcctcttgattattctaatactttaagcatataactcatataattctacagaaatcccctaaagacaaatattaaaacttaaatagcattttacaaaaacacccttacttcaaccttaagtaatctttacaactaggagtaaaatagtcataacaaaatacttcgcataaccttgatattctaactgtccataaaacttgtctcgcttaatctaagatactaaatcgtatcaaggtgacattaatggccaaaccgccaaattttaactgtcatcatgcataaaatataaaaatatcataattcataaataacacgtatgaagcacttagaattcaataaagtctccataattaagaaattatatcactaatgctttttctagggcttattttcatgttaatgcacatataattataaatagtaatttaattactaataagttgctaatttatgtctaattatgtagtcattacaattatcctttcgttaaaaggatttcatcctcaaaatctaacttgaacaattctatatatcgagccctcatgatcgactataactcttaggtggcctcctccatcttgtttttctctagagtactttgaccaaaactatggtcttactttagagggccttatccttcctatcaaggatttgaactggttgttcctcatagaacaaatttgcttggagctctaaaacttcataacttaagacatgagttggatctaacacatacttcatcaacaatgatatctgaaaaacattatgcattgctgacgatgctgaaggtaaaactagacggtatgctacctgtccaactttctcgagaatcacaaatggacctgtaagcctaggactcaactttctattcttacagaagtgcttcacactttcattggtgaaatatgaatacatgatttcctagctaaaatcctatatttatgcgttttggatctgcataacttttctgcctgctttgggaagcaagcatccaagccttgatattttctatagcatcactgatctttctgaactgattcttgacctaaatactttctttccccaatttcatctcagtgaatcggagaacgacacttcctattggatgttattttaccacgatctaacatgtatgtttaattatattctataatctaatatcctaaacatgaatttcctaaaacaataaattaaacacatatagagttctagaaaattttacattggtggcaacaaaatattatggctccttccgttcagatctctaaccgttgtttctttctgtcacatagtaatattaagatccgagcctggatctccttcaaaagttaaaattcttcacaatctttcatactatgattgattactaaattgatatgagtgggctaggtactcttcactataggactttgaaattttgaagagagaagagagagagacttcaaaaatagagagagagcctctttatttcaattttttgacaggatagtcaaatgaagagtatcaggttatgagcctatcactatctatttatatgatttcatatagggttaggatttaaattatatggaattaaaaaagataaaataatggctaaaaactcccttaagcggccgaccatataatgggccccactagttttaattttgctatttatttaacaacttatctttttctttcaaaaataccatattttaattttaaacctttaaatgtaaaatacatttatttaataattataattaattatcaaataaaattgatatttaacttatttatgcattagaccttacaaaatctcttaattaacaaataaactctaaaacctcttttcttctcaattaagctcttgctcaatgaaaattcataaataagacatagtctaatttagaattctaattagttaatcaaaactaattgacagagtctataagctcatattttctcaactagtgcgggaatcatgggcctatataatcaatcttccaataagtagctctagaatttaccgagtaaattcattatcttatcaatttctcctgactccactatagatt

SEQ ID NO: 20501 - DNA, 4428 bp, Cannabis sativa
atactgtcttttacatattttttttaattgttttctaaaattttctgtatgggaaagaactatattttttcaaatttatactttaaaaatcatttgaaaattctccattaagacaaaaattttttttgaaggatttaattgggcggtcttgtatagcttttatatattcataattaattgctataaaataaaataaaaaaagtgggtgtagaatgctggattggtctgacaccatatacatgagaaaacaacttaacaatatcattaaggttattgcttcgaatgtcaaaagataaatttcagaatataaaggtcaaagtttgatggtgtaaaccaaattaatttaactttataaacagatctaacagcaagaaagaaagaaaaagaaacaacaagtctagactgtttaaggttgggacccttattcatgtgccatatatcttatacgcaatgatatatataataaagtatatatataacttagttaaactaacaaactaacctattctatcctttgtcctattcatgataagctaattagataagctttaactaaaaataatgatgggctaactcgatctcatcatcataaagtggttgtaatccaagaaaggtatcaatatttatatacaatttcttcaaattattgactgattatgatgtagcactacacaatacatatatttatatagatttttatatatttagcggactaagagtgttaatgaagggttaaatagctgagatttgaaaacatattaatatataattgttatttttaataggtataagatggttattaaataagaattattcttagttcttggaaaatttgataaaacatggttagccaatgttagagaatcaagccaacttagcattaatcatgagcaagacaagtcagcacaaatgtttgagcatttaactttctgtgtatgtgtaaagagggacagaaatggttaacttgaattaacatcatgattcatgggcaaccaatttgctaaaataaagtaaaatttaagaaccaatatatcaaaactataactttattagtaccaagtaattataagggaactctagtgtactcaaaatacattatgaggcaacatatcaaatcacttttaaacattatgtacttcgatacaatatattacagctctaaacacttttattcatcatagttgaacattgtcttatttatatagccttagtcactaacagattctcaaagtttaggaataatcacacgtagaaacccatctctgcacaagtgaaacaaataaaagtaagctaataagagctaatgcagttttacattattttaggaagagaagagttaaggcagattcaaaagataatcattcataagtgtacgagtctagaaatgtggtgatgacttacagaaactcagctgagacagagtctttgttgacattagctggaagtggccacacaacctcatatgggccttcaacaatctctcttctgagatatgcagaggcagtagagtcatttgaacagcctgacatttgccagtgctgtgtcgagcgttttcccgctacagataacctgccatagaaatcgcaaacttgttatacaagctggcaattactgactaagtctcacattgataacgtgtaaaaacataacaccttatataaaagtttatcgacacaaatcttacttattatcatcaacttccaccctaatgtctttgaccctaacgcctggaatctcaacggtgatgacaaagttttgtcctgattctgcaacatccatccttggcgaccattccattactgcaaatatattaaaaatgaaaacattgagaataacgagttaaaagcatcattatgtatatataacatcaatcaaacactaccaaccattagagcaggaagagtgttgctccctttgatgactgagtatttcactttgtgtagcaaacttaggagggtcatcatgatattgctcagcaggttgttttggaaatgaaggcctagaaaatgagggtctttctggagaaacatagtaaagaccctcagttctaacatcagaggatttaggacaagtgtctgattgaggaggaggaagtacctgcaatgtaaaaatgagtcttaagagacttaattgaacaaagtgagagtgagaagtaaaaatagaaaaagaaacaaaaaaagaaagaaagaaagaaagaaagaaagagcacaagtgacaagtacctcatcatcggatccctgcctcatgaaattagcttgataagcagatccttggcgtgcgaaaaacagcctattgtcaaatcttctggtggcggagtttaaagtggtggtggtgttctaagacaacataggcgaatcggattaacaaaaataattgcaagtataatttatcataacccctaattaaatttagcatctacaactttaaaaagtagttagtaggggtgttcccaatgcgaatgtagatgcagtttgaacaaatttccaaaccgtacatgcactgcataaacctaaaaaactaaaagtattcaacaaaaactataaaaataacagcaaataatgcagtgcggtttaaacagtacttatgaaatttcaaactacaaccacaccatggaaggtttatttatgatgtgggccgtttgatgaacaccactagtagttagttagttgatgtgtattgacaacaaaacttactgggtttgcagtctcctcaatcacgtcatcatttgaagcttgtctcatgaaattaggtagataagcagatccttgcctggcaaagtacattttattatcgtaccttcgaatcacagagtttaaagtgctgctacagttctgagaaacccaaaaaaaaagttaatttaatttaattagtataaatttgagtgttaaaaccaatcaatcaccaagcacaaaacatacacaacagaacagagaacataataaagagcaaaccacaaaagaacagcaataatcaacaatcacagtacacccttcaacactctccaatggacaaatatatcaactctaatacaaactcaaaaacagagaaaagttcttaaaagtgtttctaaaacgttacattacaaaagaattgacacaacactgcacacataatattttcaactgtaaatgctaaggaatgcgtttcttctcttattcctattcaggagtctgtgaagactgtctggaaaaatgaattctatgttaggacaataaacatccattcactaaatttcatagagaacaaaacgttcaaaaactttatttgaatagaaaaccatctttattaacaatatctctgttaccaaacaaggtaacaattcagttggaataaacaccaagctgaaacgataatcggagtacaaaatagcaactttaacaaagctataagccattacattaactaaccgcttaataattgtagtataagtattaagctcaacctaacaagaaatgattctagcaaagtactaaaatatgaaatcaatgaatggttaatttagatttttacttcccgaactttaacatactaactcatgcccttgaactttataagttgttaaaattcccattgaactattgagattgttagatttaagatttttgttcaattttactaaagaaaattgggagcacaatttaatatatgttaaagtttaggaagtatgatttggtagatatcaaagttaaaatttagaagtacaatttagttatagacaatcgctacattagaataaaaatctttaaatctaacaatttcgataatttaagaacaatttttaacgatctgaaaaattcagaaagtgtgatttggtatagggcaaaaaatcctaattaacctcaatgaattgatcaagattttaagctgctcataaaactgtttccactactctattcgtgccttttgtagtgaaagaatcatcagttaattaaactaactcataagattaaaacaaagggatcagatctgaaacaaaatcatcatcacaacaaaaatatgggaataaagaaccaacaacaatagaaaaataataccctagtcacccctctatttaaatattgatgaaataaaataaagatctcatttttacaagaaagtaaactactttgaggttagttcaagagagagagaaaaagagaataccatggggaggacatgagtgggagacaaggagtgatcatcaagtggaaagtgagaagcgatggtgctgattctgcgtctggcaacagcttgagcctccataatcaatggggttttggatcagtctgatctgatcaaagtgatgactgattaaatcaacccaaaaacaacacaagctttagtttgatgtagtaactagtaactagtgactagtagtaggagtgagagagtggtggaatggaatttgtataaatgattgaatggaaaccaattgcaataataataata

SEQ ID NO: 20502 - DNA, 6022 bp, Cannabis sativa
aaatctgatcagaacatagtcgaatttaggcttgaagttttaactttattttcttacacaattttctctattttatagatcatattttttctgagatttaaccaatttatacctttcaagtatgaatcaagtttctaagaattgaaacaacaattaattacagctccagtgttggctttatcataagatcagaaaaagtttgtggtttatagtgatgcctccatacagggtttgaggtgttaactgatgcaagctgacatggtctttgctgtgcttctcgttagttagaggagtatgagcaacattacccaacatataatttaaaacttgtcgcagtgatgtttgcattgaagatttcagggcattatctctatggagagaaatgtgagatttacactaaccattagagtttcaaatatttctttacttagaaagatttaaatatcaggcaaaaatagtggtaagagttagtcaaggattatgattgtgagattctttatcaccccaaaaaagctattgtggtagtagatgccttgagtaggaaaggtcccaggcaggtttttcagtatgaagatgatttctccttagttaggaactaacatggttaaggtaagcattgggtttgtgataggaaaacttagcaatttgaggcttcagtctgatttgctaaaaaaatattgaaaatgctcaagtggaagaccctgagttagttaattctcgggaggaaattttagttaatcgagctaaagacttctcagtatcagatagtggaatgttactttacaagaatggagtatgttttctaaacagtagtgagctcacaaaagagattttagatgaagctcacaccactccttactcattgcatccgggtaccaccaagatgtatcaagacatggaatcctacttttggtgttgcggtatgaaaaatgatatggtagattacgtaaccaagtgtttgacttgtcagcagattaaggctgaacatcagagacctgggggtttgttgcaacctttaactcttccggagtggaagtgggtgaatgttcctatgaattttgtggttggattacctaggaccacataattttttgattcgatttgggtagtagtggatcatttcgccaaattagtgcattttctactagtgaaaatacatttttagtggataagtatgtggagttatagatgaaggtgatagttcacctttatggggctccaagtccattgtgatttaaagtttacttccaaattttaggagagtctccaaaaatctaagggtacaaagctgaagtttataacaactttccaccctgaaatagatggccattcagagaggaaaactcaaatactataggacatgttatgagcttatatgatggattttaaaagtttgtggaacaagtatttatcattgatagaattatccaataacaacaattattagagtacaataggaatgacttcctatgagatgctgtatggtagaaagttctgttctccgattcactggaatgaaatcaaggaaagaaagtatttaagttcaaaataagttcagaggaccagtgatgttgtagaaaagatcaaggcacatattcttgcttcccaaagcaggtacaaaagttatacatatccaaaatgtagaaatatagattttaggtaggagatcattttttactacgaatgtcagcaaagttaggtgtgaagtgcttcagaaagaaagaaaagttgagccctaggtttatagggccatttgagattcacgagaaagttagaaaagtggcataccgtctagttttacctttagcattgtcaacaatgtttaatttttttagatatcaatgttgacgacgtatggcttagctccaactcatgtcttgagttatgaagctttagagctacattaagattggccattttgatgaacaactagttcatattctggataggaaggataaagtccttcgaaacaagaccatagtttttatcaaagtaccctggagaaatagtatggtggatgaagccacatgagagttagagtccaatatgagggctcaatattcaaaattgttcaaattaaatttcaaggactaaatctttttgatggggggataattgtaatgaccacatgattaaacgtgagaattagttggtcattagtgaattaattaatatttatgattatatgtgcatcagtagaaaataagtcatattgttagaaataggaaatagtgatataatttctcaattatagaaattttattgaattctaactgtatcatacatgttatatatgaaattttgcattttcatattttatgctcggtaacagtgaaatttgatggtttgaccaacaatgtcacttaaatatggtttagtatcttatatttagtgagacaagatttatgggtagttagaatatcgagattatgtggggtatttagttatgaccattttacccctaattttggaaattacttaatagtaaagtaagggcaatttggtaattttccttagtttaattattccctattattatttttagttaagacaattgttagtaagaaagaatttatgctgaatatgttagagtattctagaaaatccttcgataacttaaaccaaaagaaaaacaagtcacaaactctctctctctccatttttcaatctctcagcctaatctaaacccaaaggagcaagagcaatttagatcaagttcttcaatttttgacaaagatttcagctagactttgaggtggatttgttagctaagatcaaggaaaaaccctagacttttatcttgttattagttttggaagagaaagtttgatatttgtgtgatttttttggtattcaattctgcaagggtttagtaagctagaaactattttaaagtttgtattttgattgtttaaatttgtttttaaaggattatagcatttttggcttggattgagtaagcttgaggtttagagctcaaagtttgcttaacaatggtgaattttatttcagggatttattgttgcgttaagctttgaattatttttaaaatatgtttatagggtgttttggaaagtttgagcaagtttggggtagaattgatattgagaagattgagtttggaaactctgtagaaaaatggttaaccgcctggcagactccttgtaaacagttacccgtttagagtgatttttgggtaccctagttttcctgttttcttgatatttagggtatttctacgttatttattgatagaaaaacttcatattatgattttgagttcccaaagtattttagtgagacatttactagatttatgttaatgtgactttgggcctccgattgttgagcaatttttccactgaggtagattggttcacttgattatagaattgatgtaagattaatataatagatgcacatatgtacatgtttaccatgcgtggtttatgtttgtcaattagataacatatccgtaagaaccgtattggtgtacataaagttgtacctggatatcaacgggacatatgtttggcaatttatgaattacaaactaatgctaccaatactagtacacctagagtactaagtggatgtggtattatggttagttgtgcttttagacagtacaaactagtgctacgaacactagtacacctagagtactcagtgcatgtggtattattactagttatacttatagtatggattaatgctatcacacgatcaatatgactagactcttgagtataggttgatattatggtcaatcatactatagtcaagaacgttcgagagtcagttatatgcattggacacgggttatagaatcacaatcattaggtgtatggacgcttaaatacaggtcgattatatgtttgtattttatgcttttcttactgagtctttcgactcatagctatatttttatgtgtaggtaaaggccagggctgaacagcggtgaatttggagctcagtgaagattgtatatatctagatgattaaacatagagtgttcagatcttcaggacaacatgggcgcagttttggtcgttaggcgacacttttgtcatatcacattatgttcatgatggaaaaatagattttaggatctcgaattttataaatagtttatatttacgatgtatatttattaaagtattttattattataaagttttaattaaatacgattttatattaaaccctttagttaagaaatgttagcacaataattaagaaacacaataacgtacctaaactagtagaatgttataatattaacataaaataccaaaataaaaccaaaaaagaaactaaagttatatatctgctagcctaaaatccagccaacagactaagacccaacaggtgcaaagccccattattatacataaaattaagagattatttcacaaatatacaaaaataataaaaaaaattataaaaatacgaattcacgggattttaaaattttttatgattttttttatttactgaaaatacggtccttttatattgtacttttgttaatttgttgttgattttttgttacctgtatgttattttttgttgttattttgatgttatatttttcatgtttcttttatgtagttttttttttttttgttattttcgtgttatttttatgaaaaatcctaaaaatgtaaaaaaataaaaaataaaaaaaataaacgtaaaaaatgtaatttttatacaaaaaaaaaaatatatgttttatgtaattatctctaaaatcaaaaggaaaaaaaaacaataatttaaattaaaacaataccatataaaggtgttgaaagacaagcaagcacatagccagatgaattgcgaataattgcatctattccaattgtttgagttgattcatctaaagaagcattcatacaaagtttattaattctctcccaacataggaggaacccactcctgaatagtttgacaactagttgaggcacttgtaatgttcttttctgaaaagaaaagtaatcttcataaaaaaaaaagtcctccaataaaatggataacaactcctgagaagcattgcccctagtaataggacaatcgcacgtgaaataagaattcttaacattacataaatattacttatagtattataaattgtatatcatatagtatcttggtgttttataattatgtcaaaaaaaaaaaaaactagtttctttgccccatatcattacagatattatacatagagatatatgtactttcaatcattttcctcatatcattattagagggaaatttaattttttatacttacatatacttaatatttttccttaaacacatagcatttaatatttgtgggatataacacattttacaatatccctaaaatacccccatttacattaccccctctctcttcttcactactgccaagctcccactaaatggttttttttctccactcattctccactcattctcttcatttcactacactataatctactacaccacaagctatactacatatttttttttcaattttggacagagcatcatacacggagcaacatatgcaagcaatgggtaatttttttttgtgtaatcttatttgttcttgttatatttagtttagaatgttattttgatgcttgatctgtggattgttgttgttattttgctgttgtgtgtgttaaaatgcttgttgcctgtgaatgctgcaattttcctggtttctgcaattttttttgtctggtctgatagggtccgatggtggtccgatgccctatcaaaattggttgacagggatgaaggcccaatggggtccgatggtggccccaaaattggtttttcttatttaatttgtgggatcgggcgcgatgttgtccgatggggctccaattggggtgtccgattatagtccgaaaaatagttttggggatttttgtaggcccgattagatgggtgtaacgccccgatattttgccttattttacaaaaatactattttcatgcataatttgaaaagataaaa

SEQ ID NO: 20503 - DNA, 1282 bp, Cannabis sativa
taaatttataactttttgtaaaacacaatagctaaaataatattaacccttaattttattatatgtatacatagtaatgattatttcattaaaagaaaattaaaactctacccaccatcataaccattatttaatataaaaaggtaggtcaatgcaataatcatataagtaaaacaaataaaatacaagtgtgtgacatatgacatgtgacatgtataaaattttcttcatattaattataaaacaatttgcctttattgaattctaatttggtcaatgaatatgaaaatttattaagaaaaaaagcaatattgtaatgatttaattaataactaggatccaaggttactttgtatcttctttcatttttggttcatagaatctttatgttaaagttacttaaaaatgacaaatcgtttgttctaattaatagataacttatttttttctttattaatttatttctattgtgaatctcattcatttataactattacgtacacattgttttcataatataatacattataattaaatatatttttaaaaagacagtgccttgaaaatgtgtactagtgtaaactagtgaaatatattaggataataataatttatagagtattgtattattgagtattagtagtgcttaatattttttaaaggtggagcttaatgattgattatcaatattttttaagagttattatagatattaaattatataagactcactttaattacattaatagtgatatgacaacgagtaaaaattggagtattaaggtgcctaacactaatatgaggtgtcgtcttataattcattagcgattatttataatttttattaaaataaaatatgtaagatttaatattaaattacactaatagtaatattacatatcacaataataataagcactatgtgtgccatttaatattttcccttttttaataaaaatatttaagaatctcttgaggatcatactattattaatgtattaaagtgtttctttcttgttaagaaaaatgtatttaaatattaaatcttatataattagtatttggtgtcactatgtccaataacattaatactcttctttaatttatgtagaataaagtaaaatatacttttatatgtgtgtgtaagttgctattttaaaatagtgtaaatttgattccaaacatagaaagaaagaaaaaaaaataaaattacaagtttcgagaaatgtatggcaacaacatgcacatgcacgtggagattggagaattttacgcaaactca

SEQ ID NO: 20504 - DNA, 2325 bp, Cannabis sativa
tagtctcatacctacacaatctcaaaatcatcacacttaaccttccccaggcaatgtgggattgcacagctcctactctttccccttgcagatcacgggactctgactgtcacattctggggatgcaattcaaatgacaagggatataagtgccttgatcctgcatgcaggttgtacatctctagggatgtgatttttcaatgaataccactttttcttcaataaatctaaaatagttgcaccaacagttcaagaaatacaattggcctctctggtctcattcctgcatcgacatccaagttcagtgtctctactcaacacacccaggttaaccaatggtaactacaattaatcattagccaccataagatgtaactgcaacattacaataggctgagcttgcagaaccaatacctattcttgcttcagacttagctgcccatgatgactctttagtaagttactcttctcttgctgcaagattaactcactctggttctgtttctcattctccacctccaggtgttgattaagctcatgttgcaatctctggccctattaaggtcattcctgctcctagatctccctctccatgatctatttgagtctcctccatcactaagtcctgaaccagtgcagattgatctccatgagactagcacgactccagtaattacagcacctccttctagatttcccgttacacataaaatgtgaacaaggtcgaaataagggagacacaagcaaaaagttttcagtgtatctcgagaaccaacctcagttgctttagaggaaacaatggaatggtgcgatgtaagatgaggtgttggccctaataaggaattgtacctggacccttgtacctttgccacaaggaagaacatatctatttgttgcaaatgtgtgtacaagattaaagagaatctgaatggcactatccacaggtataaggatgggttagtagctaaaggctttcaccaacaacctagatttcatttcacatagacatttagtctagtagtaaagcctgccataatcagggtggtgttgacactagccttgtcttagggatggaagatttaacaacttgatgtcaagaatgccttcttgaatggtgtccttcatgaagaagtctattggacacaactaccttgttttcaagttatttttaacccacctctagtgtgcaagttgcacaaggttctctatggcctaaaacaagctccaagaatctggtttgaaagacttcaaacctctcagatgtctcttggtgctgtctcatttaagtctgatcactctctatttcttcatcacactaagttctcaactactctcatcttggtctatatagatgatattcttatcattggaagtgaccagaaagccattaatcaacttgttgtgacgctcaactctgagttttctctcaaaaaccttagagagttgaactaattccttggagttgaggttaagtgcactacaaaaggcatccacttgtctcaagggaaatacatcagagatcttctctataaaaccaagatgtagggggaaaaatcaagcagaacacctatgacaagtggttttaagttgtttgcctatgggagtgatcttatagaagatgttcgactctaaaaattactagtaggagctttacaataccatgttatcactaggcctaaaatttcatatgtgttaacaagtttttttagtttatgcaaaatccactcccagtacgttggatttttgttaaaagaatcctaaggtatctaaatgggacaatggatttcagcctccacctcaagaaaccttagcaggtagagcttactgctttttatgatgcacagtagcttgcaggccttaatgacagaagatcgacttctagtttgccatttatgtttgtcctaaccttattgcttggtcttgcaaaaatcaaaacactgtccctcgagaggtagagttcaaaagtttggctattattgcataaatctcttggcttagatttgtttacagagttacacatctctattccaaggcctccattaattagatgtgacaacttaagcacagtattattaactgtccagtactgcatataggactaagcacatagagttgggcttgtactttgtaagagagaaggtgatttggcaattggttgaagtgaagcacgttcgtgcaattgactaaattgcaaatggtttgacaaaggccatctcaagtgattgaggctcaaatttatacattttaagcctttaattatacatataaaattaatataaattgaatattttaaagttttattggtagatttatttttattggaaa

SEQ ID NO: 20505 - DNA, 2385 bp, Cannabis sativa
ccatataaattactattaagaaagacattgatgttactggaaagctcttccatctataagtgatgacgaggaggtgaggataccttcatttacaattatttatgatatttaataattagaagaaacagaatgacattaattaattgcatattttgtcaaagttcaaagttgcaagtaagggttatataatagtccaaatatcttaatttcggctactttttgcttctttcttaaagtttgttttgctaaaaataacatatactattctgttcatttggaaatgtctagcatagatagatagtttactcatcaaaactaaagcaaactctaccactggttagttactgagccacaaggctttggcatcatttcataccttttgctgtgaaaaactaatttcaaggcatataaagttcattctatatgaagatgaagtaaatagtcactttcccactaaactagagaaccaatgtcattcccagcctcagactatgaaaatacaccattataatttgcttacaaggattaaaatatatacattaacattcttttgaacttgcaagtttataatctattctcctttggttttatataactagctttcttctgtcggtgatatctctatatatacataaatacatgcttctatgtatagatatttagaatcccaaaagaaaaggaataaaaaaataagtgtacatagaaaatcacaacatgggaaaaacaatggatcctctgttgggaaagaagttcaaaacttctaaattcaaaaacttggtggagcttgtttcgtccagaattgctgttttggaaaagcaacatcgtctcaagtgcatgcaagcacagtctgatgttgtttctctccttagacttggtcaccaagaaagtgctcttctaagggtaatttctcatcaacaccatcattgtcatcatcattaactttctctcatccaagttatgatttttatttaaacaggttgagcttgtgatcacagagcaggacatcttggatgcatattccatgattgaaaacttctgccatcttctggtggaaagggttgtgtcgatagagaataacaagtttgtctctcctttctcttctagtattgaaataaaaaaaacacttctatataataatcgtctacactttcgttttgagttttgttattattgattttcatatattatagagaggttcctgatgatctaaaggaagccatatcgagcttgatatatgcagcctcaaaatgtggagaggttcaagagttggaaaagatcagtaagatgttcaccaaaagatttggtaaggaatttgcccaaaatgctgttgaactgtgtaatcactgtggagtttgtccaaaggtagatcttgatttgatttctcttctggatttgatttcagccataccaattaatcatctgtggtttttttcttcttcttttgaagattgtaagcaaactttcaactcaaagaccaaacttggagaccaaactgacaatgttaaaagaaattgcttttgcaaatggaattgatctgcatattgagggagaaaatcttatgattattactcaggtatagcatctgttaatgttagaatttttatagtgttattgtcaaatctgaattctaatctctgacccctttttgttattttattctaggagatgagactggacagaaaccagaaggaacttgaatcacaggaatctgctaaagatggtaatgaacaaaaccaaagtgaaatcatccctgaagaagttaagcctaaaaagaaatacagagatttgaaggcttctgatatccatgaagttcaagatgagaatgatcaagctattaatcagaaaacacaagatgaaaagagaaacatacttgaagatgttatgctcatgaagaaacacagagatcccaaggctgctcatgacaagcatggagttcgacacggcgaagaatgtttgtccactaaagaaccaaaacaaggtgaaagagtttcagatcaagaagggattcaaaggaggaaatacaaagatttcaagtctgcagctcaagctgcttataagctggcttctcatgcagctgtagctgctaaagaagctgtggaaatgtctcagccttcagacaaagttcctggtgatcgtccaaggaaatccactgaaaagaaattcttagttcattttgatgagtcttcaaatgcatatcattctgttcaagggaatgaggttttggaaaagaaaaaaaagtcccatgacaaaaagatagaaacagaaaaaaaccatgctgatcaagtcatttctatttcaagtccagaaggtgaaaagattaaaacaaatagaagaggccatgttaagagagactgaataccaaagtaccagtatacatattgaaaa

SEQ ID NO: 20506 - DNA, 2482 bp, Cannabis sativa
atattaggcatgtaagctctactatataaagagcattagcctatctctaaaaccctaagtcaatagctctcaactctaagtctgaaaccctaaccctctcttttctctctcttctacatgcccaaagggctttctctccctttctctcacacgcctccaaagccctatctctctcattagagatatgcctactgattcatacattgtaatctgaagagagctatatcagatcccacctatagtgatctgaatagtattatctctcagtatcaatataactaaaagggaagtaggtcattacccgttaactcaagggctgaatctctataaaaatccttgtgttcttttattatctaatctaattgtgtaacatgtgataagcattagtttaatacgactccgctgtcagttgatcaatttctgagatcaacactaacaaaaaacattatataaaacaataaattataaataatgattgaatagaatctaattatatagttaaattaataaatttataatcaatttcgttatagtagttaataataatacacatattatcttttagattatattacttattataagtacaatatatatataaagattacaaaaattaaaaaaaaaatcgcgcaaaacacgacttaattccctaattaaacaaataagagaataaagagagaatatataattgtctgagcggtgtatatatagatagatgaggaatgctaaaagataccagtagtgcttagtatcctcttatatgttaatcgttaaccaattgtaaaatgacaataataatgctctataaataaataaataaataaatagaagttaataaaaaaaattattaattaaataatgttatttattaaataattattaaagttaatcttagcaaaaagaaatattagtagccgctagtacccggaagaagtagaagcagagaatccaggaccgaggggtttgggggttttagctgagcaacatttcgcatcgtcttcttcagccgtaattttggcaactcagagaagcatattccaagaagatgtggtatctgtgcgtgttcttccacaggttattggactacaggaaaccagaggttgaatctcttgctcatctttttggagctttcgatgaagatgagcaaagcccttttgggtattgtactttggagtggaaacttcccaaacatcaccaccccgattctcctttccatatcgtcaatcttccttccgaagaaatagccagtcaaatcgccaatcggagtaagcaatttccatttctagtttactctttcttacgttttgtttgattgttaaaagagtgttctttttttttttttgtcttggtaggtatactagtgagaggaatgtatgaactttggggagaaggtgatagctacgaagagctggaggagtctattaacagttacccagaagaaaggaagttgccgtacttagaacctgaaagcacttttaaggttaatgtcgatacttttgggaaggctatcagtcatcaggagcaaactcaactcattcagcgcctcgattacattccctttaaggtttgctgcttatattgggtcttttcgctactacggttgcctttgtttttttgttttgcttgatgtagtgggtattgtatttttaactggattatctatgttctggagttctactttcgaattttgatccagatactttagtgggatttggttagcctaaaatctgagatgtttgtttgtttttttttgtcttttgttgtgtgtgtacaactaagtcttgcacgtaataaaagtgagaaatatgagcaaagttgcatgccattccctatgcttgtatcttgtttatcatctttttaagtttagagtggaaaaatctgctttgattttttttttatttttaaaggtttctatgatcttgcttttgttttgataatttgtttattctatttgtcaaagggtcgagttaatttgaaaaatccggttcacaagttctggcttatggaaactgatgattatgggtgtaataatggacttccacccatagatcaacgaagaatcttttttggccgagagataggtggcgctgacagaaaacttctaccaacttatcagttaaaaagccgcaactatcttggcccaactgccatggatgcagaaatggccttcttaatggccaatcaagcactagtaatgccagggaagcttgtctatgacccatttgttggtactgggagtattcttgttgctgctgctcattttggggcaatgaccatggtcagcattttttaatgtttttagctgtctctttatctttcatagttattgtcttttgaggttagtcatggtcatggagatgatttgctttcagtttgaactgatgtaaaattttcagggtgcagacatagacataagggtggtacgtgatggacgtggtcctgactgtaatgtctggagtaatttcaagcaggtgaatccgct

SEQ ID NO: 20507 - DNA, 2587 bp, Cannabis sativa
tattatttataaatagttattcccaattttgattgttaatttgtcatattattggattggatttgtttgatcaaattgtgacttagtccaaaaccaatttttaactctttttcccaatccgggttttaaggctatgctatgcccaccttcttatccttaaaaactatttacatatatttttatttattttatttaacaattattttataaaataatattaatcctaatttttcaataaaattatataaaaaaaaatgtggactttggtttgtatgtgttatgtcctagttaattttatggttggtggaattattggtctgtgttattgtagtgatgagtcactatatgtaatagcttcttctattaacacttgggaatattatatatattgtatgtggtggattatatatataactacctaataacatagtccacttttttctttttgcttttgcattttcataaaccactctacaattttttactttaattaaaactacatataaaaaagttataacaaattataaatcgttatttttatgatgtgattaaaagttcgtgattaaaatattagtcacaaaaattataatttattatgattgaatatatttttagtcactgactaaaactaaattagtgacaacttgtatttaaatattatattttagtcacaagtaatattttgttgtaattaaaaatatgtaatcacaaaaaattatattttaagatattaacagccaacaaatttactattctagagccagaacagttggataacgaaggatcaaacttgcatgacacaagaggccggagggagatccctcaaacctgaatggatagagtactagtttggaatgttcgagggatttaatagccagcaaaaacacaacgaaattaagtatttgatgagctcaaaaaatgttggtttagttaatctccttgaaactaaaataaagaataaaaacatgggtgtgttatgtatatgaacttattttggggttggtgttttataaataataatctttggttaaataaaagaagaataattgtggcatggaatccttctatgttttgcttagacataaggatttgtacaagtaaattgatacattgtattgttcaaaataatcgcaactcaacaaagttcaacatcacttttgtctatggaatttgatgaagaagcaagaagagatattacggagggactatgctgctgaaaaagtcaaagggagttggcaatggcacttgtatataatcttaatgatattctccctcgatcgagttatttcttaatactaaaattgtttgtacttaataatatttatatactaggcgacaactacatgcaaggcacgttgaatgtttttttttttttggattttttttttattcatattaaaaaattacataagttaagttttgattataagtaatttatactcagaataaaattttgcattttttttgttgttgttttaagtatgaattaaagttcttgtatttcagttttcattttctcttgatgaacttaaatttgtagtattcaacattttgttaacaattcataataaatacatttaatatatttagtattttcttaagaaataaattatataagttggtagtgttgttatttatttgaccatatatgttgttcccctaaatgaatgcatttcaattgtggatttattttttctatttaaaatatttgatataataataaaagtattataagttttattgtatttatttacataaaatattatattacacatgactaagttttaagttcgataagatggttaattattttaaaattttacattaaattgttattctaatttttaaaatattagttatatgtaatttataatttaagatgaagaattagcaacttgctcttgtttgcttctttaataagtatacattgaaattcttgtatttttgagtcttcatcttctttcgatcaacataaattcgtagtgtctaacacttagttattaattcatttgaaacactttcaatatattgtctttttttgaaaaataaattataaaaattaatattagtcttcaattattaattattttagtatgtaataaataaataaatatgtatatattgaaattatatttcttcagaaaattacattgtttttgtaccgatactcttcttgtgtcgtgtcgtcttttatttcaacatatactcttatatatagttatatatatgtattaaaaatatatattttttaaaatatattcggttgtatctatacataaaaatatatttatttgagttatgatttttttttctttcatatctttgaattttgtctccaaaagagaaagagttaacttaagggtattaagggatatgtttaccaatagaccaatattagaagtgaaacttacaaaaatactgattttttgcttaatatttacaaaaatactgctatacggcagatattacttttatactggattgggcttttttttttcttttatactgtggacaccaaaaattaataccaatgacttcatcttcgtccctcacgcatagaacttgcccggcaacaccaaaacacccg

SEQ ID NO: 20508 - DNA, 3948 bp, Cannabis sativa
tatattttgagttaaatttagccaaaaatatactataaaattatatttggctcaattttttgtatttgtgcgcacaaggtacaaattagctataaaaactaatactgccattaattctcattgaaaatataccaaacatctaattttatttatattattttaatatcttataaatataaaaaagtatttttcattaataaatagtgttaatgaatgacaaagaggtaattgaaaaagttagtatttattgtgggctaaaatttgactcatgctattttttgtgttaaatttgacataatttttagcttgggccaaatttgacacacattttacattactatttgagttaaatttgagcaaaatattttaaatagtaatacaccatatttatagccttttattgaaaatgctctaattaattaattatattagtggcaaaacatcgtttccacgtcattataaataaactaaattataccatcacaataagatttaagcgtggtgtactcatatgcataatctagtagtttcacaactgataaagaggaggttctaaattagaatcatcctaacccaatctaaaaaaccaaatatatatatatatatgcataaatatatattaaaatgatgtttggtaatacttttttaatgagttttatatttttaaaattaaaaaagtgaaaatattttttaaaattatattttataaagtgttttcaccttttaaattattaattaagaatcaaaattttcaaaattttgaagacaaaaaaattattttttcactagtttttttttaaacagattttttttcttaatcaatattttaaattttgactagacccgagtagtacccaaatccagccctggccctagcaccaaactagaactcgactctggacctggacccaacataaataaaatcaaaaaataaatacgaaagtgaagtttaaagaacacattttatttttatttttaaaattgaaaaacaaaaatagtgaaataacgcttttttatttttcaaaaataaaatatgaaaaacaaaaattttacttttgtttttataattaaaaaattttaaaaaaaaaatattaccaatcgtaaatgtgttggtttatcatttgatagcaaaaaatacaaaataaataaataaaaaaaagtggtttatcattttttttttttttttgaataataagttgtttatcatttgattagacacccaacaaaattttgagaacaaattaacctttttgatttgttcaaaatatgattttttttttaaatgatcattaatgtaatcaagaaaccattaaaatttaccaaagtaataaatccggcatcctctatttatacatatatacctcaattctatacagcgaattacagtctcactctcacttgtatattggaaaaacatacccaaaaaatataagaaaaaatctttgtataagttgatgataattttaactataaatcactatagcataacacgagcaatttgattaaatctcccttgctcaatttgcctggaaaatttaatttcttcagcacatcttaatgtcttctcaatatggtaacctccgccaaagctaacttctctttccaaatggcagcaatagctttcaaaaacacttagattcacatgaaacttgaaccccatcaagaacaaaaattcaacctctaacttattcaactcattagtgcttagtcccccaactcttgcaaagtaagagttcctataattcctgcataaataatcaaactcaataacattcgaaaactaaatgataaataatcaaatgtttcgaggaaatgtagaaatatgtacttacatgtcttcgacatacttagaagccaccataattgtagtaatgagaagcctatgtacatttcgagcattaattcgaaacccaggattggtctggcaaaaacgatcaatataaacataggcaacgacatacacagagggccctgctcttgtgtatctgaaaattctttctaaataggactgaatggtcatatctggagtctcatggcaatcaaagattcgagtcctcatatctgatccactagacaaactccatttcttcctactactactacaaccactcccactcttggagatgatcctttggtttcgtgccatacttctttctataagagaagccaacacattaaccactaatgggatattggaatcatcttggtacgaatacgaatacaaatcggatcgaagctttctaggcgatattatcacactattgcagctagaagaagtagtagtcattgtgttttaatgagcactgaatttgcaaaaatagtggggtgggagaggtagctacagatcaatagggagaaaacaaaatagttaaaacctaaacgggtttggtgtggtaagagattttgaagtagaggatgatatatatacagagttggaatgagtagtgctgtgtgtagatgattgaataaagaaagtaggaagcattagacatcggtttgggacatttggaaggtgagtggaaagaagaaatgaaatgattttcaaagatatctaagatatgtgtgcctcctattttgtacaactcaaagtacagacaaacagctaagctttcttatttaattgtttcttatatttaactttaaaggaaaataaataaatataaaaatctcgccgacagtgggtttgaagggcaaaagggtatgggagaagtggaagcattcatagctggtaggtcttcggttcggtacaaatgtataggtacatatattatttggaattggaagcattgaagaattctatatcggtgtatccaaacaccagtgctaggcgactcctgcctcgagatttgttttgtgtggaaatctaaaaatgaaacttctactaatcacacgtgcaatggcgtgggaaggaccttttatcaaacatatattgtattatgagaaagagaaatgctaaaagttgctgatggtgcctagcacacatttatatgtcaatagttttattggtataattatatataaggttctttataatttaatacaatagctcttaggagatataatccacatattatttttttattatttttttttaaatttacagtttgagttgctccatgtaagttgttatgtagattttgattgcgatttagttgctctgtgagttgttatgggagtttttatgtagagaattaaattttggggctctcaaaaaatcaaaataaaagtattatgggattagaacccatgacattggacattatgttatccaccttaaccaactaagctatgaatatttgttgcttataatacacttaaattttacttaaataaaagcctaataaattcttttattttttttattttgggcccccaaaaagtgtgggccctaggcgcgggcctagcccgcctatgcctagggacggcgctgctgttaggatacactcttactcgataataatgctctatgtgaaatgctaaaaggtacccatggtgcttagtgctcttgtaaagtataatatcgctattgatagtaatcgattttctcctctttctgtgcgctctgcaactctcctcagagttggtgccatggcaaaaacgaggctaagaatgtggagaaatcaaaagcttcaactaagaaaatcatgaagaaggatccaacgtcaattacagatgctaagaaaatgaaatccatggatgaggtgcttggagtcaaacccatggaattcacggatgaggaagatggtgagggcgatttggctccattgcgtgatctgtttcaaccaccattatcaccagaatcttctctgcaatcgatcatacaacgagaagaggtagctgctaattttggtcacttttttttgcaaacaagaagtgttgggttttacgccctaaataaaactccatttcaatgtaatctattttattcaacatcaataaagaaacaga

SEQ ID NO: 20509 - DNA, 3552 bp, Cannabis sativa
tcttctcatctactttatattatattatattattttataacaacctaaatatatttcaatatataaatattaaccatgaaaatttatcaagtatatttttaaaggaaacaaaaaaagagaaaagattcctaaggcaaattaaaaactccaatggaagcacaggtggtgggccatccgtgtccccctcacgctccccgctcctcgctccctgctctcccctcgcctccccgcgctcccctcatactccaccctcgcctccccgctctcctcttgtctccccgcgctcccatcctcactcactgctcccctcatgccacacctccccactccctcatctcacccctcttcacttctcacctctccccagtcatctctattttctccacttcaatcccgcaaggataaatacatataatgccttcttccagatgcccaatcttagatttgccaacggatgtaaagcaaaacacctagtctgaatttgttgactgtcttcataacattttgggcatgaaaggataagaaagaatatccaagaattaagattcttggagcaagcacgccacagatgaaataacgacggtacgtaccataggtacgagaaatggagataaagcatacctcactcagagtacacatggtagagacaaggtttgtcctattaaaagtacaagggatacgagaccacctgacacgttgatctttatggtacaaaaaggactttgtcccgacaaacttggggaccagatgtaattcaaactaagtatcactataaatagatcattagaacatttgtaagggagagatattttagaatatcaataaaacataaattttctttaaagattggaagaagttttctttaatcatttttagtcaatagttcttcatattcaattttgtcttaacaattgaatatgtatatatagtgatacatattcaattttgtcttactgtcaataataaacaacaaataaaaaaatttgataagaagaaatttttgctaagaagactaaccaatataaatatgtatatataaatgaaatctttttttgtcaaataaaaatgaaattattattaagatataataacaactccatattttacacttcatgctttttacaatatcgttattcttcttttaataataaaatataaaacaatggccttgataaaaaaaaattgatttatttaatttggtttgttatggccaagacattactgcaaagttgaccaaagtttgtattggcttgggtcaaaggtgaagtacctttcttaaagccatcctcacacgagtctccatcggtcatggcagccgtgacccaaatgttaacatcagcgtagcgtttgttaaccatggccttcagtgaatcattaagctgagaattggcaccatcataattctcattgcaatctttcaaggcagctataacagccttatccttggccgttttaagtagacttgtgatctggccttgggtggttttggcacttgaagacgctgctttcaaggcaattttggctaagccatccaccttggccccgcgactattaggatccgcccggagtgtcttctcacaaacatctttgtacaaagctttgccacacgtgtcagagatcaaatctccataaacttgaggaattttgttcaaaccaatggagagaagagtcagaaagcagaaaactgagagggggttcattatttttttgtatatagagacaacagatatatctttgttatttttcttttttttttttttgatagaatatgaattaaggtttcaattttggtgcttataaagagctctttaggttgtacatgatatgtacgtacggttttttttcttttttattttctttaaatagtgaactaaaagcaatatatacgcaggaccaacagttacacgtacatgtgatgtgttatggctcatttatacaaacaactagagaactaagcccctggtattgttcaatatttgttatctttttgtgttgttatttttgtagtattaattaattggtaaaatttaaaataagagattataacattagaattataaaaaaaaaaaaataataataacatgataaaatgatagaattttagaaataaaatttgatattttgtaaaatatatgtagaaatatggggttattttttacaaataataaagaaaattattgaaataacatagagattctatgtgtatttaacattaaataaagaaaaaagagaacaagtcaatttatccaaacatgtgttatctcctttaattagtaggaggaaatacttttagaagaaaatatcatggtaaacactatcaaatcattcaaaatctgctactctttaaccctcttactacccactaacaaactatattacactaagacagactttaatcatgagaattaaagaccaattaagaataggagaaaaaagaactaaaaaaaataaaaatttcgagaggtgctaaatattattttgtattcaaggaacctaagatatatcataaaacagaagtttaccaatttcaatcttgaagataagaaaatcactttgttatcagaaaattaaaaaaataatattattatattaaaaaaaatgtaattaaatgtaatccatgaaaagaacttgggttcattttacgacaacaaatttgtcacaattaaaatgctctttctaatcctcttagataggggtggacatccgatctaatctaacatttttctcctcatttatagtaattagattcaaaaaattattattcgatccaatccaattcgaactcaaaattcatccaatctattctaattactaattggatttgatcggtcttttaattggatatccaattacacacctatattttaatattaacttgaaagtatgaaaaaaaaatgcgtatgaactaaatatcaccctttatttatgtttaatactccataaatatacaatcgctacaagtgtaatacaactaaaagtttgaaataattacaacaacaacattactaagtaataaaatataacaaaatatcatgaaaataaatacataaaataatcaaaaactaaaaatccaacacaaaaaaatctaataaaaatataattaatatatgttatatttttaatatttttttattatataaagtattttttaacatatataaatggaattagattggatcggttattaattggattttgagattgatacccaataatcgattcaatctaattagagtcgatcttttagcatccaatcgaatccaattccaattgtgtatgcaatttttgtaattagatatacaatttttataattagattggattggattaattcggttcaattagattgaattggatagtgcccactctagtcttatagtaaaaaaatatcatgatcttaccaaaagtctaaagtaaagcttattgttccaactatgatttaaccatctcttaactttgttatttcattaattttctttcatttttattttaatccaagtacatgttatattagcatataaaatttttatattttttaattgcacataagta

SEQ ID NO: 20510 - DNA, 4332 bp, Cannabis sativa
  modified_base (4275)..(4302): a, c, t, g, unknown or other
ttccgcatttaattaatcacttaattaaataattaaactgaaatattaaaatacggaatttcagtaaatacttaattaatttttcaaatactcatcattacaaaaaatgttacttttgtcagcgtaattcgttattgtactaacaaaaattccttttactagcatatttcgcaagttgtattattggtaaaaatgtcatagttttatcaatgcatatttctattggcaaaacttatttttaccaatggaactcatatttgcgctgacataacaagtcgtgtaaacactcttcccttcatacattttaccagcagaaaaatgtgtttaccaacacaaaatagtgaagtacgctaacaaaaatcacttttactagcacatctcatgaactacgctgataaaaaatttataattttacataaataatttaatatatattttttgattttttaatttttataattatttagtatcataagaataattaatattctaagtttctttataatattaataatataaaataattttggagtatacactaaaaaaagtggtattaattaaatttagacattatcaataaaacgatggcaagaaaaggtgctggaaaaaataaagcaccataacttattttccccttttccctcatcataacactctaaatttctctaagtttctccatttaagtttgatatgtatttatttttcaagttagaatcttatctatagactgtggataagagactcttttggttgataatttagttgatgttaattaaatttttttgattgtataaataggtgaggcctgaccaatagagttttatttgggtagaaaattaaaaagaaaattcgaggggaggctcttgaatcaactaccccttgtattgcatgtgtcgttcttaagattgatatttcttactactttatcgagaaatttcaaatttatttgtggttttcttgctcggttcttattggaatatattctctataaacaaaggtgaacaatgtataattagaacaattattttattgcttaattatttatacttaagctttcatgtttttttttatttattttaatttaaaaataattgataaaaattaaaattaaataatattaaataaaaaaaataaattataaaattttaccgatttattattgtactggaaaaaatcaaatatccatctatcaaaagtaacttttcccagcgcattaagacttttcctagcacatatttttgctggcaaaagttaagatttttcccaacgcattaatattttggtaaaagtaagacttttcttaatgcatatttttgctggaaaaaattaaatttttgttagcgtgttaaaaagttagacttttaccagcacacatttgtgctggcaaaagtctaacttttaccagcgcacatttgcgctgtcaaaagtctaacttttatcggtgtatttatgcgttgggaaaaatcatttttgctaacccttttcattttgcgccagcaaaagttccaatactaacacagatttgccaatccctttggcagtgtaaaaatgagctggtaaaagtaaatgtcgttttaccagcacaatactcaacttttgcgaacacaaaaatacgctaacgaaaatcttatttcttataattagtgactctttgatcagctttggtgtatccatatttattataaaacaagtataaagtatttaatggccgatagagaaaatattacagataattcacagaatgaaataaattatacacaaacacaattcacatttataaaaattaactatatatgtacgtcaacatatatttataatgaaaattcaattattaattcaatacataaaacagtgatgtactatacatatctatctatatagctagctaataatattacaaggcaaaacatttgcatgccaaacttcctacatgcatatatgtatataatatataatatatatcagaaaagtcagaaaatggtatactaactataattaaactatatataaaaaaataaaagatttatatatatatttgtagtatatatatattcaagaagaagaaactcccacaccaagaaaatctatgaaaggaatcacttcgttggattccatgttggattgatgatgatcttggccgttttgccctaatttcaacgtatcactttcttttattattttcccgcgctttctttgttgaacatcactaaattcacaaccagaaatattattattgtgatcattgtaaccattattattatgataatccgatctcaccactggatgaagatgatgattattattattattatgatgatgatcagtaaagggaattggaggagcaactcttctgttgtagcttaatattggcctattgtaattggaacaagacctaaaaaagctcatttgattattattatctcttgatgaagacgatggtggtggtggtggtttgatcattcttgttgaattagcgaagttccaagaagaagaagataaaggtaatgaagacttagaattattattaatccctaagccgaaatagtaacctcttaggtctcgatgatcagtaatctgattaaagggaatattattattattaggggtattgggggtggagaaagaaaaattgaaagatgatgattggagacgataatgatgatgatgattatgtgttaatgatgatgttttggattgttgcctttgttttcttgccataataacatgccaatgatttttaacagcattgtcagttcttccagggaataacctagcaattagggcccatttgttgccatggattcgatgagctgctaatagtctttcctcttcttcttctgtaaatggtcttcgattaattctcgggtctagttgattaaaccacctcaatctacaactcttccctatcataataatattaatgttattataatcatcataacaaaaataatatattatgttaatgaagtactttctatactgatcaaacacatgatatgtgtacttcaaattaaatacctagcttgatatctaataactaatattatatcgaagattctattaattaaaaaaaattgaaaataaagcatgcacaaaacaagaaaggtgttatttataaataaatatacgtaaataaatttatataactgaattcctatacaaatacgtagagagaagtattgtttgattttatttattttatggtgattactgaaaaaattgggggaaacaaaatagtacgtaccaaaccaaagctaagatttaagaatatatatgtgatataaataattaatattaataattgtgtgttatatatgtaataaaatcatacgatgaagatattaattaagcagaaagaaggtgatgtacgtgatgatatatattatttaactttgtccaaaatagatagatataaatataaacctgatcttccatggagtttttcagcaatagaattccaattctgggcaccatattgctccacaagctgccggagcttctcatcctcagccggacgccagtgaccgcgggggcaggtcttggcatcgtcatgacctgctgccccactcgatgatcctgcctcggcctctgcctctgcctctgcctgtccgcttattattaaatcttccattttttcttaattaattacaattaataataataacctaatttataatagtttttgactatattataaagagagagatgaaatggatattagacaagtagaacatatatatatataaatggttgaagagaatattatttaattaaagaataataaaaacaccaaacgagaaattgaaagaggaataagaagaagaagttggtttgggattgtggatgggcagtcacttttgttggttttacacgatacaaatttaacaatatatatgtttttagctataataatactatcttctattataaaataaaatatttatatataatttatctagagacacagaactgtagtagtgccaaattaaatggtgacttttttcttgttttaccttaaatatatataaattgttggtttttcccaactgtttttttttttcttttttctccttgatacacaaacagatatattcaattcaagctatagttagttttgggatatggatagcttatggtactgttcttgaagtgacttgtctcttttacttctagaaaggaattggattaccaactctattattatttcattaattaattatatatattttttaaacactacaaaaaattttattaaaagtaaaaaaattatgactnnnnnnnnnnnnnnnnnnnnnnnnnnnnactaaaaggtctgtggctaaaggtattagt

SEQ ID NO: 20511 - DNA, 2289 bp, Cannabis sativa
gtattgtatccaactccttagccgttttcttcattgccttctcatggccattcaaatccaaccaccatagaaatggcaccgcatccgaaacaacaaatatcccaatcaaacgaaagaactcacttattgccttatgacaccgtcttgcttcatccccactctgatcatcgctacccgatgctccgaaataacgctttccagccaccattctcaccaccatgttaagagttaaatcttctaaccaacgactcaactcaactacaactttacaagacttgtagagctctctaatccctacttcaacctctgaaatcctcacttgcttcaacatctctagacggcggttagagaggagttctaacgtggcgatcttcctcatttcgcgccaaaaagggctataaggtgcgaaaccaaagactgcgtagttgtagcccatgtgcttggctgccacggttgtagggcgcgaggccagcgccttgtcgttgatggtgaagcactcttttgctacttcccaactactgaccacgaatgcacgacgagtgcctagccggatgttgaaggccggaccgtgtttctcggccatggcaccaagggttcggtagagaagttggtcctctccaccgagaaggtgaaggtggcctatgattggccatgctccggatggctctggggcctcatgatgtttagttgttgggctctttttttgtgtcttaaatctgagtagagtgtaaacgtagtagagaaaaaccactagtaaagatgtgaatagagaaagaggtgttaatatttggagagatagctccatatttgtcaatagggaataattagttgatgaatagtttacgtgatagtgtgtattgacataatgaaaagaggttaattaacctagttttatagtctaaatctcaactagaaacgaagacctggacagcatgggaagtaccgagttggacaaaagcaaggggcgtgcatgacaaattaatattttctctccatgtagttgcctcaaccacatacattttatatattaataattctataattggctagattatatgagaaattaatattgaaattaaggtattaatttttggtttgataaagtatgttcttcgattagacgataagctattcaggttcaaggaggtttctgcactgtatgtagatatttgcatcgtaaattcatgagtgattctaatcagtatatgtcaaaaaaaatattataaggtatttttactgtgtgaaacactacaatgtcacagcttatgtgattaataaacaaaaaaatttaaacactagctcctagaaaactcaaaatacttatttctaaattatggatataaatcttatatttacaaactattgtatctctaagaaagtataaaatatgggaatcctacaaaatgcaataataagacactaatatggcctaacaccacttaagatgttttaccagtattaaattccatataatttaaaataataatatttatggaatactatcgttaactatttgtaaggtcctaccccatgaaagtatatattagacaccactaatgtcttataataatgtgttaggttgtttctagtattatttttagattgattttaatgtatttttaatttatttttactcgtgtttagagtaattttacgttttttattttttatttttgcaaatttaaaataaaagaagcataaaaaatatcgaaagaaaaagatgaaataaagaagataaaaagatcaaataaagaataagtgtccacaagatgaggaccatgccgcagcatgaaaaagagcatgccacggctcgtgtcaaattaagcttgaatccgcgtgtgaaaactcaacacgggtcacagcataaggagagcatgccgcggcctgccctcctaattcaaagagaaataggacttttagcgcgggcttatctttcctatctaattcgaagctgaataggttttctgcatgtgctatcttatgctatctttttcatttctcattggctatataagaagtgaacttcagttaatttcgacaagcaattaaaaaggaaatcaaaagcagtcaatggagtacgaatttgggagattgaattcaatactgtaggtatttttcagaggattttcagcattcttttcttctcttttctgaaattaatatgtgtgaatttgctacaatgaacatgagtagctaaacaattctttagggtctagatggagattgtttgttattgatatgtggttttaatatgatttaattttctctcaatttctatgtattctattt

SEQ ID NO: 20512 - DNA, 3106 bp, Cannabis sativa
aaaaaaaacttaaacagaagataaatatatttaatttttatagataaagtggatgaagtggtgcctgtataccagtttttttagagaaactacatggtctgtgtacaagctttacttttttttgataattgtgtacaagctttacttgctgttatgtaaaatggatattaattttagtagtatctaaaaataaattaaacaataaaaactttaaaataggaatagtaacggggaagaagtaaaaataggatatataggggtggaaattaaaataatttacagtttaattattcaaaaatgaatataatggcggtatataataacgcatagatatacctttgtatctccctctttccaaaccgtctctttctctctcagtagaagctgtagttactctctctctctggttcggagtttgggtccagatctgatcccatcagccaggtatgtattcatactcttaacctaaccctagatcttactctctctttgtgtaattagggtttcgtacaagagattatgctgtcaatttcatatgatccttcatctgtccctatcgcctattttgaaaaaataaaatcaaaaataaaaaacaaaatcgatggttgtatgaactgatgttttctgtgaattattttgtggggttttctcttgtgaaattataggaatgagtgaatcgcatgcattttggtatcttagatctgttagtgttcttcgcatttgcggtgtacttactagtggttgattgcgactttcctttgagatttactgtcttttgttctcggattctgtcccgggtaaaaaaaattgaaggttttctgcatcttctgtatagtgagcttactttctttacatgtttgcttaggcattaagctgtcttatagagtgtaatccatgaataagaatgatttattcattacgtttttttctggatcctgattaaagatattagttccagtgtctgtgcctctgatgggtgttgtttgttgttgctgtgatgctctcataagtcatatctgtaattgtcttgataacgttttggatttaaagtgaagcaattaagagaacttccttaatcataataatttagtgtcttctacctagtcgttgatggtttagggacaaatcagtccggtatcatggagtgtagcattgttattgtattatttgactatagcaagaaagtatttaaacatatatggtactggtaatcatgacaatggggacaacaacgacatggttgttgtgaattttgagaatgcttctttgttggtcgctaaatcatggtttatttcaagcgttgcttaagaaatgggttggatgtgtttgataattagtgcttctttgagaaattcattctggattaaactacatacctttttttccattttcatctattgtaacccagagatcagaggatactatcttagaagaagacatgggtcgtggaaatagcagcggtggtggccaaagttccttgggttatctttttggtagtggagaggctcccagtcccaacaaaccagccacaaacaaagctccagctgcaccaagtgaagcacctgctgtgactactgtggctgctgccaaacctgctcctgctcctgctcctcaacctcctgtggatattactaagcagatcccagctggtattcacagcacatctaccaacaactacatgcgggctgatggccagaacaccggcaactttatcacggtatgttttgccttccatgcccaccatttagctctaatgagctggttataaatattctgaattcctttggactgcttaagtcatctattatatacgtgtttcttgaaaggaattattaatatggattgagtggatcttatttgaatcaaagcattaagtctaaacattttttttatcaaacagcattaagtctgtacttgaacatgtaaatttttttttgctttagaaaaataatcatgttatagtaataagcacttgtaggccgcatccggttttttgtgaaatctttcaagatgttaatgggtttcaaattccactgagatattattgtaagctatcacaacatgtaagcggactagggagttgtcctcccttttttaagatgaataaaaaacatgtgtgtgtgtgtgtgtgttgtgtgtgtatatatacaattaatttatcctgtgtgttttacccgtatgatttaacttggattataacaacgtttctcaatgttcttttgatctattggttgttggtgcaggatcgaccctcaactaaggtccatgctgcccctggtggtggatcttctctgggttacctctttggtgacggtggtggtaactaaggatactgcatcttgacaatggaaactgttacattgatttttgtggaatcatctactttagatgaggtgtcgttttcaacttttattttttatattttatataaatggataaaatctgtctgaacttgtaatgtaatataatcgtggtggtggttgttgggattgttcaatcaaatgagcactctgctgtagagatgatgcttgcttgagacattttcgacacagctatattagttgtggacaaagtgacattttcgagtgcatgttctttgttcacaatctctgtttagtatgttatgtttggcagtgaaataatatctcctgcctaatgcaatttttcattttcatctctttccttttcttgctgcacagttatttgtcacgacttctgtttgatattaattattgaagcaatgaaacaaaagatgtcaattattgggacaatgaaacaaaaaagtaaaggaggtgtgtaagtgtccactttttttttttcttatttgccaggaatataaagctacttgtaagtaaagtatcatttatgtggagtttggttgaaggttatggaatgttggttgaaggttagggaatggaaattaaacaatttttgttttatttttttggtttcattttaaagtattagaatgttattctaatagagtgtttttttttaatcattttaataaaatgattattttttatttaaaatagaaagaatgataatttcaatacaagataaaataatatttttttatttaatttttatacattttaaatttaat

SEQ ID NO: 20513 - DNA, 6508 bp, Cannabis sativa
catacatataaacattaaaaaaatattaaaattaaaaaattaaaaataccttaaataaattagaggaggtggggcttggtggtctgcggtggtggctggcgttgctctgccgtcgtcgatggtggtggtagccgacggtggtggtggtggccgacggaggtggtggtggtagtttttttgaagaaaaaaagagattgaatcagagggattgagagaatgagatagagattgagagagattgatagagaatgagagagattgagatggaatcgaagagagattgagagagggggttgagagcttttttttcagaaaaaaatgaaaatgggggaagaaagagaaagggggcttcgtgctcctgctccctgtaacatatatacacttttaacggcgcatccaattgcgccggtaaaagtatttataaaaatttttgacttaagttaacacgcgcatttaagtatccccacctaacacatcaaatccacgcgttttaatttaatacttttgccggcacaaatgtgcaccggtaaaagtatccctacctaccaaggaaatctatgcgggaagtttccctcttctttttttgagacttttaccggcgcataaatgcgccggtaaaagtaaacatgcgccagaaaaaataaaatgaaaggcgacaaacttctcgcgccttttggcacttcatttgcttacttttaccggtgcatattcattattgcgccggtaaaacttattaatgtcggcgtaataatgcgccggcaaaagtaaaccctaaatgcaagtgggattttagtttttgctttacgccgactacttttaccggcgcatttgacgaaatgcgcccgtaaaaaggccttttcttgtagtgtggattatcgatggatatcgacagaatatagatatgttctagacaggttatagttttactagttctacaaaaaagttaggattttggttattattaatagattatcgatggagttttcaatatgaataaatgctcatcaactaatacaattttatttttgatcttgttgtttttgtaggtatgcttgatatttggtgattaaagaacccaaatcaactttattggattatctaggtattattctacaattctaaattatttatttaatatatgatcaacattagaagagtttgaatatcttagatattcatccatagtgaagtaagttatgcaattatttactttgcagttggatgggtggattaatatgcatgtttgatgagtttgaatatcttgaatattcatccctagcaaagtaggttctgcaattatttatattgtggtcggatgggtggttttttttttattgttatgtaatgtttttttattgtttatagtaagtttaaaatttttaggaatgttaaattatagtcgttatgctgccaaaattttggtaggataacaactacaatttttggttgtcatgttggttattgttgcttgattatcgacatattatcaataggttctcgataggattaattagttttttagttgtcatgtttggcgattgtttactgattatcgatgagttctcagcaggttctcaatagaatttagtgttttttatcatgttttctcttacatagttattgatgggttctcgatgacaaatcgattgtttatcttttacagatggctctagagcttaatgttcccattttagcccacttttcaggtcgtgtgacagatagagggagtggaatattcattacaatcattcaaaagtttaaaaaacatgaagaattaattgataggatgaagggaatcctttttggacaattttagaatgctgaaacttttgctttctcttcagttttggtgtactaattaatgctgcacaaaatgaaggttcaagttgagaaggcggacgaagtatggttttacattggcaaaaacgaggcaaaatttggcgtggttgagttcactctcataactgagttgaattttatacaaggtccatccattgaggagaagaatgctcacatgagaaacgaccgattgttgaacctttatttcaacaaacatgggaacgtgaagatggaacatatcattgctcaattcttgaactatgagattgccaaggacatttacaagctagggttgtgcttgttcgtggagagagtcctcatgggtcgtgagaggaatacgaaaaattatgagtggtatactaagttttattgaggatattgacttctttttttagattccttggggtgcacttcttttagtcaacttatgtattctattcagaaacacatgatgaaaatgaagggaaagttagataagaaggaactcactgaggcgacggggtacataattaatggctacacactcacattacaatattgggcctatgaagcaattttagaagttggaaagaagttcgctgttagtcatgggatacaagtacccagaatgcttagctggagcagtaagaaaattgatggaagttatgacattctcaagaaaaaacttgctctaatatttttttgaaaagggtatgatttttttttctattattattgtattgtttattttttattgataacattgataaattgtattttttttctctctgttgtattttgtttattttgataggtttttgaaaagactctaatatatatttttttcaacagcaactaatttttttgaaaaggttatttccttgcattgatgaagaagcgtatgccaggacaatcacttacaatgatgctgagatagtgattgtgataggtgttgaagagacccatcctgaatatgatgtccatgaccctgctattttcaaaagccaggaaaaaagtcacttaacatatcaaattcgctactattgcatcttcttcagacctcgatcgtgtggtgttccaagatttggtacagagattagacaggattaaggatgagcataacgttctttacgctggtcaggcccagttgaaggaggcatactaggctagccacctagaactgaaggctggtcaaaaccttattatggagcagcttagggtcattttgagtacaatacataataggtcaggagcaaatacacgtccttaattgatctgatggaagatgttgacgtaatattttctgacgactatgatccataagttgatgagaatacttccactctagcggatgccaccaatatttccatagctgagagcaagtcacatggtgaggtactgcccttagagggaccaccaaaagggattcagtttctcaagaggaggaagatccctcctacatggtttagaaactatactgaaatgaagaaaaaactcaagtcttctacgccttttgatccttttatccctccagatgataggttgttggaaagttttcgtaggtggttgtgtgagagtatccccaaccatcgtctttgggacatgaagactggtgattacggtcctgtatgatttacgaatatgttgacacgacaggattagattgaagattttgtaagtaaacatatactattttattgttacaacataattttagtttattattgatttattattctaactgctcagttgtatcattatattcaacacgtagatgtgtgtgtccatatgcataggaggcaacaccacttctttccagagacgtttccacagagagctatcattctttccacctatgtggctgagattatccatggcgcttggaaaacacacaagggtcctagggctgacttcaaatggggagatgatgtcctcgactactgcaaaggtgttaagtaccattatttggttcttgttgtcattttttttgttatcgattgattctcaatgagtccatgataatatttagcctttgtgggttgctgtcaattttcgttattctcaactgattattgaaagtatctcgataggttcttgataggattaagcatttgttttcttgttgtaatgtttagttgttatggatagattcttgtctgaatcagtggtttgtcattgttttaaaatactttttatacatgaccagttctgcccaaaatgggaagaaaatgaatacctctactttgtgttgaatctttcaaaacactcacattgggtagttgttgaggtggatatcgagttgtggaaaataacagtgtatgactgtgattccaccatttttcctaaaaaagacttagcatccatcatgaggacgtgacaagatctactctttacgttgttccatgcatgtggggaattctcaaacaacaaccaaatctttgcggttgaaatgaatgactgcaacaagcttccaaagatgcatttcgatagagttagtcatgaaattgttatgaaggcaaaaatcagataactttgttttatgtagtacctaattacttttattcttacttattttatactaatttcttgatggttgcttgatgtagtagtgattgtggtatttattctattgagtacgtggaacatcgatgatgaaacgttcactaaatgatgttacggataagagcatacatatgtttcgagattagtagtgcatgaacttcaaaaccaaactcaaaacctaaagcccttctaaacctatctacagagtgaggcttaagtcttgtttccatcaaaaagagaatcgtaggcctatgattcttaaccaggagggaaagccgattgaatgctcgaggattctccagaccttgagcattccaactcattagactcatttttctaggcgggcgtgctctgcaacacccgtccgtctaggatcatctgtagaagaatgaggattagaatcaagctctctagccctagcatgcttgagcatagagcgcataaaactgccaacattgacttgggaaggttgaaagcatggttgtttaactccagaggcacaagctagccccttgcccttaacttggaggttcggtcgaggagcctcaaccctaggagtttggttgtcatcagtagtatggcccaagtccagagatggtaaagcttcagcaagtgactgggcagcatggacaagttcagagttattaagagcagggctatcactaacaatgatggagtcagtggagattgaagtgaggcatgaggattgattcacagtatggttggggttaataagggtaggaatcataacactctgggaatttctaggagcacttaagcaagaaatagaggccacatttgagttaagcagaggcgcaaaaccaatagaatgggtcaagaaacgattcatcacctgacctccattggggaaatcagagagatccaaatcagctgtgattatggctggggcataggggtattggaaaggcattggtttctcaaaggacttttgcttgccatgaaggagaagatcatatgggcaaggaggtggaacaagtgattcatcacacttctggaggtatgcatggcaatactttttagtgtggtccagtttaccataataaaagtagaaatcagggagcctttcatacttgaaatctaaccatttggtgaactccctacccattttgagaaaacgaatgtgaatgccacgcctaattggcttattgacaaaaaaaaaaaaaaccgaaccctcagataaggcctagttccatctctcacagtggtactatccacctgaatcagctcacccacactcgtggctataagttaagctaaatcataagactttaggggagctcatagatttgcacccaaaaaggcacatagtgtaactgttctggggttataggaaaggagttatgaggagcagcaaaaatggtgaggctttgggaaaaatgccaaggctgtccatccaagattctgcgcttatccccttcacaaacaaaagtgaccagaaaaaggccatctaagtgtttagaaatagtaactggaaaatgacattgtgaggaccagacttgagatagggttttgatcaaagaggcacgactaaagtgtttaatagtgcaaagcttaaggaggagactaatatcattaggagattcattaggtatttctagagtttttaaaagggtggtggtgactttcaaaatatagtttagttagccttgaaggcactttacatttgtagagccaaaggtttaagtttttgtttttttttttcttttaaacaaaaagtagttaaaatggctaaaatatgactaattacttgcagtgataaaaactgaaaaaataagttacaattttaattaatttagccgaaaatgaaaattgagttaatctggttacaaatgttattaggaggaggaggtgactcccttagaaactctaaagttcggtggcctaagcctatctatctctcaattgacaatgaggtagtcttattatttatttattaaatcttcataataatactaagaataattgtggcaagggatccaataacttacaattaaataaaacacttattacaagaagggttttttttttataaatgtacaacaaaaataaaataattacaagaaatgtgcaaaaaaaaattatttgaaaaatttatacattttaaaaa

SEQ ID NO: 20514 - DNA, 4983 bp, Cannabis sativa
  modified_base (1440)..(1443): a, c, t, g, unknown or other
tgaattcataaatattagctctccccttataaccaaaatttaccccatcactccatttctataattggtatggtgacttactcattcgtgaattcataaatatagaatgccaatttataaccattaaaaaatataataacttacatgattgtgttaatataaaaatttagtatctagtgtaaaaatctctatatattaagttattattacataaagtattgcacaacacgtatatttaattatattttttattttttttatgtatttttaaaaatttataaattaaaagaaaccatttattcatttttctaatttttttttaaaaaaaaaatagtatttaaagttttaaaaatttgagaaaataaatattaagtttaaaaatattaaaattaaacatattcccaatatttaaaataataataaaaaatgataatgttactgttggaaatgcaaacaaagtttcacattgctagaatggaaagaatcatgagtatataagaatagacatatctctattggtacgtatgaagtcttttagaaaggtgcccgaataaaatcgtgagggcttaggcccaaagcaaacaatatcatacattaagtagagatggttagtgtccgatgatccttgacaaattgttatcacagccaaatcccaacattagccaatgtgaatgattccttttaaggtgatgtgcctcggtgtactctcatgatgtctatggatgtgcttagttaggcggtgaactctgattccatctggagttagcctagtgaagatcaagaaactctcgtggtagtggtggacctccatgtaaggcgtgcattccaacacattagagaaaagtacactaattagtaaagagtttatatatatttataaaattaatcatactgacaccgttaaatttaacagaatattcttatattcttataatatttttttgaaccaataaaatattctgtgacttaaatttaactaaatatattatttttgattaacgtcatattgttaaaaaaaaaaaataacatatatcattttatgatatgtctcattacttaaaattcaatacattcttatttaaaggtaaatgttgataaatatgagaaaaaataagtttacaaaaatttattaaatttaaaataagatagagcataaaattgaataataatttgaattttttttttttattttgttcatttatactcataggaaaattcattagtaatcttcctaaactaaaattattggtgtactttttgtattttctacactagcagttataattctttttttattagttagcattataagggtaaataatattttgaaatatgtattttgcaaaaattataaattggactctctattttgttaaatgataaaataaatcctatattttttaaaattgtacaaataagaccctaaactaattttttgtnnnnataaaatttaataataatctaatctagaaatattaagataaaactagttacattttctgtatctgtttgtgttaaaaattatcttaaaattggttatattaaaaaaaaaattattgaaaattgagctcaaggttctatttttaccattttggaaaatatatttaacaaaacagagaatccaattaataacttttgcaaaatacatggtttaaaatggtatttacccgcattttaattgtagcatgcatccaattattattattattattattttgaataatttgcactcctaaatatacagttgcaaataatatattgtgtctttttttattttctttttatatgaacgtgaaataaattatttgaaaaattaaaacaataaattattataaaaataaaaaaaaaataattagatgctataactataatgttaatattcaaataaaaaataaattacaactatttaaatgcctaaaacactttagattacccctttttttattttttattttatttatttatctattaatttaagcaatgttacccgttttttagattatcaaaattctcaatgtgagaaataaatttaataacccaaattttcacacaataatattaaattaactcgataaaaaaacaaggaaagaaaacagataaggagagggttttaaatcagaaagtgaatcataaagttcactttaaattgatttgaaaattaaaatagtttcaattattggaccccaaagataattccattgacaaaatggacaccaaaaggggtcacaaaagtctacggtattgtaaggtcaagtcatgaatcataataataataataataacaacacccaattccaaaatcacccctgctctgttctcatgtaacagaactgcaagggctgaagaaaaacaaaaatatatcaaaaaatcaccaaccccagagacccaagagaggtgcccacctttgggtcattcccccaaagccaaaacaagaaaaataaaagaaataaaggcagacatggcagagaacaaggcagccgaaatcaaggacttccaaattgtgacttcaaacaaagatgataccaacaacaacaacaacaagaagcaattagccccaaagagaagctctaataaggacagacacaaaaaggttgatggcagaggaagaagaattaggatgccagcactatgcgccgccagagtttttcaattgactagagaattgggtcataaatctgatggtgagaccattcagtggctcttacaacaagctgagccttcgatcatagccgccactggctccgggactatccctgcttctgctcttgctacttcaggggcctctgtttctgaacaggggaactctgtttcttccggtttgcattcaaagattgatgatttaatccctaggggtggcaattggacacttatgagtggtcacttgggaagatctcatggtgtttggcctgcaataactggaattgggtcggggtttgtgcacaattctggtcagtcaacatcgagtttcgcaaccgaaaacttgaattacttgcctaagtttggaatccatggcttggaatttcctggtatgaacttaggttcaatgagttttccagcaattatgggaccaggtgggggaaatcaacatgttccgggtttggaactcggtctttctcaagatggtcatattcgggttttgaattcgcaaactttggttcaatttcagcagcaacaacagcagcagcagcagcagcagcaagctgagcagagatctggacctgaaaactctgttgagaaagatgactctcaaagtagatgatcatggcttggattttgttattgcatagaatagaattttggacttgaagggttgaaaaagttcatccaacaggttcttcaatctccaacacaaacagattgctctgtttatgtaaaagtttcatgttaactgtttgaattctttccctcttttcttttctttttttttttttcatacaggataaactatgcagtagataatggtttggaggtttggaagtttggatttgattttttttttttcgtttgcttagaaaatctttctcttaggagtgtaattgtaggtaatgacaatttctcttgcttgttatctttatccaaatatgaagtttggtttagtttagatttagattataccaaaacataacgtcaataatcagttcccctttaatatctataataatatgctttggtgaataaatagcactgatcttttggtaggactaatcttaagagaattgaaggaatgaatagggttaggttatccaatattttggttggcagtgactactgaactgactagtgagtaaatgaatgattttctttatgtcattttatttaattagttgaatattctaagagtgtctcatatttttgtatagtctaatatgttatctatccatgttgaaagggtatggtctcacactcattatatttttttcacatgacccaactttttttaattatttggctttgtatgggttgggtttatatattggttaaattcccaatcagccaaggagaaactccatataatatgatgccaattgagcaagagtgtcaaattcatttatgtgtaaattaagtggagttctaacacagacagagctaaagacaaattaaatgatcagacaaaacctatgtgtccctataaaagaataaagtaattagtaaaaatcgattttcttactattttgtaaaatcatcttcttttgatacttttttacaaaatggcatgtaaaatatgtttcttttctttattgttatttttaaaattagtgcttagtaaaattctaattttcttttttttttaagaatgtcgtgaatttttcatcttgaaatacgagtatagtctcgtgagaagaggacacgtggactcaattcctaataaaaaatgatgacgtgtcaatagtggcactcatagagccaatctcgcatgactcaaacttgcgagataatgcgatcgagataaggatctagtcgcataactatgtctagcatgatcaaaagataagcataatcaatagaaattaatactagggctatttacaaaaatatgacaaaaaggagataaatttttatatatatatatgacataaaaactttttttttaatgcaaattggaattttattaagggctgaaatgaaaaatggccctaaatttggaaactaagttagtaaatgtccctttttaaaaaaaattaagaaaatggccaaatataataaattagctaataataattataaaaatacatttatcacatatttttttaaaagggaaaaaaacaggaaaattctaaaaataaaaaaatattacaatattactatgggtcggcccattcaacatttatacagcccacaatgaaaaaattacaaaaatactacctggtttataccttaagccgcacgtaacgaacggagaagatgaagatacctccatcgatccaatctgcaacgcaaccagaatgaaaccagaacgagggaaaaacaaccataaattcaagc

SEQ ID NO: 20515 - DNA, 2785 bp, Cannabis sativa
aaagtcaccacatatcatcatggatgtcttagggaaacataatcacgtgatcgatcctaggtggaaactaataaaactggtcaattattaatatataagggtcccctaagtggataattaatgctcgtagtagtggtccaactcattatgacatgaccaataaaataatcaaacgagaaccacctacttcaacatgtagccttatcaacatatttttttgatgactcaaaatggaaagaacaaatgttttattttctataataataatatatatatgaatgagatgtctacgaaaaaaatggtaaccaataaccacactatggaatacgcaagagagttgatgaagaataacaataacaataatgattgtagaggtcatttagttcttgtaccatgtcccttacaaggccacatgagccctatgcttcacttagccaaacttcttcactctagaggcttttccataaccattatccttgtctcctcaaatgagctaaacccttgccaatatcctgaattcatgtttcattacatggataacatcatttcctacaattcctttggtggggatgttatgctctacttgctgatgcttaataacaagtgtacaaccccattcacagattcattgttgaccttgaccaagcttcaatttggtcccgtcacgtgtgtcgtttacgacgccgtgatgtacttttctgccgccgttgctgatcaacttcagattcccaggattgttctgcggaccagtagcgcctcaactttcttggctctatcacttttgacccacaacgctaatgcctttatcaatcaacaaccaaaaggtatatatatatgcatgatgatgcatgtgagagaatacatattataaatatatatatatatattatataattgttaatataaatcgtcatgtacctacgtctacgggactagacgtgcgtgcatgtatgtatatggtatagtcacatacatgatccaattattattacttggcaatgcatatatattgcagagttttgcgttgagatctatttatttaatacaaacttatatcaaagaagaaaaattaaagagtactatgtattagtgcatatatgcaggtaccgttactcaaatttaagatttccatctatttcgaaccggactctcaaaaaaatatgatctataaaataaaaatcagtttcataaaagcagaatcgacttatagcaataaattaagtagatgtttaaattaggaattgtggacaattaaagtcaaacaaacggaagaaattctttacacaaaacattttgtgtacaatttaattccacgtaaaactctttatataaatatatatatatatacttgtcactttttatttattaacaaaattaatgttatatatgaaccacagagcatgatgaagcagaggaagcaatagttgcagattttccgatactaagagctaaggacatgccagttttcgagacatctgaccaagaagccgccgaaaatgttctagcaaaaattcaccatggaacaaagacagcctcagcactcatatggaactctctttattgccttgaaaaatccattttcaacagagttaaagacaaaatttcagctccaatctaccctatatgcccaagactccattacaattttaaaaataataataaccaagtaataacaaactcatcatcattcaaaagcttaatgtacaatggaacttgtagtgatgatgatgaccaaagttgcatgtcgtggctagactcgcaaccctccaactctgtggtttatgtgagcacaggaactgtagtgagagtaagcaaaagtgaagtaggtgaaatggcttggggcttagccaatagtgagcaaccttttttatgggttgttaggcctggtttggtgaatgggtcaagtagtaatagtgggcttgaggttttacccaaagggtttttagagattacaaagaaaagaggtaaggttgtacagtgggccccacaacaaaaagttttgggccacagagcaattggaggattttggacacataatggatggaactcaactattgagagtgtgaatgaaggagttcccatgatatgttggcctaggattggggaccagagagtgaatgctaggattgtgacctctgtttggaaagtgggaattgagttggaggaaaataatttgaagaggtggaaagtggagagggctgtgaggaggttaatggtggatggagaaggaaaggagattaggaacagagctgtaaagttgaaggagaatgtgagactttctttgggtcaaggtggttcttcttctgagtatcttgacaagttggttcaatttatcaagttgctgccataagaaaattatcaaatcaaagtggatgagaataaacacaattctattcctgaagctgatcaatcactgatatagattgatttttcagttataacattaatttatcactagttataaattatatttacatttgtgtgcactagtttatgaaatgagttaagagtgccgcaaacgtcaattttatatttctaaagttcatatatgtatgcgtgtttttcttttgttatttaaattcaattaagtggtatgatctttcgactgattaataatattttacatatattattgaaatcaatatatataggaaatatctatggtagagatcttggttttgtccctatcttagggatacttttttagcccttgattgttgatctaatggtaataaagttgaggaaatatgatagtaatacagtaatctagatagcaatattttta

SEQ ID NO: 20516 - DNA, 6190 bp, Cannabis sativa
gatcgacacgatttatctcttttcgcttttggcttatgcagatatgccatgctaaacttgcaattttaactatataaaatacttacgaatgtaggtaaacagttcgggagttatgccaattattttttccacgtcgtctttagctcttcccggtacaatagctcggttcactggtttatcagcattaaagaatgctgcattgactttaaatcctgggggtaagatttataagctctcatactatagttggcagttgagtaattggtgaaaaattagtgtcaagtgtgtttgtaaggctactttgccaatttggaattcggaactaaattttaacaatcaaatttgcttattttttctctttgtgaagaatagtatttgctgtgattcatgatttacttgcatgtaattaacaatacaaaattcttttgttaagttaaagtatcgaacggtcttaaaatattctgaaaactcttttgtaggttcgctctatcttcccaccaacatcctattgatagctttcttcaactactactacactttcctacagttggaccctgatgatgttagcgagcagttgaagcgtcaaggtgcatcgattccacttgtacgaccgggaaagagtacagccgcctttcttaaaacggtaaaatttctgccttcctagctcttgtgtcgaaacaacgcattgaattgtcgttaatcatgttacctttgtgtgcctctcaattgtgttaaaccaagtaatcttcttctttttatgcaatcatgggattttgactagaatctttaaactttggttttatggttcttttgttataggtcctaagccgaatatcagtgctcggttcaggttttctggcggtcttggctgcaggtcctgcagtagtggaacaagtcactcacctgactgcatttcgaggatttgcaggcacttcggttctcattcttgttggttgcgcaacagataccgcaagaaaagttcaagccgagatcatatcacagaagtacaagaacatagagttttatgactctaacaagtttggtccatagaagacaagaactaatttggctattgtgtagttgtacatctctgtatgaaatattttattaatggaattgtgattctcaaagatgagggttttcacacacacacatatatatatgatgtcatgtatgtttgagctagtcctctaattcttaattttggcttttgatttgtacatagtaacataagatgcatttcttttagttgcttgtagctgggttttatgtttttgaatttgaggttagtttagtttttaacttaaaaaacttagtataaaaaacaaatatagtcaattgacaaactgagttttgttcttttgaagaaatgaaatgtgataattcatctaagttctaagttaatatttgagtttttattatttttcaaaattgatggatgtaatgtgtttgtttcatagcataaaaaaggtgttataaagcaccatgagtcacaaataatattatttttgtgtattatcatagctgagtaaccttttcctaagtttattggtgtttaatgaagttgatcatttttttttttaaaaaaacccaataaataataaaagactattgttttaatatatatatatatatgattgattagtcaatagttataaattacaattttaatgtaattacgatgattatagcttttttttacctgtaataacaggttaccccgaggctaaggttcgagttcaagtctaggtttgaggtctaggtctaaggttttagtttgggtccagtgccagggtctgaagccaaggtttagggcttgagtccaggttgagggtaggggcaggggccgggtttgccttcaggttgggatccgagcagtggtcgagttagggtctgagtctgagttctaagatccagattaaggtcagagtacaaaattttaattaaaaaaaaattatttaaaaaattttgaaagtaatttttttttttgtttttaaaattttgattttgaattgaaaaataaaaaagtgaaaataattccaaagagtatatttttggaaaatatttttattttttcaattaaaagaaagtattaccaagaccctaataaacattgaaactttacaaatttgaaaaaaaaaaaaaaaaattgaaactttagatttgggtttgggtgtgcgcggccaaagtaagaagctttaggtcacaatcttcggattgtaatgcgcgcgcatctgaagtgtcctgtaacaccatctcaatccaatccatggctatggcctcagattccaacggggtttctgcttacttagccttagccatggctgctctctttgcttccaccactgctttctctggttccctttcttctgttcccatttccattttccaatccaaacatacacacatctcttttcttacttaatttttgtgttgttgttgttgttgttgttgttgttgttgttgttagtgattcaatggaagaaaaagtcgaagcttttggaaaccaagattcgtggtcttcagaaatctctcaacgcctccatggagaactgtgccggcgagagacaaggccgaattcgggctcaacaggtttttcctccatatcaattttgttatttgttctcatttgggtttttgaatatgtgaaagaaaagattgatctttatggctttcatgggatgattcatagtaaataccctttttaatgcttctattaatgagtataataataataatgtgtacattttctgtgttgatgataattgagttctggaattcagtaaaaagatttgaatatcatatattattactgaatttgctatgtcacaagttataatctttatgatgcttttgcaggctctgaggaaaactctaagtaatcaaccaaagcttgagaatagtgatcagcttacttcttatcccatgacaccaattggtaccatccaatcatgcttttctaccaggtgggttagatggcaaaataattcagtagtgatttctagatatgcagtatatttttgttcttatcaaagttattgtttttgttatagaaattgatttacaatgttataggaatggcacaccgaggcaacctttacttgttccccttgctagagcatgcttggtcttcgattcgtctattgtacctccagcatcacttgtgggtcttgggggctattctcattgctggattatatatgtttttcatttaaataccaatatggagaagctttggaagcatccatctaaggcaagattcaaggctaaggtgtgtctcttgtagttattgctgttgtataccaagattgctgcaatctttttatcttcttattataaaaggctggcaaaatcaataggtgagggtgccacggttgaaaggtggaaagatgggagtctttgcaactcgatcaccacaccgtccatgtcctattgggctcactgttgcaaaggtaaaagaagtaggctgttgttcccaagaattatttcttcaacttgagtttggagtgattgatcatttaacttttgaaagctcacataaacctcaaaaacttattgcatttcctttcacactcattttttttcaaaaagttcatctattagtttgagtaaaatatgtattttgagaaggaatatgatgaataaaacaaaaagtttacatccttcttttagattgaggcagtgcaagagcatatgatgcttctctctggtgcagatctggttgatgggacagtaagttttcaatatgcttaaactcgtctacttctattgctttttttgccatcactcatgactcatcttgttttaattttgttaacagccggtgcttgatgtcaaaccctatcttcccttctgtgatagtgtccaaaacacaagcattcctgagtggttgatggtatgaccttattgtcttttagcctattataactttcgttagaacatagtccgttgatacatttcttttttttacgactaatcatacttgttaaagtactaattcagtatttgaacctcttaactaagaaaccgtggttgcattgttgtcatcatcatgttgcctataaaaacaactttcttggtaattgtatttcttgtcttgcacagggggagaatttattagtagcatcttctgttagctttgccgagtgcttcaattccacactttcggattgctgggaaaaagtggtatgttatctaaaacgcacttgctaatgcgttctatcaaacacttgggtcgctgtgatttttgtttgatttggaaaaccctcatttctgtttattacaaatagtcaagtttgctatatttccaaagccatattattattctattcttgatttgcattgttttaagattaacaactccatattttgaagcttcaagttgttatcctgactcgaaaactgaaaagttgagccaatttaatgtaatactaatttggattctatgtttttcctgactgttatagttcattaagaacatgttgtttgaaaaaaacttcatgacaaaactttagaaggcactaatttccattggttttaatcttcatactatcaacggcattgttgtttggtttgttccagggcgagaattcactctatgcctcgccagatgagtttcaaaacttgataaggcaagttctgtcatgggatattcggtctctggctcaacgcaatcgacctcacaatgctattatgagaacagaaaatggcgaatcattggatagtccttctgattccgaggaccataatgatgatacggctcataaccatggaattgaacaggctccactttcttctgaggatgtgctttacttcttgatcttggaaggattcaaaatttcatacagaatcgataccaatggcaatgtcaccgtggagaaagtctcactgtcacgggccatctctaaaagtaaccaaaaccgctctaattacctcacatggagagataagttaagctaactcaccagcatcccttatgttaaaattgattctgttttgacactaaagttacttttaatccatactcattgattctgattgtatggtgaaagtcccacaactgagcagaatagaaattgaaaagaaccagttttgcttactgttcttttttcttggttttgaatggttatatcagttaatgatttctattaggtaaaacatcaaattctatgtccttaacaatcatgatgcttgaaaaattggcttatgtggatagattatttcaatgatatactgagaaaaattggactatgaatgaatgctatggtattttatttgtaaaagtagctatatgtattgtatggtgaggaatggctattgggaatgaatatattacatctcactcaaacatagtataatattgctcttgcataccaataataatatgaggtttcggcggctaaattcttccaactattgtttcacttatactcaacccttaaagtttaaattttggcagtaaaattttccaaattactgatttgttagtaaatttaaaatattattcggttaattgtcactatagatgtatattcttgtacacgtgacacatttataatggtgttattattttaaaattataaaaaaacattttaaaattaaataaaattataaataaaaaaacaaatttaaaaataaaaaatattataaattttgaaatcatttattataatttttaaataataatagctgtaccaatataacacaattcagtagtttcgagggtttttgtaatatctattttttaaggaaaatttaagaacttaattttatttttttttatttccatttatttttttttttattttagtatttgaaataatcatgatattgtgaattaaggattttaatggcaaataaatttttattttatagtgatgaatatttttttttattaatggagatgaattactatggcatgcgcataatgcttaggaagtaattagttgtgacaaataaattatttattttgtgagtgttgttgttattgtgagcataataataataataataataataatacttgtaaaattactttataatatagtttgacatatttttatggtattgctgatttatatctattatttaaaaagattataaataataatttgtgattaattatgtaatatataaaagtattattttaaattatgatttaaattattatgtgatttaaagtttaaattaa

SEQ ID NO: 20517 - DNA, 17648 bp, Cannabis sativa
aggcggtgtgggattgcacagcttacctagtatttcccctcacggatcacgggactactaactatcacaaaacatggcattaaaacccaaaatttgtagtggcaacaaagagtgacactttcctatcagagaacaacttaaaacactcattggaggcagcctaagttgaaaggcgatgagtaacaccgttgagattacgggaaatccaacacagcttaacattgatgatacgagatagactattcaaggtagcgtcaaaagtcctacgaaccatccacaccggagatttctcagccaacagaccatgcaccgccacttgacagtccgagaaaatggacaccgccacttgagaggtgtagtatcactattgtgaaatggctcataacaatagggtataaattttatgaattatcattgggtgacacttgcacacatcactctagtatttgtagcaaaaacattatttttagcaatatttaagtattattttgttacataattttttttaaatatatattaataaaattaaagaattaaatatataagtactaccacaaataaaagttttaaaacaaatagtttctcaatttctacataaatattttggttctatcaaacaaaactcattaacacatattatggatcatgtaatgtaatgtgtctaatgggtctatttctctatattatttgtccaataattatctaatatattatatataaccaaacgacagctacctaccaattgccattatacaaaagtcaaagtttatactttagtatatgcttataatttttttggcaaagaaattatgttgtcaatttccaattagattcacctaattcggtctaataaatataatataaagttttaaattaaattttttgcgataaatcacgcaaagttgaataaatacacacatttttttttttttgataaatcacactaaacataatatttatctaattattaaaaccctgagattaaaacttgataattactaagtgtactataaatataacaaattatcttgatgtaatttagcttaccatttgtatagatcttatctttgtgatatttatcttgttttactctatatgggattaggtcaactttatctgggtcttaaaagtagaggtatcaatattgatgagtttttttttgtatgtatctattgttatggacactgtatgacgagtttagaatgagacacataataataataatatgtataacataaaatattacaatgactccattaattattgttatgtagatcacataactttccttattcctcctttgattctgagttctttggatgggtggcgtcaatcttctcgatattggcttaaactaaactgtgacactcgagtggggatggagagtatatatgtatattgcgttcattgttaaagaccatcatggagaggtagcttgagtgactactgaccgtttagatttttatgactcattttctggcgagacaactgcttgctgtttggttctggatatgacgatggttaagggaagtaagtttgtcattgtgaaaagcgattataaagtaattatcaattctctcaatggtttggagtttagatgagagattaataattattctagtcattgtaaaagaacttttttaatttttattgattgttcatttcaagtactagtagaacatgtaattttttggctcatactgtagcaaagtggacattttgctattttcttataatcattatggttgtttggatgtttctttcatacttatcaaactatcttgtaatgataatcaagtttaagtttgtttaataaatggacattttatatatataaagtcacattattacaaaaaaaaaaatacagatctataatattttcaatatttttacaaatttaattttcttttatttcattagaaaatattatataacattattttcatattgcttttatatttctattattttgatgtaaaaatacaattaaaaaaaataaaaagaggaatcataccccatcaaaatcctattttttaattgataaacttcaagatggtggtacttttacactatactaaaaccacgtgtagttcatctttaaaatatccaatatatattataaaaaatacgaatttatagtattttaacattttcacaaatttaattttgttcatgttgcttttatatttgtgttattttcatgatatttcgtaaatatataattaaaaaaattctgtaaaaaaaatgaatcctagtccatcaaaattcttttttctaaatgataaaactaaaaatggtgatacatttacactacacactttttccaaaaataggtaaaacgacatgtcattaaacgttaaaaaagatgtcgttttatccatacgacatcatatttgaatgagtcgttggttagctgaagcggtggcacaggcacccagtagaatccgatccttccttctctccaacaaaacagataaacgacatgtcgtttatctttaaattatgtcgttttttttccatacgacatcatatttgaacgagtcgttggttagctgaagtggtgggacccaatagaatccgacccttccttctctccaacaaaacagataaaacgacatgtcgtttattgttaaaaaagatgtcgttttttctcatacgacatcatagttgaacgagtcgttagttagctgaagtggtgggacccaatagaatccgacccttccttctctccaacaaaacagataaaacgacatgtcattcatcgttaaaacgacatcgtatttgaaagagtcgtcgttggttagctgaagtggtgggatccaatggaatccgatccaaacaggtctgtcatcttctccgattggcttcttcctatctccttactcctttcaatcccataaacataagcacttctctctcttctttctctctctaaaactaactttctccattttccttttcactttctcgtcatccaaacactcaaaaaatcaaaccacaacgaaattaaagcttaattaccggttaattaatggcgtcgtcgacggcgatacttaatgtgcctaccagtgttggagcaatcaagggtttggattgtcaaagctacgtcggtcttcgacctttggtggttagtgtgagaagttttgattctgtagcgattaaatccaagactagccgtagatttgtagttcgagctagcgaaactcatagcggaccttttaagaagttgggattgagtgatgctgaatgtgaagctgctgttgtttccggaaatgttcctgaagcgccgcctgttcctccgaagccggctgcaccagctggaactcctgtggtttctacgcttgtgagtagtagtttttcctagattagtattgttagtaattttgttgagaatatgatcgaattatataatcataatttatattgaaaaaagtaattctaatggagcattactttttacttgtgaggaataatattaagcattaataagttatacaattgttaaatcagctaagttgtgttttaattatgatttgttagatatggagcattactcatttctgaaagaacaatgtttttgaattgattagcttgttgaatttgaatactcaaaatcaagtaaactttaatggtgtgttagtttaggtgacagaatttagtgaagtgttaagtattagcaagaaatataatcataatttagctaagttgtgttctattgataatttgttagatatggagcgagcattaatcatttcaaggccatttttttaaaaaaaataaaaataaaaattgattaggttgttgaatttagatatccaagtaggttgctgtattctactaacaataaattaactttgttgggattccactgccccgggatgcatcgagttttaattgtttgaatttgatttatttttgtcagccaataaataggcggcctcgtcggaacaggaaatcacctgcgtttagagcagcatttcaggaaactacattatcccctgcgaattttgtctacccactttttattcatgaaggttttgcatcacttcttattttctttttcctggttttgctctcatctactttagattctctatgtgtgatttctaagagggaattttatcattttgcattgtatggggtagtctattgattgttttgaaaacatttcaggtgaggaggatacacctattggagctatgcctggatgttataggcttggctggagacatggacttgtggaagaggtgatactatatttggtttcataatttatatacagttcaaatgatttggatgcatgattcatctcctactgtttgattcttaaatgttgtatttagattatttgtagaaatccaatggtttatttgtttggcctgttgaagaggattatcccaaactttgattggctttgagactaattctcagtactttccatgtaatccaactgttaaattctattttataaagtagctgagtgagcaaaaaaccaaaaatgattctccttttcggaataatatgaagagattagatactattgagtatttcacaggaaagattgacttgtatttggtgctttagtagttttgtaagcttgttattgctataaattctcatatttctctaagtgaacatcttattacaaaggtattttgcacatgatatcgcattggttgtttccaatttaatgcactaacggaacaatggaactatctatttggtcgagcaggtttcgaaggctcgggatgttggtgtcaatagcattgtgcttttccccaaagttccagatggtttaaaggttcttactttaattctgtatgttaatcttatgttctgtatgacaacatagtataattgagttgtttcttacagactccaacaggagatgaagcttacaatgagaatggcttagtccagcggtcaattcggttgctcaaagacaagttccctgatcttgtaagtcaatacacctatatagttattagggtaatgagctcttaagaatattgtgaatttctttttattaatattatcatttccttaagtgtttcgtctgtctttttccaggtaatctacactgatgttgctttagatccctactcatctgatgggcatgatggtatcgttagggaagatggtgagcagttatgctttatgattttccatcattcttttgttatatgaatgatattcctaaaacgtttatcaagtttccgaaaccagtgcatttcctagaatagggtgatatcttatagatagaagacctctagttgcacatgcagaactgaaacttgatatccattgcaggagttatattgaatgatgagacagtacatcaattgtgcaaacaagctgttgcccaggtaattgatgtttgcattatttctgccatatttgtcaattattgcttcagtcattcaagtgtgaattttaaccattcaattaacctcattcttatatccaaatccaagccaattttctgcatttctgacatggaactttgttgttccttgtgattacaatatattactatgatatctggtgtgtctgaatgcattatgctttgggagggactactaagttgaccaggttttgctttgcctctttttcaattcaaataacaggcgcgagccggagcagatgttgtcagtcctagtgacatgatggacggtcgtgttggagcaattcggtctgctcttgatgctgaaggctttcatcacgtttctatcatgtcttacacagcaaagtaatatgtttcttcttactactttttgcacgcgggttcgggctttttccttgtcctaggatcctccctcgtagttcttttgaatttcgaataattcaagatcttttgttttccaattatctgataaattacttaatgtgtatagattgtctttccattcatttcaaaactcccacaatcccttcccgaacccccaaaattaagcttacatttttgcttcactgattgagttgaaatccctcctttaccctaccctttggtccctcagtttcaatgcatatgtttatcccttccctgattccattctatgaacctttgtgtttgtcttgtttcattgatgttagatttatttacaagattcattttccaatgtcaataacaggtatgcaagttcattttatggtccatttcgagaagcactagactcaaatccacgatttggtgacaaaaagacgtatgcatttttcacagttgatttaaatgacaaaagttttctctaacttgatgcatcggttgctgacatctattttgatatgtggctttcgaaacccaagttatcagatgaacccggcaaattatagagaagctttagtcgagacccgtgaagatgaggctgaaggagctgatatcctgttggttggtattctttgttgtggattattgaaacatactaagaaacttcgttagttctcaccatttttggaacttttataacaggtgaaacctggtctgccgtacttagatatcataagactactcagagataactcttctttacctattgctgcatatcaggtaattttaatgacccaagaatctattatgcttatgaacaagtgcttctatgaaaatcaaaattggacagttttggctattctttttcagcagttactttaatgtaaattggtttgctttcacttgacttatatcataggaataggatattaaaaatgcttgagaaatagatgatagaaataattgtaaattaaacagtacttacattgggaaaatggaaaaataccattttggcttctgtgcatgggaatttggagtgagattggttgggggtaataaaaagaaatagagtagaaatgctagagagtctcacattgttaatgtgtagaaagataatagtatatgtataagatccaagtgctacttctctcataacaaattggttttgagatagaacccatgcatcttacgatgactatccgataaaaaaatgaaaaaaccgaccgaaaaagtagccactaaaagtccaaaaaaacttatcttaaaaaatagagtaaaaaaaaccacttatgattcggcggatagtgaactaaaaaaaatgcttgtgatcgagccatccaagatgtgaagggctactcttttcataaccaattagttttgagatagaaactctatgaatcttacaattctaacaagaaaagaatcaatttacatatcattgtttagctatattttaaagtgtttaatgtaataatttttctatttagaaaatgaaaagaaatgaaagtataatgcaagatatatatatatatatttttaattttttatgtatattaaattttattccattttattcttatacttgtttccattcttatttttattcttattcgtttattttcattccatccaattaaaattatcgatagtgttaagcaaccaaggaatagcatatttttaatttacacagctaagactcttagacatgttttcttgtaaatatatataaactgttgtgtgtgtgtgtgtgtgcaggtatcaggtgaatatgcaatgatcaaggctggtggagtactcaaaatgatcgacgaagaaaaggttatgctcgaatcgttgatgtgccttcgacgggccggtgctgacatcattctgacatatttcgccttacaagctgccaagtctttatgtggagaaaagtaagagaagaagaggagcttgttgaacttagaagaagggaattacaattgtgatttgatcaaataataatgtaattgtaatattagaacttgaaaatggtaggattaacaatgcggtttgtagttttgtagtattgagagttaggacttgtttgattaacagttaagtagtgttgtgttgttgtcatattgattgtattttagtattttgtactgtaaattattgactacactacacagactacctacctaccaaacatagcccaaacccctaagttatttgttcatgcatatttgttgtgtcatgtagattgaagttttttcttcacttttggaacctctgctaaaagttgtgttaaatttaacacaagatgacattgtgcaaaatttgacacacaatatacgtaacttttttaattacagttttaccatttatcattaatgaaattgataaagtaattttcagcgtaaatacttaaatttaactcttagttgtagataaatactttagtttaattttttatgataataatatttaagttatatttttaaaatttctgtaagtgtacctgatgcttgatggttaagtgtcaaatcaataatcacataagttcatgattggtacaaatcattaaatttttatttaaaaatttatttaaatatattaataaaaaaataacacgtgaatattaacttgacaattaaatccaagtacttactgaaattttaaaaatataacttaaatattattattgtcaaaacttaaatttaattatttatctacaactgaaatttaaatttattttaaccacaaattattcttaatgatatactttaatatacactttttaaattaaaatattgtcaaactattttttaaaatatttaatacatgaatgatagttattttactttttatcctaacttgcacctttaaatattattgcattaaaacataataacaaatattgtaacaaatatagcattaattcatgttttgaaccaaacttgttacaaataatacaccataacattgtagatggtcataaaattagaatatcaaatattattcatttttaaattaaaggaagataatgttatcaagtgggggcagacatttaacctttgcatgtttaccatagtaaaccaaatcaaaggcatttttcttgcataaattattaactgaactgaactgaatataacaacctaacttacgtgtgttacaagaaagtagaaacaaagtaaaccaagtttatagattgaaaattgctcataataaaaacaccgaaacctatttcgcggtgtatgcatcatcatcatcatccattgcaaaattgattttgatggattccgagctaaaaattaagtttaagctgtacacgaatactgcgctacaaggtttcgttgtctaacaagctcgtgaagatcgtgaactatcttaaatacagcatcgggttttgccagctttagtgcattttctgacattaccttaagttcatcagctttcggtccaaaccattcagcaacgattttcgctatttctttaggagatttagagtacttcccgaaaccattttcaaccacataaggcacatttccagcttcctgagacaaagatgaacaatagaattgagaaagttgctaaagctatataacacgaagaaaagagtataacgctactcgtttttctttcttacctgcccagcgatgtaatcgttcaaaatgataggcactccgcgtatcatggcttcagcaattgtccctggacccgcctgcattcaaagaagtgaaactaaattagccgaaataaccacacaaacaaaccgacgaatgtctaaagtttcgaagcgaaactaaccttggtaataatgcaatcacaagctcccatgcattcttccatcttagtaacaaaccccttcacctataaaattgtaaagtattagcaactcttctatatttctatgtatataaattattgttataatggaagaaaaatgcatgttaaaaatgtacaagcacctcaatagtataaagagatatttacagcaaaaatacctaaattattatatttgtagcacttaagtattcaaattattaggtttgtaacacgtacccaaattatttttttagcggcaaaaaatacttaaattaccatgtttgtagcatttaagtatcttaagtttaatttttggtgcttaagtctatctacatggtatcaaatttccttataacttgggtacttttattgtagaaaagaataaattgactacttaaagtgctacaaacataatagtaagatactttcactactaaaaaaataatttgggtacttattgagaatcatgagttctatcttaaaaccaaccccataattcttgacatggtatcagagtcatatttcttgtggacatgtaactctgtccgatccgcacctatatagatagtgactttgtccactctgatacggttcaagatttgtgagcaaaaaaaaaaatagctactgtcttgaagaagaatattgtgggacattgtcccacatgaaataaaaagtaaaatattaagccatatataaaaatatgggctacttcacttatcaccaattgaatttaagatagaatcctataattctcaacagtactctacgaacataataaagtagatagcatccccaaaataaataatccaattttgaccaactacatgacaacatggccaatcaacatttacaaaatgtgtggccattaaagggaagttcatacatatcaactccataaaaaaaaagcaacaaatgaataggtcactagccaaaatccttttccagcaaaacaagaccctactcgaatggcgaacattaacacgaaaaggcagggttttgagcgatacctcaacaggaattttccattcgattgaacgaagtttgtttgcgagttttttgttgtgaccgcatatcacaagaacctgaccaattggctccccgagaacctcatcgtataatgacttcccaagtgcttttgcagtagcttcaatagggcccattccttcacctcctcccattaacaacacagctggaaggtcttcatccatacccaaatccctttttagttcaaactacagaacgaaaaaaacagtgagtagatagtaatatcatctaagcaattggactaatcgggcaatctcatctcattactttaaattgcactaatctaaacaaagtggagtggtcaaatagagaggaaaatgtttaaattcaacacgaaaacaaaaatcatatagtgaatcaatttgagtagcaaccaacctttggccgaacaggcttgacaaacgaaggtcgtacaggaaggccataaatcttgatttgggtattcttgagtccagctttcagtgccctcttcgctacctcattcgttgggcaataacatctcgtaacaagcttatgaaacctgaaaacaagacatacaacattaaaaacaattctgatgtcggacaattatttgaatacacagcgagcaagcataacaaaccataccatgtaggatggcaagtgctaagatccgtgattactgtagtaaaaacgatcttatcgagtaaaccctttgacctcaaaatacgaagtggtacatgctgcattagaggatgtacactgataataatatctggttggtacttcatcaatcctttagcaacttccctaaaaacataaaaaaaccataacattgtccgattagaatcgaacatattcaaaagggtaggtacatttcgggtcttagatacaaaaaagaatccactcaagtctatttcctaatcccattattgctcagctctaaaaaaaaatgtacatacatagtggttctcttctactcatatatgatataaattcagcaatatgataaagcatgtaatcataagaaagtaatactagattgctattggttggctagttaggagttttatgaagaatatggaattttgtgtgaactatttagagtaaaagattgctctagggagataccaaactgtctcgaaaagtttcgaaatttgtaattctttctttaatatcaataagattcctatattcaagtattggattagatcaataaacaaatgattccaatcctaataagaacaaacagaaccaatcattaccgagctataaatgttgaagttgcagcaaaattagactgatgaataagtctaggagcagaagcataatatgtcatcttccataatgaaccatgtttcaccaagaaattatagctccttggaagttgattaaacggccaaggagtatgatcagaccacaaatcagtaacaaacacctgttccacacacacacatacatatactatttagtctcaacacaaagaacaaattacaaatttcccaacttaagtaagaatttgttatatgagtctaacctgatattcatcaccatattcttcataaaaagctgcctttatagcttctgctgaagctctatgaccaccaccagtatcactcatcaaaataagaactttctttggttttaaaggctcaacactattcaaacccaaaccatcatcttccaaaacactacaaccctcttcaatcatcccattattattattattgccaacaacatttccaaccccaggattaatcctaacagaagcaaacccaattggaattctctcacaatgaaacctaatagctctgttaaactgaataatagctttcctaatactataactacttctactactcaaacccaatgaagcaccaaatttaggtcttttcccatttacagaagaagaatccccaaacacatcaaaatacatgaaattagataaaaatgaagagtgcccatcagaaccaaaggaaaatcgacccaaatgagataccaagtcataaacttgactggactcttgaactacagtcgaagagttattcataattgaatgtacacaaaagggtatacagtaatagcaaaaaaattgttaatttacagttccatggcgatctttgtggtattggaacaaatgggttaacgcatgctgacagaaagaagaaagcccagatagggaaaagggtagatagaagaagagggttttttgaaagagaggaaatcctcaagaagtgtttgtagccacaaagaaaggatttttttgggtctgtatatatgagtgaggagagagagagacttgttttgttgtgttagagagagaaagagtagattctgggaattcagcaaaaaatatgctttttctttttcttaggaaaaaacaacaagtttgtaattggatgatgtttctttctttgttgagagactttgtacgcactaaaaaaataaatgaaaacataaacaaatattaatgaggaatttaaactcttttattttttaatttttatacacttaaataccaactagattattactgtattgacttcaaggttttattgttacatatacacaggtgtatacagtagttatccagttgatatttaacggtaatatttaactgacatgtcaaatttacaaagaaaaataaacttaaagagattttgctataaaaaaataaataaggggttaagtgtataaaaattaaaacataaagggatttcgacgcaaattgctcaatattaaaagtatttaaagttttgtttataggagacattataaatattattttagatttgtattttgtaaaaattaattaattttttttggtaaattataaattatattttatattttttaaaatagtaaaatagtactttgaactaatatttgttaaaataaaatttaataataattgagtttaaaagtattatgataagactaattatattttctatatctgtgtttcatattgattatattaaaaaaattgtcaaaaattaaatttaagttacttttttaaaaaatacatgatcaattttattatataataaaacatataaggatttaaaatgatactaattatttttatcagtataagtattttttaaaaaaattatgtcggcgtaagtatttaatgtttgtaaaactgttatttttatctaattttagtattaaatttgtaaccggtgtgaagttgatttttaaaatttattgaaagaaaatttagaaataacttacatgtttctgtaaaaacctaaaataaaaaattgagtaatttgcagtgtaaatatttaagtttaattcctagttgcagattaatatttaagtttaagttttgacgacaataatacattagttatatttctggaacttacatatgtacttgaccataaattgtgtagcagttcttggttagtccacgtcattaaatttttttattttttatttaacattcaatttaaatatactaataaaaaacaattaaatacttaagaaaatctaaaaatataatttaaatattattaccgtaaaaaaattaaacttaattaactttcaaaaattatatattagatatttttgttgcaatgaaatggatacttcatgttaaaaaaaaaaaaaaaaattgttgctaaaaagattgttgagtttatagtggtagaaacacaagacgtttgcaactttgacaacaaatattccaaatatatttacatctttggaattgatgtatgataatcaagtgtggcctaccaccttctattaaatatctagacaaccaatggggatttgccatgtcagcaaagtcaaaagggatgacttcttgtttcttacacgtcacggctgacctggcatgagtatgaatgcaaatgtaagtaaacggcacaagaacaagtccattcgaatcctaaatatgccttgtttgatttgacacttttattttatgactcaaattaaaacgtttttactttattgaggttatttatgagtatttatttgtttttatttttaatgtaaatgtgtgtgagtaaatactaaaaaatttcttcacaaagaaaaagggtgaattttgatttatagaataagaatatttttcttttacaaataaaataattttattctaaaaaaagaaaaaaagattgatcaatctaaatgaatattttattaaaattacattgttgccaaattcactatcattttggcatgtctaaaatttgatgatgatttggtatttgtctaaaaataaaaagttataatttgaataataatatgtacaaatctatatgaagaatttgttttcatgtaaaaataattataaatattatataaaaaaataccatgtgttagaataaaaaattagaattatttataataataaatctattcttaaatttattaaagttttgaaataactcaactaaaaaaaaaacccttcatcttgccaaaataaattttttaagtatgcatatttttactaacaaaagttacatataatataatgtaaatacattatagttaacttattatgcaattaccataaataaataaataaatttaatggtcggtgttttagaataaacttaaaaaaataaaaagaattaaacaacatgggcggtgaatggacggagatcacagactaattatataacttcaattcaattttaataaataactattgcaaattaattaatgaatttatttaattttttttttctttacaatttcttagtggaatcccaattgtaatgagtattattcaaatgtaaaaaggctgtgcaccaacgtgatactcatgccaaaagttatcacataaggcccaacaaaataagatagtgaaaaataaatatataataacaaatatttaaataggatagagtatgattaagatgtacaataataagactagactagacttttgtttgaacaaaattggtgttctctcatctcattactttccgtccaaaagtttgggctttgagactttgagttgttacactatataccattcaaaaatgttagggtctcggtgttaactactacaagacgtgacatgtattctgttattagtgtattttaatatcgggatttatataatttgatttaataaataatataaaaaattataaattactcgcaacgagctacattggtatggtattaggtactttaagttgtccaatagtaatactctatagcattagtactttactcagcattagtagtactaaacactacgaggtaatacatatttatataatagttattaaataaaaatataaatttgatatttaattgtatcggtcatatgtcgttttacagtgatattgggtactacctgatgttttttccatactaaaactatgtttggaagttttgatttttgtgtcaacaaaaaaatgttatgaaaatataagaaaaaaactaaaaaaatatatcatgtttagtatggaatgaaaaaatgaatgaaaaagaattaattcaataaaaaattttataccaaacatgaaaagttgttttttttctctttatccacacttttatttttcttatcttaattaagatccaacttccaaatataaggctagtgatacttttcaaataataaaaaaatgttagtgataattttctaccccgataaagtcggtggggctctccctacctgtatatgctatgcagactatgaagttgtcttagaaacttgcagctactcattgctatgttgtcaaaatcgggttttcacaagacgtttctcttgttaattcacttatatgtactataacagtagggatcttgataccgcgaagttgcttttcgaatcaatgcctgaaaagactttggtgtcttggaatgcaatgatgaccggttttcgtcagcatagtttacataaagagattatggtttcatttggcgaaatgacaagggatggaaagaggcctaatcacataacattgctaaatctattgccagccttcttcagccgattgcagggtaagtttgtccatggttttgcaattagagcatgaatcattaaagaaacccccacggttacatcgctaataatcatgtatgcaagattcaacgatcttcggttgtgcctcttgctatttcaaatgggcgaaaaggaagatatttcactttgaaacactatcatatctgctcatgtacaaacacaaaacaccaaaaaggctatcaaattctttttcgagttgcttaagatgggattggaacccgacaatctaaccatattgagcctaatttacacttgtgttcatctaaacagcctaaagctcgccaattctataatcgcttacacaatatgcaagggattcaacaaagaagtgactatcaccaacacattcaacaaaaaagtgactatcaccaacgcccttatagatttgtatgcaaaaagtggaaacatttcaatggcaagaaagctattcaatcagttaaagggaaaagacagtgtttcttgaagtgtgatgatcaacgggtatggattacatggcaatggtaaatcagcactcgatcttttcacaaagatggaattttcagggataaaaccaaacggggtcacgaattcaacaatcttatcggcctgtagccactttggcttagccgaagaaggttgcggagtcttcaactcaatggcatagcacgggatattgccctaagctgagcactacgcttgcttggtggacctcttagctagaacaagtaacttgtttgaggcttacaaaatcgttgaagggcttccttttaaaccttccacaagcacacttaaggcttttttaggtggttgcagcatccatggaaatgttttagttgtagaaaaaatcggtacaaaactgcttgaatgggatcctcaaaactctgcaccttctgcttcacaatatctatgcagctaatggtaggtggaatgatacagagaaaatgagatgtgagatggtaaaagaagattaagaaaaatacatggatttagtctttttcttattgatgattatgagtaagtacagggccgaccctaagtataggcgggctaggcctgcacctagggccccctcattttaggggtccaaataaaaaaaataacttttaa

SEQ ID NO: 20518 - DNA, 2310 bp, Cannabis sativa
tttatatgaaagtgaaaatataacacttttttattgtttatttttttatcaaataagaatcaaggtttttataaacaaaaatgagttattttaaatttattttgaataatttcagtataatctattttctagtctatgtctatcatatcaatattcactccgttttatctctcataagtcgtacttttctttcaccactttctatcaccttattttcttttgttttcatttcagaaaaaacaaaagaagaaaacttgtatgttaatagtatatgaatgatttggaatattggacaatatatattacagttgactgtcattttccattctccattgatcagaaaagacaaaatcgaaaatctaatttttgtttaaatgtcaagttaaagttttagacgcaaacataatgattttattgatgagttattgggccaactctaatggggtgactcatagtgttgtcgagtgattatttcataaataaaattaaaaaattattatagaaatatgattattaattttaaatacggttgatttttttttattatttgtatgttattttttttgttgttattttgatactattttttttgttacttttatataattttgttattatttttgtatttttttatacaataaaaatatataaaaaaaaattaaatttaaaaaaaaataatacattatctaattcgatcactataaaaaattattattataaaagataacattaaattttatacaatacattattttttagagttgaagaagggttgctttctttgtctggtccaccagaggacgacgattaggaaagcatatacgctaattggatcgaccaagtaatgtgccgaaacaaaagttgtgttaacgaatcaacaatttacataatttgttatttattccttttaaataatattattttaaaaaattagattgtcagaaattggttctcaaagttttttattttttgaataatttatattgtttggaatatctccattatttggtctatctatttttatatttaaataattaatgtgcaatcaaatgaagtaaaaacaaattattttgtttaaaaaggaaaaaaatattactaattagtttgaaaagtagatataatagactaatgaaatttgttttgaaacacgagctgggtgtgtgtgtgcatgaaagtgaaataataaaaagaaatagtagtatttttgactaataattatatatctaaaaaatatatataaaaaaataatattaaatatgtatagatataaaataaaataatgacacaaattaaaaaaaaataactcttatttttactgagacattatcctataacagatttcatatataagtgcagatacaaatttaaccataattaataaccttatattaactaaaaatatattacgtacacattgtaacaattttattaatcaacacgttatttaaattaacactcactactcaaaaaagacaaaagagaaaaaaaaaaaaaagacgatctctcttaaaaaaaaacagtactgctataaatcatacatatatataaaccttcttaattattattttatttgtatttaatctttaagcttaaattttggtagtaataaaatcctccaaatttaatttgttacaatattaaaatatcatttctttttcataattaactatcaacataaattatttacatatatatactcttgtatatgtaatatatttatattgatatacctaatattattatttaaaaattataaaaagatatttcaacattgataatatattttttaaatattttattttttatttataagattttatttaattttaaaataaattttgaaataatataatatttacgtattaatataattgtgtcacgtctataaaactatccaagtatacatataatagtttatggtgagtcaaccgactgatattaatttgaacttgaaggattatgtgcaatagaaaccataattaaaaaagtttagccaccaaaaactctatataatatgtttacgttttaactaaatatatttatgtgagtttgcatgtagaagaggagagcaacttcacatataattaatatataatataccttgatggaggcccattgaccatgatgatcatcgagtggttgagaagcttcattgtttgtgaaataaacctcaggagatctgggttctacttcgaacttgctacagaaaggaagccatttctttgagaattcagaggcctctaacagagcataaaacgtcaactccgaagcaccatcgtcagaaaggtagacgctaagcttgtgtggagg

SEQ ID NO: 20519 - DNA, 2540 bp, Cannabis sativa
ctaaatgtatgcatagtcaaattttcctttatttgacttggaaagagaaattgaataagggaaagcgaaaacagaaggcaagacagaagaatgggaactgctcccgcccaaattccgacgagcttcggccacgaactaagggcctgccttcgttgccgccttgtcaagacttatgatcaggtatccttcttcttcttcttcttcttctttgttttctcttactcacattttcagggttagggtttaaaacttcatgcttctaacaccgcgaaactcatttttcctctaattttagtttcaccattttctaaaattatattgaaatttttgtgggggtgggtgatcattcagttcagagaatcgggttgtgagaactgccccttcttcaagatggacgaagatcacgagcgtgtcgtcgattgcaccactcctaatttcaatgggtatttttccttttcctttcctataaataattttttttttaattttgaaatctttgtaatgtatgcacattgtcacgacatgtcgtttggatttgggttttgatagcataatatcagtgatggatcctaccagaagttgggctgctcgctggttgagaatcggtaaccttttatttattcagattcctttttttcattggttttatttggaagttaaccaatttctctttctccttggtcttgaaaaactgaatgtagtaatgcctggttaagtataaatgttcttattactttggaattatgcattctttaatttttatatttttgttctgttagaatagttgatttctgtaataaaacattttccggggttctggcaggcaaatttgcccctggctgttacactcttgccgtctcagaggcattacctgaggacttgcaggtgagataactagtttgtttattataatctagtttgttatagactagtaatttcaagtgataattattgtataaaaaaattgaacgtggctagtcttgactcttgacttatgctgagtggttactttattgcacaaatttatgattttctctaactatttatccctaaatttttatgggctcctgatgcctcggtatttgaatagcttgattgcttatacttggcattggaaagggtctaaatgtattcccttcttgggtgcaaatgtgacattagaatctttaccaactgtgttagtatgctgccctttctctatgggttacgaatcgcttctgagatatcttttaccacctgtgtgctgcaaactcttaaacctgtctttcctctttctattgatgactgtagtcattagaaaaaattataaacttaaactaaagttaggttgatacgcttgttcattggttccaacagcagagccagtacttacatcctgtggggtaaggctaaatattaagcacacacaaatagattccatttgttcttagtcttaagacagtatgtctaggagtaaacttttgttaatacatgtccttaatttcttttgggtcgggataaaattgaataaaacatttacctctgaatctgatttgggttgtaaggcctaattttaaatttaaaattttcacggggacatgacaactgtataaatcgtgtattttggagcagtggtagaaatctttaatgtttatgggagcaaaatctaaatgcaaattaacacataaaagtttgagttggagccactgacacgcttgatcctcattcggctctgccattgattgtttctgcaaatcttgtcctatttttcaattccattgtttatctccttttacattgatcaataaagtagatacaatttgaaaatggttttcatgagtttagtaacagctcagctgcattatgcttttgccaaaattagcaatatgataggtattaatttttatttttactggcatatttttcttagtttaatgacttgtggtgtgctgactttatgcagaacttatgcgaagacgagcgagttcagtatgtgcctccgaaacgcgtgtgaatggctaggctaggctagtcaagcattttgataattgtgatgtttgtacgtagttacagtgaggtagaaactttttgtgggaaacaattttggttgtgaaaactcagtgttcagttgcttaaaatgtttcagtgaaatccccattaataggttaattatagtattccgttgtactttggatatgaaaagatcactttgaccactcctaacaacttctctactcttttctttaaaatacatcatcaaaactctactttttttattttacctcacacatttatattaagagttctttcataaatataaatatgaaaaaatttagtagagtttgtttttatatgacataaataaataatacaaaaaaaatatgagattaaaaaatgattaaaatttaaaacatgagaataaataaataaatataataagatttgtaataataagtttagttggaaaagttgctggtgtcggaaaaattattgtcgttgaaaaaatcactagaaaaatcgttcgaaaggttaccggaaaagtcgtcaaaaaagtcattgtt

SEQ ID NO: 20520 - DNA, 4305 bp, Cannabis sativa
tcgatttaattgggcgggttggacctattttcaacctgcccaattaacagattgggcggtttgtaattttttcgggttatttcggtttgtaatttttaccggtttattcagtttggtttgggagggttattcggttcgggcggttatttttttgtacagccctaccaaggggtatcgattgcttgcacattcttgggcaattggtaatattgttcttgtttaatttttcagttcccaaggagtacccagttttgtacaaatgagtgaggacaaacaccacacacgtgcaaccgtgtcgaactagtacagtgtgacactttattttttagaaaaatttatttattaaattattatttttatttaattaattaaaacaatttttaaacatgtttaattaattggtaaggagagacgtgttctcctccttatttttagcatcgttcccacgatcccacttaacgttcccatgatcaacgtcttttttcccgttactaacttctgagaatcaatgagagaaatacatctttctcacacagaaaaaatcatttacaatttattatttacgattatattatttaagtagtctgagcagtagtttttaggtgtcgtatttcgatagttctctaccgtgcattaaagctctaatatagtggtattttgactggactgttttatcttggggacgattgacaatttttgactgcttgcatattcctggatagtactgcaaatgtcttaaagagagcgacctagtctgcgactcaacccaaaaatttcacccatttacgatctcactgaacattcccatgatcaacgtctttctttctgttactactttttgagaaccaacgggagaaatacatatttctcacacagaaaaaattatttacaatttataatttacgattaaattatataagtagtcagagcaatagtttttgggtgtggtctttcgacagttctctatcgtgtagtagagtttcgatacagtggtatatcgattgagctattttatcttgggaatgactaaaaaattttgactgcttacacattcttgagcagtgtcgcggatatcttagagagaacagcctaatttgcgactcatcccaaaaattttattcggtaatattgttcccattttatttttcagtctctaaaacggtatgtatggtgatttataatagaggtattttttttagagcaaatgctcctaccaatgaaaacctcacaaaaaagtcgctgggggcatattttcaacaatcaattttatactagattttgtactaggtgtactgctttggttttaggataccaccgttggggcttcactctaagattctttttcaaaattacttccattttgagtaagtgataaataaatttacacatctcattgcactaattgggggctctaatagtgattgagcgagccttctttttgcactatataacagatacaaaaataataaaaaaaattgaaatcaattgtcaactatggcttttagcaataggaccgactatcgattcaagctataatttaataagtagaatttatatgggaatttaaaattttatttaataaatatgctatttttcatttgtatatttttttatggttatttattgtttgagggttttactagaatttaacatgacatatttatgcaaatttaaattttaaagtccatatattatgtttgtgcattgttttccatttagtttattatttttaattatttatttagatattttgcctatttttttcttttattttatttcttttattactttatttattttcttcagtttgaaggtccaaccaatttttttttctttgtttcattttaattttgttgtttatattttttaattttgtttcagttataaatttattatttatctttattttttatttcatattcatatagattagatttttctttaatttttgtattcttcattttttccctttacttctcttctctatctctatgttcatttacattttttttctgtttgggtgttaaattattatttttgtagtttttttatgtttttatttgggtattttgttttttagttagtaactgtttacaccaagagtaaccctgatgacatggatatcaatatttgacaagtggcaagaaagatgacatctcaaagttgagtagtcccgagtcatagcaagtcgaccacggaggggtccctagccctacaccaaggttgactttgggaactttataatggaagttcaggctttgataactcgtttttaactcactatctttcagtattatgtaccatgaagacatggagcaacctaatccaagcctcgagagcttaaattacatgaacctacaacccgaaagccaacctgggcacctagggttttacccagggcccaggttcccattctcaactagggtttcagtttttgggaccttcttagagaaagtaggtcaaaaatttcttcgagacatcaactaaacataccaatgacatatttgaggcatcagaattagtgcaagtgcacttttaagcacctgagcccttgaggccccgagcacctagtgcctaggttggcaatctgtcaatctgtgtgccttccatgtatcaaatcaaagatacaatttttgcatcttcttcatcttcatcaaaaatggggaaataggtgctttcagagaagaaatagcacttcctgggtgccaaaagcagggcccagagcctaggttgacacttggggctcgccctgcgtccaggttgatattttgtcaacctgggccattttttatggtgttttcagagattttgttcgaacatcttctccaaaaaaataggaattcaactatttttggggagcaaacggaatttctatagggccaaaactgggacccaacgcccaggttgatgtattgtaaaattgggttgtttccaatcaagttcactaaaaagtgtttcatgtattttttccatcatcagaaataatgaagatttaagaaaaattggggagaaaaccacaaactcaagcccctggaaacggggccccgcgcccaggttaacttggtactgggcctagtgcacaggttaacaataaacttgggttgctgccttcaattactcaaatgccaaatctaattcaaccaatgaatgtggaatggttaaaaatgggggtaggacacctcgtcctcaagttgagaagcctttgaagtatcaaaaatgagatcccgagagctcgggagaaagtgcccagcatctaggttgacaaaaggtctggcgcgttgggttctgcttatctaattctaatcttgtatcgacagtccatctagtttgtcacaataacatagatccatgaagtcagagaagtcaaattcaaaacttttcatttctcatttcaaactcacttggaaatgaagattttgagtctctcatttctacaaaagaacattatttctgagaactggtgaccagcttcgccagaacacagaatcagactaagtgatgtcaaaatatcacttagacaccttaaagtacatctcttagacgttttttcacttatccagcgtccacgttggcgtcatatgtcaacctgggcgctgggatgtcaacttcatgaactatcttgaataaaatagccataactcactcaatatttattcgattgacgcgattaaacttgcatttagaagataagtcaatgctctatcaagtgatacctcacacttcaatcgtaattctgaatctatcattgtcaaatttcattccatgggagttacaataacaagctctgagttacccacagggtaaccctttgggctccgaaaaaatttctttctccaccaagagctaatttttaccattagatcatcatctacggtaaaaaatgtctaattttcattttttcctatttttgcaggcttccttcacctataaaaggagagctccattagctcattttttacatttaaaaaactatccacaaggtgagagcatctttctctagaaactagagcttaaacacttagcctttttctataattctcgtgagaaatagaaactcgaagtagacgtagctctattaccatcatgacatggggaatgaactactataaattttgtgtgtctctctaaattatttacttaaacttattaatcatctcaccaatctagcaagttgatgttggccacttttcaacgtcaacattttggtgcttcattaagagccacaattcgagttccccaactacagctcaatttctctaccaagaactttgttccaaaaggaattcataagttcaagcaagtaat

SEQ ID NO: 20521 - DNA, 5994 bp, Cannabis sativa
aaacgggtattgggacgggtatggggtgaatttaagaagcgggtatgggggtgggggagcaatccccgcacccgccccgcctcgtttacatccctatacataagacactatcttttgtaaaaaaaattacatttttacgtttaatgaattttttctacttttttataattttctgtaaaaattacacgaaaacaacaagaaaactacataaaagtaacatgaaattaacatttaaataacatcaaaaagaaaaaaaaacatacatataatataaaatcatcaacaaattaacatgcatacaacttaaaaatatcgtattttttataaataaaattaaaaaaattataaaaatatttaaaattctgtgaaatcgtatttttataattttttttttttgttgtctcgttgtatttgtaaaattatcccaagaaagaaattggtccaacgaaaattggaacataagaaggattaagtcataattggtgaaaacagtaaccggggcgcgccaaacatcaccagcaggcgacctaatcaacataatcaataataataacaggataagaagaaagaagaagaagaagaaagaagaagaagaagtgaagaacaaaaaaccagtttccactactcacttcactttactctccattcttcttcttcttcaacttctcacctccctccccccactctaatggccgcaacagtaagcaactgttgcttctctctcctcaactccaccgttaagcttcctccttgttctgtttctactcgacccaccaccttctctacactgcaaactcccatttcctcactaactcccagtaatcagggcaacagactttatcgctcaaccaaagcctcatcctcatcttcatcttctcctcattttggcagagaggtaaaccccctacttttcccacttgattttcttctttttagattgtgtaaaatataattttggtttgaaaaagcgcagaaggaatctgtttctgggaaagaatttcgaggaaggagagatgaaaggaggtcgtctatttacgtagatgggtctaaaagtggcggaaaagctcaaacagcagcttttaaatcatttggaacacagaggaaggacaagaaagataaagaaaaagagtctgtgttcgatagaaaagaccagcaggtatggtatttctcagtgtgtacacacacatatattgatatatatatttagaacagaatgtgttactgggtatttgctataagaagttgtcagtgctctctaaatggagtaagttttaagatggcttaattatgtgaagtagaaggtcatgtgtgggagaatacagtgaagaaagaagacaacttttgttggagcaagtttgcagagtgtttggttttctccaatgttgtcttgatcagagaattgttcttaatttcttcaggttgaagcgggaaatcttcaagatgcaacctttcttaatgctgttgttaaggtagaatattcacccccttttagatttagaccttggatatatcataattacgtccaaggaggaatgctttaactaatttgatatgctatgtgaacctgtttaacatctgagctgactttatgggcatactaattattactggactgttattattatgaatgccagcatctaaatgtttaagtcatgctgattatatatttctctgtgcaatctctgattttttatttttttttgtaaaggtttactgcacccatactgagcctgactactctcttccttggcaaaaacaaaggcaatttacaagtactggaaggtatgtttgtaatattattctttttacttaacgaagttgaatagtgaaataataacttattaggtgaaactacatttttgtttatgcagtgcctttatgatcggtgatggaaaactgttgacaaatgcacattgtgttgaacatgaaacacaggtaaatgcactacattgtattgttgttatagctaacaagatattgtcattgtaaaataacgtttttacaacaaaggttacagaaattggttttaactaaacacctttgagttgatgaacttgtctaaccattctctcaactaaaaaaattgtcagtgttatatgacttttctctgcccctttagagacattgatcacatacgccatagggaaattatatttttgtttttatttatcagattgataaatcagattcggtaatatatatctttggtttttgtcagtaactattgcctgagccttagataatttggatattctcattttgcggtttgagaaagcgtttagttagcaaatcaagttgctggacctggtattgttttggtaaatttgaacagcaatgtgcgctactgccaactaatttttcttttatctttgaaatgatttcaggtcaaggtgaaaagaaggggcgatgacaccaaatatgttgccagggtatttcatttcatttttttatgattgtgttatccaatttgaatgacccaagttgttacttgcagcttaccttccactttgtaaactaactccaggttttagccagaggtgtcgattgtgatatagctttactctcagtagatagcaaggaattttgggaaggagctgaaccccttgaattgggacgtttgccccatcttcaggtttagattacatttactttctttccttagtgggatggtgttctattaattaaatgtcaatgattctttgtttagttggtaatatctgtatcatcatcattattagtgtatgcctattccgaagagctaataaatgatcagtaatagacttgattgaaatattagtataagcaagataaattttccgaatagctataggtttattaaaatataaccaaattttatactaacataaggattctcattttgtatctcacactaaatcttaattctttacacgattatctcaataacacttatttctttgttttgatatcagtgtagtttttgtacctgtacaattttaccaaatgtagctatacttcaattaataaatgtcatagaactgtctaatcatttgatattgtgtcattgtgtgtatttaagcattttgtcattcttactgagcaggatgcagtaactgttgtaggatacccccttggaggagacaccatctctgtgacaaagggtgttgtatcacgtatagaggtatgatctcttacctaagtgcgatcatatgcagtaatgcttatttgataatgtcattcataaccagtttgatgtatcctggtattgtctcttgttatgctggttttggagtttaatttctaatgtttacatttatatcaggttacatcttatgcacatggatcatctgatttattaggcatacaaattgatgcagcaataaatcctggtgcgttgtatatgcaatttacgatttttttgtattattgctttgtcaatttagttactttctatcacaattattcagctgcctcaaacctttttagccatatcttatgcttccttagattttaggtaatagtggtggtcctgcattcaatgaccagggagagtgcattggggtggcatttcaggtaatctttctggcatgctgtcaaatttttctttttgccctctgatttctcccccttttcttgatatcctggttttgaatctgaatattttggagagactttaatatgttatcggaatctgcacaattctatcaatcatcaacctgtttctgatttttattttattgatcatttatgaaggcaatgaaagcctgttttttctttccaacaagttcccatattatttgtttacaagacacttcctttaggtctacagatctgaagaggctgagaatattggatatgttattccaactacagttgtctctcattttctggatgactatgagaggaatggaaagtacactggtgagaagctctttatgttcatctattttgagggtgtattctctctctctctctctctctctctctggtgactggggtaaatttgttacttgatttgccaactttattggaatcccatttcccaaatcatgtatcttctctctttctccgacttccaggtttcccttcccttggcttgttattgcaaaagttggagaatccagcactacgtgcctgcttgaaagtaaagtcaagtgaggtatgtcacatgtaaagcattgattggatgctagaaactacagtctaaagtaatatattgaggttttatttttatttaaaaatttcatatttttaaataggcttattggtaatatggagataaatatactttctgaagtgtacatgcaacgaaattggcgtagattgaaatatatactatgttagactacaatggtcttttaaagttcatgactgtgttagagaattgttttgtttgttgttcaatatgttacttgtctatgagtaatattattatatcatgaatacatggaagctttgattcttacatacttggaaatttaatcattaatgtcagaccatccttgattcttgcagatgctgtgataatgtaggttcagatttacctaattcatttaaatgcctcaggttatcccttcattttatgtcttgtgcagggtgttctggtgcgtagaattgagcccacatcagatgcatataacgtcttaaagcaggtatgctaaccagttgctaaagcaggacttttctgtaaagttgtacgtggactacttaagacattaacctaatgagaaaccataaatcactattttagaggctttgttgttaagacacagctttctgttcagtggttaacactggcttgtacatttgaatattatgaatttggactggattgtaaggacatttaaacataaagtgggaacataaagcctagaaaaactgataccatatttgttcataaaggtcatctgggatatttttttctttctcgaggtgtcgaaacagctgctaaaacttgtgtgtttctaaatgtcatttcagttttctaagtatactttagcactggaaaaacacatcacttagtatttgcttgaacttctgcagtgtcaaaatatttcaaattcagtgacacagaaaatcttgctcttttacagggggacgtgatagtaagcttcgatgatattcgtgtaggatgtgaaggaacagtgccattccggtcaaatgagcgtattgctttccgatatctcataagtcaaaagtaatgcattttgatcaataaaaatttcgtttagaaagctttattcattttgctttctacgttgtgtacagagaacttattccttgctgtcctacttcccttgtccatatttttcatacttttaggccgttaaattaattcaataatgttccggtgctcttatgcagatttgccggtgacgttgcagagcttggtgttattagagctggggaatttatgaaagttaaagtagttctaaaaccacgagtgcatttggtaagttagtcagatcctgctaattagtggtgagttttatcacaaaagtttctaatcccaattactttgtgtttcttgtactaggttccatatcatattgatggaggtcaaccttcttacttgatcattgctggtttggtgtttaccccactctcagaaccactaatagagtatgccacattggttttatgacacttggaaatgtagtgaatattatcctaggctagaagtgttctttaccttttagattgttattgctggtatcatttgtgcacttttttattttattaatttccttctaatattttattctttggacagagaggagtgtgaagactccattggggtatgtactgctgtacttgaaaataaaaattgcaccaaagtacataatttatggtttgaaatctaatttcttagcctcttttttgctcagttgaaactgttgacaaaggcgcgatactctttggctaggtttaaaggagaacagattgtactcttatcccaggtcaactgaattcattttttttttccacagtattcatttgagtagtgatattttt

SEQ ID NO: 20522 - DNA, 5091 bp, Cannabis sativa
tttatatatgtgtgtggatttatgcatgtacatattataaaacatgagtaatatctaacacatttaaatgtcatactttataattgattaacaatattttataataattattgaattaaattatgtggaattcaataattaaacaagttattaagtaattatatatagtaccttccaacacactattaatgtataattataaattacaatattatatatatttatatattacaatacatgtcatatatctcatattacattaacatataaacatatagacacatgctgattaattatgattatttgaaatagtatatatcataaaattaaaataatcatgttcacctgtaatctcttacttttactagatatagttctcataatcttacgtttattatatagttttcataatctcgattatttttccttcatggatagtattctttaattgtatgatgcttagaaaaaatttaaaattatcaagaatttactcaataaaaaaaattacaaccaaaatcttaaaatacaaataattgttacatctcatccaaaaattaagattcattttttattgtaaaatatttacttataacataccatatctcaataaaattataataatttttcgaccacatgtacattataacttgagaaaaagaaaaagatatacatataagagacaactatatgtcattttcataatttaattctcattctcaacttttattatattttccctctatataagattcagacaaattcaatataatgttcatataaatgttagagggtatcgtatacttaacattcttaatagtatataatattattattagtgtaatttataacattaagtcttatttattttgctttaacaaaaattataaaagaaatattaattaataatagggcatcatcttataatagtgctagataatctatagcaatactctaatatttattataaactccttggtcacttccacccaaaaaaaatcttccagagtttatattcaatgatttaattcaataaatattattttcatataaactatttgaaaaaatggatataggcgtttgattataaactaacatttatatttttactatcggttcttaagacctacaattaatataccattgacacaaatttgggtctcaggtcttaatagctagcgttggttacaaacagagaatattgaatattattgtcgatcaagaaacgacagtaaagagggagggatttcccgttagttctggcataatcctaccaccattttcgtgtactcattctagatcgacacctatggtaggccatcgaattgaaacaaacgctattaagtctcaatagcatcaattgcagtttgatgttgttttgtatgattggaaaaatacaatctaaatttggcagtataaactattcacaataattttttgaaaattttcatgagttttactataatgaactctgtcataaaaaataatcaggattaaaatgcttaaattgtgtcaatttaagggcatgttgtattgatacaaaattgtgatgtaacataaacgcacacaaaaaattgagggggtcaattcatgacccctacccctacataagtctgcctatggtgtatattaaggaactgtgcattgacactttcacactctcgtacaaaatcgcaacattcactcgtgcgattgacctttctatatgagggataacattgattggttttgcgctattttattaggctcattagggaagcggctccaaccccaaccaaccttacgtcgcaaactgcactgtgttgcaatcctcgtaggcactcgccttgactcaaagcctccttccatatagcacactccatgtagcggaataaagcgtatgtgtaatttgtataatttatctttttatcttattgttaggagccttttcattttagtacttaagacaaattataaattatttaatttttcatattgatatacattatataagacatcatcacactattttttttaaaaaaaattatgaataatttattatgttgaaaaataattccaaaacaatttatatcacctctatgcaaataaaatttaaagtaacttgtgtttaatttgaaaataaataaataaataataatagtggtagacttgagtgtcgactagagactgcgcacctggttttgtaaatttatttatttattttcttattagaaaatattatttatttattttcatatttggaaaataaatacagaccaaagtcaaaatatcaagaacaaaaagaaccgattctcttctcttattattaagcttttggtcttctgatatctccatgagtcactatattcggccacgtaagagtccaagattaaatccccaccgttggatcatttctttttctatttccacatacaaagtggtcccctacaaaggttttgagatcataatctaactttataagcttttgatcatgtggaaaaaaagaaagaaataaaaacgtcactgttgttacgtatttttttttaaaaaaaaataattgagaaaagaaattaatgtcctttattcatgatttaccgttggattggaaagctgtgaacaaatgtgtggtgaagatctaaggagaatgagtcgaatctagtctcttaaacaggaaatatgacctgttttgttataagccaaattaatataaacaaataataataatatatataataaagttatatgaagaaatattggaatgtgggtggacaggtcgatgtggggttcattagattttttttattaatattaaaattttaatttatattaattaacagcaaaagaatatgccaattaatattctttggctacggcgcacgtgcaatgtttcatgcacgagtaatttcacgtgacaaccaactaatcccaaatcaataataacatattataataattgttaaaagaattactagtgtctaatactattttcggtgtcatactcaaagtcagttttaagagtaaaccagttaggcagtacgtataatattattattcaaaaattaaaaaaaattaaatttataatatttataattttttaatattttattttttattttataattttatttaattttaaaataatttttgaaataataatattagattgtttcaaaaaaaaaataataataatattagatgtattaacataaacgtatcatgtatataaaagtgtatacataagcagtccatggtaacagttaactgtagaaaatagataacactttaaatttattaacagtttaatagtttaaaaagttttaccactaagattagaactttgagggttaagtacaagtgaaacaatagttaagaaaatttaaccgcaaaaaactctactttttttctctacatttttcttactttttattttcccaccaaaatcaaactttcaaatataatttaaaatatttgaataagaatcaaagtaaaacaatgctacattattatatgttctaaactacgtacttcattttaaagcttatttaaaatatataatattcactactttaaataaattttattaattattttaggttttaatgtatataatattaatattaatatattttaaatatataaaatattctaaaatgttaagtaaagtatatatttcaagtataaaatattttaaatatataaaatatattaaaattgttaaagaaaataatatttctgtaatgtattttgaagaaactaatgtataatataataaaaaacttaaaataaaatacaaaatgaaattggtagtgatacattttgaataataaagtaggaaagctaatataatattgagcaatgtattttagtatgtttgtaatttatatgtttgtttttttaaaaaaaaaacttttaactttttatgattatattaataatatcttattattgttattataagataaggtttgtctttatgtatcaaagtattaaggaaataaatcacaattttactttagagcatatgcgatatgccaagtggtcccacaagatcttacctttggaacttaattactcacatttaattataggacgtataataataatgataataataataataataataatagcattgctattaagggttgtgcttagtactgtgtcattttataattgaatatcaatattttttaaaagctattatattaaattatataaaactcaatatttaattacaccaacaacaatatttaatacgtaaaaaggtgttagacgccattataataccttttagtatttctctaataataataataataataataataatatttatatgaaaaagagaagtgtttatatgtacatttttttttttaatttttaattttgttaatttattgtgaactttaggaatgggcatggggacatttcatttcaaatatggccaatcctcatatctaagtggcaccctccaaaatcttctaaaacgccctatggttttcatttttattaaaaaaaaaatatatattttgtttgtgtttgtgggctctaaaataattattaattataaatattaaaataactggtatctaaacccttttatatttgtttttttatatacgatctttttatttagagcccccacaaatataaatttgaggtgccaataaaatataactgttaaatactaattggatgatctttgtgcatatttgtgtatacgtaatagtaaagcctcgaaatcaatataataataattcagttgatatttaacggtgataactaactgatatcttaaatatgaaaaaaaaaataaaataaaataagcataaggtggttttgttaaaaaaataaaataaaagaattaagtgtataaaatcaaaatataaaaatatttcgctactaattatcctaaaataataaaaataaaattatataataaatttatttacataaactgaaataagaaactaattcataccctacatagcaattagcaaatatataccaaaataaaatagtagtatttatacatataaaaatactctctagagactaagagcatgtttggtattgttttctgttttttgttttaaaaaattgtttttagaaatg

SEQ ID NO: 20523 - DNA, 3404 bp, Cannabis sativa
aacaatcatatatttagtctaatatacactaatagtaggagcatctccaatcatgctttttaaacacactatttaattaaaatagggagtaggtctttaaaaaaaatgaactgaaactatacgaaaaaaaattactttctataatagagaatagatagggagctctctaaatatagggagttccttattaaaataatcaaatattaactaaagtagaaaacatgattacagtaagaataataaaaatgactttttatttaaaattttaactattttaattaaaatttgattcaaaaatagagagtacaattggaaatcttcctagaaataaatttgcaaatttaattatgaatacaacaaatcttagctaattaaatatgtgtctattattatttaattttttgataatgaaaaaaaaaaatcatatctaattataacaaaacaatacaatcatcaatcgtagaaagtaaaacaataattacacgcgggtacagtaattaatcagaaagccaagtccaatttttttctttttctttttctttttcttcttcgtctaaatataagaattactctataattataaccattgggttttggaaagtaagtctgaaccacaaacgttaattataggtccattgaatgatatcgtcccatataaaaccgtacgtaaattgtgtccatctcttgaatataatatacatataaagaattgaaaactagcctaataaccagcccctttcgtcaaacttgttggtctccatcttcaagtagtgtccaaaagggattggttagacaggctacattattatatattacatatattgaatcaaatataaataaatggcatcgagaaaaatgatggtggtgatgatgatgataatggtgatgatcgcagtgggttggatggaggtgggagaagcagtccggtataggacagtggaaccctgcttcaccaactgtataaacaattgcatggctgttgggagctcctctcctttccattgtagcaatcaatgcctgcctttgtgctccagaatggaatgcttcttttgtctactaaagaaacaagagtaatcattataaccctccttctttttttggttttttttctgttcttttttaattatataataattactaggcctttgcaaacggataattggacaaaagaaattaacaacattctttttttgtctgatttgtatgtttatttttattctctatacataaatatatctatttgtgaaagtgaaacagaatttatctgtttttgtttctcggttatggaagaatatcaaattctgatctgttaaaaggttaaagccgactttttatgttgaaattgattgttaagatcattttatacataattttcttcaaattagtaaacgcatgtgcgtttatcatagatcattcatataaaaataatctacatactgttcatgctttaaaacatgaatttcttattttatatatcaatttttctctcttttactttctattttctagataaaatattttaattgaataaaatataaaaatttaaataacgcaaaataaaaaaataaaacaactcatgtaagctgtaatataacaaattatggatttattataaaaaattaaggtaactataaatcaagttcacaaggtctttgattgtatctctgagtgaccaatattatgtggaatcaaaattaatcagtcatgccgatcaatctttaacaaaattaaaactttcaagaatttgatacaaacgtagaatagtttaaacagaattataatgatatcacctatatctccatgcaataaaggaattagaatagatgcaaactagaatagcagtactgttagtcaaatgaacataaaagatctaattcttaacatatgatttgaagagtaacaacagcaaattctataagacatcatatgttacaatcggatgttatccttgcaaggggatctaaaatgttcatgcaccaagctcagaaacagcattgcctggcttctgaattcagtgttataataaaaaaaactcaacagcataagtaaccgttgtataatttccattcaatccatactccagaatggtaactaaatcttgcatattataatccataatcatgtcttttagggaatataactctaaaaaggagcagagtaaaacttcaacaaaaattcaattcacaatctgggaaaagaaacacaactaacaacttagtagcccttatttcctcgaattcgcgctctcatgtcaacctgaccacgtttgcaattgaagtatgtctccctcaaaccaacacattcactaggtattgaaggactcttttctccagcacattctctaaacgaccggttttcgaccttaacacagtcagattcaccaaggcacttcaccaactccattgctaggcccttgcaagattttgccattttctttatttctgctcccttcttgttctcaaatttcaactctaaccaaacaaaaaaccaaatatatgcagacacagcaaaaacaatcaaaccatggctcatgaaaagtcacgctctgaactaaattattaaaaaaattgcgaaacaactcaaggaagaccacatgcatgcctattcattatgtataaagattcattaatagaaaagaaggaaaaaaaaaaacaacctcaaatgaaagcaaatagagtacagtagtaaaatctgataactacacctgaaaaaaatgggacaacattttacctactttattagcctaatcatctaccaatcactaaaacacaacagttattaaccttccattatcaacgcaaactcaaacttagttactgtgttactgtggaaccatcccaaacaaaaagcctatcgcatcaaattaaaataacaccaaactttgacctagaataatgcaacaaaaataaaacttttacctattgtcatgacaaaaaaaatagtatactgaaaattatacacaatttctaaaatcatcaatccaacatagaacatatagaaaaattgcaaaaatatgtataatttcaaagcaaagcctcatataagagcaaaataaattatggaaatataatttcataattatgtaatgaaacataatctaaaaatcctcatcttttacgcattaaattctcatctttcaaggaatcgaaataagatagaaatataccctttatccgtattgactaccggaggctagtcccgactcctgctggagggtcaccggagattttgaaggaaggaactcagagaccaccggaggttgaaggaaggagctcacagaccaccgctggagccggagacgattaggggttcgaacttagtttgattttttttttttttgcctttctgagagagagagagagaatcgatttagggattagcaggttagtcgattccgcttattt

SEQ ID NO: 20524 - DNA, 2065 bp, Cannabis sativa
gaggtggttagtgaaatttttgttttttttttgttttttaaaataataatccattttttggggttcaacaaaagatttctggatttgcagccttaatgaaatattatattgaggtgtgtattattggtgtctgcagattagtgtaatttaattacaaagaaagatgctttgaatgtggtgctgttttgaagagaatagttacaaaagctttataatttattttattagtaatgataagaaaatgagataaaaatattggtagacaattttattgtgacagtcttgtctccatgaattttaattaaaaggtccaattattatgcgacgtgtctagaatcaattgttttttgtttttcctgctctttctcatgattaattcattaatattcttcttcttcttcatctttttttattttaattctttacaaaatttacaaaatatttatttatttatttatttgttgagaaataaatacaagatgttaagatactacaccttgacatagtctgtcatttgcttcgctggtgtacacaattaaattgttcttttctttctaagcattaattcttataataacactttttataaaccaacccaagtgaacaagatgctctcttttttgtgattaatcaatatatataattcacataaaaactaattttagctatgtgagaaacaagactttttagagacactagattagactatctttttactattttttcaaactacaattttggctcattatatgactactaccaaatctaccctagagtgaaaattcttaacaatttcattcccaaaccctagaaagatgtcttttctacccacctatatcaaatgatgctaattttgttaagctacattataattgtacaagagaattttttttgtgggtcaattgtcaaatcattaaccctaaaatctatgtccttaatggaaggaaaaagctttcattttcccacattaaactttcccattcttttttttttattattttttatgttttattttcattttgttgggatatgaagaaggtactactaatatcccatatggagggtcctaataaaggactagaaaaattgagatcttacctagcaagaatgtttggagagacttaaagggacaatatggtagtttttaagggtattataatgagttttaataggtaggataggaatggttggggaaaatgaaaaatgttaaaaattattatttaaggtgttatatttttattggtgtaatttaatatcgagtcctatttattttaatttaataaagattataaaatcgctaatcaattataaaatgacatttcataaaagtgctaggtatgctattgtctcataacaatacttgttataaaatattattaattatttgtttaaaagccaataataatacttaatagtaatgcttggtgccctattaatccaactatcactattctctaactcatattttctcattttgtgtactattttcctttcacctaagaggctttttgaggatttagtttatataattaagactttgtttggtgtttgcttgttttggggggtaaaaagaaacaaaaccatcatttgcttcaccaacctatccattatttcatgctctccaactgtaaacgtgtttttgtttgtattttaatttttttttttttttggggggttttcaaaggatatctctcactgtcaaatgaaccaaactccattctatttttcaattcttgaaaattaaataattaataattataactataataatagtactattaataattacaataattaatatagttagtagaaaattaaataattgataaaagggtcattttcacatctgattttatttcaagatttgaatttggtagattgtctaattataatataataatatcataatttcaaatttagatgttaatttgagagatgccacaatctatggaaaaaaatactaataattatatatttatatagatatgagagcaactgtaatagggatgttattttcaattattttaacggttagaaaaaatttctttagcatttgaagttatta

SEQ ID NO: 20525 - DNA, 2146 bp, Cannabis sativa
ttgagagaaatggtcatctaccgtttctctccttttgtctgtaaggtttctttgtgtttatcctagtgcatctctatgcctactggtcaatgtgaggtcctgtgttttctccagacctcttagtttcttgcgtgtgtgttatatgtgacctttttaatgttttcttgtctttgtctcttgtgtgtgttttgagtggatttgagtgttggtgttttaaggtcagccgttttctctctgtggttactttatttttttctccataagtttttggtgttggtctgttattccttttgacctcgtgtaagtttggtgtggctgccctgttcagtgttgagtgtttcttgtttgctttaaggttggtggttggtaagattctgttaggtgtgaagttattcattggggcccttttgttctctgtctacttctgctagtatttatggaggatattattgcaacctcttctcctaagaaaggcatgagcttttcatgcaacgatacttctgtgactcttgttccgtgtgctgcttcgatcaaggccctgtctacatgctgtttatatgggaaagtcgtagctcccatgactgtggaagaatcatctgtgtgggagtttgtggcaaaaacatggaagaaaccggtctctgtggtgtccatggcggatggtttgaagatgtctaatatcttcaagtttgggtttgattctgctgaagatagggattgggctcttgctaatggcccctggtgcgttcgtgggtacaccctggtattgcaagcttggtcttcgagcttggaaggctctgttactttcaatttgttgcgggtgtggatacaaatccataaccttcctcatgagtttttctctcgcgacaatggacacttcctcgggggactggtgggtaaagtgataaagattgatctggaggaaggaaaaccagtcacttggactccattcatgaagatattagttgacattgatgtccataaacctctagtgtccgggtgttttttcgacttgacctctggtgagaaacagtggttgcaagttaaatatgtgaagatcggtatcttctgttacttctgtggatgtctaggccaccaacgcagggggtgcaagttgtcgtcaccggttacggtggcgaaggaggatggcgttccgtttcctatgtatggcccgtggttatctacatcctcagcctatcttgacgtattctctggaccgtcgtttggcaaagcccgtcaactggtatcctcggaggtggctaaaggtggtggagaaattggtccgttggcaactctctcggccgatggtgttaactgtgcgaaaatcagtacaggccgcgtgcacagacgtctgagacgtcctctgggtttgcctgcgaatgcagcgtctggttctgggaaggctcagcgagccgtgtggttcccaaagcatagctcggttggcctggagaagggtgtttcttcttttagcaatggtggtatgaacggctcactggacaaagagaaagcttttgtttctcttccttttttaaatgatgttgatgttgaccggtcaatggggagggaaacgaatttgaataacaaagccgtttctttggctttgggcgagggtgggcctgctgttgggccgagattggtgaaggatgggccgtgctttattattgaggatttggagggggttagggattgtgggccacagctagttggtagtgggccgaatgggacagttattgatttatctgaaaaggccaaagcttttaattcaagctttgggccgaaggagggggtgattagttctaataaagaaatttcttctcaaatgaaggctattgggccgagggtgcttaattctctctctaccccacctgggccgcttcttgaagaccaagtggtcaacgctcgggatggaagctcttctaaccatgctagtactcaccgtgagtctatggttccctctaatgaggaggtggctttggctcaatttttcaaggctcaagaggatttaatgcatgaccttcggcattttgggaagcttgacctctatgaaattaggaggatcggaggtgatattggtgttccggtttcttcggaagtcaatgaaaggacgactcctttcaaaaaaagaaaatttgaatcctcggcttctctt

SEQ ID NO: 20526 - DNA, 2808 bp, Cannabis sativa
  modified_base (43)..(48): a, c, t, g, unknown or other
  modified_base (895)..(907): a, c, t, g, unknown or other
actaaaactaaattagttacaagtaacattttgttgtgactannnnnnacatttagtcacaaaaaaataatattatgactaaaaatttatcactaaaaataacagtttttatagtattaatttgatggtcgattttaattttttagattgtatgaacactcctagtaattggaagccacacaacaacctctttgctcggatgtattgcagtccacgtccaccaactcaataaatccccactaattgatcttatttctgtgaaaaaaaaaaattaacaagatgcaaattcttacatattttgattcaagaagaaaaaaaataccaaattatagaaacttgaaaaagcaatatatattatcaacgttcatgactagtatttatttagttagaaactttcgacgaaaattgaacaccttagaaaatgaagttgcgtatatcttttccaaaaattctctttttctggataactttttgattatgaataaagttccacactataaattcttctgaaagttcaaagaaagaacatatttattattgggtgaacaacacacccaaaaaaaaaattaaatttttttttttaaaaaaaactataatttttaggataataatattttgaaccttgtgttttgtaaaagttaataattaaacactctgttttgttaaatgataaaatagatcttatatttttcaaaatagtaaaaataggaccatgaactcaatttttaataaaattttattttataatataactaactttaagaaaattttcaataaaaaaccgatacagaaaatataattagttttataataacatcactagatcggattatacaagttttattttgataaaaaatcagttcagggtcttgtttgtacaattttagaaaatacnnnnnnnnnnnnntcatttaacaaaacaaagagtccaattaataattttacaaaatacaggatccaaaatagtatttatcctaatttttataaatcatttgctcatttattttcttttaatttactcttccatttgtttttcttcttttctaacaaattttcataattagttcttataatctaaatatttaataaaagagtaatttacggcgtaaatattaagtttgacttccagttgtaaataaatacttaagtttaatttttggcagtaataagttatataatattaagtcattattcacgtgtcattttcttattggtataactattttttttttttaaaaaaaagtaaaaatttaatgacttggaccaatcaagaattgtcacgtgacaatttacttaacatttaacagtcaagtacctacaaaagttttagaattataacttaggtattattatcgcaaaaaaaataaacttaggtatttatttgcaacgagggttgagcatcggtcagtttgatcaatttttttctatataaaaattcagaatttgattttcggtctagattggtgcaattcaaaaactgaccgaccaatccagaacctatcttaaaaccgaccattttgaacctcggtttggtcggtttaaattgctcaaactgaactttttttttaaatataatctaatttattctataaacacattattctacattttaaatatacaaattaattgttcattattttctttaactttaatattaataaaatatattattattatatattattagtaattacaatatataaagcaaaaaaaaaaatataaaattaacatatatgtataacggtcagctttggttttttcggttggtttattacccaaaaaaaaaaaaaaaactgaccattcaatggcagtttaaaccgttagaggtttcttcggttatcagttccaatggtgttcggtagatcggtttgaacggttttttcgattttttggattaattttacgcgcgctcagtcttatttgcaactgcgagttaaacttaagtatttatatcgcaaattactttttataaaattacattaaacgtacaacaactcaaccttgggacctattctttttattagaaaatatatagtatcattaagttatgcttatcgtttatgcatttaatgataagtgaataacacacgacccaaaagaatattcaaaagtttacctaaattattatttttggtaaaattttaattttttatagtaaaataaactttttttatatttttacaaaatattatttttcaattttacgattattattttatttagttacaattttgtagtgtcttataaaattaataaaaaaaaaactacataacgaaaacagaaaaataacatcaaaacaacatacaaatcataaaaaaaataataaaattacaatataaaaataaataaaaacatcaacaatcaataatccatatttttttgtaaataaaaatttacaaatgttaaaaatatttaaaattttctataattgtatttttaaaatttgttttaactttttaaaatatttatgattaaatatcccaaagaaaatttatatctatatatagatagataagcactaccatatcgaattaattcattccccacaaacgcacgaatcatacctaattaattatatatatatataatatctgaagagagcttttaatttggaagcccattatatcatgtttccccataaatggcgcatattaatttacaacatctaataattagcaaccttaatgatttacacgatcaattctaatcacattatttttggattatttatatggagaagaaaaaaaataataatatatataacatacaattttttttttttttttttttttttaaggaaaatggtaa

SEQ ID NO: 20527 - DNA, 6380 bp, Cannabis sativa
  modified_base (36)..(39): a, c, t, g, unknown or other
ttttttcagtgtcggttttttcggtgttcggacggnnnntgtattcggtttggtcggtttttcaaattttttgctcacccctattataaagtgtataagtgatataaaataaagtgagaatagtttggatagttttttgcaaaagctgaaaaatttgataactgttttttttagctttaattattgaactttttttaccatagagatggcttttaacaactctcataacctccaaatcagccaatttaataccatttacaccccgttaagaaatggtaacagcccttgtgtgtaggttatttgaatttcaaagtgatcctaaacactataaatagatatttttggtttacttgtgaagacacattttttgtgagtttctatcaaagagagcaccttgctagaaactataagcttggtaaatccggaaagctattttcattctttcatttttcctaagcgcttgtggtagggaaaaataataagcttttggacaaaggtgcatgaccttgttcaagtttagtgattcccttattatatacttatatatggtgtatgtggtgttaagattgttctcacatctcttatatgtatgctatttatatgttgtatgttatgtatagtttattgctttgagttgtaatttttctcttcatctctattctctattttatgtgtatagtgttgtaacattatttaatctatgatccattttgtcttttgtattatttatcatagagttgtaatatcctgttggtttggtatttctattggattataataatttccaacatatgtgttgtgaaaaaaaaagagaaaagaagagagaattctatttcttgagtaaaaacgtaaaaatgtggcttaaagcagtttctaatttgtgtttgtacaaatgagtacaccgaccaagaatctcacactactaatttgttacaactaattacagtttaagcgaattaaagttttaacacaaaatatctaataataccaaacattcaagaaaaaacattatattgtcatagagtcagagaaatatttgcccattttaacaatatactcatctaaataatattcatattaatcacttacttggtccttctacgtccataattattatacaattattacaccactaaaaatgcaccccaacacttattattatgatcatcaactcaaaggtgaccgttgaggaacacccttccggcgccgccgacgattaccgccctcgtccacatccacccccggggaactactagagttagtattattattattagtacgggcaacgctggtggagctagctgagccgggagtactagaactacccattgctgttattccgtgatcatcatgatggaactgttattgtaattttaattttgtttatttattaaagtttaaacgaaataaattacttaatatattatataataaaattaagcaataaagggagaaattgaaaaccttgcaagaaagggagcaaaagctataatctgtgttgtggagaattccggtacatttgatgcaagatttctcagaagaagaaaccctaaatgatgatattggtcttggcctcaaaaacaccactcttgtctcgttcgctatgtatggctatatatttaataaataaaatttatattattaattctttcttcatcatcaagtatatatatattagtaagaatatatataaatatacttacatcaacagaagaacaattcaacgtttttgcatcggttatgcgtatcacatcctgatacatataccttcttatctgtaattatcaaatcccttatataaatatagtcattgctattatataattgatcgatgggttatgtaggaataataacataatataataaacctgtaagagagagtgacgattatggtgtgataagcagtgagaacataaggaagtacagcaatccaaacagaagaagttctttcgattcttgttcttgttcttgatcttctcagtactagtaatactgctatggacactgcaaactgtaaagaatttctctcctaaaagaatttcaacccattcaggtacttttactgatgatgaatccaaaccatgctgatcgatcgatgcacaccataaaaaaacaaagaataaaaaatcattaattaatcttttgtttcaaaataaaattgaatagtacttcatataggaataagaaatggaaaacatatatagtaatttgaaatttaattaaactactcaccattttcttcatcttttgttttaatgttgtgatagtcaggtgagagagagtataatttcagtttgattatctttataaagagtcgagtgtggtgcctgtaatttggttttgatatatattaggatcctagtgtgccaccaccatcttatgcatgggttaattcataaaatcggtcctaaaaatatatgctatattgtttgtcggtagaaaattgtaaaaaaagtattttattattaatcttacatattttaattttaaaataatataaaaaggggaattttttttataaatatacattataaatatttttttttatgaatcaagaaaatttgtattgctcaaatatgatttttgcaaacaaatagcacccataaaggcctaaaaacagtatgatctatacatttatgtacaatgcttacttaaatctcatccatacaattcgaatgcttggttacaagctttaaaaccaactggcatcctctatactgacttttttcagccaacatatgctaatcctttgtgtaacagtctgctttagacccttgattaacacttctggttctgcttttgtattttcccacaaattgacatttcgagctctccatagtgtatacactaagcaagagagagcatctgcaaacaccttttatctgaatttactaagttctgatctgccaatccatctggtgaggctaatcaaggtggtagctgctgcatgccattgtaatcagtattttgtatcatggagacaagcagctgcaacaaggcattcgaagaagagatgtgatgcaatttctttatgcaagaagcatagtacacagtgttcatctactgctaaccccattttcagtaacctgtctttagttttgagcctctgttggattgccaaccatgtgacaaagctgtgctttggggtgttcaatctcccccaaacctgttggcaccattgcaccttagtttgatttgggtagagcagggtgtaactcttggatacatagtaatactgcataaagagttgctggcctgcttctaattcgttgaactgatctttcaaaattacaaggctttaccagctactttgtaatggtgtcttgtaattccaccagtcattccccttgatgtatacacgatgaatccatatcagctataagctatcttgcttgtttgcaatctcccatacattataaatgttaaaattacatacacgttgtttaaaaagaataggtttatctaccttgccacgtcagcaatttatatcgtggctgctaaagttaatttcaatcgtcgaacgaggaaataggacgcgccaaacaatccatgattctcaaccttcccagcgtgtgcttttcaaaattaaaatcgaaagctatatatttcctcaagtctaataaacgaaaaatcaaactatcaaaccaaatgatatcaaaccagagaactccattgacaaattttttttaaaccacacgcaaaaaaaaatttgaccgatttgagaattggagaagaaaattggatacaaatttgttgttgtatacaacaaatcaatcatcatctcactcaattgatcaattcacctatcatctcataaaaaaaacagagcacgcaacttcacggaagaagatctacgattatatctttgacatcctaaacaagatcgcaatactactgaaacaaataaaatagacaaataatcatgaatcgtattctatatatacgattacaaataactgtttcaaattcgttttctgactttgtaaaaattatatactataactcattatacgattcgaaatactatatacagttaaaatgtatcatattaatatgaaattataatgtggaaaacatgtagactttgttaatgttgttagtaactaaacaaatatgatgtttgttatatttgttaaacattattatttttggttgaacaactaatctaatcaacatatacagtactaagcacctaacatttacaataaactataaacctttattattgtattcactcccctagtatagtttaaattgcatgctcctttccccacttgaagattcacctgatagtatatggtatatgatagtttattcatgctactcttattcttgttttattattttttttttctaatcgtatactatgaataattttttttttctgtatactacatataatatgaaaaaactaaacatttataatataaaagtacccaagaatatggatgttagaactgtgattcttatttataatggaacttaagttgacaaaactacacatgttgactatgaagttgaaggtatcataactccatcagattgttcctattatgacctttctcaaattatatatgatgctttgaagttggacaaaaacaactatgagattgatatccaatttcaagttaaagaagtcattccaccaataagaatcaaagatgatggtggatgcagttttatgaaaaaataagaaggaagaatgtaacgccttgatacttaggcacgctacaatgattttttcaattaatgtgctacctttgctaatcaaaggatttttcttgaaaaaataagaaggaagaatgtaacgcctttataatttttttttttgaaaattcagaatagtttatcaagttcaccaacaatacttacaagataaagtttacttacaaagcttttgttaaagcttccacccactccctatctattttactcaaattcttagctttcaaagagttcactctagcacaaacagtattagcaatacaattaaaagtaaccttaacagtagggagtttttgctcccaaagaaccttgtttctagcaagccaaatggaatatattgttgctgtaatgaaactcaaaagaacctttcttttgcctctagaaacttttgccttccgaatccactttaggacatcatggagctcttttttaaatttataaactttcatatatttatttacataggtcagaaacccgtatttaaacttttacaacattcacaaaatacatttataaattggtcgcacaacgaatacaaaatacaatcccaggtgtatcgagactgaacactccaggtcgcgtcgcctcgacatgtacaatcaccatccaagcccagagctcactcccgttcaaccttcgcctttaatttatctacacatgaaagtagcatttgtgagtcaacaggctcggtaagaaaagtttataacaaataatataatttcgacatgcatttaagcgcccacacaccaatctacggggcttaacagatgagtaagaacgttctttactagggtacaaccactgtaccacatatactatgcaccggtattatacgagcatcgatagggtttgtttcgtacccttggtaccactaagtgttgtactacacacattccgtacatgttcgtactagttctggtaacaccgtaatgtactctttacatgttgtacactataccaatgcactcagtaccactatcgtactagtgttggtagtgtacgaatcacaacaagcatgcatatatatcacacatacatacattcgcatatacaatatgatctatgctattcttacctcgtttctgaattcaagtgagttggccgacctgaacggaatacttcgtgctggatggatgccctagtcacattacaaaatcgggtaaacaacacgccaaaaccctaatctgggaatctcaaacccccaactaaaggttctgttattgacaactaatacaacattaccctaagtatcaaggaatcaaccaaccaaggctctgaaaataacacgaaatgacgaatcaaacaatttgggaaaccttcttctgttccaattaaccgattttacaggacctgtcaaaccggtaaaccggttgcaccaagttcccgcccaatccgtaccaaactttccagaacacttataatgacctcaaacaacatattccaagcaataaaatccaaaaatacacatagaatcaaaacatgccattaatgactcaagtttgagttttcaaactcaaacttgttcattcaccacaacaaactctcaaaccagctgcaagaacccaattctaacctaaattgaaccaagaaactgaaccacaaatcaaagtaacctaacagccactacaacacaaaattgcataatcaaaccaaaa

SEQ ID NO: 20528 - DNA, 2538 bp, Cannabis sativa
cttgattgagttcattttacacataatatatattgatgaataattttaacaacccactaactatgattatgtgaaggaaaaggggagattatttaattagttaggtaccttgaacttgctctagtgtagaagccagcattgatgctagtaccaccgcccaatactctggctctggcattaatgactccatcagtggaaacaaaggcttgggaagcagaggaaggagaggtgtcagccaaggcaatgtggaagtttcgtaaaaatgacacatttgcattggagaaaggaactcctcctctttcaagtaccaaaacactaaagttttgtgatagagttgcagccaacggacaccctgttgtcccacctcccactattatgtaatcaaaacgattgtcgtttcctttcgatgcaaacgacgatgattgggatgagaaactgcttgctcttttgataaatgggtatttgaattcatagtaccacctttcttttcctgcaaattaataaaaggctcactttgtttcactttactaatgtcttctctttttttgaaagaaaaattcagggaatgcccagttaaaaactttggccaagttttaaaagaaataaataaataaaataactattaactgatcatgctacttgcgggatctctccactgtagtactaaaaccacaaataggatagtgaatatatacaaatattctcttttgtatggtggagaaaaagagaaggggtttgatatcaacactaaaaaaacaaaaatccccttttgagatttcagtcttgaacttttttttttgttgtgaacaagaaaaatccaaagtcataaaaaaaaaattgtacacaaagcaaagcaaaacaaaataaaactcacacatgtatataaattataagtattgatagatgaaacaagagtagaaaaagcaagaaccttgagccaaggagactaagatggataaccataacaccaaaatggtgaagagctttgttttaccaacaaaagaagccattgaaggcagacaaaggcctcagaaaataagtcacagaagaaggctgctgctattactgtcttcaagctatatgtggctgcctctggttggtcttgttttgtgtgtgtacactttcttatatacttataaaattcaacatattttagaaattattgtactaataaattaaatagatttagataataaaatctgtttattattattattattattatcggcctagtattattttaataataattaaagaaaagaaagtgtagaaagaatgatgtacacaactgtatacatctaactggaactacaacaggaaatgacattaaatggtgaaatgaatgccatggctggagttaggaatgcgtgaccgttggattaactcatctcttgatctgatcgtctgatcaaacacctcagctcactcacaacctaaaccttgaccagacctagtgaagaggcaattattataattatgtcaatgcctttctttggtttctttctagacatatataaagagacttagttcgcattaatttcaatcacccttttaagcgtaacaaagtgttaattaagctattctttaaagggtaagtaagaaagagaaagctaattaaactgtcttagtctcttattttcagaataaaccaaacttattttttttgtccattaatgttgtccaaaaaaataatgattaggaactagaaaggaaacaagacaaccccagatcacataacataaagaacactcccaacaatttttttctttactttttaaaatacattatcaaaattctactttatttattttactaaaattttttacattacatcatcactatttctattactttctttatattttgtcttttaataaatatataatattaatatatatacataaactataaacaatatgccatattttttataaatttgtatttttttttactcttataaaaaaataccaaatttagagtatttatattaggatttctgctctaagttgcagagaaatgctaaaaggagtctagcaccattttatatgttatattactattattagtacatgatttaatttaagaactcttttataaaatattattagcaggtcaatcctgaacataggcgtgttaagtttgtgtctaggaccatttaactcagagccaaaaaaatttcccttcatttgcaagacaccacatcaccatggtgctaaatgttattgatgcttaataagaaatgtttcttcctaatatattggcaacacggttcaaatcccataataggagattcaaatgtaaaagtagcaataacaaatcacttaggaacagtggcggacccagaatttaaagtgagggggggcgtaaataaatttaaaaggaaaatataaagtgtagttagtgggatttgaacctttaccctctaacctatttaccaactaccttaaccattacaccaaggttaatcttatgtctatatatatcatcttttaatacaaatatatattgtaactaattaaaatacatatacattttttt

SEQ ID NO: 20529 - DNA, 1761 bp, Cannabis sativa
aaaaaaaaagaaaaaaaaagaggccttttcttaaaaaaaataataattgggccttaaaaaaatgggagccttgtgcaatggcccaagctgcccaatgcttgggctggctctgagctatgctagctattgtgtgccttccggatgttgaccatgctggagtagaacctcgcctggatgagttgttagttatttactgggaaggacaaccagtttatggatttggcccaacaatgccaatcatgggcttgttattgggtctgaagtatttgagctatatttattatttggattccacacgtctcctgtcaaaaatactgataacatttacccccaagcttctagaatgctgtgagttgcaggagcttgcttcaagctgcatatggatagacaggtggaggctaaaggtgaaacctttatagtttccagatacttatgtgaatggaagaaaattttccgtttttcgaatttaagcggtatgtgacatcgctttattaattggttcatggagcaaatgttttctgaggaagttcttggaacaaaatcattaaaccggcagctatttactttggtgcaagtctcgaggggaatataatcatgcatattttctcaattctagatatagcatttaatgcttgactgatggcattctggatcattagatttgttttatttttccttaagattagatctgaatccttgatctgggtatcacgtggatcgcttctttaaagcaaaaatatcttgaaaaaccaccatttaccacttttaccaaaatttaaaacttctttcaagtttatagagaagatatctaatatgaattaagcaattctggtgcacgatatcgactattgcattcatagtgattatttgcacatctttgaggtaaccctttgcgttggatcttaactttgaaataaattctttaatcgatcaagcttatgctattcaagaaagacttgattgtctcgagtgtccgtctatagaagaattcagtttgacaccatcatttggcgtcaacatctattcctcgaggccatatttctttgcatgtccaaaatcttcacccagttcttcaacatgtgatttttctctttttaacttcttgagtcttgattaatatttgaagtataatatctcattctgaaattacatgtgctttatttgtcatttgatgagtagaaattatgcatgtgactggattctgatagagttaggatattctggatattgtattaaacaagttttgcgtctagtgaaaactagatttttcattttccttctttggaaaaagttaacttcgcagtagaaatgttggcaaaatttttattcctttgtcctaaacccttatggttcaggacgatgcttttatcttcctttcgtttggctctcattgttcccaatcttaaccgtctagaatgattattccttaagagttttgattccagatgtaagatttgagggggacctctccaagcagtttatagggaagtatcattttaactccctgctatcttctttagtatgggtaattaactgcttgatattttctttcttatcctatgtgggaataatgtgtaatgttatatgtgatatgggtatacaaacaaggtatgagttgatttgatgttcagatattattatgtttatgactgtgttatctagttggggggggttatgtcctacattgctcttcttactgggcgttagcttgcgggtactttgtgtgcaggtaaagttaggcaaaactaaacagtgaggatg

SEQ ID NO: 20530 - DNA, 6735 bp, Cannabis sativa
  modified_base (1841)..(1859): a, c, t, g, unknown or other
gacgcacagtaacgaaatcatcatcattatcatttctcttcctcttagctttcctagcatcaccagagatagtagcaggaagcttagatgatggctcaccaacatcaacaacatcttttgatttttgatcagggggtttcgatattttctgggcaacagatttctgtttagatggtttaatagacttttttttttgggtttcttaggagaaagggacaataaactcgaacgagatcgagtaacaaccattactctaaaataaagaagaaatgaagaagaaacactcagaaaattaaaaaaaaaaaaaaaagaaaaacaaagaagaagatgatgatgagaataatgaaggagaaggaaataaaaattaaaagggaataaagagagagtgggttagagagtgataactggtaggagacgtgattgatatttgacagaatggaaggaaacatgtaggtagttaaggtgacataagcaaaaccatataaaatgtaaaaatttaaataataatcgtatttttgtttaaaaaaaatgataaaattgaaactgaaagtagaaaactgtaaaaatgtttgaaaagaaaaaaattggcattttatgtaaaaaccctatgttttagcttacctctgtgcggtgattctgtttgactgcacagaacagagcactattgaaaagcttttcttcagctttcaaattttctccacttttttataatttgtccagcaacaattctaccattttttttttggttgagaatcgctttcttttgttgagaaacaacttcagttctgttttttgattgaaattctggcgatcgttgtcgaagcttttttcttcgtccatagtgttttttttttggttgagaatctttttagatttgctattgctttttgcttacagtaacattgaatcaaatttgtctatagattcgatatcgattttgattttgatttttttattggagttttggttgtgtttgaaggtgttttttttttattttttttttattatcgttaatggggtttttttttcttgtaagaataattcaaattgatttgcaatctcagcaaatcgtaaatttataagtttcgtatatgcgtttgtgttttacacatttttttcaagtaatctcattccgtaaatcatgagttgattggcacattattgtttcaaaattgcttcttttttttttttagttatgtgttttttttttcaattatggtagaagatgactacgcgtcatggtattaggaattaattttattaattaaggtaaattttgttaattgaatatatttttagtatactattaaaaatttctcataatttttcttaagttttctctctctgttaaaatatttggataaggtggatgaggttccatctcaaaactaaactaattgatagtgggaagaataactcattcatcatatattctattatttttttacacattaagaatgtctctccaatcaatgtgatttatatgctacttaaggcatcaatatctttacaagccaatcttgaggtgatatcaattggatcatttccgaagtttagcttcacaaagcttatatcagccactcatccactttttccaacaggcatatgtcccacatttgaagttttcacatttcgagcaaaaacataattttgaattaatatatgtttatccataaaaaaaaattaatatatgttttaccgtataaatgaataaaacttgatttataaagtgaaatgctagcaaaaatttgtagaatgtgataaatagcattaaatcatattagactaaatttattttatttttcttcttctcctcttcccttattattattattattatnnnnnnnnnnnnnnnnnnnattattattattattatttcttgtcttttacacctattttagtattggattaattaaattttgctttcttccttgaaatgaaacaaaacaaaacaaaacaattgttttgtggaattaaataataataatgattttaagtaccactaccacgaacaccaagtggcatgggtgtgggtcgttttcctcttctgatatcctcccagtgcttaaacccaggtttggagtttggattttgatatttgtttttgattttttttgaaagggtgtgtgtgtttgtggattgtgggtgacaagtaattttaaaagttctggtttgtttcaggaagaaaattggtgtaataaaagtaggcaatgagagttacagaagagaatcagagtcagatgagttaaatacaaaaaaagcaaatctttcagcttcaaggaaggaaagggttcagctaccaataatcccaaattatgagggtaagaaattccctattggtgaatttttaagccaaccttgtgcaattgaagccctcctcaataccaatgccttaaaaagtttccaatgtctttctcctaacacttacaggtaggctacctttcaacttcaattcaaccctttttctttgtaaaatctaacttagtatatcaaagtagtttaagctagaatataatagaactattttcaccattattagaagaagttgggattgttggaagaaattcatgccccaacttctcaacaatcaatcacttgtgcaggtgcactctgcaaagacttaaacttctcaactttgaagtagccccagtgctggatttgagagtaactccaacaaatcaagactgtactgttgaaatgctttcttgtaaggtaggtgaattttgttcccttaattggaaatgggatatatgtaatgtgtgttattatttcttaagttttgctgattttaatatttgcagtttgagggttcaaaaatcatggagcaacaaaacaaccattttacaggtacatttattattgtatcagataagaaaacttatgattcttagataagggaagtcacttggtctgtctttcaaccattttatggtccaactacttggtttttctttcattaaagcttgttatgattttcatcatctttataatttgcataataataataattattattattatacttgcagcattcatgagaaatcgcatgtcatgggacacaagtagtgatgaagattcatttttggaggttgacatcaagttgaatctcattcttgaggttagacttggaatagagataataaatataaatatttgtacatatccaagttcaaaaacaacaaaacacctgctctgttttcaactctctttttgttttggtaatgcaattgcacaacattatgacattatagatttagagcagtggctttgtgcatgcatgaactcactttttcttcttatttttttatttagaaatatgcaagattattgttgataggaacataataaacagttttatttgcagatatacacacgcccttttacgatgatgccagtatcaaccgttgagcgtcctggaaatttgtaagatatgtaataaccaatctgactttagtatgtacctacctaatacatgacatgctacaacaatattttcccgtggtatatatgtatgtatatatgcttctcatctcatcagctatatatgttttgtaactctgaatgaatgatgtgaaattgtgatgatatacagaatgctacaagctttattggatagattggtgccattgctcttgcaacaactgctacaagattatagtaaatgggttcatcaacagttggattctgtctccccaagttaatgcctctttcttccatttttctgtacaaatgaatgaatttgagccttttgagctgttcatgttttttttttttttttttttgaatggagctgttcatgttttagtagagagtcattcttaaaactgcaagacaattatattctattaaaaaaaactcttatcttgccatgttgtattatgtttcaatctcgtgtttaagggaaatttgagcaaatatgtatcccaacaaactctttcgctgtggagtatttttccatgagtaaccattgttgtaagtctaaggaacccaatattgacccttaacactaatttcttcaatttcaatttcctcatgacaacgaagatgataaacacttgaaacagaaaccagtcacatatctggatgtatattatataatatatataatttcatatgtttcagaaaagtgttgagagcagaaacgtttttacagctttgatttaaaggacaattaaaatatgaccatggtcataaactaaattacacattaaacttcaacaccattaagttgcataacgatactacaataccataggaaccatctaaatcctcaaggaaacactttttatgcagtctcctttgcggctgcatgcccatcatactcatcggtggtaacctgtccgtattcacccttagagtccttctctacctcctcaaagtaatcctctcgggcattgtcagccaacatcaaggccaccaaccagaaaagtgctgaatcaagggacacaaaagcaccgccaccaagcaaacctgtcttagcggtagggcaatctgtcttaagattgcgatggacatggtgcaataggtgggattgctctgtgattgtaggccacaacaagagggctgcagctattcctgctgtgaacctatgtaatttcaccgaaagcaaaagtgactgtaattagaagagaataaagaagctaatcaaagactagcctctataggaaattccaggttatctaatcaatattgcagcaattttttcaagagaaaaaactggtcagagtaatacaaggcattctattaatttgttaaaagtaaagtactataccaaagaaaggaatcactatgacagcctcattatttgaagatctgcctgagttacaagaaaatcacttctaccatggagttatttttctatttctataaagtacacacacacaccagtagagagtacacatctaattctcagctctataagcacttgtgtaataaggaagatgatataccatcaactatagtagtatacaaactatacaatgaaaactcatcagatagatagatataacagctaggctagcagtgccatataggaaaatggacaatgaaggttaactttatggatgaatattatatggaagaaaggatacttacaaagcaatgttgaagaaaatgacaaaagtagtgttcctgaacaaagcaccctgtggaacagactttcccttgtatggataaaacaatgaccaaagcccaaaagctgttgatactagcagaaatgcaaaagacagaaatcccaaagccactgttggatcagagggatatttgcatataacaactcctattcctgggacttgagtgacactgccagcagcaggctgtcaagagaaaaaactttgttatatatattcaaaatcaaaagcaaaatcaaatttatacccctcaatgatctgaatgatattgttgttcataataaaataacattggaagagatactgtgagagatattattgtagatactatttcaatttctgctctacaaccaagtctggaaatttttctaaagaggaaattgaaatgacattcttcaaaataaagtttctttctaatactcttttgtttcagaaacaaatgaattaaaattgctgagctggtgtggtgagacaatatttacttaataatttgacatatcactcatgaaattatagaaacaaaaaaattcaagaggaactgcaaattaagacgatattattacctttttattttcagcaacaactccaaaaatgaaggacaacagaccagaaaaggctactattagggaaaactgcttaatagttaaggccattttccctgcttaatttgttatcaatatcctgtaaaacaatcattatccaattattttaagagagacactgaacttagaaattaatcaaataaaactaacaaaccaacaccctgaaaggaaaaacagaaagtatctttacaaattaattaaatcccatacatgtataatagataaaattgcaaaaatgaatgaaacccaaataactgagtgtaaaattaaagaagggaggtgtaccaaacaaacacgaagataatcaatcaatcaaatttgcaattgcaagagaggagaggagaggagagataagctgtgaaactgaatttaggggtgaatctagagagagagagaagtaagttcagaatcgagtcagataagattgaagtcaacccttggaatctctatctttctggttagagtaacaaagttattatcaagtagagaagagagcaagagtaagaacctttttccctagtaacctccgtacaaggcggtgacaacaactgtccaatgtcgatgtcaatattaatatacccaagcaattaagttttaaatcatttacgctactaattaacaaactatttgattaattaaaattaatagcataacacttcgaatggaagggaagaaaatgtgcatttattagtttctttattattattattattattattattattattattatggaggtaaacaatttttcatcaattcgagtgtgaacgaattgactttgttataaataaattaaaataagcagttgtattgtgtgctagttttgcccctatagcgtgatgcgtgagtgatgataggggtagcaatttttgtgttcatgagttgtattccataatagtcctcaaacattctttaatttgtttaaattcttatcagagaacaaataaaaaataaataaataaaaactaatgtgaaaatagagtctgagtaaataaattgataga

SEQ ID NO: 20531 - DNA, 1588 bp, Cannabis sativa
gtatatatttataaatatataaacaagtctttttgaatattattaattattaattactatagttgaactaattgtattctattatgtaaatttaacttaggttggatgttggtgatggaaaagaattgattgtaaagaagtgtccaagaactattctacaacaacaatgcataagatatcttggaccggtaagttaatctaatcgagttcgttataattatctttaatgggtattttatggatttgctttggtatcgtgtttatactgtcgtattgaatagtattgatactgctttggttcagggtcgggcttgaatgtgtttgagctttaggaaaaacactaattattgggccttagtatctttgaaaattactaaaaaaattgtgtattttttaaaaagaatctttcttatggctctgcgattggtgggccctaaacacagacctgacccgtcttagcccaacgtcagcttgagagcatttgagctttagggaaaaaaattgagcctttgtgataaaaatatatggtatttgactattttgaaaaattaccaaattttttgtgtattgtttaaaaataatttctttcttctcttctaagctgggtggaccctaaacgtaagtctaacccgtctttgttttgttagaaataattaatttatctatgatgttaatgtagatggagagagaggcctatgaagtgattgtggaaagtgggaaacttgtgcataagcaaagtggtttactaataaacacaattgaagggtcaaagtggatatttgtgctaagcacaacaagaaatttgtatgttggtcaaaagaaaaaaggtgtttttcaacactcaagttttctatctggtgctgctacaactgcagctggtagattagttgcccatcatggtgttctagaggtaataatcctaaattaactctcttaaatttatgttcgatgcttcgaaaccctctaaactcaaaattttcatggatatttgtgtcttggggtttgaatcattccaaatgattaggtaacaattgtcatagtttatgtgaggtttgagttcttctgtataccgacatagtaattgctataattttatcgaaaatttgaatttttcaaaatattagtgttttgaagattcgagtcgcactaattcggcttttttaggattttttgtcttgaatcttcgttgatgatcgaaattcgagttaatatctacaaaataattgttataatatcaaaattaaagataatgttggttaaaaattaaattaattattttgtatcattattgaaatttttaaaatttgctctaactttttcatttcattttaaaggctatatggccatatagtggtcactatctcccaacagaagacaactttagagaattcattatgttccttcaagaacaccaagttgaccttaccaatgttaaggtaattaattaattaattttattaattttaattaataaataattaactaaaattcactaatattttattgttaattatttttcagagatattcaatagatagtagtgacggaacttcattcaaagaagtcagtatcgaagaagagactaaga

SEQ ID NO: 20532 - DNA, 3080 bp, Cannabis sativa
aatccgagtaacaagaaaatctggagccattttaagtatgaacgattaccgactttttgctataagtgcgggattataaagaatattaaagaagattattctgccttgaagcgaatggtgtccgtgcatgatggtcgttcagtaccattgttcggaccatggcttaaggatggttctcgacttgataatggttttaccttgttagaatttgaggatcttcaggatatcaaaaggatggacaaggaagataaaactactgagagggtgaacaatgttgcggcggacacgacgggccaattaggatgtcgggtgggttcgacctctgattagaaccaagttggccatggtggcccaagcagtggtgaggtggcagcgagtccagctggccaaactagagcggaacatgtgcgaatggaaggggtagtctcccaacagggagataatgcctatgttgtttcatacaaggactatgtggacacgtcacatttcccctctaagcacgtggtccatgtggccaatttatttaaggaaaaaattgggcctgattaaatttggagcttcgcgtgaggatgtgggctctggtggatccaactgtggaccaatacgtaaattaaagaagcctaaacttgatgaaccgagaggtgttcccaaaccttctattttttgggagaaaatctaccactggtggtccaaaatctggtgctaaaaggaaaaatatttctggtaattcaaacaagcacaactccttcgtggcggagagtgatggcctgagctgcttggttggggttgataaaacggaaatcaaggatgtctttgttgatgaaagcggagtgaatattttggagacctcaaagagcgatgatgaactgctggatcctagtaaaaaatatcgattgcttattaattctctgaggtcagttgagagttcttttggatctagaaatgaggaagtgaatgtcaatggaggaggggattggggttattgctactaaccccatctccggacttgatggtggagatatcgtgggcgagagaaggaactcctctattttgtcagatgttataattgcaggtaaaatgggtattacgattgatacaatacgtgatggggctcgagattttttatggcgaggaggcgggtcgacacatgccccctaaggacccatgaaagtgctttcgtggaatttccacaaactcggtagttcattggcaaagaaagctctcagagccttggttttgagagaagatcctaatgtgatgttcttaatgaaaacgaagctgaatagtagacgtatgaatggtatttggcagagtatgggttttgggggtgcatcaatagtggatgcctcgggtagcgcaggtggtagatttgtggatgagggtgatggtcaagatctcagtgagctattgaatatcactggaggtgtggatctagggtgtactggcaattttttcacctggtcaaacggtcggtgtcttgccgagctgatcaaggaaaggttggatcgtgccatctgtgaacctgattggcttgttaattaccctaagactagtgtctgttccctgactattaaatattcggaccatgtcccgattatccttgatctttgggtggataaggagaggttcagaaccccattccggtacttagatgcttggtcaagggatgagagttgcaaggctattatcaaggaagcttgggctattggtgttcacagtatcaagagcttccagcaggtgactagattgaagaatacctgaagatatctgattaagtggaataagacacactttgggatgtgtaagaaaaaactacaggtgcttaaccgtcctcttattgaagtccagagacgcaccccttcggaagaaactctcaagcttgaggcggatatcatgttagaaattgaggaagtggaaattcgttaggctgagatttggaaacagaaatcccgcaaactatggtataaggatggggatagaagcaatagattctttcacactgtgacgatgattaagagaaaacataattttatcaattcggacctgacggatggtgtggagtggatcgaaggtagacagttggttggtgagtatgttcgctctaactttatctctttgctttcatcctcctccccacccagagccccccttgaaaatttgattcatcttataatctcgagtgagattaatgtggagcttgtccgcatccccacaactacagaaattaaggaagttgtgtggtccatgccccctctcaaagccccgagtccagatggtatgccgagaaatttttttaaagaccactgggagattgttggtaatgatgttgtttctacggttgtcaagttctttgaaacgggtgagatggttaaggagctgaatcaaacgtttgtggtgcttatacccaagaagatgggagctaactgttttgatgattacaggcctataagtctatgcaatttcacctataaaattatttctaagctactggcaaatagattaaagcccctactgtctaatttaatctctccaacacaatcgacatttgtccttggtagatggattgcaaaaaattccatcatgacccatgaaattttagattcttttgagaagcgtaaaggtcgggagagttttgtgggtctaaagctggatatgtccaaggcctacgaccgtttggaatgggccttcttggagcaaactctgcgtgcctatggctttgggtcacactttatacagttggtcttaacctgtgttaggactatttctttttcgatccttctaaatggtggccacctcacacagttctctcctatgagaggaatccgacaaggtgatcctatctcgtcgtatctgttcattctatgtaacgaggtcttttaaggctcttaatgcagaaagaagctcaaggctagattacaggttttaaggtacaccggcttagcccctccatctcccatttgatgtatgctgatgacacatttatattttgtaaggcgaacaaggaggaaattgcagcagtccaagagtgcattgatacttactgtttgtggtctggacagaggctaaatgtcaggaagtcg

SEQ ID NO: 20533 - DNA, 5397 bp, Cannabis sativa
gctttgcaatgaaagtagagatctcaaatctggttcaaagttgaagatctgaaatttgtgtgtatataagtgtgtgtgtttgtttgtttgatctaattttgtttaaatttagtttaagttttgtttaatttttttctatgtgtgatttggatataaacagtagggtgaagtggtagtgtttgttgcactggtggtgggtgatcatgagttctggaggagggtggtggttgttaatcttggggtggtgatggtatatgtgaaagtgaactgaaaaaataaattagaaaagaaaattgaagaaagaagaaaaataaaggattttttctaaatatatatttttaatttttttattttaatttataattttatttttaaatatttatttacatgaatcaataaaattatgtcatgtgtacattgtgtctacataaatgtacacatggacagtccaacatgacacttaacacttaaaatgaatgaaaactgtaaagtgctaacaatttcctagcttttgtggttttgtcgcaaataaccctttgttgcttaaactttcagggacatttttgttctatgttgctcgcttactttagtagttcataatttgacaaaaatatgcattttagttaaacgatgagctattctaattcaatgaagttcttgtttgtttgtagatatctgcaaatttatgaaatattctaaattactcaaaaataaaaaaataaaaaattctatcaagtgagacaaatttagtggtacccaaaaattatagctaaacaaaaaggatggtaatgagattagcatgaagatcaactttttcttttcttagttggcgggaaaaaaaacgtgttgtgatgttttaacacaaattaaagtaaaacaatctttgccaatctttgcaaaaaaaaaaaaaacaaaaattaaagaataacaatttaatgtgaaatagagaactttgctactttttttcaagagaagaaggtggacttgttgtgagataaaaccttttgactttgaaatggcaacccaatattgctatgtaatttagtttacctaccatttgacactggaaaaatgtggaaagtactaaaatcttgataaaatcatatagagcatcctcatatattatgttttgaatcaaacgctcaaatcttaaattttagagcatgtgaaatttatagcttcaactgcctaagttgagatctcaagtcagacattacattagagtactataatgctttccatcgattccaagtcaaaatcacttctttcctctgtgaatttattttctcttttttttttttaaaaaaatattaaattaatttatctaacgaaatgaaacgaaatcatttcactccattttagtttttgatgcataaaaaaggaaagaagtagacccatgtacaatcaaatgcctttatagctaattttagctcaagacttgtcctcttaaattaattttaccagaaccactcactcactaacctccactccaagaagatgaactagagaaatacctattttggaataagttttattttattcaatttatgtttgactttcatttttgcagacttgcagagatcatatatagtcaatataattataaaaaaattaatttgttaagggcattttagtcaaatcagaacaaaaggtccaaacctaatacattcaaatatctaataaaaactaccctgttacttaagtcagagcactttcaaataccgatctctcatttttctgttctttcttttctcttcgaaagctaaagctgagaacaccttgaaagagcgtcttacgaacgctgcaactgattctcttgctaaaacccacaaaaaagattttctctttttggctcacaatcaattgcgcattctcatccactccaccacgcttagtttctttcagagtttttctctttccgtggtccttcattctgcttttcttttcttttttttctcagcaaaatttcattcccaggtactcatttatgtttgccatttcaatcatgatatgtttgtttcacgcctaattagtattccatgcagtttttttaagcttttgagggtaatgggtatctgtagatgtgattgaattctcaaaattctggttccaaatccaagggaaaagtctcatctttggttctgagaaaaacccatttctttttttctttaaagggtgtgtgtgtttcttctctctgcaactactacaatggttgcagagccttggattttgaagatgggtagccaggttagtaccaatctgaaacaaacctttcttcttcaaacttcgaaaagaaaaagccttagaaactcatcagagcatagtgataagaagaataataagcagactataggcattctctctttcgaggtagctaatgttatgtccaaaactgtatacctctataagtccctgactgagtccgagatatccaagcttaaaaacgagatcttgaagtgtgagggggttcagaatcttgtctcctctgacgagtcatatcttcttgagcttgctttagccgagaggcttgacgacctgaacagggtcgcagccgttgtgtctcgactgggtaagaggtgtaccgagccggctcttcaagggttcgaacatgtttactctgatatcatgagtggggttatagaagtgaaggagttggggtttttggtaaaggacatggaggctatggccaggaagatggagaggtacgttaatgccactgcgagattgtatagcgagatggaggttttgaatgaattggagcgagccatgaagaaatttcagcataatcaacatgaggaaagtaagagggcttttgagcagaaattcatgtggcagaagcaagatgtgaggcatcttagggacatttcactttggaaccaaacctatgacaaggttgttgaattgttggccagaactgtgtgtactgtctatgctaggatttgttctgtttttggtgactcttgtctgagttttgaagcttcttctcaatctcctaacaaggatgaaggcattcaggtttcaagtcagctcgatcgtcgccgccattccccagctgcagcagccccccccttaccacctagaagggttctcagcaagaagaatagtggtgtaatgctcaagaaggggttgagttttaagtctcaagctgattcaagaaggagtgaattggccatgtttcaaccagaagatatagttttcccttgtggaactagccctggaaggcttttcatggaatgccttagtttaagtagttcagtttcaaagtttgatgatgatgatgattattatgatggctgtggtggtgattatgatgatcgaggtagccaaatttctacttgtcgtagtggtattttaactaatggatcaaggagagagcaaaggaacaactctagctgttttagtagctcactgattagtatggatcatcagaggcaatcaaactcgatgaatggtgcgagatttggtcccaaaagtaggctagtttgctatgctcctccttcaactgtggggggctcagctctagctttgcactatgcaaatgtcattattgtcatagaaaagttacttcgataccctcaccttgttggcgaggaagctagagatgatctttatcagatgttaccaactagcttaagattatctttgaggactaatctcaagtcctatatgaagaactttgcaatatatgatgcccctcttgctcatgattggaaagaaactcttgatggcttattgaaatggttagctccattggcacataacatgatcagatggcaaagtgagcgaaatttcgaacagcagcagattgtaacgcgaacaaatgttcttctgcttcagaccttgtactttgctgatagagagaagactgaggctgccatatgcaagcttcttcttggtttgaattacatatgccgttatgaacatcagcaaaacgcattgttggattgtgctagcagtttcgatttcgaagactgtatggagtggcaactacaatgcagagctgcagcttatgctgattgatgctatcattcttggttttgcattcttgagcaaagctcgtgaagctttttccttgattttcccaatacttgaagaaaacaggtgatagttcaacaatcaacatgtgaatatatgagaaagagatgtatgtatatgtaattcattgcaaggtatgggaataatttgacctcagttagtagtgctcacttccatttgtttatgaaaaataagtttttcttttgtttcttaatcttctgtagaattgtatatatatgttcatgtaaagttagtcttctctcttgtatcttggcaatatttgtagttcatagtcttatcaatgcaaaaaggtcatatatatacctcaacaagttactagtgaaatgttatattgttgccaatttatacatcatgtttagtagttattgtaatttaagtgtgatgaacaccaaatcggtggcactgaccaaaaatcataaagggtttcggagatttgtgaaatttggtggcaaaagctaattgtttttaatcatacatataatatattattgttgaacagacaaacaatgacaactaagctaagtactaatgtactaactactaagggatgcttacttgttattattaattttgggagtgggggttgggggctttttatttcatttatgtatctttttgttttcataccaacctatatccaatcaatttattgtattttacacaccagtgtatctatctgttaaaagacagcaaatctttgctgtgttgcaaacttgcaatgcaaccatctctctcttattcataattatgttaaaaaaaaaagaccatcttaatctaatctaattgtgccttatacaagtattatatttaaactgaatttattgtaggaagggtgactgtactttctttttctgctgtgatataatactccacctcagctatttagaccccctgacaccagccttgcctagctacacagcgccgtaggaataggtagtaattattgactgccataaccacatttcttgtgccaaaacctttctgccacggaagcatgacgtgagagcttcagctgcttcttttaattttttataattccagaaagagcagtgatagcaattaaaatagggttaatatcatttttgaattttttattttataaaatattaaaagataatataaattttgtattttcaaaaatgacataaacagggctcaaagtttaatttttataactttttttaataataaaattagtactattttaaaaatataaggtctaatttatcatttaacaaaacaaaagactcaattactaatttttacaaactacaggatcaaaaatagtatttacccattaaaatataaaggaaaatgatacataaattttcaaatttatga

SEQ ID NO: 20534 - DNA, 3596 bp, Cannabis sativa
tatatatatatatataatacttctcaatgggtattacttatataggtactaaacaaatttaattttaaaaatattaaactattcaatttttgtccgatagcgaataataaaagaaaaattttcatttctaagcataatttacctacttaattaaaaaaatttcaaaaaatacttcttcttacactatatcaaaaatatgtttacataaaaaatatttaagtcaaactcaattttttttattacttttttgctaattttttttttagctgatggactaatctcaaccctatataatgtaaaaatgagatttttttttattaaataaaaaaattaatcataaaaactcaaatttttctaatattactcattcatgtgtaatactcattaaaagcgcacccatatatgtatgaggttactcatgaatgggtaaaattagaaaattttgagtttttatgcttagtttttctatgtaattagaaaaatctcacttttacatcatatgggctaagattattctatcagtaaaaaaaaactaaaaaaaataaaaagttcctaagcaaaaaaaaaaaaaaagaaaagaaaaaattgagtttgacttaaatatttttatatgaacatattttttgatatagtgtaaaaagagatattttttaattaagtagttaaattaatcatgaaaattcaaatttgtaattttattattcgttattagattaaaatttgatggtttaatatttttaaaattaatatatatagttaaatttatttagtaactatttatgggtaatacccattaagaattattctatacatatagatttataatttatatattatataaaaattaacaattaagaaagagatcatatatgatcttatttttgtttggtaggtaattgtctctcaaaagaatgaataatggaaactctatacaatttacttaggtaattaatgatcttctcctcaaagtatgcattatcatcaagttttttattttttattgaatttataataatgtgatttttttattaactgatttaaaaagatcgtaaataaataaaataaataaattaaaaaatatagatcacaatacacatatttgtagaaagaaaattgacaatgacgaacattgaatcttatagtggttcgcatctaattaatttcaatggtaacaaattagtccacttaaagttttattaatctcaataattcttcagagttatgttcatcgagaattttattcttaagtgagtatttttcaaaatgtatttcaaagtgagagagaaagaaagagtctgctcttacaattgattgaatgacctatttataggctaacatataatagcatggcttaggcggggttattttaactagatacatgtttcacttaactagggttataagtttaaatataaaataacgataataatataattaatattcaaaatagatatatatcttaacaaataataaatttggagatgcatctagaatatttcgtaagccgcctagtgacacgtgacctagcacgtgagtgtatctccccagcgtcatgtccacgagcacctagtgtaggtggtgaaccaccagggttggctctgtcgctcatgacaaaggctcgactttgtggcatgtcacagagagagggttggctcttgtggtatcgtcagtacaaagggtcagtcttgtctcatcttggaggtttgcctcatcacggaggtttgtctcataatgttaatgaagttgtatctcgtctcagacacgtgtcccatcacgacaacgtgtcctgttacgggagtatgccccatcacaagagttggccatgtccatggtcatgcaaggtcggcctttcttgtgatggtgtagggcaaccctactagtagtggcgtagggttggccttactcgtggtgatgcttcttccccctaaacctaaagtgtcttcacgatattcatttcgtttaattactaactttcttgatatcttgagcaaaattcatgtatatttaggtcggatttttgagggagaacataattaggctataataaagaaaattttgacttttataactacgtgtataaatgaaagagaaattaattatgcagctcctaaattaactatagaaaagaagtagagaatgaatataatgaactcatatgcacatatttaactatttatataggttttctctagtctcatttaataattttgagctcaaacctaaccctctcctaattattagagttaagagtccttttctagtaatttgactttaattataacaataagacctcaacaataattgtgacattaaagtccaatataccagtacttgaaggaatattataagttgctattgcattgaacatactttaaatcatatgtaatgttcacacttaaagtatttattaaacttgtacaaattatataaacatatatatataaaaatatgtttaattaaaaataaggataacagtgcctaaactcttttgtagtttcatttgttgtatttaactactaatgttaaaaataaatctacttgttaggtatttttgttaccaattttttagtaattaataaactagaaattcaaaaagacgcctaatggtgtttagcacaacctaaagtgttatattattattaatataattaagtatcgaattttatacaatttaatttaataatttttatagaatattactaaccattagtaaggacaacctttagatattagtattagacaccgctagtacttatgaaaaattgtggatatagtagttaggaatcctcgtaaatgccaatgacattaacacaatgaagaataactgcaattttttttttttgatgaatcagttctatgtattttgttaacaaaatatgtacaagctatgcaatattctgttaagtaattgagatattctgctgaaattaatgtaaaaaatagaaaaatacaattaaactaaaaatttcgttacatagccatattttataaaatttgtggataaatagttaggaatccttgtaaacattgaaacaacaaagaataaatgcaacattgatatgtcaaatgcaataaatttagcataatataattgatgcaataatgtcaaatgcatgcaaaaatacattctttttttcttgtttctcttcaattttcacaaatattggaattgaaacttatccaagcgaacagaaagtgtttataataaccaaagttgaagcataatatatggcatgttaaaatcctttctagcaaaaacttgatgagcatctccaaaagatgcttaaaatgttcaaataatctcaaaatataatatatatatatatatatattttttcttattatagcaatctttattctgaaaatgctctaataataagcacatttaaatattattaaaataattcatatattattatttaaaatatattaaattattacagttttttattttatgaaacggataatcaaataataagcattgatgttggatatcagtactgtctctagtacatattctaaacattttgtcttgaaattgactagcgatactttctaaaaactaatatgtcaccttattaagtatttttaaaggt

SEQ ID NO: 20535 - DNA, 4207 bp, Cannabis sativa
actgcaatacacatgtgctcccctgctactttaacatcccaatttcacttgagccaatcttgaggaggagggctccaaagagcgggggcgatcggggatggggaggggataagggaatctttgtaatcagcataagagtaaagaatggagtcaatacactgattcacattatccatcctattattatgcacattgtcattttgcacccgccagattgtgtcaataactatagatgcataaagaaaaatgtcatctgcatttatgcctctgttctttaggctttagataaatttaacccagtcccacacacggatacctgtactacagatggggaagatgccccaaggggaagagcaccaaagatggaaagccatgttacattaaagaaagaggcgctcaacagattcctcctctaccccacaaattgggcaggtgatatcggcgattgaacaaggctgtcctagttgggagtgcatttgacaaaatgctccaccacatacctttgtggcatttaaggatcttactattccataatttgttctagagggagggggaaacctcacaatgggatgaccattgcagagcttggattaagtaggcagacttataggagcaacgactattaccctccttagtccagacctagtgctcactccctaggcccgaaggtttaccccccttcaaaatggcaaaaatagtctcatcattaaaaaggtaaagcagtttttgggtgtcccaatcaccagatatagtcaacaactcagacactttagaataataatgagaagggttaccagtccgtggtgggtagaactcttgaccatgagtgatccaagggtcctccaaaatcttcgtttctttaccattagtgattactttgcaagcccccctcctaaggatatcattagctttcactacatttttccaaaactattagtccgtagtcttagctttacactttaggatatccttccccctaagatatttggcctctagaatcttgcaacatagggactaacatcttgtaagaagtttccaaccccactcagcccagaaggcttgattcatttctttggttttcctgaagcctaggccgccctgggatttagggaggcacaacttgtcccataccttcaaatggatcccatgattacctttcttgaaaccccaccaagagtcacgcaccatgccatcaatcttagagatcaggcggttggaaaggttggtagtttacatggcataaataggcatagtcaaacccactaatttgatgagggtggcacaaccggccttggataaagttttttctttccatccttcaagtttagaggtcaagttagccaagataaaattgaaatttgcatcgttatgtctagatcgaaaaagaggaagacctagatatttagttatgccttctggaccaccaatttcagggcatttttaatttccagttttaagttcttagaagtattcttgctgaagaaaatagaggattcaagcttattgacacatttcctcgaccagtcacaaaagttttccaaacaattccacatacctctagcttccctaacggtggctcttccaaccaagatgagatcatctgtgaaaaaagatatgagagatggttggccccccgaagcaaattttgatccccatgatactaccgttttcgaaagaatcctgaataagtcttgatagaatcttcccaacccaaatgaacatataaggagaaagaggttccccttgacgaataccacaagagggataaattcttcccacttcgccccccattgagacagatggtggtagttgtaatacattgagatatccaattacataatctatctaggaccctaaaacatctcatcacatgatccacaattcagttagtttatcataggcttttgtaaggtcgatttgtatggcaaagaacccctcttttcttttttttcggttaaaggagtggataatttcttggccaatcatattgttgtcttcgatatttcttcttggaacaaacgcaacttgattggggaaactaatcttagggaggagaggcttgattctatttgcaataatcttcaaaataaccttgtacgacacattacaaagagagatgggtctgaagcgacaattccttgtagagttctgaatcttagggatcaaaaccacattagtagcattgacaccccaatgcatagagcccgagctaaaaaatccatgattgcagcacaaaagtcctcccccactatctgccaataatgcttgaaaaaaatggtagacatccgatctagaccaggcgctttcttgcttcccatgctaaacatggttctatgtatttcttcaatgtctggggatttgactaggtcttcctggtcctcattggaaatgcgatcaggaattaggaagttgcaattaagcacagggtcaaagttatttttactaaagatcccactaaggaacttggtaaactcttttccaatcaggtctcacgaatggatccacttgccttctttatccaaaatactttcaatagcattacacctcccctaatagtagcctagaggaagaaaatttttgaacatttgtcgccatctttaagccaaaagatacatgccctttgtttccaattgagagatttcatttatacaccgcctcattaagagcttttctagtagccttttcaaatttagcttctagatctttaatggtagagtcaatctttccaaatcaaagtttgttccattgaaagagtgcgactcgagtagcccctaactttttgaacagtctggccggggctcaagagtataccacagagtttcaagcatgggcaacaaccagtttacttctaccatcccaagtacacccttcttcaaattcaaagaactttttgaatttggcttctaatcacccaaaatataagcaaagtggcctatgatatgaattcctggtctgaaacgagcgaagaatcgcattcgggaagattaagagccactccttgttaaccaagcctctatccagcgcagacttaacatgcgcattgctcgatctatgattgtcccaagttaacttgtccccttgaatcgaaaatttaataaggccccgagaatccactaagttcgagatgataggaaaaagaaatccttccctttagaaccttccctctcaagctcgttaagaacgaaatttgtgccacctaagattaaccaagggcctccaaatctatctccaattttcataatctcatcccaaaatttattcttagcgtggaagtatggcgggccatacacacaagacaagagctaggggtggccaatggggttcaagtagaccaaacccgaaatttaattgtgggagcaatttacacgttcaaattcaaacccaactttccaagctaagataataccccatgcacaaccaacagcaggcacagagatattgaattaaaagtgatggttttttagaatacgtaccagtggagtagcgtgaatctttagttcagttagaaatatgatgtaagggacttcagttcatgaactgtagaggtctatcccaaccctttactgttccaagctactcctctaatggcacctgtgaaggagatgagacatcctcctccacaggggtagcaacatgagataagatacgatagtcagcatcatccaccaaggttgcattaatcgtttgattatgcgtcacgtcctttttggtttgaaaggcaatctccgagttgtaaagcagctgaccatcaaagtgactatcaataaccaagtagactacttcatttgtatcttgtatcaacccattcttatcctaaggaaaatctcgaacgactcttgggtgctgatgaagtaattttttggggcggacactaaaggagcaagtaccttcatcaagtttccttttttttaaaaggattggttctagcattagattctgaggtaacttgtactccaatgtcaccaccaatggccttaatctcaaaaaagttcagctctccaaattttttcggctcatctaaaataatttctagggcttgaaacaattagtcaactccctttgttcattaggctgaaacttccattcttgtccataaaatgagttattatgtaaagatcgcttagtttaatttggaaattagcagataaatagggtttaattatggaaattatttattgatattaaaataattatttatgatgattta

SEQ ID NO: 20536 - DNA, 3771 bp, Cannabis sativa
aaaagaggttttcgagcttttaatggttgccgcgactagaccttttgtagtcgcagcgatgctttctacgcaaaatcgtgaacaatttcgtaatttgacaatttttaagtagaaacctaattctattcaagggggttacgaattttgagtccattattcagaaaccaaacctagaaacaaaaagaggaggacttccaagaggggcttgtggtaatccaagcgatttctctaattagttctttcttctctcttttagttttcttatgcttatttctgttttaagttttatattggatttgatcattgagattatgaactaaactcccttttagggatttgataaatattgattaaaattatgtcatgagttaaatattaattgctatttcttctttcttaattgtgaatttattcatatttgttcttaattacatatttgagattgattaccttagacatgattcatgatctcaatacaaaatttgaaaagtattaaaaatgctaaaattgaataaatcttagttttgatgcgaaacgagaatatttacagcctttgtgacatttagattattgtttaatgcagattgtatgttagtctatctcagagatgaataaataacatatgatttaagacctaaaagtctaaaaaaagttaggttaaatatctaaaaattcaaaacccccatatgatttaagattttttttttccaactttatgagagagctaattgaataatatgcttcaggagtaaatatctaaaagttcaaaacccccacccaattggggtagcataaaacaaagccaaatttggaaattcataaaaatcaagccaactagctcaatgatgacatgtccttttatgttgtcatgatttattattcttataaaaatcaaggtaactaaaaaataggcacaaaaagaatctgatagatgcagagaagcaactcacttcatacgcataaaatacaaagggtaggtaacaagagccgaagtagataacaaactatcagcctgaggacttctcaacgtctatccgaggccacagattcagcagaaaagaggtacttgactcgagaaagaacagaatcgtgagcagggtcgtatggatgatccttggatgggatctccagtatggctgggatgggtgtgttgtagctgtccactaggaaccttatcatgtttgcaacctgttttgaaaagtaaaaaattaaccactcagaataatgtttttaggggatgacagaatttcaaatttatataaccactgcaaaacatgatataatggtttcaatattggtattacattaggaccattgagattgttgatcagctaacttacatattggctaattaagacaatggcgacgtcctcctttgtggtgaactctttgaatgcatcttcaattgctttcactgtggtttctgagaaaaaacaaagattattagtaatgaaattaaggattaattttatcctagttctacacactactgttaaactttaggtttatgattttagggcccaggacatgggacatctttacttatatattcggtatcattccacaaatcaacgccttcattggcagttgtcctagtttaactcattataaaagctgacttgtcatgttcaccaacttggtaaaaacctacatatccatatgttttgccgtggtgggaaaagagggagaaagcattatacaatgatagggaaaaatatcccaatgaaagactttaacatcaaagtcatgctatatgttgaaacaacaaaacagtaaagacatgatttcaggttgttaaagtagccattcctgaagagctattacagtaacttatcattccaactatttattttaacagattaagaaccagaaccaaatgactaacatggaaaatggatttaatcaaccttcctccatgttgtagtggggattacaataaaatattttcataaaaacttacaatccctttcttttgtaaagcagttaaaagattacagtagatatatcaaatccacatttttgtccttctacttaggtacaaaaaagttcgaacaaaagtaaagatgactggtaaagtccacaatatagttaccaacaatgggaagatatacatatatttcgaagtaaaatttcaacaaaacaagtattgacaaatctgtaatacatacttgaatcgacaataagatagtttgtctttcttcgcaaatcaacattgcccactccagctagcaaaaatccagtaatggtatcctacaatatcacagaataagacatcaaatgggtacacttaaacagttcaaagcaccaaaagtacaaatacttaaaaaggtctaattataagagagccccatcttgagtaaaatagaatgtaagcagtaagactcatcacccagccaaatccttctatcttccatattatgacacaaacatacatcttacttccaacataactaaatcaataagctttaggagttaggacttctctaccattcagatttctttgaaacataagttacaagataaattgattcagtcattcaggataagtcaatataagaaaatccaataaggttggaactaattcagtcattcaggaaaactacatcatccatacctcatcagcaatcatggcaattagtgcagaacttttagtaggaatttgagctcttccagccattttaaggtgatgatttctatctgcaggaaaaaaaaatcctcagcatttacataaaccgcaaatatctgtatcaaataacaggatgcctactcatcaaaagacttcacttcttcagttcatgtatctttttatgcaattgaatatactaatatccattttatgggatttccaatctaacccacgagaaaataagctatattatcagtatcctttaacccatttatattctgctatcaactatatatctaaattcatcttctcagcatataagatccaattcataaaaagaattaacaaaataaataacacccaaaattaaacttatcaacatagatcgcaatcgaatctctaaagtccggctccgtaaaattttaacaatgtccaactaaattttgcgaaatcggatctaaagcatcaaaattcaattacatgaattgacaaggaaaataaaaacaatcagaaattgacaaaacagtaccagtcgaagcaagaaagaataagtaagtcaagcgtcgggatgattaagaatgatgatgatttcaagctaaattcccgaaaccctaggaatcaaaaattgaaattagtgaatagattgttttgaaatcaaagatggaatgagaaggaaggacgaaaggtgtatgatgaatttacctcatagaagcttaaacgaagagagagaatgaagcttgagatcagagagagagagagagtagagagagtagagagagaatgatcgtcttcttacttctgatgactgtatttttttttaaaacttaataattatgttattttttttatatattacacaaaaaaaaaaaaaaaaaagaactttgtttctaatatttataaaagggttatttgtttttacatattcctaaactatataggttttggtaaattgatatttaaattttattttttttagtaaattagtcccaaattatgtatgttttggtaaatttatctttaaattttattattttatgcaaattttattcttcttctttgaaaaaatttattcttctaaatttttgttagtcatttttcttactatatttttataggttatttatgttaattatgtttaatattat

SEQ ID NO: 20537 - DNA, 5631 bp, Cannabis sativa
  modified_base (5571)..(5583): a, c, t, g, unknown or other
atttaacaatcttaatagttcagtagaaatttttaacggccaaaaaagttcaggagcataattttgtacatgtcaaagttcgggaaaaaaaattgctaattatgcctattttaatttaataaataatataaagaatcacttaatacttagaatacttcacatcactatgatgttaggtaccttatagttctcaataataatactcaaaattttaagtatgataaatgaaatttttagagaatcagatatgatagagaaaaaatctctttatataattatattcgttctctatataattgatcacaattaagctagaaatattttgtttgtatccaacattagtacactccatgatgacctaatttaacgaactactactttaccttatatattatcaacttacttattatatactttaaaaattagctatgtgcattgcacaggaatcatgaggaacaaaaccatgaactgatgcagtgaaacataatattatatgtgtatatatatactgtatataaaaaaattcaatgaacactacacctagctattttaatttctatattataaatgtataaattataaaactgttgttgatacgatatatcactatcagaaagctttcttttgccctttccagttgaaaaaataggttttattttggccaacaaatatgtacatatactttatttattcaaaaaaaaaaaaaagattctttttcccaaacaatttcacgttggtgctggttctccaatagcaatgtttattaaagtaatcactcaataataaataaaatatagataaagctggtgtgattaatgggaactgaagaacttgccgtcgaattgtctcccattaggaaaaccaatagtggatattacagataatcattgaaatcattgggaatttaaatactgattttcttatgttaatattaatttaaactactaataacacagctgtgtatatcgtgcacggatgcgtacgatttttttctttttaaaaaaagagcaaataatatatgaaattttttttgtttataataagcagagaaaaatttgagtctgaatttctgaagaagaagaggagaaaaaaatgccaaactgattctgttaatgtcaaccatattatacttaattttaaacaaaaacatactataattattttggcacatggcatgattttgatttgcagatcctttgtatatgtatttatattaacaagtctagctattggatgaatctctacatactatatcaatgtttccgaggataccatataacgttatatttgaatatatatatcattatataagaatataatggacattaaaaaaaaaaaatagaatgaaattaaaattaaaatatataaaaaaaaatattaataaaaaaattataaaattttaggtaaatactattttgtatactctgttttgcaaaagttactaattttaccttctattttgttaaatggcataatggaccctgtattttttaaaattgtacaaataagacccttaactgattttttgtcaaaataaaacttaatagtaatgtgatttagagatgttatgacaaaactggttacattttctgtatctgctaatgttagaaattttctaaaagttgattatattaaaaaaaaaaattgtaaaactaagctcagggtcctatttttatactattttggaaaatataagctctattttgtcatttaacaaaaaagaaggtccaattgataacttttgcaaaacgtggtccaaaatggtatttacccttaaattttttgtcatcttgtattagaatggccgttttccttccatttaaatattgaatagtcaattcaccaaaacactgcaagaaaaatgactttatgttaatgtcctcagtattattttgccggtgagcttttatgtcggtaataattcgtcggcataaggtgttttgccgacgaaccaccttaactcgtcggcaaaactatttatcccgatgaattaattggtcggcataaaatcctcgccagcaatgatttatcagttgagggttctgtgacgaagttttgccagcaaaatattgcgtcggttaaacttttgcgccaattcttgcctaatttttatttaccagcaaagttttcccggcacaatattttgccagcaaaacttcatcaataaaaaaataattttaattttgacgacgagatatagttcactatcaaaataattttttaaaaatatatatatttataataaaattaaaattaaactaaaactaaaattaaattttttaagataataataaataaatataatctgaaatatattataaaattaaaatttatattataattataaaattatataaattgaataaaactaagtaaaagtatcgttagtttattataattaatattatttatactgcaaactaaaaaataaaactacaagtttacaacatcgtcgtcatcgttgtcatcatcgtcatcatcgggggcagtctgacccaacgccaggaggccgaaatggtggaatcagatgtattgggtgttgaatcttggaacagcaccgggcagatgcatcatttgttgttgaaacacactcatgtgggtttctcagaggaacctgccctgggagtttccctctttacacccatactaagtctcgacaactagaccatccctctcaagtggcgtgagcacttacctagcacctgtgtcataacagacatgtctgcgagaaattgggtggggtcaacattgtactatgggtaaacattggttggcacgggttgagcttcacgaatcttaactattttggcctacaaaaatttcgaacaaactgttagggttgaatagaaattaaaatatacgacgagtttattaaagataaaaaattacttacatgcagttgttgtgtatgttaatcgcaccatttgttgtccttgtagcgaaactttgcaaaagtatccacaatactagaaagttcacccattttgggatcagcctatttttatacaatataaaaaattaaaaatatattattaaaaaaatatatgaatttttagacaaatatgttgacaacatcataccccactcacgatgtggctgactatggtcttagacctccatccactttgattcttcatctatcctcagtttttcacattttgtttgactcttgcctgtaatttaaagtaaatttaacgttagcaaaatgagcaaaaaattataagttaatggatattcaattacaacttttattttagacctgttgttttgggtttttctagtatgcgataacctctccatatttctcaatattctcttttcatactttttccatgttcactctccagttatgtagcccttttgatattgatttaagaacgtaatcacgaacataggattgtcaattgagaattcaaacttggtctaaaaaaacattaaagtcatatatatatatatatttgtataatagtattatttgatctattacaataaaaatttgaatgttaccgctattatatcccgatagtctgaatggttgtttctcaacgtcctcaaacttaaacttgttcaaaggaatagtatttcgaacaagaaacttgatataattattaaactcattgccatagtcgtctattggggccccaatccccttatgaaatctaaattttaattgctatctcgcaggctgcttggctagttcttgtttaatatttttccctttgtagtttctcctaactctatttttcttattgttgcttgcacccacatcaaccattctatacatacaagctacaaataattaattaataaacctattaacaaaagaaacatgtatttgatgtaattagttgtgggtttaaatattataatactttaaagtctacaagtcatcatcatcattaacagttacattattttattatcactatcactagtgtcttcatcatcattatatacaatgaaatcatataaaccttaacggtgaggctacttaaggtccttactagtcacttcaattgggtcgacatcatcacggacatattcgacatcgtctagttgtaaaagttgaatgactaactagattctcgaagagtttttttcttggtctcatcatcatcctcatttggaaaatcccagacattgcgggggctgtaaatatttgcaagcttccaattaactccattcttcaagtcgggaacgtaatatattaaatttgcttaggatgcaagtatgaatgctttattttggtaccattgataggtgaggcagacactagtgaaaaaaccatcactttttgtcatgttactgtttgtgtcccatcacttccaccaaaaaataataacactacaatccttcaagtaaatgaacttatagacttgtttgagtacaccataaaaatttataccaccttatctaggcaccaaaataccactattttaggtgttacgattgtcatcccgatactcaactagaaatttaacatcgttaacaatacatccaagataacaatagcatgctggattggagggattcatacaactcatatgatatcagggcctaactagtatataatactccctctccggagttgctttattatccttcaatgcctcctagtgctaggaattggctgtttgtgccatacagtctatttgataagatttgaccgtcattaggcagggaagggtctgtcctcgcgtacaaggaacctggttggactttctgtctaccttcctatagaccctgcctgacctatcgatgagccttccttgtagaggatctcttatcagatcctgacctcttccggcagttctctcattgaaccgccttatcaggtcactagcttccctattacggtgatttagtttcgcatgatgggctcgaaggatgccctcttagtcttccatctaccttaaaaagctgtatatgtgctggtcgtaagcatcacaaccagcaacacgtgattcttcttgtcctatctaaatgacctggcctacaacttctctaagcctggccagctcaatgtcatcccccaagtccaagcgaggtttaccaattgttgggtcaccaattccatgacctgttttgcatagcatcgtggaacagcctcagttgagttttatggaggttgttccatgttgatatgctcttccgtaacagatcatatggattgtcctatccttggaggaatggcgggattaacaagatttgtaggattagctagattgacaatgttatccagattagtaggaccttctgtggtgggagaaacacgaacattgagatctaccgtcatgggatcctaaggaggatccgagggagcagttctttttgttagaaccatggtaattagccagaacgagaacgagatggataaagctctcaataaaagcactaaaatattgactttgattttttcaactgatagcggagctttattagttgttgattatcaccacgtgtaaataatagtaacaaatagtaaaattgacacatagatttaaagaggttcgaccccttttgattagcgggtaattgttgggttttgtgccctaaataaaacccattacnnnnnnnnnnnnnatcaatttaagagatttgaagtggtttatgttaacatgtatatttcat

SEQ ID NO: 20538 - DNA, 3433 bp, Cannabis sativa
  modified_base (642)..(644): a, c, t, g, unknown or other
aagaggcaataactaattggctctctttataaacattaagcacaaacaatctgtgttttcaaaggtgagcgatatgttttgttagaactcttatttgttgtttctagcatggattggaaggtttataaacaatcattgatatactcaccacttttcaaaaattggtaggtgtttccaggattaaatttaaagaaccatggctcctcgaccctgcacccaaaattgacttaatcatctactgtaaaagcataataaacagaaaaaatatggtaagcaaaacaattgtagaatctgttcgtggccgaggttgtagacttctcttaattattgcagtctgctactaatagtgagttcttcaattttgtttgacaatctgtaatcagatatttatttgtttaatttagatttttattccttgaattttaaatcatgccccctgaatttttaaagttgttaaaaatgttttttgaactattgagattgttgaatttaattttagtaagaaaagtctaacatggataaaagttcaaggggcgatttagtcaatgtcaaaatttgagggatatgatttagtagatattaaagtttggagagcatgatttagtacataaataataatagtaaaattaaatgaaattagannnaagtccttaaatctaacaatttcaatagttcaagagaatttttaacggtctaaaaagtttaggggtcataatttggtaatgtcaaagttcgaggggtaaaattctttattagcctatttattttgatgaagctagatggaattttgcaacaacgatcagagaggcaataacagcgaagaggctattcaggttcagtgtgacatggtggctataaaaccattgtagactgttgtaaaatttgattgttgatgattgaaagaagttttgcagtgtcaaaagatatacacagtaagttcccaatcttcattcgttgagtaatggagataaacaataagtaccatggttctatgctaaggtgtgatgattaatatacctttctacctgaatcagggcactcatgcacttatgatgagaacttcgtgttgaacattgcttctggctcgtacaagtggcccaaatgtgaagttttttctttttcaagaatcaagcctccactcttttcatgattagtatatatttcaactctccgtccatatatgcaatctaaaatttgttaccatagaaaatattattcatttttataatttactgtattgtaatcaatgctagcttttgagcttctcttagtcagatatctatactcagtggtggcagaccaggattttaatcgaaggaaaaaaaaaatgacaatttcatagataaaccggatatagttcattacttgtaaatactgctcattaagcagaatcaacataggctaaccaagccatttatattaaaaaagataaaaatcttaacactttcaattaaatgacctataagttgccagcaataaagtatcaaaacactgtgaaggaaactagacttccaccccgaatgagtgtgcgtcaaattacatctattaatgacaatcaaccaaaaatatttcaataaaaattgggtgaaaacacatctatttatgaccagtagcctttgtctcttagcctatggcagtgaacccatgaatgattctcaacttatcaatcaattgtaggggcccattacacctgagctttctttcagtattaataaggtctattggttcatgcataattccctgctcactcactggttagttgtgaaatgaatttttgagatacctcagtggcacaatctctcatgatatacatctgaaaaggcctactaatctcgaaattgttgccttctgtgatgtaggttgggccacagatcctgatgaccgccgatctacatctggcttcaccatctttcttggtgataatcttatggcttggcagtgcaaaaagcaacgcacaatctctcgttcaagcagtaaagctgcatatcgaagtttggcaagtactgtaactgaactcacatgaattcactcaatcttcacagaacttcgtatacagcttccaaagtcacctgctgtttgatgtgataatcttaacactatcctccttacagctaatccagttcttcgtatactttacgagagaaaaagttctccaacaaattgtccatatcaagcatgttctagctattgatcaactcactgatggtcttacaaaggtaatctccagtcaaagattttccctgtttcgatccaaacttacaattcaagatcttactgctgccacagatgactcgaattgtaaccttaagggatcgtgttaagggtatattgttagttagtaacagttagtttgttaggttcgttattcactattttgtaacaaactctcttctaactaactctagctagcattgtaatctgtagctataaataccatgtaagattactcttagggtcggccttgagttaaaatgggccataaataaaaaaaaaaaatggaccctaattataaagataaaaagtatttttaaaaattattaaaaacaatatatatattttaaaatgtatcttttttatttgggcccctaaattgagtgggtcctaggcgcgggcctagcccaccttagcctagggtcggccctgattacccttaattaataagattgctctttgtttcacctatcttcctttacttcctttctgtctttcttcttctttaatctgctattttttcttgctctatttttcttttactattgtgttcgaacatggccaatatattcaacaataaataacatttgtcatcaattttaatagtattaaaattgttattagacactaatagtataatatagtatatagtactatttaaaaaaatgttgtcttataattaattaacgatattacataataaagttataatattaaattataaaaaaattacataatagactaaatattaaaaaagttacaaaaatatgtcaacacgaaaaaaagatttatgttttacgttttaaacttttttatttactaaaaaatacatcttaaataaaaataataaattattttttgactgttattataattaatttatagttatattatagttattatgaagttatttttttaattattttatatttttttatagttattctgatgttatttcttgtttttttaagctgtgtttttactttttaatgaacaaaatgtactttgtaatttcaaaatttcaaaagcatatttttgtaaatataagtattagatcgtaaaattatgaataaaatatatataaaaaatatttttgaaaattctcttaaatgaggattattttacaaatacataaaaacaacaaaaaaattacaaaaatacgattttacaaaattttaaacatttttatgattttatttgatctttttatgttgtactcttg

SEQ ID NO: 20539 - DNA, 6562 bp, Cannabis sativa
tgactatgaattataatttactctaaatttatataatgatatatatacatatataatattataaacacaaacttgatattaggcttagatttctgttttcctgtctgttaagttgttaaataaaagttagttaagttgtcaatgattgttagctagaaacttagattgtatcacgcctatataaggctctcttgtaccaagaccagaatttagattgagatattttctctctcttatcctactctgttttctcatatggtatcaaaagtgacattgccattttccatggctagaccttccaccaaatcttaagatggcattccaccatcaataattgaaaatcttacatcagacaattctgatgttacttttgctcccacagccattcccatggctgcttctcgacgaaatacttctaggaccagatctcaaaacaacatcgacaatctcgaacatcaatctccaagaattgaagagattccaattcaacctcgacgatcccaaccttctctagatcgaaatgccaatgaaaatgtctccagtccctttttccttagctctgatgatcatcccggcctaattcttgtctccaccatcctcaccggtgtgaactatcaatcttggaagcgcagcataacaatgacattggctgcaaaaaacaagatcgccttcattgatggctccattttacggcctgaaactagtataccccttcttgcatcttggtttcgatgtaataacatggttatgtcctggattgtgaattttgtctcctcttaaattgctcaaagtattatgtactttgatcttgccactgatatgtggcacgatttagatgaaaggtttaatgagggcaatggacctcgcatttttcaacttcaaccttagcttactcaactacagcaaggtgatcattccgtcacctcctacttcacaaaactcaaatccctatgggatgagctgaaagaatttcagccaaacactacttgcacttgtggtgcaatggaacatttttttgattactataatcaaaattaggttctgcaatttctaactggtttaaatgagtcctatgcttcatttcgtgcccaaattttgcttaatgaacctatcacaaatctgtctcgagtttttgctatgattgttcaagaagaatgccaccatactcttggatcttcagataatccacctctcatcagtatgccctcctcctaccaatctcccaagaaataagaaacaaagactttcttgttcacattgtggcaaaccaagtcttttagtggataagtgtctttttatcaacagttttccacctagttatggagacaaaaaaaaagactgagaaaggcaaggctcaagctaatcaagcctcggtcaatacctctacagatcataatgtaggcccctttatcacagcagatctttcatcacaatgccaccaacttatttctcttctcagccaacagctaagttaggctactcctcgagttgaacctgtcacaaaccctgctgcttctaacatggctgataacatcttctctcacccttttttaattgggttcttgacagtagtgccacacactacatgtgttccaattcatcttactttgcttcattttacaacacatcattccccaagcatgtcatgttacctaatggtcaaaaggttacaatttcaaacataggtacagtctgcataaattcatctctcaccttgtataatgtattatatgtccccaatttcaaaataacctcctatcaattactgaacttgttgataatacaccatacattgttttcttcaaaactaactcgtgtattatcaaggattcttctcggagtgtggtgattgggatagctaaacaagatggcaagttatacttcattcctcaagacaatccacttgctacaactagtcaatcttatttagctttcaataaaccaaatgtagatcaatggcacaatcgccttggtcacccatcaatgtacatttcaaaggtttttaataaaaagattgatccttccttttatgtcaattctaatacccattgtcatgtatgtcatttagcaaaacaaaagaaacttccatttgtttctaacaacaattttgcaatgaacatctttgacctaatttacatggacatatggagaccttttcccatcataagcatagaaggttataggtattttttaacaattgttgatgacaaatctctgtttacatggacttacatgctgaaaacaaaatttgaggttcaaacaatcataccatattttttcaccatgatatgtacacatctctcattccatcaagaatatccgttctaacaatgtcaaagaactaaatctcacttccttttatgaatccaaaggtatcatacactaccattcatgtgttaaagaccacaacaaagttcagtggtcgaaaggaagcaccaacacattctaaatgtggctcgagcattgggttttcaatcccacttgccactggtttactggccttatctggtttcaacaaccacttatttactaaatcacacaccttttgccctactcaaaggtagcacttcctttgaattacttcacaacaaaactcccaactatgatcatcttagatcatttggatgcttggcatatggttcaacactagactccaaacgacataaattttccccaaggagttgtgcttctattttcattggttaccccttgggaatgaaagcatatacccttcttgacattgaatctaaacaaatatacatatctcgtgatgtcatatttcatgaaaacatcttcccacttacctttactacatcaccatcaaagatacactagtttttttctcaagctattctccccagtcaaaaaccagtcacccaagcatccaacacccaagaacaaatacctccaacaaaggataaacatactgctttgctcaccagccctcagaccaccaaaactggtcgtatagtgaccaaaccagctcatctaaaagattatgtatgtcatgtggcttccactgcacaccccatagagcctttcctatcctacatcaaattgcatccccaatttagagttgttgtcctagtagcatacactcatagtgagcctaaaaactatgctaaagcttcacaatttcaacattggcttaaagccatgcacagtgaaccacaagaattagaaaaaataagacttggattatcaccaagctactccctggccacaaagcaattggctggaaatgagtatacaaagtcaaatataatgaagctggagaagttgatcgattcaaggcacgattgatggccaaaagctacaaccaaaaaccaggaatcgatttctcccaaacttatgcaccagttgcaaaattcaacaccttaaaaactttcttgccttggcagccatcaacaattggacaattcaccaattagacattaataatgctttcttcatggggatctccatgaagaagtatacatgaaaatacatcctggatacaatgctccccctaacacaatatgcaaattaaataaaagcatatatggcttaaaacaagcctcacgataatggtacgccaaacttagtaacactttactcaaggatggcttcactcaatccttgtcagataactcacttttcatcaagcataccccatcaatttttttggttgttcttgtctacgttgatgacatgattgttgccaacaacaatgaatcaactatatccaacttcaaacaacaattagacatcaaatttaaacttaaagaccttggacacctacatttttttctcggccttgaggttggcaaaattaaatagggaattttcatctcccaaagaccctttaccctttagctgctcaatgatacaggctacataggtgcaaaaccaacatctacacctatggaaataaacttgaaactaagtaaagacaaaaggcctcctttttcagatcccacagtttatcgtagtctcattggcaatctcatatatctaaccatcactagacccgatatttcctatgttgtcaaccaccttagccaatttttatcgtgtcctcgtgtcccttacttacaagcaactaatagaatttttcagtatctaaaaaatatccctagccaaggcctctttttctcttctaatgtagctccgaaattgactgcttttgttgaaaccagtctatctacagcaaatgttcagatctctttttttgctaatgccgactggggtagctgccaagacactcgttgatctgtctcaggctactgcatttttcttggaaaatctcttgtctcctggaaataaaaaaaaacaagtagtttcccgctccttcgctaaagtcgagtatcgtgcaatggccaatgcaacctctgaactaacctggctcattgctctactaaaagattttggcgtctcccacagcacaccagccaacctttattgcgacaacactgctactatacatattagtaaaaatccagtataccacgaacgcatgaagcacgtgaaaattgattgcgatttcatatgcaaaaaagttcaacaaggatccatccaacttctacgtgtatcttctcaacaaaatctagcagacatcttcactaagccattacttccaactcccttctctactgttagttaattttctgctaagttgttaaataaaggttagttaagttgtcagtggttgttagctggaaactcaagttgtatcacgcctatataaggctctcttgtaccaagaccataatttagattaatgagatattttctttctcttctcctactctattttctcatacttgataaacaattttgagataaactaccatcttaaaaatagatcacgattggttgaaatgtttactatgagaaatagtgtttttgaatatgttaatttaattctttagaaattgtaatttaaaaagtgacaataacaatctgcagtaatagattaaaatcttgttacagcagaacacagaattaccgtagtaaaacagaaacaaaaataaattgtacaaaaaataaaacttacacaaaaacattgtacgtggtatcagtgttctttcgaacactcctagtccacgtgaccacccctagagaaagaaatcaattagtaaagtctcaaacaactacaaatacaattgacttaaataagttccttctcgtggtctctgacaagagaaacccatctctccctttatctcttccttatttgtgctgaaggtttctcgaccttaatttgaaaatatgaagagtggaaggggattcacgggtataaagtaaccaattgagctcctatgatatcccatatgctttttgttgatgatagttacctatattgcaaggaagttaagagtgatgtgcatcgagtccagcagctcctagtagtttttgagcttgtcttgggtcaaaaagtcaatttttacaaagtcttcagtgttctttattacaaatacgacaagccaaacttgagatcgcatttgtaataaatatgttgggaattgatgtcaacaatatgggctaacacaacaaaaaactatccaatcaacccaaattaatataatcaataaagattaatataagcctaaataaaaagtctaacatctttcattgtggtgttgtggtaaaattgaggtttagtgacatgtggattcataagatttatgcttatacttttttttattgactatattattttatttcaatggtgagatttacagtcatattaattaatctatatatatttatagagttttgcgtttgggtggtctactttcgcttttttttatgttcgttatgcgttaaagattttcgcaagagcaaagaaattatgatcacaataatctttcatctcgtatccaatgtggcaagattgggacttactatttcacatctttattttgcagatgaaagctcatttttcattaacactatgcttggtagggaggatgggtgatggagtggagggaaagagttgaagggggagctagatagaatccattgtgttgtaggaagaagaaagagaggagagaagaggtggaggaagactttttccctctaaatcttaaaaattcaatctaaaatgaaggatttaaaaaaaaaaaaaaaagaaaaagaaaaataaataaatatcctaaattccaaaattattttcttaaaaacaataacatatatttatactaaaaatgatataaactatgctaaatttaataactaacctcatttccatcaattcacctttactctttacataataataataatattactatcctttatgttcttcttataaattttcaatccatcctgccctccttcattcttaccaaacatagcctaaagtatcttcaacaacttgtagaagattaaaggagattcttgagtggtatagtaaagcttcaggctaattgctcattttgtaagtcactttgtttgttttgtaataaaaatatttgtaagattgccttcgcatgacctctattatcggcgttgctaaggtgggttgtcatacttgtgtttgggtttaatggcatttaaataacatggtgtttggttttta

SEQ ID NO: 20540 - DNA, 6145 bp, Cannabis sativa
aaaaaaaaaaaaaaagaataatagctatttctcatatgttgaatgaaaaatatagaaaatttattgcaataggtaattatcaaattttattatactatatgtgcaaaaaaaaacgtatttacaaaaagttgtgtatttttctaactattttctttatgtacaagttatatatatggtaataaatttgtgtatactaatttaatttaatagccttgttattaattggttaatcttgttatatttatatcatgattttattatgttattaatggattactcttagtcatcatggttaaatattaatttttgactaaatctattatagaaagcttttaccatattattgtgacaacaaaaattaatcatttattttttatttctttagtttaaattaaattacatataaacattttataataaaccattatagaatgcataataaatatttattctttaataaaaaaacatttattatgtttaattttgtaaaaaattattctaacttcttagttaattttaaaaaaaattattttatttttttaataggcatgctatattataaataataaagatatatgttgataaaaaaaatagattaataataaacataaaacatgtttataactagtaaaattatttgtatgtttatttttttttaattttaattaaacacatataaattattaatgtataattgtttattattttaattaaatatttttataaaattaacatatttattataaatcatgctaaagtggatactaaacatttatactgtaataaaaaaaataacatgttctattatattaaactatttattatttatttcattttattttatttttcaaaatatttatttatttagagaaaataacttatatttataataaataaattataaaataaacataaatttataataaatcatactaaaatagatcataaacatttatattataatcaaaattatttaaaagaactcaacttttattgtaccacaattttagtttcatatttttaattttttcactaaaacatattttaacataattgttaataatagtaaatatttaagagattgtttaataaaattacttatgaattttatatatattactctatataattttttacttttatattttattattttatttaatttataataagtcataataaaatagataataaacatttattttacaataaaaaaatatttagtatgtttatttttgtaaaaacttattctaacttttaattaattttataaaattatttattttcttttttataaacacgtaatattataaataatataaaaaaaaatattattttaaaaaaactagtattgctataaatattgattataataatataatatataacacacatttgaattttatttatttttgtattatttaatttttaataaacaaagatttaaaatttttatacattaatatttaaaattttaatattttattttattaaaaaaaaattcttaaattattataatttatactaaaatagataataaacatctactctctaataaaaaaaatatttagtttgtttactttaataaaactatttactatttatttaatattgagttttaataaacatattgtataatataagaaaatattttattattaataatttttaaaacattgatatagtaaacataaaatattataaaataacattacaaatattaattatattaatctatttatagtaattaatttagtcattaatgctttgtattatttagtgattaaaatatatgattttatgtaatatatttttttttttgaggaagagcaagaaaccccttgtcttagacaggtgcctgcttgttatacattgaaagtcctcacttgtggcagaggaaaatcaaggttacaagaattgttcataaacaagaggcaatggcaattagcattcagcctagataaaaaaaaacataaaaataattgctaggcctcaaaaaacaaaaaaaactgctaaagcatcaaagatttccaatctctacataaatctagaaaggatagatcctcaaaaagtctggttttaaatacttgagtagctgtccaaaacatagctttctcccacacatccgctttttaattttcaagaccttcaaagattctagcgtttttctccagccacacagccttaattgttgcagaaatcgccgttcataactttgttctacgcttgctgccaattaatttacttacaaacatttgtggtactgaacttggcattacccaaaacagctcaaattcctcaatcaacttgatccataatcttctaataaaattacattccaagttttcaaaatgtataagtttttaaaataatatttttttttcagattttttataattatattgtttttgttgtacatttatgaaaaaagcccaaaaaatactaacaaacaaaacatcaagttcaaactactgacaactctacaaagtagttttgagcacaagaaatcagtgtaattttctaatcttaatggggtttgccaataggcaataaccctagatataaatctacatattaacatgcctgtaaagatcagaattgtcagtaaataatacacacataagcagcagctgtagcaagctttttgttttgggaaaagaataaatagaacatcatcaagttcaagcttgtttgaataaactgtttgtatcatcatcatcatcaagttcagtagaataaactgtttcaagagtgcttttaccttgagatacataatgaaatgaaattaaatggccaacaaaacagagggtagtataggttttgctaataactcataatgcgacacccatgctatgttatgttcaaactagagaatgtactaataataggaaaattatatcacaatcttaagttactattaaaaaaaattaaagaaaagattaagcaaataaattcaatttaggcctaatagtaataaatataaatatatatttatatatctattttatataaagtgtggctatataacagaattctagagttaacgtttttgggtttctacgttaactttaaagaaattttaatttaaatttaaaatacttagaatattatagatatttttaatcatgtttttaaatttattggtttaactttgaattaaaataaaaaaaaaatgtaaatattttatataaagaaatttaaatttaaaatattataaatattttatatttttaactttattattatttattgaggaattacatcatatattgttttttcaaatttacggtttaagtttctaaagtggtttctccggtggtttttatgtgggttgctatacgattttttgttacgatttaggttatagcggtagttgcaataagagtttctatgtagaattccgtaaaattgcaaaaagaacctctttcgaagtgtaaaaatgaaaaagtccattatttattttatatttcaaactcaaatgattgtaataaggaattgagtgctttccattttagttatggtaaacagatttacacaccatatttttcttaagtttgaaaataaaaaaattttatatcaaatttacgaattcagtctatatatagacacactaaaatttgattatgtgagttttggttaagaatataataaattacaatatatgcattatcaaatatattatctaattaataaaattttaaaaatttaaaaaataagtgtatacgtaatcatatccaaatgacactccaatgtaacaatagttaaatttttttttcttaaagattaaaatcgcaaatgacatttaaaaataaaaaaaaaatacattacctaactaaaaaaaattaaatatacatatattgcttaacatgaactaattgaacctaattaaaaaaaaaaactaattataccatggaatatctagtattatatatttgcttaatcgatcgagattaaaaggtggtttataaggcctgactcatcagagtttgttttatgtccatggtaacatgactggttgagatatgctccaaacgaaggagatgaaaatgaccagaataaattcaacaattaaatttaatttaaagcgaaccttaatggtagagactagagagggaaaagaattcgtggtcaacaccttacgtgtcttttcctacatatataatcaaatataaaacacataaaaatcagaaacattataactcttccaaaagtagcatatctataacttgaagttcagtcatacaaaatttaaaacagtacgtagtcaataaggctataaaatcaattagacagatattcagagctacaaagaatagcaagataaaaagtagcaggaagcacttacaatatttaagctcacaacatataagggagagcaattccatttagctcagtatcagtccacttgtgcaaaataattttgggaccagaagcaattaacaaatggccttgaagagaaggagctactttattaactggtggtaagccaataggggacaagagatattaaactgagcctaccattttcactaacgtcaaggtataaaagtgtactaattaatcaaaagcaagaaacactaaacaacaattcacaacaaccccgtatcagaaaacagagcaaagagaaaataacttcattagctaaatctctttcagtactaaaaaccatgttaaattactagttcatccttatccacctccttaaaaagtttcaatgaacttctcacattcttcacatgaatttacaaatattttctaattgttgcagcaagtgttttttcctttagatggtactgaattatatggtcttaacaatagtgtgaagtgatttaaaatcttgattgccccggttttgtacaagtaagcaagagtgctgctttaggctctatattgcaaacctgtttccatctttaatggggtgtaaaccacaatacaagttagcttagcccaggcatattatatataatatactatactatacatgcagctatatatatatctttcaaactaattaaattaatttaaaatggatcattacctattattaattactcatatagtatatatgtattacagatgcatgcagcacaaagagaatggggaatggtggctggaatttggaagtgaaccaataggttattggccaagctctgtattcaagacgcttggtggggggtggcgatacgatcaattgggctggagaaatttttaacgatggggcaaatggtcatcctatggaaactcaaatgggtattggtcattttcctattgaaggattttgtagaacaagcttctaaaaatcgcttagctttaatgtggaaattagcaaataattaggattttaattataaaaattatttattagtactgaattaattatttatgtttatttgaattcagaatgcatttttatgtcacatatagaaattttataatttttcatacttttgtgcccgacaacattggaacgcggtgaatggctattagaatcacatcttagtatttttttagtatagagggataatattttagacattgggaatgtcgggaatagtcagaattttagaatttcccaaaataccccttagtgccattttatgacttttagtgtggaagggcaaaatagtctttttgcccatttgtatttttgtcctttagtggactttatgttgatgaataatctgattttttaaagtttaattagctgaatgatttaataaaaccattcctttatttcatttcatctattttccaaaataagaaaaaattgaaaagaagctctctctctctctctttcactctctctctctctcaaaaatcctagggcagctagggttggtgattctttgtgaaattcaagctgatttttgcaagaaattggtggtctcaagctctaggtaaggtctcaattaactcccttttcgtttcttgattttaaagatagtgaatcatgcacgtttttgcaagtttggttgttgttcttgtagctagtgttgagttatgttttcagaagctaaattatgtttttatggagtgatctgagctggttttgatagttagtttgttggatgagcaagctttgagtttgttaggttatttttagtattaattttagattaaatttagtatatttttaattgagttt

SEQ ID NO: 20541 - DNA, 3915 bp, Cannabis sativa
tgtacaattacttgaagaaaaaaaataagtgaataattataacttttgctcaaattgtggtttcgaactaaactattcttaattgtttggtttggtttggactaaactaattcggcacctgttattcactcaactaaatactgtcaagtaaaattatggcacctcaaattggggcatgcaagttagagaggacttgaagaaatcaaaaagcaaggaatgttcaaagagaagctaacagaaagacttgaattatgtgatgaatgtaattttgaaaaggcttgtaaattgaagttcaacaagacaaaacacaccaccacagaactgttagcttatgtccattttaacctttgggggccatctaggatttcatccaaaggtaaagcacattatttcataagcattataatagatggttatagcaggaaagtctggatttattttttgaaaaacaaagatgaggctctaggaaattttgacacataaaagagattgctagagaaccaaactggtaacaaaaactcaaggttctaaggactaacaatggccttgagtactgctcaaatgagttcaaggaattttgtgccaaaatgagaatccaaagacacagaactatgatcaaaaccccttagcaaaatagtgttgctgagaggatgaacatattttttgattgagagggttagatgcatgttgctaggagttggtttaaacagaatattttgggaagaagctctaaaaagagcctgctacctaatcaacagatcgccatctgtgccaaacaacttcaagacttcataagctatggacagataaaccctcaaacttagattacttgaaagtgtttggatgtactacatttgtgaatgttagacacgataagttacagcctagagctttgagatgcatgtttctaggctatcctgaaagagttaatacagagtatggtgcttagaacctggattcaagaagtgcatgatttgtagagattgttttcaaggaagatgaaatggccatgagaaccaagagcttttctaaagacagagaacatgtatcaaatgagaatgtccagattgaggtggagtgataggctagtttaggtgtattttataaagtgttttagaggtgtgttttcaattgattatattcattttgtacataattacgcttgttttctatttgtttcagacttaaatggtaaaattcataatgtgaattgaaaatgagaagaaacatattaaatgagatgaatatggtaaaaaattctaaattttgaatgctcaatacgctccgtttgtgatcgaaaatcaagtctgaagcttcaagttaaattttgactataacgtgttcaatttgaagaaaaatattgtgaataaaagttataaatctctcctctatctttccaaaacatcttgaatcatctaattctgagtaatattgaaagagttatggccaaaatattatcaatcagctcactgccgaaataaagattttactatgacaaaaataaagttatgacttgaaatgaaataaagatactaaattagtctattgggggatcaatttattatactatttactataatgcatgcaacaacatgatgttagatcaagtgtgaaaccatcatttcaattacttcctaaaatagttagaatttcttcctataacaaaagctttgagttctcgagtttgtgccttcgggtagatctagggccaaatgatcatccctcgattagggtcatttctctcctcttatatagtatacatatagaggtgtggttagggcagtgcttgagaaaataggagcccaaaacaacataaaattatggggctcctttcaaaaagagtagtcaaaaaaattgtaaaggagaatcaaaggtccaaaaaaatgatctaaaaaagtatcacaacctaattcttagaatgttttcctctaataagtaatgttttaaccaatgatctattataagtgataagaatatttatcctctttaagcattagttgtgttctctgatttaatggtagaggttagtggtttgaaacttgttggtgtattgtgccaaaaggctaatggttgaagaaacaagcttgctattgcgttgttaatttgttatcatctaatgcaataattattgtactaaatatttattatattaagtaacataaaaataaatttatttttattttttggggcttcgatagggtgggggtccttaggtgtggcctaccttgtttacccttaaaattagtttggaaggtggtgtatgattaatgatattttataataattattaaattaaattatatagcgtagaattcaataattaaagtacatctgcatataattaattggtgcatatattcatatctctatttataaatgaataaatgctcatgaattaaatagcaataattagcattcaatatatggcttgaatggagttacttatttattatttccttcaatattaatccatcctatctattaacaatataaagttttttttcaaggaaaaaacaaatataagttcacaaactttttcatttcaagattttgttactcaaaagcaagttttgtttataatattcctattatttatcatttgatactttatgttctttataataatatatcttaaattcttacaaattagtataaaatggttacccaattaatgattaaatttttcaatataatcagttaaatagtactcaattataaatatttcaaaaagtatccacacacatgtcatatcctaatgctacccatttttttttttttttggtgaaaagggtggtgcgaacgcaccagattcattgaaacaaaagcaaaatacagcacatcaaccaaccaaaggctagcgataaagtctaagaaacagaaaatcaaacaacaaccttaagacataaagctacaacaaacagggagaaaaaaaacacacggccaatacaatgaccagagcaaaaccagaataccaaaacaatagcagggtctatcccggatcagggacccattcagtatcatccagaaacactccttcatccatggtgtttactgcaagttccccaacagagccatggtatcacgcccattttgcagagttgtgtgccatgaagttgaccccccggctgatcttcttaaccttccaatttccaagtgtgcgaacagctgaagagaacctttccacggcaccattcagcagctgatgatcctctccgtgcaaagcgttaaagtgtgttaccaccagcgtattgtcacagaagaatatgacgttggtgaaattgcgtcgcaccccgaattcagcagcactcgccaccgtcaaggcctctgccaatgtgggatttgttacactgagatgtaccgagtagatggcctgaatttggttactcgaatccctgaacactgctgctccgtaggattgatccgcatcaatggaaacatccgtattacacgcaatccatcccgtaggaggagttgcacttatttcaacaatctttgaaagaggttggcgagcggatgagtgatcatggaattgacgcctcacgattccaataacctcattaataggggtactgttggttccgtgaattaccttgttacgattgttgaaataataccataagataattattttatttgtatgggcaaaaatttcacaagaggcattgaaaatgtgcctaaattgtcaaactctacattaataagtagggaaggaagggcaataatgattaatttggtcaagcaaaagtttggccaactagttaagactaaattacaaaacaagaaataacaacttaattaggtaaggcaattaaggttggtttgcaatttgtgttattgtgttgtgttcgtgtcaacacatttgtgagtacaattaagataaacacaaacacgttaaacgtgtcaaaaactcaaaca

SEQ ID NO: 20542 - DNA, 1400 bp, Cannabis sativa
cattgctcttaataaatgatccttcatgatcctcattatcatggtttagataagatcatcatcagaattactaagaaatcaaacgtttgacatatctgtccatggatttacatagggattaaacgttggatttttcgtaaatcagttgcgagctttgtaaatcaaggcaacatttagcataagcatattgattttacaataaataaaatgtttgatgtatttataaatcaagaaaatgcttatttaggaccccgacattaagattaagctagaaacattaaattttttgaattcgagcaatatttagaaataacaaatggataataattgatggtgatgagtattatcagagttaaatatattaactgagttttttactcattcataacaaaataagaatgtgattgtgttgtgcttctaggatgtataagtaaacagagttatcaatgagagagggagtcaaatagatgagtggttcttttcgagacacttgactttgactagagtggataggtaaatttagaaaaattgggactttaagaaaaactgaaaaaggtgaaaaaaaaaacatttgacaagacactacacctttatctatagtaggggtgttcatcaaaccactcacactgcacaaattgcctgcacctcaccacaccgcataagaagtgcggtttgaaatcctttgcagtgcagttgtggtttgtatttttgccaaaccgcgcggtcgatgcaatttgcagttttaaattttagtaattgcagttcaaactgcaccgcactatatattataaaattaccaatttttacaatatgatttttttatttttttataaaagaacaaatgtatgtaatatatgggtatataatattattttttagagacaatgacttgatgagtagtatatataatatgatgataaaactttaataaaatatttttttcttgtattgttaaaactttattagattgatttttaaatttttaatataatatttgataatgatgatagcgtaaaccgcccaaagcacaccgcaccacacctcatttttgcagttttaaaattttgcggtgcagttgcagtttgagaaattacaaaaactccatatgcggtttggtttgaaaaaaaaaattacaaatagcaccacttgcaccgcgaacacaagaaaaatgaaaaaaaaaataaaaaaataaaaaagccctcttagggcatctccaatgcttaaactcaaatatagtgtcaaaacaacactaaatgagtataattttagctctaaatttttttctattacaaccacaacactaaaattcatactaaaaaatattttttattattatattattttattaaactatctcacattataatatttatataaatataaaaatttaatcataaaca

SEQ ID NO: 20543 - DNA, 5606 bp, Cannabis sativa
  modified_base (626)..(629): a, c, t, g, unknown or other
  modified_base (1264)..(1271): a, c, t, g, unknown or other
actagaatgttttcgaccctttgcccagtgaatatgcatcactatttataaggctatgagcttggagaggaagtatttcccttttcgttacacttgacataagcaaaaagattgcatactaaatacagagtacactgatcgtgggatttggacagcttgccatatctctgtaatttgatctccaagttatagggatttccttgatgactcacgatgcggaagttgaatttcctaagtgcttgttattctgtgcgggttgctgactgctttgtcttgagcatgcatataaggtatcctgttcggcctatatcttgcgagcagataactagagtcggttccacgtgtcaccatcgcatgatgccacgtcagagtgcaaaaattggtttaacattaatgcatgatattttgttagaataattaaactctttaaatacatatatttttatatgtgctttttgtgagataagactattttgaatattaaatttataggttatatgtattttatttattctaaagttaatagtattgttttcacatatttttgcactatttaatctttgtcaaatatttaaatctaaaaaatccttatattttttaacaaataaaaataatatatatttttnnnntttttattttacattattaattttattgaatatatatttattttttcatttttctacatgagagtcatatcacaaaagtcccacatggtatagaaactattgtgggtgatataaattcacattaaatagatcaatattcttttatttttatttgacacaaagctagtataatttatttgctatgtgggtgattgatgaacttaatcttacccaattagttataatttttttttcaagtgaatgcaaattatatttttgtattttttaatatttatcaagtttaaaataattacaaaaaaattatttaaatattttttctattagaagtattttcttataattcttttgttaacacaaattttcgttaacgatataagcctatttttgtgataggatttgcacaatgttgacctcacttttagccaacgacaacgagttaaataataagcgatagaaaatatagttaatataaaataagaactaatgaacagtaaagaacataagattttaaagaggttcggccccgttagtttgctaatagcctactccccttggatttctattgactcaagaacaaagaatacagtgtttcctctctttaagctctcaaaatgaaatctctgagtgtattctcnnnnnnnnctctgaagtaattctttcgacccctataacaacgagaatggatcactttttatagggttaaatactaaagggaaggttttccttttgcttacaatatctataattggtaaagatataaattacatattaagaatacatagatagtgagattcggacaacttcccttatccctttgatacgatcccttaattttagggattgttttcttgcttcacgatgccaatcttagaattgccaagtgttgatacgctgcttgaaccatctaccctaactctgctcggtcgcgtagattctatttgtgcaagtgtatgctgaagtctatttagaatatcttttcagctagatgtaagaagtaggagccaagtgtcaccagcatgtgctgccacgttatagtgtaaaaaaatgggataacattttctcccaggtctgcacgggacttccaaagtcacgcgttgacttcacctagattgacattgcgtctgagcgggtgacacgtgttcgatgagcctgttcgtgatccgatatgattctgactaagagtcccttcgatttttgagtaattaatgctttgattgaatcgtgcctcgagatgcgccatttacttgcatgcttttgacggttactctcctcgatgcactcaattgcttttaatttcccaatatttgcttttggggggaaatggaggtgtttgaaatttcccttaattgcagctttccactgatctgcctataaatatgatagaaaatcctaaataactacttttagcatctttctcaagtaatctcagagcaaagaaacacttttctctcttgaatccttcggggaattagctaaaagagcagatcagcgtgatcgaagcaacctaatggcttcgaacaatgagtaagtttctcatccgtttatacttgaatctttagttttctggatttccattgtagaaaattctatagttcttgacatgttttagaaaaactgtaaagaatctaggtttagaactttgaaacttttactgtagtagatcatataacttgattgttgtggcatttcgactttaactttgcgatgtttggttctcactttgctcattcggggtttagtgtagattaacccttaattcaaggttttaaaattcttggttacgaacctaatccatacaaattttctgtctttttaatcttttgattagacctggtcggtatatttttcttatttttgttcgatatcccagccaaatactcatcttgtgtcttgtcttttatagatgaaccccggtgagtttttgggaggagaacaccatatggaccaggatcttcttcaacctttgtacgaggatcaacctcgtcttcgttccagtccgtcctcttcgagttacagactttctaactcgagtttcgaggactgggaagtgattagtgaaggtacacccactccaaaacccgaggtacaacacaatttttactcctagcaaatcgtaggagaaggctatgggggatttatttgggaacttaggaaggggtggagacgttatcttctgtctaactagacatatatcgtccagccaaatgtagctaataccgttcccgtaggccgcccaagttttggtgcctttggcattcctatagctggtcttgtcgtgactattgaatgacataccaaccaacaaccatccaggagtaggatgattgcccacacgaaacagactatgcaaaagattactggtgttgagcctcacgtggctcggcatgtcgcgctgccaagcaccgaataggccaaatttgccgctcaggaagaggactacgaatgggaggttgaattccaggaggtagaggatcaggatgacaaccttcctgatagcctttatgaggccgaggaggagggggctactcgacctctgtgctttggaggctacaataaggctggggagtcggtgttcgatgtcagtgacatcttggtagagggagaagattatgtcacccaggagtatgccgaggcggtccctcacaggaggcaaggtgcctttatagcttggtgggtgtgtcctccgtccatcgtaactgaggtccagttacggaattcggagaaggatggatacttgggtagtgtcgagtgcttcctccgttctccaaatcaccgggcaactagtccaagggagggatattgtgcctggtcgggtgctcacacaaagcaaggtgcgatgatgcctttgcacccatacttcaaaaggattgcagactactaccacctttttctgacccagttcacacccaagggcatcaaatacttatccgccctattcatcctctatgcaactcaaggatggggtgagccatctccgcacgacactaactagctcttttatttgaagtcaacgcccaagcagagtaggtaggggtacttctactactcccagctggacgataagttgataaagggaacagtagaccctgcagtcagcaaaatagggcattttgtggatgagtattacttcgtgactggcatggagactgtccatactcagttccagcagattcttgcctatttctgccctcctttcacgctagggcttagggaaagggggcaaaaaattctccaattgctggaggatgatcggaatatcaccttgttgaccactgaggccaactttgtgaactaaaaactctatctaggggatttttaccaaagcccatgaaggaaaagaagaagaagtgcaagatgagccgagctgaggatgtcgagcaagagaaagagctcattcaactgaagcgtgaggctaagtcgaagggaggtgttggagccaagtagtatgctcaagaatattcagagcaggagaaggacgctaaagactattcagagaaaaagaggccacacaaaaagaagaaaactctcccgaccgagcaagcgccaatagaacatggcatttagatcagggaacttggtgtgcctgcttagccatcgacccctgtgaaggggaaaggaaaagccgttctggtggagcaagaagactctttagatgatgatgctctatctatgattgtttgaaagaatgcccctgccagcgtgcagagtatttcaacttgcatttatcttctttaattttcatgcttgcacatattttattccttcttctaaccgtattgctttatctgtgcagagatgtctcaaaagatgatccatgctctaaagaagtctcctccaaccaagaagtctaggggtggtgagattttgtccaaggagaaggtgcctaccgacatggtcattgatctctctgaggagcgacccgctgtggaccctccaactcagaaggtcacgaagtccaaaagttcttgaagagggagtttggacgtgttgagcaagttaggactggatttgaataagccagggctagattcgaataagtttgaaccccttcgacaactctagcgctatgcatgtaggccaggagaggcaaagacatgcttcagcactaaatgactcgatcacttctggaagtgagcgaacagccatcaagggcagatagcgagttatccttggaactagttttaggaggatttctaaagaaagttactcgggtgaatccttttcttccttttttatccattcacctttgagtaattcatatcttaacatatttactgtgcaaaatgatatgaaaatggcttatgcttactcccgagccaaatcagctgctgtcaagaatcttggcactaccaacacgatgcagagggacatggacttggccaggagggaagctaaagatgcgcggaaccagctcgaggttgttaggaaagaactttgggagataaacaagaagcttctttctgccaacaccaaggtcgacaagctgactaaggagctgtaagatatgccttcaaccgcgcagctagaggcgaacaacgtttctctatcccaagaggttaatatcctcaaagatgagagggagagtctccagactcttcttaacaaacttgaggaggatgccaagagcaaaaagacagggaggagaaacttgtgacagaagacggataactaaaagaaggacatcaagaacaagaagtccaaggtggaggagctcaagagggaggtgtatgccttagagacagccggccttaaggttttctacgagttttggaaggcaaatcctaaaggaaaatttccttatcttagtgattccaaagatatgtatcttaactactgcacagctcaggaggccaatgaaaaccctgaggtgaccacgtctactgctcctacggaccagaacactgacgttccttttgttcagcccgatgatcctctagctccttcaaaccttactatccataccaagagcctaggact

SEQ ID NO: 20544 - DNA, 1867 bp, Cannabis sativa
tcaaactttaacatcatgcccttaaatttttttaggttattaaaaatattttccgaattattaagattgttggattcaataatttttgtctaattttactaagaaaagtctgatataaataaaaatttagaagtataatttagtacatattaaatccaataatcttaataatttgaaaaaaaatttataacagtttgaaaaaaatgcaaaacttaaattttacaataacataagataattaattggatgataattaaattagttattttacaataactatataagataattaaattggatgattatttgatccttgaaaagcacatttgagtaaaaattacttgtatatggtcaaacatgatctattatgtatgattaaggattcaatcaagatatagaagagtactataatatctaatatttttggtcattttaaaattttattatttcacttaataattgtgcaaagaaaaaaattatcgacttaattaggtcttggctcattgtcatcaacctaatcttggactgaagtcacacactgtatttggtccaatctaatgatacaaagtcaaataagtaatgcatttttatattgcattagtaccatttttattattatttttttaacattaatcttagaagtttacgtattttcctaagccataaaaaaatagtacatcaatattacatatttctaagggtacatcattctactcaattagtggtattgtataataattattaaattatattatgtggaatttaatatttaattatacaaataataatataatatctctgcatcatcataaaatttagtattcggtgaatagttaataattttatataacaatgattaattcaaaatatatgaaatttaataattaattacgattaaatattaatcattataacatctatagtataagttacaaggtaaaattatagtacatttaggaatattttagtaaactcctatcaattttagcattgtagagaattttttaatttaactttttttataatcacataaattgtatttatttaaaatcacttataaatttttaaaaaaatttaaataatttaaatttaaaaaataaagtgtactatagaaattttcctaagttatatatcactataatttttagcattttttttttttttttgaattaagcatttatatattacagtgtataatttggctataatttggcattcgaacagtacctccacgacacaggcaccttcttataaccacttgagctaaccaaaattgagtttttctttttttttttttttttaagaaaacttagtttaagaataacatggccgtagagtagtagtactgtatctattattttttttttttaaaaaaaaaaaaagaaaactatctatactaaaatctttggtccaacgtgtttgtcacctaacacctcaaattaatttaatcaataaaaaacatgaacatgtgatagtgagatgtagggccagcgcgtggatgcactgcaatatcaaacgcgtggagagaactacatcgctggatgtcaagatcacgctttacgagtcacgatacggaatgaacggatccgaaaattgagttattaagtttatttatcgtctcgttatatcgtacctttggttcagatgacgtggtatgttgctattggctatctcgtcatcctgacgattccccaccgaatatataaaaatatttggtattatcctagttgggcttcgctagatgggtcacctttgttgggcccacttataatattgacccctacttaattacaattttgatttttatttatttatttttaagtgaaaattacatgaaatatgggatttcataacaaagttagaaaaa

SEQ ID NO: 20545 - DNA, 3294 bp, Cannabis sativa
aatctatagcttttatctagacatagaagtgaaatgatgattgctctagaaaaagctggccctttcgagacggcggtaagtagctcctctgccaaaaagaggcaaaaactcgtggtgtcagatttcgacatgggggaataggggatcacccctgaaccccttacgccaaactgaggatgggccaacccaggtctctcccctcggttgcatcaagaacgccttttgtggggttcgccttccttaggagggtggttccttgcgaccctctgaagattaagagggaaaaggaagcgagcagggccctgaaaggatgtctggaggcggaaaagctccaaatccgtcagtgcgtgaccgtgatgttggcagtttgcaaggtagaacttttggatgatatgcacgtggtgcccttaaggggcagatcgtggaggtcgaggccctgtagaactagttggcttataggctagggcgagaggctgctccttttgttgtagagctcttggatcaggtggccgggagtgcctcagaattgcccatggagacatgggtattttgcaacagcgtaaatgcttttgcgctagcccactccacaaagcggcagaccattggggtaagactttaggatgcttgctttttacttttttctctattttgcgtttacttttcatatcctacgttttgccaccttagtcttctgacttggccttatttttcgacaggcggccttgctgagggaaagggccactatggaagttggtgtgctagtgaaagaattagagcgagtccgggcaacaaaccgtgatctgggtgctaccaacgagacccttcgggctaagcttatggatgccaagtttcaaattgagggtctgctgcaggccaatcaataattaaatgagaaaagtgcccgctaagcttgcttcatccagaatatgaaggtcgttcacgacctttacacagagactatggagcggatctccggtgcagccccgccctctccatcaagccgcgtccatccgtgaacctccagccagcctatttttaaattttcttattattattatttttcgtatatcctctttttaactacacctttttagccgcggagacaattaaactttgccctggccgcgaggggctttttagtagtagaataggatatttcatttttctgttcctttcttggagacttgttgtgataggctgtctagggcctggttgtgttttttgaaacaccgagttccaacggccagtgtttcactctttcttcttttagtcttgattgcctcctagtagattgaggagctacgtttcggtttgacccttcctttctcggtgccgcaacgtctttttggcatgctacccacccagatggttattttctttgctacgagatggcccttctctgcgaaacaaggtccttcataatttcctgcattctccttggggtttggctcgttcacaaggtcaagtccaggggtgatgtctgtgattgctttggacatttttcttacttgggtccttgtcagcctttcattccggcctgttatccaacttgattgggtaagttttcatgaaggttgcggagacgtgaaagaagggattcaggtgcatttttcttttctaaaaaagtttttgctaaacgtgattcttatcaccgggttcacttctgtagtttttgagggaagaactcaagctttttctctcggggagactttggttgagaacattgcctatttttattgcatgtatactctttggctaaatgactttggcaaacagacataagatattgcagctgtcagcaatcagacatattataccccccaaatgagttgggaattttgcacccaaatttctggtcatttactccgagtttaacttgtgcctctgtctctgaggagttgggcatagctttgccttatttcgggacgtacattgcccttctgaggtagtttcatagtcactttcacgctctgggaatggaaaaatggggttctggtcgagaccctggttgcatgccttaacaatctcctcatggcgtaaaccccgtaagtgagattcttgtggcacgagcggccattagtttcctagacggaaagctaagcttgcgtccttgtgcaaaccatctctcttgcataggggctgcttgagtaaaaatcatgttgaactctcatggtggctttcactaagaaaggttaaaagtgcgcaaggagttcaaacaatatatttgcttgcaaatgccgaagggtgcagtatcgttgggttcataagagtaagattgggttcaagttgtccttctgatctgggaagaagggttgaagatgtatcgtacccccactaatcttttttgtacaagaaacaacattcatgcgagagtcatgttgaatttttatgtaacaagcttcgacttccaagaaggaaggctgaagttgtataaaatttcaagcttagacttttcttgaaaagatcaaggggaaagaatcacgtagggtaggatagacttcaagcagtccttccaatccgagaaggagggttgaagacatatcgtacccctagtaatcactcttgcacaaaaaacaacatgcatgcaagagtcatgttgaatttttatgtaacaagcttcatcttccagtttctaccaacagtaccataaccaggtctcactggtaacccagcagccgttgatggtactgatggtctcctctcaagcggtgcccattggaagatctgtttctgggcaactttaccacatgtagaaaagacagtggaagtagttgtcgggagatagatccagccctcgcaccagtgctagtgccaaagtttctagttggatagagtcattgcatctaacgaccctttctgagttagtagtcataactgcatcaggccataactccttcgttcggctctagtgcccttgcactgctctatctacgcatagtgatatgaagggggatttgagcctgaggatttcgacggttgatcttgcccccagagagttggctggccagatctaggcttctaaggatggatatcagtgcagcaggtgttttaggactgcatgcatttgatttcgccacctttcttgggcagactgtggcaccaaatctttttctgggagacacctcaaatctgcgtgtttttggccttcagcctaaccttttcaagagatcaggaggtcttccttatttcttgcacggacctttttcgaacaggcttgcgccggtagccatcgtgcatatctctttcttcagctctcaatgaaggcaccaaaatgtttaccgagttttttggaaa

SEQ ID NO: 20546 - DNA, 4563 bp, Cannabis sativa
  modified_base (3865)..(3866): a, c, t, g, unknown or other
ttaagcgggtcgtgtcgtgtttgacctgtttttatttcgtgtcaagtcgtgtcgacccgtttttgagtcgcgtttaattttcccgatcttaacccataaaattcgtgtcgtgttcgtgtttcatgtgccatgtcaaaacctgttatgccacccttacaaaggatgcataagtacacctaattatagcctataccttttaattacaaaacattaaagtataggctgaaaatgactttttgttcatataaaaacataatttatttattttttgaaaattctcatttttcaaaaatacacaagtatatttttttcatatataaatatatacatatatataagatatttacaaaaataatcaatttaagggtttatatataaaaatacatatatatttgatcagcttaatgaatatataatataagcttgcttttgagccattgcgaagctaagtatcccatggcccatggtgaagcattttggggtgtggtgatgaagaatcatccttgttttcgtacttaaagtattagttattttaaatatttcttccttctaacaaatatataataatttgtttttgtaaatatatatatggagggaaacagtacgctacaaacaagcttaggcaaatccgaaatgcagaagcattttcccaaagtactggtgttaatctgcattagcagaacataaaatgagacgagcctaacataaagtaacatatagatgaatccaaactgcaaaacacataaattacttcgtcagaagcaaccatttctgatatgttactactacaatcacataaaagttagggaataagttgggcatggaggaacagaaatttcagtaattccttctaacatcaacatcacacttttcattgaaggacgaagagctggatcatcttgaatgcaccataaaccaactttcaccatgttctccaatgtcttcttatctacttcttcaccaataacaagcttatccagctccatagacacaaagcacttgtaaacccaattggctagaacaatctcatcagggtcttccacattaacttccaaattgttcctgcaacatataatttcaaggagaacaatcccatagctataaacatctgttttaacagagatcggaatgttcttttgccattcaggggccaagtaccctcttgtaccccttacccttgtcatagttcttgtttggtctggcattagcagctttgctagcccgaaatctgaaatcttagccgtccaaaaatcatccatcaaaatgttttgaggctttatatcacaatagatgattggtgtcttacactcttcatgaagataaagaatacctctagcaacatcaatcgcaattcttaccctctcctcccaatccaagcgtttggattccttcttgaaaagaagatttgctagggaaccatagctcatgtactcataaacaagaagccttttcgatccttcagcacaatatcccaacaaacgaactatgttcttgtgattagctcttccaatagcccgcatctcggaaaggaactcgctttcaccttcttctaccaacttctcaagtcttttcactgcaacaagttttcggcctctgtttaaggcgcctttgtaaacagctccgaatgatccttttcctaattcttctttgaacccattcgttgctcttttgagatcattgtatgaaaagactctcaaagtaagttgatcaccaacaacgcttagatttccaatatccattaaccttttgtacctcaggtcacgaattttaaaagcatatatgccgaaaattgcaagtgcagccaaagaaaatatagtgaagcccagaactaagacaataatttgcaccatattgtttttggtcactccttgattcctcgactttggcgtcttttctaatgtgttgttggaatcgatagtaatagtatccccaaacttgaagaaagctgttgttgactgtgaaaaatctcttcttacatatttcaagggaagctgatgcttcgtacagagtccgttactcctgtaatacagtgccacgccacagtagcagtcttccaaacaagattttctacattggtctggatacattttaactgcggcatatggattatcactccaatacatattctccatctctttgatattataagaagtagtattctctttcccaccatctctgcactccctcaatggatattttctcaagcagtacggagtgctgcctttaatagaatcagcataatcagttccgggaatacaaagagactttgattctgcgtcaactgttgtgcaatagctatttaagccacaagtaccccgcacttgacaaggattgtcaattgatgaccacaccattgattctttgagattctctgtctcttcctcacgcctgtgcgaatacaaccgaaagataccatctgcgtcaagagttgccctgaatatggtaccatttctttcagtaatttcatatgaagtgccatcgtcattcaatgaagaaattatcccataattacggttcaatacggctagaagaccagtttcgttaagataaagagtatagttgatgactggtagtcttgattgggcagtattggtggcccaatatgcatcttgaggccgatccccgtctttccttccatacaagacaaggtttccatctccttgcatatcaagatgaaatgttcctgttccgtgattagtattgttcgagttcgagtaaagtctagcaccagtagccaaaaactgaccctgcaggatcgtatcagttgggtaatcgaaactctgccaaatggtcttgttatttttattatacagaacaaagttcccattatcgagcatggatgcagagaacactgtaaggaaactggaattggcaacacgagtttctggttcatgtgctctagtcaagacaagcttgccattgtcaaggactacttttgggctactggaggtgagtatcggtcgactatcccgatttgatgtccaaacagtggtgttcttctcagctccgactaaccagattccaatggcatagcctttgccataactataaaatccaaatgaaaaataaccagatgatgaagaccagaaggaatggtcacggctagtagtagctattgggacaagtgaagcgccctctaagataattttatcgtctgctgatgcaagcaaatgaagtgatattgctgaggcagagagcagcatgaaaacaattgagaaagaagccatgaattgatttagtgatgtagtctcattgaggatcacacaagtagtatacttatggctatttaacttattttcatttcacgctaaagtcttcttttaaacaaaaaattaatatatcagcagaaaagaaattacttttcttcttcttttgatatgacttttcttctacaagtatagggttgaccgttgaaccaggtcgtgttagtatattgatactgccaattttcaaatggtaaacagaacattttttttcctttcagaaataattagcattaatatgaaaatgacaacattgtaaagtattggagagtggagagaaaatgaatctgattattattcaataactttagcgtagagccaagtatatatacaactgcaagtgactaatcagctgaactaatactaactaaaaactgaagaagttaattgcggcataaatcttaattctttcactttgcttatacttaactttcaaaacttaaattttgctaataaaacccctaaaattagtaaatcgttagcaaattacagtttctatctattttaaagttaagtgtcatattagactgtctgtgtatatatctacgtgaacacgttgtatagaaggcacaattttattggtccatataaaaaattatttnnaaaattaaaaaaaaaaataatttgaaattaaaaaaattgtaaataaaaaaaatgtatattttttttaaaaaaaaactaaaatataattaaaaataaaaataaatttaatttaaagagtataaattgaaaatgataaaaacctaattggaaaccctaattccctttctctttcttcctcactcgacaccctctctgtcttccttctgcgattgtgtagtggccactggcacgacaggatcgtcgtgctccaatcacccatgccccgagaggaccatgcatcaccgtcctcaggcccagaaaaccccctcgccctatctctcgctcttcatttctttctcaacggcgagcatgcacagacaaagtttagacccttgccgacactagtggtccaaacagaccacaaaatgagtttccccaatcccaaaagcctagaaccctaaccttccctcgctctagaactctctctttctctctcattcctctcagtgcaacaacggcgaaggccgcgatggtcgtccatggttgttgatggtccaagcgaaccataaaattgtgatgccagaatctcgaaactcaaactctgaagtctcttctttgttagaattaatattgtggactaatataatcataaacttaataccataaacacaatcattaactatgtgcccaatatttgttcataaccataatgggatgg

SEQ ID NO: 20547 - DNA, 3579 bp, Cannabis sativa
  modified_base (83)..(92): a, c, t, g, unknown or other
  modified_base (371)..(397): a, c, t, g, unknown or other
tgattttgttagggttgttattggatcaagggttatttggctggtatttgagttattaaagcactacaaaaaatcttactttnnnnnnnnnnaaaatttatgactaaaaataaaaatgttgtgactaattataaatcatcatttctatgatgtgactaaaagaaccgtggctaaaagtattagtcgcaaaaattacaatttgttgcgactaaatgtaattttagtgacaatacttagtaattttagtgacaatacttattatgactaaaaaatacttattatgactaaaactaatacttattatgactaaaactaaattagtgacaacttgtatttaaatacaatgctttagtcacaagtaacattttgtnnnnnnnnnnnnnnnnnnnnnnnnnnnaaaaaattatgttgtgactaaatagttgtttccaaaaatagcaattttttatagtagctcatggactcatgagtaataaattgccaaaaaaataccattttctttacattaaattagtctaataaatcatgtcaaaaaaaaaagtctaataacatttgtgtgtttttcatgatccaaggttgaaagaatagctaactttcaaaaataaaaatattgtattatatatctatatatattgttaaaaaatgtattatatatctatatatattgttaaaaaaatgtattatatattattaattagttaggtagactacttgttcagactcataaaactcgttatagtttataaataaaacatttcagcagagctaacctaggtaagtaagttaaaactatataatataatgtttgcgcgtgtacctaagccagattattgtctgataataattaattgaactaagtaagttggaaataattattaattaatttaacactaattatttttggcaagtagtttagcactaattagtttgttcagtgaagtgatcttggaatatcagagaaaagatccttatatataatatagaaagggtatccaaatagtatcaaatataatattgggtaaatattattttggatcctgtattttgtaaaagttgttaattagactatctgttttgttaaatgacaaaatgaacactgtattttttaaaattatacaaataggaccttgaactaattttttgtcaaaataaaacttaataataatctgatctaaagatgttatgacaaaattagttatattttttgtatctgttcgtattagaaattgtcttaaaattggttatattaaaaataaaattgttgaaaattgaactcagaattctatttttgtcattttagaaaatataagattcattttatcatttaataaaataaaatgtgtaattaataatttttacaaaataacaaatatgaaatattatacattactttccatgtacaagattactagctacatattagctttaatttctgacgcaatataaaatgcggattagtagactttggtgtacctatatatagggtagatataataatgatgcgtacatgagatattttcaggtcaaaatgttaccacttgattatacaaccatgcatgatgcattggatatataaaaatgtgttataagatatagcttatctcacgtacatgtgaaacatgcataaatcaatagaatttctttttttaaagaactttcaaatatgaaagctttcaataaaacagacatagttttataaattaatgggttatgagtgatcttacagaaaaaaaaaagattcaaatatatagtatcaaatcgattacattattaatagtagatctagcaattaaacccaacaactagctatcccattattacattttatcaaaaaaaaaaaagctagctatatcccactagtgaattaatgtgagaaattagaattaaaaagtaataatatcttgaattcatccaaaaaagaaaaatgatttatcttttcttagatgcgagagaagaaagagaatggcccaaattacgcatccaataccaactggaaagttgagtggtggggtggtggacaactttggcacttcttttttatttaaggataaatggaatttggattgataataagtgaagttggaattactcaaacaataaatataaatctccctaaagagataatcaatttcagcatatctatgacatctatagaagaatggatgtttgctaaaaacaaaaagaaagacttgtttttgtctttatatgtatgtgtgctgtttgtggtagaaaactaaaagtgatatgaagtataccacatgaccaaattacctccttaatatttttgtggtgttaaatgctaattgggtgaatttacaataatgctatataattaaattatttttggagcatttttatttttacactttaaaacagtatatttttacagaattctgcatataaacccctcttgcaactagcgctacaatctaaattgcaacaaaaaatcgtaagaaaacccctattacaactagcgttgcaaccactttagaaactcaaatcgtaaattttaaaaaaaataaaaaaataataatatttaagataattctccattattctttatttctgaagaaaattttcaaattcttctatggttataatacaggtgttattagaaatttttaaaactaagtaattttattttataaatagcaggaactcatttacctctttttttacataaaagaattcacatattatttgtgtatttcttttattatttttttttatcactttcaaaaaattatagtaaccatttcaatatatataaaaatcataatatcatagaagaaatctttcacaaaaagacaaaaaagaatgacttatctttgtatttttgtaaattttttttttacaattttctttaaactttttttttttttttacaattttcttacaataattttgtggatttttttaaaaaatttctggtaattgacactaataatagtatactgttatttatggtatttaacactttgtataacattttttttataaataatttgtttttacaacaacttttgagagttttttcttaatttcttgtgaataattttatgtatatgtaattttttaacaataattttttttgttaaattttattaatagaacattattattttacaccttaaaatatcgaatacaatacaaataataattacttagcatgtttccacattatttactaaatcaaattttgtgagacccgatattaaaatacatcaattacgagttgtcatcattttatggtatttaacacctctctgaatattttacttatcatctccagtaataaatatataatttaagttaaaaaataaatcaatattatatttagcccaaattttataatagtgctccaatgcatttagagtagaattaatacgttttatatagaaatgtgtaataaagtcaataaaagtattaaatttttattagaagtatataaaatttttattaaatatataaataaaatgtaaaaaataattaattacatttagaagtggtaaataataataaaaagtaatatttagagcatctctaatggtgagttataaatgtggtgtattgtccttt

SEQ ID NO: 20548 - DNA, 3874 bp, Cannabis sativa
tttaccattacgtactctagaatctagatcttaccctacaacatatgtcattaataatattattctagctaatatttcaatttaatatatgatgacataccaaacaaaaagtagtacctcacatgcaacttacctaaacttccttcctaaatcaactatatcaactcaaattaagtcacccaatagtaaattcacactctttaaaagttcaaacaaagtacatttttttaaaaagaaaaagaacacaatgtgcaacttatctagtcactaaaataaataaacttaaatatattgaaaaactaaaaaagcaaatggatttttacaccatatattgaaattttaaattattttattttttttattgtagggtagaatttttttaaaaaatattgtgtacgttttatactgtatactgtattaagttttcacggttgttttaactgttttgttttgttgttttataaaaagatagtatttttataaaaaaaaaaattgtgtgatgataaaattgtaattttttattcaaaattcaatatttttgtaaaaatctcaaaagcaaaatgtactacaaagacattataaaatcttttataaatgcatgatcattggttgattttttttactaaacaatgttgaatatatctacctacccaaaaaatccatattacattctttgcataaacaaatgttataacaaaacaaaaaattatccaattcataaacacattaagtaaattaattatcatgcaaaatcataacaacaaaaaaaagattcccaaaacttaaatatttcataacaaagaacaaaattagcattatatatctcttatcttatctcatcaaaaatcaaatcattttaactttctattcctcaacgttgtcgtttgtcttaacattacatgtgaaattacaattttgtccctatggggagccatgtttgggctacgtgtcgtattaggataggaccgcatgtgtgagctagcacgtgcgaaggagagagagaggtgttttttgggtccacaaaagacggaaaacacataacgtggtgggacccactcggaactaaacgcacgaagcctcacatgacaaagattttaatttaatgctcactttcctgaaacaaggacacgtgtcggtttgtctccggaaatttcggcaacgagatcaccgttgattgagacgagagagtagaggcttgtggggcccatcctacggacgacgtgactcccgctggttttgacggctcagatcgtccaaactggacagtttcacattttgtattctcatttcggttattttatcttttttatttcgaatctgccgacgaatatctacatatacgacgacgtatttgtggggcacgtgtagggttttgtttaacagatatattaataaatattttttgaaagcatatattaataaatattttaaacaactttttttaataaaattggaatttattttatataacatttttaatttagggtttgagttgttttatagttattatgtagatttttttattgcaatttaagttaagttctaattgttatgtgaatttttattaaaaaatattttaaagtgtaaaataaaaaatatttttgctttcaataacaaaactggtgtatccatgaaaactgaggactttttgtttcagatttcagaatgttataccaaatccgagctggaaacgattttttgcacaatgtggtatatttggtctgatcgaaataatattcttcatggtaaatcagctcagcaaccgactgtaattttggctaaagcttaaagctttctccacaacttctaaaccttgcagcagcaacatcttcctgttggtttaactcctgctgcaacaccttccaactgcaatagatggcaacctcctcctccaaactgtctaaaactgaacatagatgctgctttcaatgcttccagcaacaagattggttttggggctatcataagagattcaaatggcattgttagagctgatatgtctcatcctatacatggctgttgtcgaccacaagaaatggatgcaaagggtctattttatagtcttaaatgggctcgacagtgtaatttcagagtggatttggtggaaactggttcattgatccttgcagactctatcaagaaatcaacatcaaaccgatcttcatttcaagatttactatttgatgttcaaactcaattatcatatctctcttcaatttgtgttaatcatgttcgtcgtgatgccaaccaagccgctcatggtttggctaaacaagctttagtgttggatgatgtttgtacctggtttgaggattttccctcagctattcgtttggttgttgtaaaagactctatttttataataacagtcttttttctcaaaaaagaaaaaaatctttaataaataatcaacatttattcaatttttttaagggaaacctaataatagatattaagatggaatatttgcatatttaaatttttaattttgtaaatgccacaatttcttaattatttttagtggtgcaaagttccttttgtacagactgtatttatatcttaaatttgtaattagactaaatttttaaatttattgaaataatatttaaaagtaattgatactacacgttttcattcagatcaaaagatttaaaggatttatataacaagaaactaaataaaaattataattttattaacatttacttatgtcactaaaaaattatttacttgttacaaagtttgaatacttatcctgtaaatatccttattaagaattaggaaaagataaaaagaaagtattttttatttatttatgcgtataagcatcttgagttgttgcatgacaaatggtcggaagatagtaactttggcttttgaagagccttatgaaatctcaaaatcccgtcaaaattcaagaatttactttggagtttgttttggttgtttaccaacattgtctccgttaaagggtaggtatgtggatgtatctgttacttatccagtgtgtaatgatagggtcgaaccaatattcttcacattttggttgattgcccattagtagaggcgtgttggcagaggattgatgaggggttatggcttctctcaacatctgatttctccagttagtttcatcaagttttggggagtttttctaatttgaaggtgtgtcatgtagccatgatttgttggtctatttggcgggctcgtactgggcttgtgtagcatagtaaaagttctgttgcaaatgagacttggtggctacagtgttatcttactttaataaatagaaggatgctcatgaacgttcagctaacactttggcttccaacgcttgtgttagtgtagagcattgatcgactccgagtgttgatacgattaaagtcaatgtaaatatctctgtcatttccagtgcagatttttttagaatttgatggcttgctcgtgaccatcatacatggtagtgtgctatttcattcttcgaagcaaatgccttgctgagttcagctggttgtggctgaggcaattggtttgaaggaagcactcagttagatcaaacaacatgggttctcacacgttgttgttgagtcagactgcaagagtgttattgacgctcttcatagttcaactcatatagtctctcttttgggtttaattattttttactcgttttttagtttttgtgatatatattattttttgtattttttattaaatgatcttgatataataagactcctaattatttggtgaatgttgcttgctattttgttagtcgtaactataatggggcttatccttactacttttcagacaattatttcaaataatttatctatctaatgaaattacaattttcttgttaaaaaaaaaa

SEQ ID NO: 20549 - DNA, 1607 bp, Cannabis sativa
tttttttaaaaaaaatatagaaaatttattttttcagttgtttttaaaataatatcatttaaacattattattacataaaatcaatatggaaataaccctattttttataaaatatatataagtaaaaatctgtaaaaaaaaaatatacaattttaaatacttttgtaaatttctctttatatttttgtttgggaagagtaaataagattgagtttgatgagaaaagtgaaaaatggaaaattggcattatggaatttggaatttgcgaaatgagctgagtcggtgggttggcttcaagttttgactatctatacactacacccccacgtgatccaacggctgtaaacaaatcatattataaaaaagaataaaagatttcattttattttatttctttttttggggaaatgtcagagcaaaaaaaaaagtccaatcaaattattgactttgtcttatattcaataattggtggtaagttaagaagaaaaatataacacaatacaattgtttgtttgtttagtagtagactagacaaggagaagagggtcctaattttaaattattataaataatgaaataaatgataatggagaaaaaagacaaactataattaaattataaatatatcaatataaaaaattaagaagaagataaggaaagtaaaaagagccataacatcttgtacccttcttctattgattctcacatgcttcatgttgtttattattattattatttttattatttttattataattagggtatatatggtaataaaacaactcatctttaaatattttggatgacacttcaatacctatcattcttaactaaaaactacaatacatcatagaatattagacaatgaatttctaaaaaaaatcatttaaagaagaaagtgatgtattcagaaaatattgtttttttttaaaaaaaaaattatgttttaaagaaaaataatttattttttattaatattctttttattcatactcaaattataataaaaagtaagacgacgaacaagatttatgccttaaaacatctctaatgagtattttaaaaatacttgatgacatgtagatagaatgacaagtaataatgcttaaaaaataacattcttgcatttttttttattattattatatcataaaagtataatataatataattttaataattttcagaattgcttattattagaatattttagaacaaaaagtgtcgaaaataatataagataaaaataaaatattatatttttaagtcatataaaatttttaatgccatatacacaatcatgaacaataaaaaaaaataaagactcattttgatgccaaagtagattagaggtaccaaaatacctttttttaaataaaaacaatcaactttcatcaaacttaaaattatagccataagaaataagaatgataactaacttaagagacaaaaaattttctgagatagtatgatatgaagaaaaataaaaatcttacactccctgtttgatctggtattgtacctagccatgaagaacgaaaggaagaagacaaagaggaagaaagagagaaaacacagagctgaaagaatagcttcttgatattat

SEQ ID NO: 20550 - DNA, 2689 bp, Cannabis sativa
tagtcaatatcgcaacgcgcaacgtgacatgtgacatgtcacatgtcgagaagatactaggcacaactagtgcctaatagcaatgctcattaatattaatgaaaatttttaacttttgaatagtatcacatgacatgtgtatgcgtgtattaattaatacggtgcctattttccttcacaatattcaattttgcgagtgtgagttgtaccactcatctcatgccatgtataattacagtgaagtgtcaacatattattggttggattaattataattaaggataatgcatgttactagtttgtcaatattaataattacgtaattaattaaaaacataaccaatgaaatgcagcttatgaatcgtgctcacacaatacctaaaagcaaggagagccttaggcaaaaattcatacccatccattttcacaacctccttttaattataattaattaatctcctcccacattgcaatctctccctttaattactcttaattattaatttttatatatatatatatattattattattatacacgtatagatacaatatacagatgaggaagctatgccctaacattgagagggatgatggacttgaaacggtccttgaagttcctatacctgaagaaatgttcaaaagcatgggtaacaactccaatgtaaggtttcaaaatatgttaacatggatgaaagctcaaacttccgataaatggtccgctccaatcatcgccggccgccttaatgagctacgtttccttctttacctcgtcggatctcctcttattcctcttcaggtccaattaggccactccattcatcgcccactcaaagattgttcaatcgtaagaacacatttctattttcgatctcataattatgtatatatatatatatttaattaatttataattacagcaagcttctacggcgaagtacatagtccaacaatatgtggcggcgacgggtgggcagccggcgttgaactcggtgaacagcatgtgtgtgacgggggcggttaagatgagtgcgtcggaatttcaagaaagcgatgggaaagagattgttgatgtaaagaaatggtcagaagaattggggggatttgtgctttggcaaaagaatcctgatatgtggagtattgatattcttgtgtctggctgcaaagttgtttgtggtagcaatggcaagctttcatggcgtcattcctctaatcaacaaactcccatctctaaaggccctcctcgccccttgcgccgatttcttcaggtcatttttccatcattgcaaaatattatagtttcttttataaattggtatttcatcaaaagttaataataaacactaatgaaatgtcacatttttaaaataatatgttttaatttagataaataatgtgatagcttgaaaaacttaatgcatatatttttttgttcatatatcattactcattaataaataaatattgatctctcttgtgcttaagtgagtatgtgagaagaaaattaatgaaagaaagtgtaaagaacttatccaaactgttggtgtagagaattatttaacatattgaggttataagaacttatgttcaatttatttatattaaaaaaatattatcaaaaattgaactcactttctactattttaaaaaaataaagtttgttttattatttaacaaaatagatagtttaattattaaattttacaaaacacaaattttaaaatagtattattaacccaatgcacaatgatagtaccatttttaccatgtattatgacaaataaaaaatgagattatttgttcagaagaaatttcaccatgtactatgaccaatatactttttaactctcgttaaataaaacttttgataatttacgaatttacaatttctatttatctaataaaaaaaggtatttatattatgagagtggagataattatatttatattatgttttatgattttgcagggtttggatccaagagcaacaaccagcttatttttagaagcaacgtgtattggtgagaaaataatagacgaagaagactgtttcatattgaaactagaaacaagcccagcaattcgtgaggcccaaagtggcccaaattatgagatcattcaccacaccatttggggctactttagccaacgatcgggcctattgatacaatttgaggactctagactactaaggatgaccaacaaaggagacgacgacgttttttgggagaccagtacggaatcggtaatgagggattataggtacgttgacggagtcaacatagctcatagtggtaagacacgtgtcactgtcattagatatggagagcaatccgccaatcacaagagagagatggaagaaacgtggaaaatcgatgaagtcaactttaatgtttggggtttgaccatggaaagctttttgcctcccactgaatatcaacgacgtcgttaagagcatttttgttgtcgttttgtttaagtatgcattttttattttttatttaaaaaaaaaaaagaaaagaaaataataatgtgtaaatttaataggttagttaggtttgtatcttttcgttgagaattttagttaattatttggaatgaatcaatcatgaatcatcacatgtatcaaagaagtaaaatcaagatgttaaatagttctataattcgagtttaaattagtataaatttg

SEQ ID NO: 20551 - DNA, 1784 bp, Cannabis sativa
aattcaccatagaaaaaagaattgttgatatccatgtgatgtaggtactaatttttattgacaactagagtaaacagtagtttgagagtattgaatttagccacatgggcatatgtttcgaaataatcaatacctagttcttgtgtgtagcctttagctactaattgagctttgcatctttaggttgagccatcatggttgtatttctttctatagacccatttgtttccaatggcatgttgtccatcaagtaggggaacaactatccatatgttgtttttctctaaagtatcgatttcatcatccattgctatgttccaaattgtgtgtaatctggcttcaacatatgtgatagattcaggaagttgagctgtagcaaagacaactgctcttaagtttgcactcagcctatcaaaggaaagaaaaattgtaatggggttagttgtgctaaaagaggattctggtaattcacatgtgtagtcattcaagtgagcaggtttatgaattattctatctaatatggaggtttttgggagctgctggtttgcagcaggagaattgaaacctggagtgttaggttgatgtgtatctacagggttagtagcagtattggaaggaaaaaacatgtcaacattgatgttgatgttggaatttttgtaaagaaatattgattcataaaaaatgacgtctcttgaatgaaaaatttagtttgtttggatataaaggagagtgtaagcatttatattttctggacatcctaaaaaaatgcagggtcttgctcgaggagaaaatttatgaatgtgggttacatgagatccataagcaagacatccaaaggttcttaagtgagcatggtatgcaatatttcataagaggttttatcattaagtgatagaaggggttctgttaagcaagtaaacacatgtttttaccatgtaactccaataaatgaatggtaggttggattagaaagctaaagcctgagcaacattaagtatatggttgtgtttgcgttccacaactgtattctgctaaggtctccctacacaggaattgtaatgaataacacatttgctgttgtaaaaacttgttatagttagttctttaggaacactactgacagatttgatattagtttaattttgagtattgacaaagatgaaaaagttttgtataatttgaggaccttcatatttagcctttagtagatatatttgtgtatcttgagtggtcatctattatagttaaaaaatatttgtatccttcaacagagggtgttggttatggtccccatatgtcgaggtgaataaggtcaaaaatggccttagaaaaattgttgttggattaaaatggtaatttcttttgttttgccaagtgataagttggacaatgaaaaggaacaaaaatatcatgaggaaattataattgtttattgatcttattagaaatcaatgcaaaaggatgaccaaggcaattatgccattggtttttatctgtttgtacattacaagaaatttaaatttgagaatcagagttggttcttactttcttactgcatgtaatggagtttttcatatcttttagttgtcccaatcctcaaggtccaagaaggtccctaaatgtaacaatcattagaagtgaaaacatgtaatgataattatatataagaatagaaaatacatttgatcaattaagttttgaaatataattgtattacatgcattagacttttaaattactattttctttgcattaaaatattattttcatatataatttttttt

SEQ ID NO: 20552 - DNA, 9288 bp, Cannabis sativa
aaaaagattgtaatctattaactacaaaggtgaacaatttcaatataatatatttaaacttgcaaattaacgctaaaactttcataacttctaatttaaaacgagtcacgcaaaataatttcaaattcagtcttttattttatagtggcatttgtgttgagtttcagtctacctgaaaatggattcatttactgtaaagtaatatcaatcatattgtaaaagctgaataatttggagtagaccaacattttgtattcttcaaaatcaatgaaaataccttttcttttaagaaaaattacttcaacaacactataatttacttgataataaaaaatttataatataatatgacattaaaatgacataacagttcgtctcctatgccttctcagaatttatataccaacaatcaatcaaccatgctacctccacctgctggtacgctaaaacttaatgtgaatactactttggataatgatggtcaaatgataggtattggaggtattgttcgcaattctaacagtcataggtattgttcgcaattctaacagtcatattattgctgcgattttcaaaccaatttagaagttctgttaaaaaaattaaggccaaggcaatctctcaccatttacaatgactgagaatattaattatgtggtttattatatactatataatggcaaatttcatgatttatttgagattttatttatcaaatattctcttttgtgcctcgctaagttatgttcattcacatgattttactagattcattttacggatggatactgatattatttagaagactgtttgtcgaaaccctatcgaaactatcagtctaaacgaacttgttcattaatatatatatatataacttttttctctaaaagaaaaaaaaaaagtataggatctcatacattgatgttctaataattttctaactaaagtatacgatattacttattttcactaatttttaatataatgaaatattattatgttgttatactggtatagatatgtaaaaaaaagactaattaaatatttgatcacataaataaatacaaccactatatttgattctaatctggacagaaactaaagtctgtataatgaaatctcaaaagaattatgtatggttcaaaaaagaaaacaataattatttatggaatatcaaaaaaaaaaaaaaaaaacctaaacagaagaaaactctttggtttctgttttatcttttcttccagcaaggatcatagaaatttggaggcctctactgaaagcttggttgaagagcaaacgagtttggaactctgatacaaatgggaaccatgacaaaattgctgtaggcatgaagattatgagtcccattatgtattcataagctcttgctaattcctttattgaatcccagagtcctatcctcttcaacaatcctctgcaagcttgaccaatctaaacaacaacaacacacaagctcatataaattcactgagtaaaaaattggattgaaatctgaataacataagatgaacaagatacttacaagaacaatggcccatcctgttggcaagaaggcaaggatagcagcaaataaatctgatatagtgagaccacatactacaaataagacggtcatgactgacataaaaccaagaaacaatagcgccttgagaattcgaaacatgagctggaaatcggtcccaaatcttcttctgcccatggataccatctgataaaccaaaaatcaaatatggcatttggaaaatgattaattgtccattcataatatatattaacaactcaacaatgtccatttgcttaattacctttaaaacaagaagacaagttaccatgactagccaagagagtccataaacctagacaaaattttaaacaaaaaaaaaagacaacaagataactattagaataaaaattagattaagtgttcaattgaagatcatgtattaatacttaccagcaaactcttgctgtgatgagatatatcaaggtgatagacgattccatattggtagataaagaagcggaatgcaagtaaaatttcaagcactcttccacgaaaatctgtgtgtttaaggtgttcttgctcttcatcccaccatgactcccaacttttgtcaggtgagatcccaataccaccacgatttcccatccatctcttccaatccgtccaatcatccacagttttttgccagtcgaaaccagaaggattgaacacaaaaggagcaaacaaccaggaagcaacaagaaaccacatggagaaagtgatgaacaaatagagatttgagctacggtaagattctccatagacttcatacacaattaataagataaaaagttccaaccctttgacaaagtgactacgtgagtaaaggcggtaattatcagcaaactttgcatgaaaaacaacaaacccgcgaccagtagctctgtatttagaacctccgtgcaagattgttcttccaaaataatgcgcttttgttcccagttggaatgtgaagaacacagaggctagctgcagctgcatgatgatgaaatctcccaatgcagtccgaaatcctttctctagaccaatttccatgaccattggcaatactagcaacaaccccaattggaagacagactgcgtagccaaagcttcttcaagagccttggtttgatgtatggttggattttccaagatctccctttccactccactcataaccatgtaaaggcgtccatacaagaacacatatacggttagcactgtcacctgagagtgagacacaggaaaatgtcaccattgaattgacaatacaatcacaatcaatgcaaataataatacataatttcagctcacataccatactactaaagtagaaaccaacagttgtgaagtaaaatgagagcattctgtagaagtcaaatcgacgtccaagccgataaacatcacgacttaatgtttgttctccatttccattagcaaccttagcctcaaagtttgaaatctgattcatacccacatcacgcccttttcccacttggatatactcatgatgtgtaataaatcctccacgcaaagttgaattgtagcctgttcattattaatttataaatttatattcttctaaacttaacattcaattgttgtcaagtattaatatccttagagctcatacaagtaaccaaaccaaataatacctgcaaatatatcttcactcaaatttattgtttttgaagctttgcttatcccacctcttgttagatggaagattctatcaaaaatatcagggtggccataatgaaagcgaaccctgtaaagacaacgttattacgaaattacaatagcaacataaagttaatgtgtccaacaccatatgaggaaaacaacaattagtgcaatttattttttgggtaccacatatttaaatttaatttaaaatatgtgagaccccatattaaatttcactataatatcgggtctcacataaaaaaatcactataagaatttagttagcataagatttacaggaaaaaaaatgaatattagacttacctaagaggatttgccaaaattcgttgaccaatagttacaaaactagtctcctgattagacatgaaccatgcaagtgaagaaacactgtaaaataaacaagcaaaaaaaaattacaccatcatcaattgcgagatttgcattaccaaacattaactgatatgcaagccatcatctagagatcgaagagaataataaccttccagtgaatatatgctctctcagacccaatattgtgggttttcggtccccaagacgcggcttaataaattctgccaatacgtttctcattttgaaagcttcttcatagtagttatcctgaaaaaaaaggggttagcaagatcattgtttaagctttttgtcttgcttgtactttcaaatgaacaatgaaaaaatgttacctgattcatgtctattgtctgcaaggcttctccacgagtaaatataatagcatgattctgattttcaggcttcccttcgccaatgactgttggaggtcctggaagcttgattcggtatatttcctaaaaatttgagaagtttcacatgttaggtagtagagaatgaattcagcagtagaaaggggtgttcctcaaattgatgttacataatctgagaagattatttgcaagtgtttatcattgtatgcatcgaacctaaatgaaatctttaattagcaaataattcgtctttttataaacgtataattgaatctgtcttttttcctttcatcccacagcctttgtctggtaagagctttgtctagccttcagttcatctactctactcctatctagcaactctatgttcataaataagttttcttaaccagccttcccacatcattttctcctcctagtcactccgtgcctctagtcagtggccttaggcctaacctaatttatttattttctctgataaggtttgagttttaaacaaccacttctaatatactacccaatttaggaaagaaaaaataatgcagaaaatgttaaaattttccatacctcatctaacttgtcccctcccttgagcaaaacagagtaaaaaaccttttgaggccttccattcactgtgtcctctcttgtatcaatgtaagcaacacgtaacgattgatgtctacacaattgacattttgaaaaaggacatcagcatttaatacatcattccttaaactgcatccagtacatcattttatacaattgacgactcacgttagcattagtttcaggatactagtgtaacaactttgatccctaggatcattggatttcttttgaacaccgtaaagttggcaagacacaacataggtaaacttcaaatcggccaaagcttgtgcacggtcagaaaatgtcttttggtctttttcacttaactccaaggttcggtagccactgaaaatagctgaaaagggaaaaagaaaacctctaaaacatattcacaatacaataagattagaaataaaacgaagaatttatcttctttttctttttcttttaaaacaaaattgccttgtattaatttaacatagaaatacaagggtgtggaaaatccacaaattagaatatcatacaaaaccactaaccattatctcctgccaattcgaggaagcactgaagctccaaagccttcctataatacatcatccctctcactggaagaaacaccagcgattctaactttagattctgtaagtgattagtattaaagagattccaaatcaaaccattatccggacctgttctataaagtgtttgccctctgtaagacacccattgacgaattaagtctgacttatccttctcaatatttttgatccgagccgtgaaattttgccattcatctaaaaaaaataattcaaatggttgaaatgtgttagaacttttccccataacaacaagaataatgcaacatgcagtgagaccaaaactcaccaggatatattttctgcaggtaaaacaaaattgatatcccatcctcattttccttgttaagatcatcatcggtataaaggacatcttctttgtagtacggagtaagaacactaattcagaaaaggcacaaatgtttaatttaaggaaaataaagagaataaaatactgtttaacttgactactattccgactttttcttctctcccctctctctaatcttgtacagtaagtagataagctaataaaaagagtgagacaagtcatacaagagcatagtaatatagctttatgataaattttcttgataatagattatacaatcttcagaagtttttttgccttataagattctattcattatcaagaaaatttatcataaaagatctttgtttaaaccaaatcagttatgctattacaactaacctaaaggataacatgtcacgaacttcaggagcccttggcatattcataaagagagagtttgcgaagaaggtaatacgtcgacgagcatccaagttttgaggcacatttatggcagattccttgactgttagaagcaaattaagtctgacaacctacagtgaacatggaagacagtaagtaagacagaaaatctcagtaactccattaaaaaaaattacacttgtgacagtaccttctccttccaagagctattgtatcttcggtttaagttaatcttttcaaacctctgctccttcttgacattatgaccactgtgatggtgagctgtttccaagattctacaaaagagaaaaagcaaaatcacattacaacaaacaacttgaagtacacataaaatttggaaaagggaaccacacacaaaaacaaggatacagcagaataaaattagttcttactggtgcccattacacataacatcctgtgtgataatttccataatatcctgaagcacattgattaactgaggtagaagagtctcatcgtcctcatcagatagctgtcaatatacaagcttaaagtattaaatcactgatcaaatatgtagcattaaaaacctttaaatgtaatggaagaaatgtgttaccaatttgcccaagaatttttccaatctctcactgagagaaggcatcccactcatccggaaattactcaagaaaacttttctgtctagacattcgtctacttccttacatatactctctacaatcctgtcccaaaagaacaaaaaatcaaactctgatgatacttctaataacagggggtcatgttttaacaaagaatatcatatccaaaaaaaataaaagcttgatactgaaaattttatttgtcatacatcttatcagctttgtcttccagtaggccatatattacatccctaagtgactcatagcattcaattactgcagagtacatataatcgtcactcttaatcttcttaaataattcattatcatcctttcccttgaagtcttttgccatatctaatgctataggaatctgtcacattaaaaaaaaggctaaataaaaaggaataatgacataggatcttggtcagaataaagataaataaatcatgcaaatagtaccttactagcgagcaagaaagggggccactggacaacagagacttcatttgaacaataaggaaccaaaagcaaatctcgatccctggacagtttccattaatagaaagtaatcagaagcataaaccaacaccacatttatatcacagcttgatgagaaagaagcaatcagaacctattgctaataaggtcttcttctcgcatagaatatatgaactcgttccacacttgagagaaattggcaatattcttccgcacttgtgatggatcctgtcattgaaattgttcgttttagtcaaacacatgaaatataataacatttaggagagagagagacacgttcaaataatgttctatagacaatcagaataaagaaaaagacacaataaaaactccatacaattgtacatttagagattttgttttggtatctggtgcagagtgtatttttatttggaaaaaaaacataaataaaattacatacatacatcatagagaactatgtactttactgtctaaaattgcattaccaaatttttctgtttggagtggtctgtatctgttgatggcatgagacgacggctgaaagctagaggcacagattcaaatctggaccgcagcatacccagcgttcttatctaagaaaattgatgtagaacaaaattattaaatccaatcatttaagaacttaactacttaaggaacttccaacttcccacaaaccaaaaatgaagtgctgatagttagttttcagcaaaacagtgttatttacattaataaattgcagccaattttccctatagtacaccactaacctcacccagatggctgaaagctccatgtatcccgccaaataaagtggaaaatatagcataccatatttgagcatccatgaagtaaacctatactccaatcacataagacaaagtcaatgatgacaagagaaagtgtaaagaagagagaaataaaacatctgcgcaaaaatctacatctcatcttaactcaccagaataatcggtgtccatatggcaatgatgatgaaaatattatgcggtactacagcggaagaaaaaaaaatcaattagataaatcagtcagtaaaaaatgttggaatattacaagaaaaagaaaagttgaagtatatgtataaccatgtggaaagaactcatgccattgataattatcaataggcatctccatgatcaattttgttggttcaactagaggtgctatctgtcaacagaagacattaatcaagatttgaatagttcaataaatattcaaaaatgttaaaactgaaaagtggtagtacaaagctaatggcacaaaccacaggaaggggattttttttttcaaacataaaacctcaatcaaaccttgaatgagttaaagatgaagttgcttttctggtattattaacaaaataaatctaatatcttgaattacagccagatattctatatccaaactaggtacagttggtaccacattacaaggtttttcactataaactttaacggtctgcttcatcattcattacaaatgtttatttagtgctagggttgctctgcatgtacacttcaaaagttataatgagtaaggatgaaattaaatgcctatttagattaatgagtgctgctaagcttacttagagctttgtataagtactctgactggtatttatttcagttatcatctgctatcctagttacagtcaacaagactcaatgctgtaaagagtctaagttttcttctctctcattaaaaaattttttgaaacagcacttcatgcatgcatatatctgtgcttttagacaaaaataaataagcataaatccatagttcacatacagaattcctttaaagttataaacttctaacaaaatattcacctcaacatagtagctgaaggctagcttgctgatcagtagcatgatccaaaacaatgtatacctgagcacatcgaaaccacatgaattaatagcagtataaacagagagcacatctatagccacttgaggctagctcaagtttttggatgtgtttgtgtgtttatgggatgggggagggactctaatctccactgtataaaaacaaaaacaaaaatacaaaagcttcttccttacttcagcaatgagaacatgtcctcatgcatgcctcttccgacatacaactttggctgcaatgtgataaaatatacaaaattttcaagttgatctcaaaataataataataataa

SEQ ID NO: 20553 - DNA, 3323 bp, Cannabis sativa
attcgatagtgcaatactatcaactaagtcttcctccctagatctctaaatcagaagcagtttattttaagcccaaataaaagtctaacagaaattgcattgtataaccacttccctttatttgttttgatttttatctttattaccatattctttaagatatactcacttttatagatgatgttcctattaaattatgtgcttacacttaagtagagagaaaagatatattaggcaagttactataaaagtggatagattttaatgaaatataatataaatattttttattaataaatactaaaaaagagatatttctcaacatatcccctatatgaatgcattgcagatggaatatgaatgagaataagaatataattgaataaatcaaacaaatattaggagaaagttgcggaagaatccattgtaaaattgtgattctaatgatcatctattgtttgatgcatgccacattatgctagttaagttatggctaaagaacttggtattcggtcatatatgacatatacaattactttgatcctttttatcaagtaataatgtttttttttctcaacaatttgcagggtagattcgtgaagataagttgaggtagtgttgtaaaaatgaaacaaactataatttaattactactgcaaataaaagtacgacctagctgtttttgtgcaaaaagaaagaaaaaaagaacaaccaagaagaaaagtaaaagaagttttcttctctgttgattctgggtactgctgttatagtttggtattcatagagagaagagagtagatggtgatttcaaagcagaattaatgcccataatttcatatcatatcatttcatataatataaatatgcggtttggccaattaagtttgaaaatgtaaaagttatgacatttatataaggtacaaacatatcatgtattaaaaatagagatgcatgataggatcgtagtaacatgtacagttccaaatctttgcaatatcttatatattattctatcataccaccacaaattatttgataataacaattatattaatatataatatatgatacttgaatttcctatccacaattgtccatgtgtaagattatttgagattttgtgaattggttttactgattcttggatttctaagatcaagttaaatcaatatcggaactaataacaaataggtttacacatgtgtacaaaaatattgaagtaataataagaaacaattcccttttaaaagaatgaagaacaaggtttctttttcttacttttgtatatgagtgtgcataaatcgatctaatttaattataattgaccgctaaatattaaatattcaattatgattgaatcaaattaaatgttcgtaatgaaacagtttgagagaaaaaaactttgaccgctaaacattaaatatcccattatgattgaatcagattaaatatttgtaatgagacagtttgggagaaaaaaactttgagttttcgaaatgatggaagaaagaacttctttaaaacgaattacaaacactttggagattagtttgtaattgacattatacaaactaattggtccaaaatcagccataccacttgagtttttaatttttgaaataagagtgattatagacttgtttagcatttccatgtcatgggcataattaaggactcccaagatcacttttgtaattgaaggaccaacaatctctaaataattttagtagaatatagtttaaacttccatacttttgggtatgccagcgttatagagattcagtgcatgcttgaagatttgttatgaaatgctcaacaaattgatccgcgatagatgctatctagttctgcttaattatagtagcaacttcttcattctttaactagattttctcaaacctaatcgagctttcctcctcattggttcgaagacttaattgattgagactacataaacagaaatagcacgataatcgtagtctaaatgttgtgtaatcacatgttcaaacattgaactccatttgtcatttacaaaatacaaatcaagcttctctttaatcgtgttaacttgatgtttacttttaattcaattgtatagacccccttcaaatagcaactcagaaagtaaacaatagtcaagagtgcttagaaaattttccatttgcattttattccttaaagctccacctttccttaaagctccacatttcttattttgattggaaagaattcattaatatcaccaatgatcatccatggtagcaatggagccacatcccataatctttttaaaagagttcaagtctattattaaaatttaaagctagtttagtttctataatatctactcatttttgaaccttgagaaaccactttatttatttattcatagtaataaaaccaaccaacataaatattattcataaattaattacacaatcctttaaaacagaaacaaaagtcacacaccacactctcctcttctattaatttgtaaaaattatacatatgtatatagataattagatatccttaatttaaattaattagcttgaatctgaacaagctttatgtctggttttttcacttcttgtttgggaatggtgacagtatcagtaagcactccattctccatcgtagccttcacctcattcaccttagcattctccggcaaccgaaacctccgatgaaacctcccacgtgaacgctccacgcgatgccacgtgtcaccatgatgacgactctgctctttgggtaacccacaataatcaccctcgtcgtttttcctctctccgcttatttgcagaactcggccatcgacgacctcgaccttgacttggtctttggtcaacccgggaaggtcggagacgaacacgtgggctttcggggtctctttccagtcagttggggtgttgagaacagggcacttgttcatcaacgacaggaatgggtctaggattacttcttcgccaccacagattttgggaacaaacgacatgtcgtatgagccttgtatgtgtcttttattggaacacaaaatgtgatggatttaactgaagtagtttatttatagtggaaaatattgggatggatcttaattaatatataaattaattaaggagaaaaggaatgatttgatttgatgtagttttttctagactcttgtacaatcttcagggaagttttggaaattggaacaaccttgaattttttttttaattgtaatattgtcaagtaagttccagaatatgaatatacatttctagactctcgtttcaataaaattatatatttttaatttgaaaagaaggaaagtttatgta

SEQ ID NO: 20554 - DNA, 4043 bp, Cannabis sativa
  modified_base (34)..(36): a, c, t, g, unknown or other
ataattaatcataaacaactgctaatttccaaannnactaagcgggctttacagtaatgttacgggttttctctttctaacttttctagttgctcgagtaggctggtgcaattgcaaagttagaggaaactcaaatcaacaacaaagaagagtataaagggacgtcctacatctacagtaaccatctagaatacgaaatcaatgttgtcaattcttggaattgaaccaaattatttctctgatgatgaaatagggaaggtagtgaccgaggtgggttttgaacttgcgacgattgcggccggagaagaagttaagttacttgtgtgtctaagcccaatttctcccaaaccaacattgaaattactggataggaatcaggaccttcgaagtgatttctcgaatttcatcttggcttcctaaaggtactcaaaagagataagtcagggtaagaatccaactccttctattttacgttctggttatattgttcagaatttaactacttattttagaataatggggttaacatcacttttgatgatattgaggagaaagttaaaatttctcaattgtgtgttatgttcttggtgaaaatcctcatttttcaactgtttagggttttgcaagcatgtatggaagaaccaaaatgttgatgaagtggggattttatatcatggtgtgtttcatgagatttgattcaattgaagagcgagatgatgtgatgaatgggggtttattttctttgataagtaacctattattaggaaaccatgggatgcaacttcatatattaagaaagaagatttttgagtggttctttcatggatccatttggatgatttagaattgaaatattggggtgaaaaatatcttttcgaaatcattggccaactggggaagccattgataactgaaaatgttactaaatgagggataaattaaattttccccgagtacttgtggaggtctctctaactcaagaattttctagtcttatttctttttatgaatgagatggatcaagaagtctttgttgttgttacttatgagttgaaacctgtgatttgcagacattgcaaagggatgagacataatactagtgattgaagcaagaaaggaaatcaaaagcaagaatgggttgtgagaacatatgtgaaaagactacaaatcttgttgatgaacagacaaaaaaatggtgatcttgatggttttcaatctcttactaaaggttggagaccaaatgaggaagagaaacacctccctacagtcattgctaacatttttcaggtgttaaatactcaagcaagggaaagttctaagttgacagatgaagtagaaaacactggaggagggtaagatcctcctcttccaaatggatcaaaccatgtgttagaatgttagggggatcaataaccaaaataaataaattgagatcaagaaattaatctcaaataagaaggtttggttgattgttctccttgaaacaagggtgaaggcttagaatttgggagccttatatgttcgaatgttctgagggtgatgttttacttcttacaatgcatcacatcatggagcatgcattgtgattgtgtggaaccctttaatgtttatggtgactatacttaagtggttaagtcaattgattcatttatttgtatgccctaacaataataaaaataaattttatgtctcctttctacgactttaatgtcaaagattgaagggggaagttgtggacaggtcttaaggagtttataatggctcacccttagctcttcctttgtgacttgaatgatatgttggcttaagaagagatattttttttggtaaattagtatgtatatattcacatcaaaaactcaattacaaactagagcgcaactaaaaaagaaactattaattacaagcttttataaattcccactaaattttgatctactctattgaaactttatatattcataaattgtaatctaaaacaaattgaataaataatatttttcacaactacatgaattgctggaagtttttactcccacaatattgtattcctactttttcaaacaaaataaaccattgtagtgataatgcaaaagaaaaccttccttctacctttcaagatttttttctaaagcatatgaagcatttttttaggtcacttccattatagttcagcccacaccattcagtaagatggtccaaaactttcttgctataacaacacccaaaagaaaaagatgattcatgtctttttttgcatctccacacagtagataatcgtcattttgaagcaacccaaagtggtgcaacgaatctctagatgtagtctctcaagaagagataaccacataataattctatgtgtttggatgaccaatgatgaatataagttttccatagcggctggaatacgccctgggagtagactatggaggaatatgttgaaaagggaattagatggcattgaagaattttacaagagggtggaaaaatatatctgtgtcaaggaaggaaataaagtcttggagacgaacaaaagcaagtgtacttctgaaacctcgccaaacccctacatggtctatcagacaatacccttaatgctcataagctgatacatccaagtgaagtctccactatacaacccataaaaaataaatatccgaggtattcgtctaagtaaagccccactatgtgagaagaagctcctagcgataaccaattcgcttttagtgtgctgcagtaaattaaagaaggcactcatgtgggccttcgagtcaaagtgagtgacgctacactcttggggggcacaaaaaaaaaaataagagagagagggaaatttttaaaattgacaaggactagctacctttagtcgaaaagagaaatgcatatacctctccccacaaaagttacctagccaacataggtctagaaagacactcatggcctaatgctgaaataagggggacgcctctcaaaagtaagcaaataattacaagtcaagacggtagcgcagtcaagtaccataagctccctcccattcgagtaaaaggatgaataaatgataagaggttgagactactcaaagagccatactcccttaaatggatgcccacttaccacaacaaaaaaatggcttggccaaagagtgatccccagagtcactcagccaacgctggttacaaaaaatggctaagccaaagagtgaaccccagagtcactcgaccaatgccggttataaaatggcttggccaaagagtgacccccaaagtcgcccgaccaacgcggttacaaaaatggcttggccaaagagtgatctctagagttgcttggccaacgcaagttatgaatgtttttaggccatagagcgacccccacagtcgttcagccaatgtcaagtaaaatttttgcttcaccgcatgggccgggatgaggttgctcagtaaaaaaaaaagggaagagagggccagccaaggtaagaaaaatccactacaccaacatattgtcacaaaataaggttcaagcaagggatgtccccaaggcaaagggggcatttcctcgaagaaaactaagaggatctcacacttcagcaaggaaaattctccaactcacttagtcgacaagaacacttaaaagaattcttatagactggggaacaagtgttaaccccaaaaattagctctacttatttccaagattagttaactaatctttcagcaattaacgaaagaaacttcaatgagcttacctactcggtatgtatttcataatgctgccatcgatacttgcaattctcgagatgcacccatgcgattcgatgattggtcttgtggtgatccaatgacaaaagcatgagcgtaagaaggagaggttgtacatgtgtggatgagtgtcgtgtgcatgcatgtgaaaaggtgtgttggtgtaagctgagggctcgcatgcgagtcgtgggtgtgtgtgagtgtagggccagccttgaaaatatatgggcccaagatgaattaaattttggggccctcaaaatatatataaaaaaaatataa

SEQ ID NO: 20555 - DNA, 2206 bp, Cannabis sativa
gaaaaaataatctaacattaattaaagaaaaaaaaaaaggcaggcacgtgaggatcacgtgttaaagtagcaaaaatatttgcgtatctaaccttacctactgcaactactcaccaaattgggaaatggaacgtggggactgaggtgggtcccacccataacctcacatcacatgcaaatgggccgtccaatgggcccccaccactcaactacaagacaatcaaccaagtatcatcgccgccacgtgcgatgtcggggttaattaattaaaattaagtgataattatattaaatactattttttaaataaataaacaatcaattaacaaaaatataattaaaaatacattaaaaaaatataaaaaaattcatataataatatttttgtatatttataaattaatctctaaaatttatgtagctaattatatttatttattaaaataatttacggtataaatatctaaatttaacttacagttacaaataaatatttaaatttaatttttgtcgataataataccgaagttatatttaaactaattattttttataaataaattttaataacgtggatcaattataaattgttatatgataatttacttaacaattaacaataaaatatcacaaataccacaaatatttataaccgagaattaaacttagctattcatactacaaatacttattattattaaatactaattaagttctaacacgtggcaagttttgattgcaacaattacgtgtacggttggatctttattgcttcgtaatgatcgtcgagggcaggccgttggattgcgtaagcagcccgtttccatgaaaacgtgatcttatctatttactattatacccctaagtaactaataattaattttttaagtaaatcaatcataaataattgacttgattcgattttaaaaagtcttttggtagaaaaaatggaaggtatatgattcatagtaaagcaccacaattatatacgtaaaagtacaagtgggacccagccaagtggattagactgtactgattaacattttgatttgaagtgtagggaaagtattgtgtacgtaaacacagagtaactttttttcccatctgtacactgtacggcgtgttactacatacattcataaaattttaaatataaaaaaaaataaataaatataaaatctacgacgatattatagcgaacatagtttctctctctaaaaacctcataatattattttctctctctttaaaaaccttgttggttttctttctttgacccaaaaatggtgtctctcgagcttgaaccatgtttcatggatgattttttgaactttcctgatgatgaagacatatcgataaggagtaatgaggttttggactcgttcggttcaggtcacccttttcattttcatgtaagtttttgttcatgtgtatatatatatatatatgattatatacatatatagactcttctggtttgagaaaagaaaccgattacggtggtgactcggccgagtttagaatatatactgagttcgggaaatgactcggtttggttttggtaaagtttggccgagttgactcgggcgagtttgccaatgaacacgaacacgatgttaagtgaggattgggtggtgcacgcgtttcattgattgattatgataacattatgtatgaaaagacatttttgcccctgtaaacgtttacacaccatgttataatattcgaggacaaaatcggcatataattaatggggacgatatatgcttttattttttaataattaattttttttattattattatcaaaattattgttgccacttgctcaatgtcacattgtgagctgagctgttattcaaccattttccaattaatatccaccaataaaaaattaaataatttttaattattataccctatcttatcgaaaagaccataatacccccaaacaatttgtgtatttaccaatatgtacattttcattgaacaggaagaagaacttgaatggatatcaaacaaagattcattcccggcggttgaattcttaccggacattctctccgaccacccttacggcggcgccggcgtcaaaccaaaccttcacagtccggtatcagtcttggaaggagaagaaggcagccacagcagcagcagcagcagcaacgatagctcagtttcagtactcacaagctgtttcggcggc

SEQ ID NO: 20556 - DNA, 1912 bp, Cannabis sativa
attatgagttttttcctaaaagaactaacaataataataataattctctttttgagcttaattttcttagggaaacttcagattttgatgagaataatttgtacccttttgtccacttgttacctgatggaaacttgttcttgtttgctaacacgagatccatactattcgattataatcgaaatagtgtggtcaaggagtttcctcctattccgaacagcgagcctagaaactatcctagttcaggctcgtctgttttacttcctttagatgaaaagaaaataattgtagaaattatgatatgtgggggcgcgccgagtgggtcccaccggcgcgccatgaggggtgcttacgtggaggcactcagtagctgtggcagattaaaagtgagtgatgaaaatcctagctggcaagttgagtacatgcctatgtctagagtcatgggcgatatggtaattttaccatctggccacgtcatcataatcaacggtgcccaacgcggcaccgccggttgggaatgcggagaagatccggtgacgactccaatactttacgaccctgcagccgagcacggggagagattttcggtaatggagtcgtcgccgcggccgagactttaccattcgacggcaattttgttgccggacgggagggttttgatcggcgggagtaatccacacgtgtactataacttcaccggagtgaattatccgacggatcttagcctcgagtcattttcgccggcgtatttgtcgttggagcacaaggcggtgcggccgaggattgtggcggcgcgtgagagtgttgggtatggggaattgatgagtgtggtatttagggttattggagaaacgacattggattcgttgtcgtttaggataatagctccgtcgtttagtactcacgcttttgggatgaatcaaaggatgattgtgttgagagttgtgagtgtggttaggattggattggagggttataatgcttccgtgttgggtccttcaacggctgagattgctccaccgggttattatatgatgtttgtggtgcatggtgagatacctagtcacgccacgtggattaaattacactgacttatatatatatatcatatgatatgcttttgtgttaattaattgtatgtattatgtatatgagtttttatttttatttttagtgatatatgagagttattttggcttttgtgtttttgtttttctatatttaaagaagaataatgagaattagagaaagatatacgaaggaattaattatggaaaaatgttaacgtgttaaaaagaaatcatacaatattaaaggtgttcaataaaccttaaaaacaggtgttcaataaacttcatattttaatttaatataagtaatatgtgacaagaatagttttttttaatatcattttttactatctgttttgtataataataataaattaaactgtacattttaattataaaatgttacaaaaactgtacttgagcgatcaaatttggataactttttttttttaacataagtaatttaaagataattttcagaacaaacatatataggaaatgtattcaattttttcatatatagattattattaattttctttcgataaaaaattaattcagtatgcacaattttataaatacaaagcctaatttattattcaacaaaatatataatttaatcagtaatttttgtaagacatagaatctaaatgtattatttacaatttttattttattttattggatcaaaataggaaaattgtctttaacaaaacaaaaagaaaagtattaattgtcgatcgccctttgtatagaatttcatgcacaattaccttaatttttctttctttctctttagactaattaatttgattacgtacgtagttgatgtttgtttataa

SEQ ID NO: 20557 - DNA, 1013 bp, Cannabis sativa
taattgtttttctattttttttttgtttggtgtactaatataattcgatattcttgttttggtgtgtggaagatttcaaatctatttccccatttgggattgtgatcgtaagtttcaaatcaataagatctcaattggatgtgtattttgatgaggagctgagactttatttactatatttttttaagggaatgttagcaggttcttaacaacttcactaatatttaattaattataagaacagtagcttatatgtaatcgtgcccaatttaagaagtcattatagtgacgattagtacttatctctaatcattaagccgttaagactctagagaaacactattaaaagaatggtttactttaattattttaaatttagtcatgtatgtatatatgttcacacttcacattacttgtaatttgccgcgtaaaaattggaaaagttcctatataaattaactaattgggaaaggtacatatataaacacatatattaacggagggcaaccctataataatatatattaactatggcaatgggaaatagtcaaatttattctattcgcttctctttaccctaatgtattgtctaatatgctacttgaattttatatggttcattaagtaatagttcaaactttttctaaatctttttaatggctaaatcattaaaaccgcatcatatgttacactaatgcttacacaattaataatttaatacaaagagattgtttcttattgtgaaattaatttttgaggtttttacatggtatattatttttttacattttgttactttgatactgctatatggtatttttttaccgttttaccgtacacttttatactgtctttttttcaaaccggatgaaacttctatttatcctcatattgacacttgtattatgttatgtcatcttttatatctttttaattaaaaaataaaaaaaatattaatgtgatgttgcttgtcatattcatagcagttcctctagttttttttttaaaaaaaa

SEQ ID NO: 20558 - DNA, 3073 bp, Cannabis sativa
tccaaaatagtattcatttcataacaattatgtgagtgaggattaatcatgatacaataataaatttttgaataattcgcggcgaatcctccttatgttttaatttttatatacttaatcctcttatttttttgtgacaaaacctctttaagtttacttttctttgcaaatttaaaacgttagttaaatattaccgttaaataccaaatagataacactatatacacctatgtatacatgaaagtaaaattttgaagccaatacatcaataatccagttaatatttaacagtaatatccaactgacacctcaaatttacaaaaaaaatataataataaataaacataaagaaatttttttaaccaaaaaataaaataagaaaattaaatgtaaaaaatcaaaacataacaaaatttcgccgcaaataataaaaccactacaacaaacatatgagctactcactcacctattaaatttccaagccaacaataaaaccacatgtatatttttcttcttctcacctactcttccacacaactatacaacaaactctctcaatgtcattaatacatatttattataaagtgttgttaaaattttcttctatgcaagctatctacaatggagtcaacattatttgatcatacaaaaagtgggagattgttagcgtttatgatcgtgataataacgattattagttatgttaatgcaaaccctaaagtttcttgctttttcatatttggagattctttggctgataatgggaataacaataatctcaacactttggctaaagccaattataagccttatgggattgatttcattgattctcaaccaacaggaagattcaccaatggaagaaccactgttgatattattggtactcttatatatttctcttcaattattttttatatatttattttatttaaaaaaaataaaaaaaatcataatttgtttataattatgtgttaatttattttaggtgagtttttgggttttgagaagttaattccagcctttgctagtcttgataataatagcttcaatctattgagtggtgctaattatgcatctgggggagctgggattctcaggcaaacaggaacacatatggtacacattatatatatatatatataagtaattatatacttttaattatttatgagtactcttactcgaacgagcaagtgtgatttttttattggttatgagtaggctgcaaaaactgtcaaattgtcagtttttgcaagctatcgtgatcgaccaataaaaaatgtcacattaatctgtgtcattttaagtagtagctagtgcgatatttaactttatattatgaatttttttatcggagggatattacttttgtttttactagtagggacgtttagagagattataactcaaatttttttatttgactgtatacacgttttgtagtaaatatataatctgtttgtgaaaaaaatagaaagattcaaacattcagatgcacacatgtaaaaagaagtaagtacacgtgcaactgaatttttgaactctgtttttgatatcgtaaattatttagaaaatttcaaaaataaatagaatgcgtactataattataatgtagattgtcatatattaaaaaaaatatatataattttttaaattatcaaaaatatattgatgtctttagcaacaaggacaaaattggtgtccctacaatactcttgtcctttctattatttacaaagagtacttattgtgttttatagggtgaaaatatttgcttgaagaaacaaataaagcatcaccaaattatggtatcaagaataagtgacaaattagggagcaaaaaattagcacaagagctattcaacaagtgcttatattgggttgaaattggaaataatgattacattaacaactacttcatgccttggatttattcttctggaaatctttatacacctcaacaatttgctcttattctcatccacaaatatcgacttcatatcatggtaattaattcttaattaatacttctaataattacattattatacttgaaaagctcaaattaattgtttattttggaaattatttattaatttgataggaattgtacaatttcggggcaagaatgatcactttagttggattgggacaaatcggatgcactccgaatgcaattcaaatatatgggacgaacaatgattcttcttcatgtataagttacatgaatgacgctgttcaattattcaataataaacttacaacgctcgtagatgaacttaacagtgattttaccgatgcaaaatttatttacgtcaattcttatgagataggattgtctgaagatctcatcgctcttggtaagaattattacttgtttagcgccagtaatatttttaattttataatttcattaataaattgaaaataaataataattattttttatttcttattagggtttaaggttttgaatgttggttgttgtggtggagatgagaatggacaatgtaagcctttggagattccatgtgagaatagaagagagtatgtgttttgggattcatttcatccaactgaggcttacaacttaatcactgcaactaaaatatatcaagcttattataacatatcatatatagatacccaataaatattagtgatgttgttcatttattaatttagttaaaccaattatatattgtcatagattaattgttctttatctatatatataattagtaagttagttaattaatcataattaatttaaggtttatatgtataaatagtatattaatctctttttctctctcaattatgtctgtaatatttatgtgtgtaagcttatttattttatttttattttttttttcaactgagattttttattcaactagactaactcggtctcaacatgatggataaaacatcagctgaaaacgttagtgtaacgcccgtattttatatttaataaactcgaaagttaattttaataatttatagcttaataatcatatgggtcgggatcccgagtatcaaaatacaagttaaaagtattttactaata

SEQ ID NO: 20559 - DNA, 4517 bp, Cannabis sativa
gtttatgagccattgtcgaagctactatttgattgggtcctttcttgaaaacaaaaccaaaacctgtgacatagttttcttgatccaatgcagcatctacaaacaaagctgtgctatcgtcccccattctgtcagagattgtgtgggtagtgatagaactctgatgggcagaattggaagaagaagacactgcactatgaattttttgggcctccttatattcctgtaaataatttaaaacaaactcttgcacattgttagaaacataagacctttgaacaacaaagagtttttggtattctagatttgccaaattaaactaacaaaaagagggagatcctctataggtattaaatgaatgccttgaaggtagaactctctaatatcatgccgtcaattctctgtatgaaaagaatgaaacttaaaatgcttccaaacagtactagcttagtgacaatcaataagtgcatgagttaccaattccagtttgcctccacagaagtgacaataggggttttgaaggactttcttgtgaaacagatttagagcacaaggtaaaatgtggttaaacgctttccaagtaaaatgcgtgatttttggtgagatagggagtgtccaaagggttttccaccaatgcttaagagggttaggatcagaagaggagggagagtcaacgtttgcggaagaggaagcaaggtggtacgctaaattgacagtgagaatgctagaatgatgaagtccccaaatgagagtgtctgcaggattgggacccaaagggatttgaaggacagttttagcctgatacatgggaagataatgtcgaagctttgcaacattccaggtattgttacggggtataaaaaaagaaacagtggggtgagaggattcaattgggtgaagaaacgtggggtgagaaactccaggtatccagatggaagcagagacgggacttcatttaaaattaggtgtagtagcaacttcaattacatttttagcacacttatttttcttcattcttttttaacaactcttatctcccaattatacgttttcatactaaaccgccgattttccctcaaatcacgatctcactctacagaaaacccattgcatatcctcttcttctccaatccccattgattcctccaatatctttttcttctcttatccgaaattcaccctaactttcttttaaccctcctttgtcatctccgaggcttcgtgagtttcaaagttttctccctttgttctattctgcttgcttatttgacttatatcaatatcagtatatatctcattacatttacatatatttcttcaacaacaagcattgtctctttgttttatagttaatgtttcttttactatgattgcaccgacttaactctcaagttaacaatcacaacaacactcgcacattccccaaaacgacattccgacagcacatttctttcccaaccaataaaaaaatagcaatgaatcacgtaaacgacatcgttttggaaagttttagttaatccgacactatgtttactgttatttacacaaattgacactcttaatagttgaaagaactacaaggcttccgagtttcagtcggacaccacagatttcaatcatattcagatggctctgtcgtcgtctccgccggccaagggcatagtcatcacggtaccggtgctagttttggcagcctcagccaccgctattctcttccttttgttgtctctctcctcatcctcctgcgattgttcttccgccgtgggcactgttcgaaccccatttatcgagagcgctgttgaaaacgccgccttttcggtggcggagcggatatctacgagcaaggatgatgtggagtgggtgaaagatcagatccgaatcaatgggttgcatatgcaggacaatgtgcttcgaaagggtattaaccctcgcactagagctgaacagcttcaagatctcataaagttcgtaatctcctctcctttccctatgtgtaaattatttgcatttgagccccctgtcagtttgaaattcgaatatgtagatttgtttatctttttattgtgtcatttattgatttgtgcgtttgagattttgaatctttaaattcgaactctgctgtggctagttttgatttctttaagcgcaacaaaattttgaataattgcatttttttctgtactaatttttgtttcatgctgctatatatcgaactgtttggtttgttttctttaaaattgaactaaagttttcctttttttcttgttttaattacagttacaagggaatttctcactatgaaggacaagaatcaaacaaccacactgcacttccatgccctggtgggctccttgttgaagagcaccatagcaactatggtgagccatgggcagggggccgagatgtgtttgagtttcttgctgagtcttcccacctcagacccaactcgcgtgttctagagattggttgtggcacccttcgagttgggttgcattttatacggtatctcaaacctgaacacttccactgccttgaaagagatgagttgtcattaatggctgcttttaggtatgagcttccttcccaaggtctattgcataagcgccctttgattgtgagaggcgaggatatggatttcagtaagtttggctcaggagttgtctatgatttgatctatgctagtgctgtgtttctccacatgcctgataagcttgtttgggttgggctagagagattagcaagtaagctgaaaccccatgatgggcgcatcttcgtttcccataatgttaagttttgttcacgtttagggggagaagagtgtaccaagaggctctctagtttggggcttgaatatcttgggaagtttacacatgatagcctgcttttcaatcactatgaaatctggttcgggtttaggcggttcaagacttagagtttcgataacatattccttaatttagttgtggaattgtggaacctggatcctcattagaaagatcaaacagaaagctatgaatagatgttttcctttgccttgctcttgctgcagtgccattggtagctgttaccacattttttttaaaggctcctgttggtaattgtatttgaaagagaagcagctcagaatttagcagcacattctcttgatgcaacactagtttgcacagaatttgtaaactagtgaagtgagactctgctttctgtttgtttgtggttggattaggaaaatgatattgtttaagttatgaatgtaaatcggataatttttgcttagatttatttattgtaacattgtgtgaactgtattgagtgagatagttgctgtagcagattttttttcttttggaaaataagctatgattatataatgtgcaacttttcatgtgtattatttagctaaagatcaaataaacatatcgattaatatccacgaaatgtacttttaaaagaaagaacacgaaattactgatgaatggcgtgctaattagttactggtgaaaggttactgtgagaaggaacttcacaataatgttataaaattactcaggcatttcatattctaaattatatcatttatttttaatgagaaaaagggtgttatttgcacaaatataggtatgaaaaaaaggggataattaaccaaaaaatcataaaaactttatgaaaaatatagtataatgtcaaaaatacaaacaggtaaggtatacagagtagaagtaaacatcccatccaattttacgttttatactcacttgatttaattcaattagtaattaaacttaaaaaaaatcatctaatctaattcaattaatcttcaaagtctattccaattaataaatgatttggtgcgatccatcgaatcagatttgtgacaaaaatcatgaggttataacttaccattataataacacatgaatttataaatgacttaatattttcacatttgttcccatatgggacaatctagtttaaatttgcttaagctgataatatatcgtgtaatgtaagtgaccacagtctttattttggagataaataatgtaaaactaaaccatttcaatggattttcttctctctcccctctctcaagacgattcttttgccttatcttcctaaggtttttcttttgttcttctcgtccctctcgattagggaggtcgtcattggtctttccctgaccgaggagacttgatgcttacctgggtgcatcatgaggtggtggagtacgttcgttggtggttgatcggtctagagttttaagcgccagcgggtggtggttcgagctttgaaggtgggttctgtggtcgatagcacacattttgggatcttacaactattttctcaagtttaaaggttctggatgaggttgcgtgtggtattggcaggcattggtggtggtcaccaacatttgggacatcggtctgattggtgttagtggtggtggtttcacactttcctcctctctattggcggcctgatggttgagttttgatgttggtcaatcttcgatggagttt

SEQ ID NO: 20560 - DNA, 5471 bp, Cannabis sativa
  modified_base (5183)..(5184): a, c, t, g, unknown or other
aggccccatccacttatactttcaacattgctagctctgtggttgacccctctaagttctcatcgatcttggtgcactcgactgtgaatatagctagggcttaacccttgattgcaactcttggctggtattgaatgtctaattggctaagtttcataacctatttcaacaatattcgtgagcattctggtttctacaatacgtgcatgatgggttgatttgtcagtaccttgatggcatgggctttaaagtaaatcttagctttctcgagccgcttagcaagaaaaaatgataactttttaattagaggatatctggacttcacgcccaatcttttacttacataatacatcgacagtgagacatttccttcttctcgcactaatgaaacacttatagcatgttcacacacaaccaactacatgtacaatggttctccctctaccaattttgacaaaattaaaagtttagccaaatgatcctttagcttctagaagggttcctcacacataacagtccactcaagcttcttgttgccacaaaaaatgttaatgaaatggatacacttatcaatagtttttgaaatgagcctactgagtgcaactattcttcctgcaaaactttgcacatctttgtgttcttttggagatggcatgtcaatgagaacttgaatcttttctggattggcttttaatccacaaaaattaactatgaaacttaggaaattccttgaggaaactgtgcatttcttatgattcaccttcatctcatactttctaaattattgagaaagcatccttaagatcatctctatgttctcttaaagttttggacttcaccagcatattatccacattaaacatccatatttttcccaagaacatacttgaacattcagttgaccagatgttagtatgagctctggcattcttaatcccaaatggcatcataatgtaactatacaccccctcgaaggtagtgtgttcttagtttcccacatgcatcttgatctgattatacccataatacacatccatataactccaaagctaatctgaaactagtgtctactatctaatctatttgtggtaaaggagaatagtctttcggataggttcgattcaagtcggtgaagtcaatgcacatatttcatgttccattaggctttgggaccaacattgggttggccaaccataccagatacaatgtgaaagcttgttgacttcttcctttactgctttcacacgggcagggtccaatggacttctcttttgtcatcacgagatcattgtatatgttcaaagcatggcagatgatgttgggacggatcccactcctatccacatgattccatgcgaggacatcttgattttttttttttcattttttgccactatcctttctcttacctcaagaggttggttttccttacttcgatcatctttgttaggtttgtgtcacctttataggttttttgcttgtgggtctaatatatcttcttaccgaatcaatctcagtgttggctaagctagtgatgcaagaactatttcttccacttccatggcctcttcacaaacaatgaagattgttcttgttgatacattataacatttcctgacactcttttggccaccctttgcagtaccaatgctaccattgtcacttgggtacttcatgcacaaatgacgtataaatgtaattgccccaaactcgactaggatgagatatctaaaaattgcactgtatgtagtagggaaatccacgactaaaagttataatacttaaaggcaataagggtattgcttctatctatgcccccacttagagtgactggaaattggatctttctcatgggtattagaatctccattgaacccttatagctggattggactcaaggaaagattgatttcaactaggccaatggcctagaatgtgactttaaatagaatgtttacaaagctcccatcgtccaccaaaacccatgacactcttttggcgattttatcttcaatgactaatgggcgatgatgagggaagtggacatgtctgacatcttcctcaataaatgtgataagtaatttcatcattctatactattgagttactatttgaaccaatgcataaacttcttcttcatgttccaactctttcaaataccttttctaggtattttggctgcttccaccgatatgcggacctccagagatcgtgaccacatgaccatccataggtggtggagcaatttctagtggataaggatatcttggtttaggagcttgtatgttgtatagctagtgtcccctcagtgacttctactcccaaagcttactgataaactataccctgagggatcctagtaggtccttaaagtttagttgtcgcttattgcctttgcactgtcatttgtcttaggtaaacaatctagacacttatccgttgacgaagagggctgggtttgatgagaatttccgtttcatctttcaattggttaaacccattggtggtgttgcctatgtcaaagtggtttaccacttcttggtggaatctctattatgtttacctcttttgaacattggaggtggcttcctgtaattgatagtgttgcaagtttgcaaatagatattttctctggtacgtatctggtgagtatattcaatatactaggattcgtatccctcgttcttttcatggatgactctattttgctttggaatttgttgtttctttttcccttagcttggtttaccctttatttgggaacctacgtttgttgttgtggtagagttgttctggtagaaatattgaatctagtttgtgttgccccgtagctgaagaaagtagtctaggaatgggcataccctgagccaatctatctgtagcctgtaggtccagtaaactgcattatgggagcacaatcaacaatgatagataaaagttagttatacatctgaatgttatctcagttgtatcaagtgctacaagagccacctgaactcttaaagataagcttcttctagttttatgattccttaagcctgtgccaagaagacaaagagtgactcaactctctttcgttgtatttcattccaaagtaaggatttggatatgatccctacttgtagggccactagcttttgttcatctaactttcttcttcaatgttgcttccgtgaatgttggatataagatgtgagtgtctcattctcctattgcttgataattgccaaggaactaatatccatgttgaaatcccttgtggtaacaaattattttttgaacatggactgtagatcttactgactctgaatagatccaggtggtagttgcttccactattcctttgtcgatttagcaaaattaaggggaaaacataaatatttttcacatcatcattcacatgcgcgaccttcataagatgattgtactgggacaagtgaaccatgggttccatctttccctcgtataaatcaatcagtggtatctggaagcacggtggaaagaccacgtctaagattcttctaacacatgattccatgtcttcatcttccaaatctgatttggctccactctactttttgtccacaaagtctcttactttttccaaggctgctatttgatccttcatcctttgtgtctcatcgtccgtaacgttcaccaccatttttcgatgattgatgttattttataaatggcctttgcgatgcctaattctttcacgacgtgctttcgttttttgagcattcaagttttcccttaggtcaaccataaaatcactctcttcagggtcaaggtcttcaacatcttcttcctgatttatgaaaatactgggacaatttttctttccataggccttagatctgagttattgagcacaaacttatttccttgcaagaccctccttggcagattgtttgggtgaccctaccttggggtttggtccacccttttttttggtggttaggatttactcgtgtaagcctaggcaaattggttttcctttgcgaaccatctgctatgtacttccccataccattcactggttttgacgattcgagtcccatttggtcaaactttcttgtagccaatattaggttggtgtttatctgaatcccaatccctggattttagtttgtgggaggaacctctgggttaaggccccttgttgcaatgagagttataactggaacaacatctcttgtatttggcaggtggcttgctcatgtttcgccaactctgcttcattgtctaagacaagtttctttaaaaatgccatatccgcatcctaggagggagtgtcgtctttctcctcttctttgtcaaaatgctcccctcaatcatctttgtaataccaatttaggtcagcttctccgtcaagattttctttatggagttctttggattggttgacatttcggagggggtccccacccacaacaaatgcttctacctctcctacatttactttctaagcatcatccagaggaggaggttttaaagtgtcaataatggagttttgagcaacatttcaaactgtttggttggttgtccatgtaaccatgtttctcgtagccatcattttcttacatgacaagtgatggtgagaatatttcttcaactctcaatgagaatactaaaatatttacctagattttctggattttgtcaaagaggcactgtgccaagtaagcatcctctaaaccatagactttcctaaatactctttcaacttctattcttggatgacacaatcctaaggaatctggtgacctgtaccctctagtaggtaaggcctaatttctaaaaacattctatcatgcgccatcgttggaaaaaagaatgtcagagtagtggtgtattcctcaaaaaggtgacttccttattgtcaatagcatttctaaaatctggaatatgggataggtcgctagatttctcaggattgtgttagacgagtactgtgtgccgtgaaccgagcaccatataagtatcctttaggaccatagattgtcctaaataccctttcaacttatattcactactaccaaataagcctttggaggcggttttttcagcaaattaataaaattttaataaacacacctacggaatcggttattacaaaataatcgactctgtaggtgataatttttttaattttaatgaaaaaaccctacggagtcggnnattttgtaataaccgactccgtagatgattttttaattttaatgaaaaaaaacatattgaaccctcttcgctatcgtcttcctcaaaactctaaaataaccagcagcccttcttcctctcaaacccacgaaacccttgcccaaccaccccatttttcccctatttcttcatttttcatcgacttttacccattttttttcaatcttgtatttttcatacccaaaatcatatccccaaagtttgatcgtcttttatttggtcttttagcttaaatcgagcttagaggt

SEQ ID NO: 20561 - DNA, 3659 bp, Cannabis sativa
  modified_base (3631)..(3634): a, c, t, g, unknown or other
acattaataatttagacatataatatttttttagacaaaattttaattattccaacgtaaaaaaatgcatgtatagtgaattcttagatgaaatatgatgtaaatgattttagagcattatgaaaatattatcaattgaaccaatccaaacgagaattaatttcaccaacctctcttttccgtgtaaaaatatcagtccaaacacaaaccttattttcaccacatttgacattattaattaagctcattaattattaattgttattattctcaccccattatattttatatcttaattataatatatatttgaacattattattattattattattagatatattagaactagtgtctaacattatatatatccgctacatgagtaattataggtaggtcaaattattcaattatatatatatgaggcatgatatggagagaggtgattaatgtcaattaattttgacgatgacaaacattaattgttaatttgtccaaataataaataaaggaattaattaacatgtacaagtggccattatatataatatataatagaagaaatagtaattaaaaagaaggaattaacgtacaagtggtggctctgctacacgtactctttcggtgcatatatacacgtgtttagattctttgccagaatatacacatacacactattatctctatctctatacatatagaatctgctactacatacatttgaatatatatatatatataaatatttgtttttgtttgaagctagctagctagggatgtggtgtggtgaaagtggtagctagtaatactatttgggagttgttttgtgcagtagtagtagtagcactaataataataattaataatgtgtccaaaggaaagggacagattatatgtatgatttttgagtactactactactattactactgctctacagctcttcttatatattttataatgtaattattattagtattagtaattcattttaattatatatatgttgactgtgtatatagctagtagtggatgacgtttgaacattacttaattaattcatttccactatatatatatatgtatactctactcaccactacaaacaataacatatattcacattttatacctatatatatacacctttttagatattaaaagtataaatgtgaatatatatttaccaaaattaaatttattataatggcatgttgctggaaccatatatatatatttcatcttaaatatataagttagaccaagatatcaacttatatatatgtatatgaatctcccttataatcagtaagtataatatgtaagttgggtgagagacacatgcatatatatatatatgtatatatgcaagttgcattataatttatattaattaattttgtgatattaatatatatagtggtagtgcatctgcatgcatccaaattgtaattaattaattaattaattagttttgtgttaacaaattaatttatgggaatctttattatacagagattctgccagggattcactcaaaaggtctttaattagttattgctttaatttcctttttacttattctttctctcttttaattaatttgataatttattaattaattagtcacataaacactcaattatatatatatatatttataatataagaaagggtatacagttagttccttgttgccctttttattgggatatatgtttgactttatccatcgcatcatataaatatagccatgcacaggcgctatatatactatttctacattatatattatataaaattctcacttggaaattgaaataatccaatactaatttttttttttaaattaaaaaaaagtattaattaattatgtagttatagatagtgtttatctcttttcttgaaagaaagcaaaacaccaatatacatacgttaacgactttctgcctcattcttcatataattagtttcattgggagtactcttcttaattaattcaagtaataattaaccaaaaaaacagtacgccattttatataatatatttttgcataaccatatatgcaatcccccactataaaaagaagataaatactagaaggcactagtggtgcctagcactctcttatgtgtcaatattattattggttcaactaagtattgggtccatataatttaatataatagtttttaaagagtatcactagctaatcgcaacgtaaaatgtcgcaaaagtgctagacaccactaatacttaatcacaatgttctaaaaagaaaaagtagtacacaatatacaattaatgtatatacacttattataattaaagattggtttttttctcaccgagttccaaaattatgctctaatattattaaactcatcttttcattacttaatgaataagaaaactagctgcctatacatacatttattgttttaatcaatatcacatcccacaccatatataacaatacaattattataatcctaattaattacatataattaataatatatatttataaaaaaaaataatataaatagagtaaatactattttagacctgtattttgtaaaaattattaattggacattctgttttgttaaaagataaaataaaccatgtgttttctaaaattgtacaaaaaatcttaaactattttttgtcaaaataaaacttaataataatctaatctaaaaatgttatgataaaattggttatattttctgtatctattcgtgttaaaaattgtcttaaaattggttatatcaaataataaaattattaaaaattgagctcaaagccttattttttattattttaaaaaatataaagtccattctatcatttaataaagtatagtgtccaaattaataatttttacaagacacaaattttaaaataatatttatccatatatatgtgtggtttcacatatcataatacgaaacaattaaacaggtatttaacaatatattccattttgacagttcattttaatttataatataatatatatcacactatatatgtataagctaaagccacgtacctttaaacttgatcatatgcagccttacaaacatgacatagtgcgatacacggcatatatatgtataaattacatatatatacaaattcaacatatatatatatatgtatatgtatatataaatttgaataaataattttatatatacatagtgatatagcacaaaggatcgatggtttttccagtaaataaagccaaccaaaaaaaagcaagtacatactttttgtcttaatttgtcaattaattgatcatcgtacatatatagagtaaacatatttttatcactatatagctagttggcctgagtttatattatatatacatgtcagcattcatgcatatatacctttggaatccaaattgtttgtatatatatataaatagtactttaattaggcagggaatgttttcattattttttgattatcttcaatttaattatattttattatatgatatgcatgcatgccaatacgaaaatatagttgcatgatacttttctattttgttatatatttagaatattttgtaaattaatttcagaaaattataatgtgacagtcagtagtcnnnngatccgtaaggggaaatactgggta

SEQ ID NO: 20562 - DNA, 5200 bp, Cannabis sativa
  modified_base (36)..(70): a, c, t, g, unknown or other
cgctcttccgatcttatttctgatctatattaatannnnnnnnnnnnnnnnnnnnnnnnnnnnnnnnnnngggcataaaacccaacaatgatatataggcaatagaggtttgaaagattgacaaaaatttgaaggtggctagagttttaacaaccctattagaggagttgaaagcaatgggcctttcgtccaatgatgattctcagtgtactgatgtgatggcactggtggctcattctgatcgaagttcggtcctcctcttcatgggaggtggaatgggagctaggaagagcactgatctaaaagacattctcaaagagtatggaatcaacaaaaaaaatccttcattatattctctatcttaagaacacattagatctacaaagacattagctctagaggccatcattatattattcaaacaggtgagctggtcatacatttattctctttagaaatcattttataaaaaaatgattgaaatttgattctaaagtttaagattcaaagaggtataccagtcatcaacagatgcagcctcatcaaataacaacacataatataggtataataataaagttatacacaatttgcttcttcctattttggtggaagttatctttactgcttttcctattctattgtataatagaagaaacagtcacaaaatagtatataagaaagccaatttgtggaaatgatacacacatatttacacaaattgtggatagaggcttattacataacttttccttactgtttttttttttttttggaaaatcttcttcaggtatcctactataaatatccaatgaagattgagaagtgagtaaacattttaatcttatttcgtataaatatatgttcactaatctttgttgatgatagtttcggtttgattctttgcttgtaggaagattaagatgtttgaagaaagctaatatactaaaagacttatcgaaacaagaactctttgagttatcattttaattctttttttttttttaataaaagcgtaatcatcataaattaaccaagctattagacctcacggtcattacaaaataagttctccggtgagaaaatcgaaatagagtcgtacaactggtgggtaaaagcccacttagccacattatgggcaacataattacaggacctactaacattagaaaaattacagctaataaaagagggagaagacttaatacaaaatgagacatagttctcaagtgcccaatgggtctccttcccattgagagcattgataactagcctcgagtcactctccacaattacaaacttggatcctagttccaatgccaccaatacagccaaacagcaggccgcagcttctccatataatgcatccaagaaatccaactgagccgagtggactcgaatcactccaccaaggtgattccttgcaacatctgcagaacacataatgtgtaggcccactctaacatcacaatttagtttaatccagtcctgaggaggagcccaaggctcccgcaagattggtgtaggacaaggaaagaaagtagcatgtaaatctgcaaaagaattacaaacaaagtcaatacatttcttcacatcaggcggacagttattgtgtaccatatcattgtgcgtcctccagatggtgtcaacaacaatcgaagcataaagaaaaacatcctcaactcggatacccctatctttaagattccatatgaatttaacccaatcccaaatacgaataccagtatcacaaatagggtaaaggccccaaggtcaagatctccatagatgaaacaccacatcacatgattgaaataagtgttcaatagattcctccctcagccctcacatcagacaacttgtatcttcaatctgaaaccttctttcgatcaccgctctaacagggagcgcattggataggatataccaccaaagaatcttatgatactccaatattttgctattccaaagcttattccaaagtgacggagcaacctcacagtgaggtgctattttcaaagcttgggtcaagtaagcaaatttacacgagaaccgcccattacttttcatagtccaaatccatctatccttgccctgactagaaggattgccccaattaaaattgcagaaacactctcatgattataaaggttgtttgacttatgaacatcccatttaccacaagttaacaggaaatctgccactttgttgtgacttgtagtaacatcaccaatcggtttcagaatgaaaccttgaaaatgaggaatccatggatccctccaaatactagtatcccttccatcaactaccaatttacaggccccttttcttaagattgcattggctttcacaacatttttccaaaatcaggaatgagagtctttatatctgcaactgagaaaatccttcccttttagatacttggcctccaataactggcaacacatagattgacagccattcaaaagtttccaccctcattttgccagaagagcttggttcatttctctagtttcagaaaaccaagtccaccaagagacataggaagacaaagtttgtcccaagctcttagatgaagaccatgattccctttctcgaagccccaccaaaagtcccgcaccaaaccatcgattctattgacaaggcgattagagagtttggtggtttgcatggtatagataggcaaagacaaatccacagatttgataatggtagcacgacccgccttggacaacgtctttgccttccagccctgtaacttaaaagtaagattgtaaaggatgaagttgaagttagcatccttttttcttgatctgaacaggagcaggcccaaatacttgataacaccttccggagattcaatctttaaagcttccttgatacctcttcttataccattaggggtatttttgctaaaaaagattgaggttttgagcttattaacttgttggccaggccaatagcagaacctctgaaggcagtcccaataaatattgacttcattcaaattggcctcagcaactagaataaggtcattcacaaagaaaatatgggagagaatcggaccacccctactcagcctaataccctgtatagtgcccataccaagagcctcttccaagagccttgataaaactttagcagcataaatgaagagataagggaaagtgggtcgccctgacaatgtccacaggatggattaatcttgcctacatgacccccattaaggaagatgttgagagtagtggtggatatgcactgagagacccaattgcagaacttttgaggaatcccataacaagaaagaacatgatcaataaatttctagcttagtctatcataggctcttacaagatcaaattttatggcaaagaacccctttttgcctcttttcctgttaaatgagtgtatgatctcttgcacgatcacattattatcttgtatattcctacccaggacaaacgcagcttgagtgggacaaatgagggagggtaagataggtttaattctattagcaactattttggaaatgaccttgtacaacacattgcaaagagatattggcctaaagtgattaggtcttttcgggttcttgattttagggataagcaaaacatttgtagcatttacacccttgtgcatattgccattcacaaagaaatcagaaactgcttcacagaaatagccgtcaatagactcccagtaatgcttgaagaaaagaactgacatcccatccggccccgccgccttatggttgctcattgcaaaaagagtacttctaatttcatcacaagacgggcacaggataagctcctcctggtccgcctgtgaggtcctttcttggaacaactaactgcaattaatagcatgtccatattcagaccccaaaaaaatagttttgaagaagtcaatgaattcaagaccaattaactctcggctaataatctagacattatttttattcaagatactctcaatggcatttcttcttcatctaatagcaaccgagagaaaaaaaaaattagaacacttatcaccttccttgagccaagagatcctggcccgttgtttccaataaatctcttttcttgccagagtttcattcaaggagctatgaatatcacgttccatgttccaatcacgggctcccgcatgtaatctctacatatggtcaagtttttgttccaactctttaatgatcaagtcaatcttactaaattgagttcgattccagcaaaggagagcaacacgagtcgctccaagtttcttgaagatgcgagctggggcccaagaatgatcaagcaaacgccaagcgttggcaaccaccaacttgctcttttcatctctcgtccatccttcttcaaatttgaaacatcttttaaatttgggatccaatccactagaaagaagacataaaggtctatggtctgaattacacgtctgggaataccaaaggataactctagaaaataggtcaagccaagctccattaattaatcctttgtcgagagcagatttcacatggctccttccagatcggtgattatcccaatcttgtcaccttgaataggcatattaataagaccatgagaatcaacaaggttagatatgtaagggataaaagggtcccttcccgacgacccttcacgttccgagtcacttagaacaaaattggtatcacctaaaataaaccagggaccaccaaacctatccccaatttccattagctcagcctaaaaaattttcttagcatgaaggtaaggagggccatacacacacgagaggagccaagggtgtgaaggaggatccgagtaaacaagactagagatatggttatgagaacaagagatacactcaaaattgaaaccaactttccacgccaatataatacccccaccagtaccaataggaagcaaattaacattaaaataaaagtgcagggattttagagtatgtaccagggggtagcatccactttaagctcagttagaaaaacaaaatcaagagagtgcgatctgatcagggacttcagttcccaaactgtagaggtctgccctaaccctctacagttccaggtaatgcctctcatggctccagtggaggagatttgacattctcctccacaggggtatgagagtgagcagacaagctggagccagattcttcaatcaaaaaagaaccaaccagagggttcttcata

SEQ ID NO: 20563 - DNA, 1620 bp, Cannabis sativa
ttttttttttgattaagaggcctaaaaacagccaaagggacaacaaagaaacaacaaacacacggaacatcgcacctaaaggatgcaaacaaccagcaaacaggaaactaaaggagcaagtctgcaaatacaggcagcaacaaagaaaagaaaacaaaaggaaagccaaaaggaaaactaaaaaacagagaaaactaactcagccatcccccattgaacttggagggaaaccgaaaaaattgggcgcctcaaaactccctaacagttgggagtgcagagccctttgagccgcattatgggccacactgttgtggatcctggggatccagctgacctcccaaaggtcaaaatttgcagaaaattcaatgaacttagagacaatgtctttgacattgtggtgaagcttatccagatccttgttttctttcgaaattgcggtgactgcttcagccgaatcactctggaagataatgttcttgtggcctaggtttatggctcgatcagccccccagcaaagagtagcaatttccccggctagaggctcaatgtgttgaattcgggttgagtgaatgcttgtgatctcccctttatggttgctgaagattgctgccccaaccgactgggacttgccaattgctacgtcggtgttgcagatgcaccagccctcaggaggaggcatccattgcagcatcgaaccaacgccacaaatcggtgtttgaagcgcctcttggagacgtttgtcgattagctgaaggatgatctttgtgggagtgcggtgtcgatgatggaccacctgatttctttcgaaccatatcttctcaaagattattgcagccccttcgaggaaagcatggaggctggtgtcttttggtctgttatcactaattttaaaccagcttatccactcttcccaacttgagaaattaaaagagcaagtcctaattccccaacagcagccaaaccacatcgatcgggccaaatgacaattccaaaagatgtgtagcgagtcttccactactaaagaacacaatggacaattaggatcattgataccagcgaagagttgtaatttacctcgagtgagcagacagtttgaaaggattttccaccaaagcattttcagtctcggatgcatcttagtcccccaaacaatccgccatttttcattggtggtgcctccttggtgtaggttctttatgattcgataagctgaacggattgtgaatttgccattgcttccggggatccaaatccaagagtcttcagtagggtggtttggaagggtgatattcaaagtccttctagcatcttcaggctggaaccaatgatggacaaggtcctccttccaagtgccgttttggataaaattgctcactaagctgatgccatgggttgcgtcgagtctcggttgaggttggagcgtgcccaagtggacccaaggatgaaaccaaatagatgtagatttgccatttccaatttttcgacacataccttcgttaagttgagatcgggcattaaggattgccttccaaagcacagaatcagaacctttgggctgaacgtcaaggaagctgtggctcttgatgtatttagcatccatgacgagcttccaaaggcttg

SEQ ID NO: 20564 - DNA, 4253 bp, Cannabis sativa
  modified_base (2597)..(2598): a, c, t, g, unknown or other
gggaacagggtgcgctatttaccttgcgtgaaccgggagctccaaacattgtcttgggtcgggtataagcattaccggcggatctactccgggagaaaggccatatattgatgttcaactcggcggcggaactcgttccggttccggtcttccgctccttcttcttttccttattacaatctttactatctttatccttattactattattattattattagtattaatattactatcttctgattcacttttggtgcttttcttaaaaatatctctccaccgcttcgacgcgctcaaaggaacagccgattcggcggaagaaatcttgggtccgggtccgggtccggattcgggttcgggtttgggaggaggaggaggagctggttctggttggggaagatggggttcggattcagaaggtgtatctttgtgttggtgggagagaaggtgaagagggagtagaaagccatctacgataagctcgtcagcggataagagattgggctccggaaaagaggggtttcggaccatccagaactcgaagtcgggtgagtttgaatcgaagctgattcctcttctccttacgctattgctgggagtcaaggtttgggcctccggaatgattattgggctgtccattcccgggcggtagaggagttgagaagtttttcagtttgtttcctatgtttagagagagagaggaagaaggaggagaagagtagaggtgttttcagggggaagtgaccctactaatgcaataaataaagagaattaaacaaaacaatagacagatatattatagagaagaagagaatagagagatggtgttttatttattttaataataaaaatttattcaaaaaaaaaaatagagaagtggggtccatagtacatggaaggagcaatgtcataggttaggattagagagatgatttggtggtgtagtttgaatgtagaaggataatgctcttttttctctttcataatatctctatttctactcattaattagaatagatagaatttgtccaactattatctttcatcttcgtagattttcgcctatctcatttttttcttcttaagtatatacttctaactataaaaatacttacaaatagcctcattcaaatattttggtctttttttttaatgagcaataaagattaaagatacttctaaaaatttggataataaatgcaaaaatttctcataatgattttaaaaccattaaaataaataaatttaatagaaaaaaaataatgacagttgtaaaattttggtaataaattacaatccaatatcattagggtcatgcaatttattttaaaaccatgctatcttttttctaaaaatttgaaagaacaatagggtaaatcataaaaataattatataatatgaatctaattaagtcgtaaatctctcatccctatagataaataaatatttagataaaaagatataaattattttcaatttttctctttatacaatttcaatatatatattattgaatatatatatatatatatataaattggtaggcatgcggaaatggtaatatcaaggattatattaaaaaaaaaaaaaaaaaatgcactatccattaaatcgagacaaattcaattatgccataatgatgttatatctgtatttaagaattttttttattaactgaagttaagaaattttgattagcactatttctcataattaatgaggatgtgataatatagccccgatataagatttttggcatgaagttaatggaattccatatgtaacattgtacatatagctttttgtttattattgttattctcttattattattaacatgatcatgactttattaacatctaaacagattattaatacatcgaacttaaccacaaccttttgcatattaattggatatagtacttcactataatgacccatttagtaatgtagtttacttactttcatgtacataaacacactctttaaacataagtagactcaacaaaccttgatttaaaatttaagttagttggtttagattcgaatatatataaactgtttcctttttttcttaatatcaataaatgctacaaatatgatgtgtacatattataacaacacataacatgttataataattcataaattttttcaattattatcctaacagtctatggtgaatacctatagagaaaagtgtgaaatctcttcacaattagagacgacattatcagcacactctactatttttgggggaccaacctataaattaatattatagaacccataactccatataacaaagcaaaaactccacttgtgctaagtatatagtggtgatttacttttggatatcattgaacattgatttagattgtgatatttttttctataataaataagatggtgttaatcatgtatttgggtaaaatatgaaaataattaaatttaaaagaaaagaatgatgtcacgtgaagttgctatctttcatgtaggatgatatgactccaatattagaaattacaaattagaatgtctttcactagcgttgacaatttataataagcattattattcttattattattattnntattattattattattacatatcataattcaaacaccacttgataataaaatcccaattcaatctcttatcaaccgcatcaattactatccatgatttatctcaacatatccatatgaatgatgcttttattttttagtttttagatgataatgagtgcgagcaaacaaacaacaattccttaaaattaggtaagtgccaatttatgatttttaaactcttaactcatttcctactcttaattcatttagccatctatattttttatctataaaatttgaatgcctaattatttgtgtggtaaaaatgattttatttctctctttttttctttgtagtcttgaaatttatctttaaaatatttatttggcattcattgttaacagttacaatcccaaaggcaatggtaatgaagttcatctaataataaatataataaataaaagtaatgtagtggaataattattttattatatttattggaaacctgaagatcgttcgtggggataatttgttggctagctaatgaaattattatttgatacacttcgtaataataattaaaaaaaataaataaaataaaaacattgacaaattcttattaatcagttgacttgttcacttgagcagagctggccggggctgtaaaggtacgtttggtggcttttttttcttcaatttttggttgaaaaaaccaatagatgtattatataatgatctatttctacaaataaatgtcccaaaacaaaaattgacggctcgaaaaataatagtatgtggaaaattcaaacactcaaaaaagtaatatatattaatagaaatgaggttagttgtggtgtgggttagaacatgggctacaataatgaataatgaataagaatgaaaagagagcatgtgatgggcataaatattagtaattaaaaagggatcacacggttggaaaacttgtaagattggaattatgctacaaaatgacaaacttgggttggggttggattattggaattggatttggaccctcctccataaatatatattttgattatttttcaaaccaggattcaagatatgtatatatattgatcttcaaatataccacgaatcttgataataatgataacgataaatgataatgtaataagtaattggttttgcagtacaactagtcagtctatatgtaaccctatagtgctgctaatggtgaagctgcatgtgcctatgaatgtgatgtgtgtgtaaatgtaaaattaagctattatatatcttacaacaattcttattgctctaaggatattaatgagagtaatattgtgttgtttgtttacatgttggaattaaattattatgtttggttggatatatatttaagaataaaatgaaattatttatattgtattgaaaaaattgtctgatttattaggaaaggagaagacttataagagcattgtgtgagtaatttgtaataatttcaatgataatttaatgtgattttataaataattacaataataataataattaaatgaaagggaattgttattccattatagaccccattgttattcaataccataaattatttatccaacaaaaacatgcactacttagttaatgaaagttttcacacattctatatcaataaaacatataatccat

SEQ ID NO: 20565 - DNA, 2062 bp, Cannabis sativa
  modified_base (1553)..(1555): a, c, t, g, unknown or other
  modified_base (1581)..(1581): a, c, t, g, unknown or other
  modified_base (1805)..(1817): a, c, t, g, unknown or other
acttaataaatacatcaagcaaagctaaaggggttaaaaatttcttaaagttacgatcagcagaagaaactgaaactttagccaaataataagtcacacaattcgtagatcgcttgagaaaatataaatacacattatgtaaattggtatttaagtaacctaacttacataccataatctcaataaatttttcccacttagcaacatggacatcaaattattactttcttaaatagctattagatttccattaaaatattttcaaatattttgatattttacttttgtcactttttgctataccactcgaacgattctaactaataaaactattacataatactataacattcgagtacaaatacaaataattaaataatttctaatttaattaataaatcacacataattaattctatttaaatattaaataaattctcaaattcaatcaaatatatctctactttatattttttatttaattttttggaaaattctcaaaaatctaaataaataatgttataactataaccaacactattaattttttagataaattcttcttcacattaaaaatatttttagtgataaaatattttaccacacaattataaaatttaatttaacctaatcgatgtgggagtgaaaatttgtaagactaaaatattactatcaaattaaattggcattgatgagtttaagtgaaaatttaagaatcttataatcattttcatctcttacaaattaaatttcttatatttttaagagagaacatcattttatccatgctaaaattttttgaattcactaaaacaaaggaaaaataacacttatctttttgccttattttatagggtgtctaatttgttattctgtgttttatttaaatacaaatttagtaccttatattttcaataatatttatttaatactttttattttaaaattatacatatttagtactcttaatttaaatttatttgagaaaaatttatcaatatgattaaattttcttcgattttatgaattctaaatttaaatttaattatttaattacatataaatttaattaatttataactgaaatctaaattaagagaaaagcaaacagaaacaaacaaaggttagttcatggaagtaataaatggtgcaacctccctagaaaaaaaaatgttaggtctaagtttagataattgtaattagtttaaagaaattgtagttattatatataattttttagtgtaatttataagtacaaatatcattattctttacttaaaagtcacattagttttctttgtctcaccttttacctaattgttttttactctctctaacaattttgttttaaaacttatttatttacatcttaaaaatataaaatctatcttaactagatattatggtttcaatattgatcaagtttaattataaagtggtcttgttcattttttttggttatacatgtatgaatattccttccacattttatcaattatttattttagagtaatttgcggcataaatgcttaagtttaactctcagttgtaannnaatacttaagtttaatttttggcggnaataatacttaagttatatttctggaactctataagtacctaaccgtcaaatgttaaaccattatatccacgtgttattttcttattaatatatttgaactaatttttttaaataataaaaatttaatgacttggaccaatcgaggattgccatgtggaaatttatttaaccaggtacctctagaagttctaaaattataacttaagtattattaccgtcaaannnnnnnnnnnnntatttatgccgcaaattactcgttattttatttataaataaatttattagtggtggtttctttcacacaaaagaattgggcccgaatcccccctccccaatgtcaaaaaacaaaaaaaagaattgggcccataagtgggccttatgagcaattatacttcgacccatcttgaatactcatggtataaagtagatcaataattccattatatatatatggatcaacaattaggcatatccaatttt

SEQ ID NO: 20566 - DNA, 4071 bp, Cannabis sativa
tgtaaagttaattcttgcactaataacaagtgattagttttcatggttattggaatttttacacttattaaaacttttcaaatgtcttatagttcaaatgtgatgatatgaaaataaaattttcaagtacatgaaacatgaaacagcttgataggtaggaattttctctaaatgattacttattgaactaatccacatgaacaagtttactttctaactgtgagtctgcacctcatatatatagaaaattaataacaaatattatttaatatatatcagtgatttataatttcatatgtgatcactcttaattaatcccagtgtaaatttatttgaaatatgtgggacacactctctactaatttcaatttgcacctaattgtaataggccttataaaaatgctcatatataaagatcgtacaaaaagttatagcaagtcagtaatctttaaaagcacaactacaaattaaaaataacatttttacagaataagaaaaaggtcatgtgtaagagttataattattagctgggtgtagaactaccagggccaaaaattaaaagaagaaaaaactaatcattggatatattaattcatggagcaaactaagagaattggcttagtccacgacctctttgctcttctagccatatttggtcgtggattttcatttaatttaaatagcacaaatattaattatagttctagtctttcttcatgctataaatattagttaatagttaattttacacaatttctttttattctaaattattggtttggttgtatatgatgctttaatataatatattattatagcatgtcattcaaatagtattttgtcttgcctttcttttaacttcaggaacaatttcataatttaagactgtatttggttagaaagaataaaataaaatggaaaggaataattatttatttcattgatttgtttagttggagaaaataaaataaaaaagaaggtccttgcaatataagataaaaaaatttaatattttatgattagaattcctctttctttatttttatatattataaaatgggaagagatcgagagagagacctgattgtcttttgtatctgggtaatccatatccttcaaatgctctcttctcgctattgaaatagttaccaaaatcacgtcgatcttgatggttgtgatgatgatgatgatcatggtcatattggaaaggtcccaaactgaagctttcatgcctgcaatacaacatttctttctgattaacagctgcgaactcctgttgaaaactgtcagccattaaattgggcttctcctcaagcggatcataaggaagatcaaatgggttttgcataggtaaaagaatcgaaggtgccgaaccaggaacttgtaatgactcattctcattagcctccccaatcgggacctcaaaaggactgtttcttgaaacaaaaacaggggctattgtagtacttgttggaacaacaccatccaaatcaatcaaccctttctcggcctgtatttggaacaaagttctcgctcttcttttggctattaagctctcaagcctcctatttctttcgatctctgaaagcccaagatccataagattcttctgatcatcttctgtccactccatagccttattaccaccattctttacagcctcttcttcctcctcttcctcgtcatcgtcttcaaaatcttcaacgttgtcagcctccgaaacgacactgtagctgtcacatttcttcaactgattttgttccaaaccatcagatggcaagagggtctctttctttggcaattcagaaccaacaacgtggagattattaccaatagaagtagatgataataatgatgagctttgcccacgtccacgttcaaacaaaaagccctctctttctttcacaactagttttgcatttttgtcatttgttgggggaggaaacaggttgtcgtttcctttttttccagcttgggatttccattctctgttcctgtcaactatagttcgtctacttttttgtcgtcgtacggaggagaaaccctcgccaacgctaaggctatctctattagcaaccacattaacaacttcttctttaacggtactcgtcgccaacaacgttgttggtgatgtcgatttttctctctctttgacagttacttcgcttgttgttgttgttgtgggtggtagttcggaactccagaaacatcgaagaaggatggcgatgcaaattagaaacggggagtggtatagcaaaagatcgaagaatatgtacacgaggaagaaaagtaacaaaatgcatgaaaacaatgggtgtttttgtacacatacattactagtgtgcatgaaaaaacgaaggaatctccatatgcatactagtacatcctctgcatcaatagccattttgtactaacatcaaaattttctaccctaaaaaataaaagaacaaaaatttaaaattgggttttgagtaaaccagccagagaatgtttgtctagctaaaattttgaactgggtatgcatcctttttcatttttttgatgtgggcactactatacccaaaaggcaaccaaaaaaagaaatatgttgctataggaatctacgcttgaggttgtgggtttagatttttcatataattagaaaacatttgtttggttggatggctttgtcagatcctttcttataggacttcttttacctttcatttctcctccaatattcatggggcaataaggaaagaatagaaaacaaccattcaaaaagacaaccattagtttttcatattattattattatcattctattaagtattaaccatgatgaacccttttgtcctttttattttaatcttacgttatgttcattttctattgataaggaaaaaatagtagaaagaaatatatacaaatactcatttatttatccaataaaacaatttttgttgtaaaatttatccaaactctaataaactattatattgatgtttaatgggtatttagctatgttcaatattaattactccttagtaattaatattgaatttgaaataattaaatttgagtatgtgtacaattttaagctataagttttatttaaaagagaagtgttaccatcaatcttctataatcctattactcaacctccgtacctaaaagtacatgccgaaatatttaaaaataaatataaaattcatggcggtgttcgttatagttacaatattattcatataaatttttaaaaaaaattgaataatttataatgtcaaaaataaatttaagtttttttaaatacgagtaataaattgaaatatcaagaactctgttctcgaaaattttaatatcaagaaccgcataaactaatatagaaatccaataactaatgacattatagtgaattatagaattatatgtgtacaagactcatgctttgcagtttagaccccaaacaatggggaacgccgaaacgttttgtttaactagggctagggaagggataatgggcctattgagcattctgcgaaacataacctatgcatgggtttgagagaagggctcaatgcacaaagagctagcgacctccgggactagcttaacaaaaaaaatatggaaaccattccactaaaagtaatgtcaacaatgaaaatgtttggctgagcttgttgtcctaataaaaaatttggctaaggttataagacgccaaaggggcaagagattagactcggatggggatgataaggagccttgcacaaaacacatcctaagcatggagctcccaaaaaaatttaagatgccaaacatggtaacttacactaggaaaaactgatccaagtgatcacttgtcctagtttgaaaggatattgacaatcacctggttaagcgtaacgccaaatatctttgttttccacttatcctcaaagacacatgagaggactggttcaaaaggaaacaatccaaacccgtcacaagttggtagaaactaaaacgagaactttgtaagcaattttgtatggcaaagaaggctcatttggaagttagtgccctgacaaatgtcaaacaactaccatacaagat

SEQ ID NO: 20567 - DNA, 5716 bp, Cannabis sativa
  modified_base (5471)..(5503): a, c, t, g, unknown or other
tatttaccattagacttattgggatattacattttcaataaactcgaccccaacaccaactacgggttcaggtccagctctgggtacgggtcgcgactcccaggtttgaatccgggtcttgtgtcctggtctaagttcgggtctgagtccgggttcaggtctgggtccaggtccaggtcccgtgtctgagttcgggactgagttcaagactaggtcctagtttaggtctaggtctcgagtcccgggtccgagtttgggtctgggtctgggtttgagtcccgagtccaatctcaagtttgggtctcgggtccagattgatgtctaggtctggctccgggtttaggttcaagtctgggtttgggtccaggtctaggtcaggcccagtctcgggtctgggtccaggtctgagtccgggtttgggtctcgggtccgggtttgggtctcaggtctcgggtcatgggtcaggggctaggtcctgggttcaggtctaggtcccaggttcgagttcgggtcccaattcaggtctcaattctaggtctgggtcctgggtttgggtctgggtcctaagtccagtcctgggtttgggtcttgattatcgggtctaggcttaggtgtcgggtttgggctcgggtctcgagtttgggtccgagtctgggttttgggtttgaggctgggttttgggttcgggtttgagtcccaattcaggtctcgagtccgggtctgcgtccgggtcctgggtttcgagttcgagtttgggcccaagttcgggtcaggatccaggtctgggattgggttttagtttgagttcgggttcaggttcggtcttgggattgggtttggatcccgggtgagtctggtgtgtgtccgagtttggggttcgagtcttgaattaagtttttttttaatatattgaaatcggatcggaccggatccgatccgatccgaaagaaaattaggcgggacgaagtgaaacgaatctaatctgagacccaataagtatctgaatattttggatcagaagtgatccgtcgaatcaaaactctgacccactttaattaattggattttttttgaaatggaggtttactgtttatggcagcacataaacttgcacatgtgcatgtttttaaatataatgtatgaaggcatattctgtatttatggccaaggagttatatattcccattaaagtcttttttttttttgaaacccattaaagtcttttaaaaatagctaaattaaagcaattaattatgaaatagttaaatcaaagtgactattatcaatagttggcacattgaatttggttagtaacttattaaaataaaagttttgacaacaagatgctatattaattgttgcacataaatatttatatctatatatatggcatagagaacatccacgactatggtttcaaatttgtttattaattgtaaagcgacttaatttaagatgccaaagtacaatacatggaatttatataaaaatagagagaagaaaagtagatcttgaaaagaaaaaaatatatatatatttcctatgtaatttatttcaaacctaaaaagtatttgtagaattaggtggggtgtcttttttttttgggtgaattgtgatgctatctcttttcaccactttaagaatatatgttgagaaaataaataaattaaatttttaaagttttgttttatatttatcagccataatttatttttggttacgtttatttgtcaaaaataatcttttgtacacgtctattaggtagtggtgtgacatgaatatttatctcaatttgaactaataattaactatatattaaaaagtatgtatgacatgtttttttttttttttgaaatagatatgtatatgacatgtttaggtaatagaaaaactctaaacacagaaatatatatgtatatattatagatgacatgttgtgcattgcttttaaatttgaactttatttttattctaataattattttgtaagcgttcgaataaacttcgagaaatactttggttctttaaaaggtacgaactaggaagcatgtatcaactagcttctcaatgcttttttattttttaaatgtatctttttcttttattattattattattattattgttaaaattaaagaagaaatacgtgaagatatgaatgagatagaaaatattaagtgtcattaatttattaagttatttttcaatagccaggataacattttttttttaaaattattcatctaaaactatattttgagcattctaaacaaaacttttgttaaaggggatgatgccaaacatgctcattagattagtactagctttttatttttatttttttttaataataaaactcaatatatacaaattaatataggaacataaatgttgtataaaatcaaatgagaaagggaataattagtgattttgttaaatattgaaggtttggattaaataagtacggtcttgtcctttcacgtagaatcgaaggccacctctaaatgggcaccaccagacataaaatttaattagttagtcacaatctcataacttatataaattataaataaccaacttattaaatttctttcttgcaaaaaaaaaaacacttattaaaattcatattaattaatttcagcatttttttatgacacaactttctcctccaactaccataacagctggagattgaacttgccgccactctgttgtattttttttttttttgaacaatgtaattgtactattgcaaactatgtaaaacctcatatactttttgaaggattacataccacaacacatcttagccgttggattctaaaaaataaatttttgctaagatctaagggatatgtgatgttaactaaaaagtgagggcaatctaacaatagattttggtgacctattctattttgtgccattgtactttattcttatttgtaaactcatgttcttcttctcttcaataaatatattttggcaattcgacacactttttactctacctatatgtatgtagaaatttaatcaaataatggaaaaataattttaggaaatttattaatatcaacaatttgtctttagaaaattaaattaattattttgaacatcattaatataaatttacatagctccaaatcaactaaaaaaatttatggtaaaagtctctaaaaaattcattttaatgtagataaatcatcaacctcataaaatagcagtaatagtctcaaagttcgagaatcttgtaagtccgttggtcctcattttaacagatttgtgagttactctaaaaatgacacatgttaatattaaatagtgacataagtttcaaaaagtttactttgattcggataaatctctaatttcaaaaaatagtaaaagtctttaaacttaagattcttgttagtccgtaggtacataattgaatagcttcgtttatagttcttaaaattaccacgtgtcaaaattttgttggtgcatatcataaaaaattattttaacaataaaaatattattaaaaactttaataaattttttttttcttttattgaagattaaaaaactttatatatatatatataaaaaaatttttacaaacttctacgatttgccacctacccttctcgatggtggaggcttactgtcgagtatcgacgagtaccattccttcatctccacattcttccccatccatcccactacctaagaaaaccaattaagtataagagaaaagaaaatatgtgatgaggattgagatcagatctttgagagagatgaaattttttgttttttttttctttatgtttctaggaaactgagagatatggatggagtatgccatagagaaacagagatatggatagtggtgggttttggtggtcgattctttgacctcaacttttttcggttcaaagtttacatagacaatttttttttagagtggcttctcttgctaatagaaattgaagagttttagtagagtagatcagggctgggtaggttgggatgagagtgacaagaagaagaaagaaaaaaaatagaacagataaaaaaaattaattaattagttttgaaaattatttatttatttatttaaaattaaaattatgatttggaccaataaaatattaatacgtgtcattttcaggagcaacaaatagagaaattaaattgagtgcctacagactaacaagaatcttgagcatgaggctattaccacaatttttaaacattgggaacttatctgcatcaaagtaatttttttggagacttatactgcaatataatatcaacacgggatatttttggagcaactaacagatctcttaaattgaagactaacacacttacaagaatcttgagcttgaggactgttaccgctatttttcaagattatggacttatctgcattaaagttaactttttaggacttttaccgcaattttaatacacaaagaatttatttaactctacataaaaggagtgcaaaattacattaaataatttaaagaaacatgccatatacatattataaacttaaaattttgtgtcatagaatatgaatttgtaccataaatatgcatgttttgattgatatttattgatataattagaatgctacaaaatatatataattaatatttatttaattaatttaatttttgtatagtaaagtttaaattactaactaatttttttgcccttaggtggtattatcccctggtagaataagatcgtcaggattttcttcatcaaagagtaaactttcttggcacgagttttgcttccaatcgcgacatagtttccagtattctacgagagaactcttcttaggccgccaatttcaattcagtttccaccaatttttcggccatttcaatgattgcagaattttgctcatcgcgttcaccttctatactactttcctcgtcttttggatcagtatgatcaccatccttagtttcatttgcttcatcgataggatcatcataaacatttcatttattgtgttaatctttactcacacgacgactacttgtgtaatatcccaataagtctaatggtaaataattagggtttatgtttatattatgagttgatcaagtaataagtagaattatgatcattctagtctattttagcataaattttaaatctattataagtggataaataagtgtaagttattaattatttatatagcatatgtgaaggttatatgagctatttgtataataaaaacatttttaagtttggcgaccttggagactcgatcgggagccaaaatgtcatagcaggtttaattaatagatttgcaagaaaattatgataagttgaaagtgtaaatattggggtaattaggagtacgtgaaatttgatttagtgccctaaaaatagagatttcttaatggttaagaaatgatagctaggataactattaataaaaagtttttattattattattatnnnnnnnnnnnnnnnnnnnnnnnnnnnnnnnnntattattattattattaaagttttattaaaacttatccgaatatatatattatgttttaaaatataaacatacaaaaatgaaaatcctcccctatcctctgtgtgacgagatccttatcccctttatttattctctttgattttcaattcgaaacatagcgattcaagctctggtagtagcggaatagtaaatccttgaagagagaaagcttg

SEQ ID NO: 20568 - DNA, 2916 bp, Cannabis sativa
attattttaagtttaattttttttgaaaatattaaaataaaattattattttgtgagatgtaaaaatatttttctatgtatccaataattatttgaatattgacaattaatgatagtttatgatgagttgtcatgatcgatcaataattgattaataaattaatgaagagtattatttagtttttgataatatttaattgacattctataaatagaaaagctaatgatgaggggtaaaagtaatgggtaaaactacaatgaacccttgattaaatggatgttttggcaaattctttatttctttcgccataaaaaaatttgtaagttatttttctctggtgattgtgtatgacactataaaattttttatatttagtcacaataaaatttgtaactaaaagtaaaaaattgtaactaattataaatcattattcttatgttagaattaaaaagttcatggctaaaggtattagtcacaaaaattacaatttattgtgattaaatagatttttagtcataatacttattgtgattaaaattaaattagtgacaatttatatttaaatactattataatagcgatgatgataattgatggtgcaggagagctatggtgatgagcgttgtagagaagcatgggaatactatcaatgcaatgctatatgggctctaaacggtaaatgattgtatagaatgacagattcaattagtaaatctagataacaagattatgaaaacacatcaaaggcacgcatgcaattggaatagagtttaattcgaagtaggcatatcaaaaaaacctatttagttagagcaagttgaagctctaatttgacggattacttctgattctaaacattcaaatatttattggatctcagatcagatcagatccgctctgtcccacctaattttttttcagctcagatttgatctgatctggtatcaatatattaaaaaaaaattaattcaagactcgaattcccacacccggaccccttgggacccaggacccgggacttacttggtatccaaacccggacccaagattcgggaccgaagtcagacctagacctaggcttgagacctagaccctgaccgaaaatggggatcggacctagacttggacccagcacccagtttggggccctgacccaggactaggaccgaccccggatcccagacccaaacccgggaccagccccggacctggactaagaactcaaactcaagacccagacctgggacttgagacccaaaccgaagacatagatccacacccgaacccgaacccgaagccagacctaaacccgtacttggacctggaccctagaccccgaaccgggacttgggaccctgacctgaactaggagccagacccacacctggactcgggaccgacactcagacctgaaacctgggactcgcactcaaacccggacccaaactcgaacccaaactcgagattcaaacctgcgcccgggactcgagatctgaacttgggacagacccgagacctgaacccaaactcgggactcgaacccaagactcaggacccaaacgcgagacttgagacctaaacttaggcatcggacccagacccgaacctggggccaaacccaaactcggaccaaagacccgagacctaagacccaaacccaagcccaaaacccatacccgagacctgaaactaggagcagaaccgaatctgggacccagacccaaatccagacccggaccttgatcgaaactcggaagagggacccagtcttagactcaggaccagggagctagacccgggacctaagacttggacccgggacctagaactagactcggaccgggacccaaaactggacccagacccgggacacgaggccaagacccggacccagaacccaaacctgagaccgagacttgggacccagatccggacacgagacccaaacccgacctagccccaaactgggacaggaacctgaacctggacccaggatccaaacccaagacctggacccgggaccgaacctgacccataggttgtgttggggtcgattttattaaaaatatattataattttacacaatctattaatacaagtcaatgccaaatatagtataaaattaaataatactaatacataattaaaatacatagtaaaattagattctttaaaaaagggtgggtcaagtcggatcagatccaatccgaataagtcgggtcagatctgatacgatccgagtatttgatctagcagggtggggcaggacagatccttagatgatgtggatcaggtcggatcatagccagatcagatccggcccgatccatttacactcctaatttggagtaattataagatttaggacttgtttaatacacaatattagattgcattgtattaaattaggttatataccatatttttatataatactatatacattttaatttacagtaaatattatatatttatatactcacaaaaattaatatcacatataattttacataaaaatattatataaaatataattcaatataatattatacattacaatatggtataatacaaaataaaccattatcgtgtttgttcagacaaataattatacaataatcatgaataagaggtaattaagggatcttagttatactatctaattcttatgagcccaaagagaatttgggtataattacaaaatattatctttctttttttagttaattaatgttatcaaagtatgtaattaccaactcatttaccaaatataaaaataaaaatttatatgaaattactacttgcatctaaacacacgttaaatatgtcatagttacttagctgtggaattgttagaatattaattacacaattacttctaaaagcactttaaataaacaatagaatgatatat

SEQ ID NO: 20569 - DNA, 3973 bp, Cannabis sativa
taagggccgcctcctcgcctatttgaaaattttgaatgctatcaattttaacatccactagattcaagtcgtcaggtaagttcctggcagtaggaacctcgccagcttctcccaacttcgaaggttttggccgcctatcaaaagaacaggatttcgtgtattgttttctttttttgtctttcttgccttgtgacaaattcgaaggaccatccgcgtctttaaaggttaaatccgaaggctttggagagaagggtggaaggactcgaacaacttaatcaaaatcatgagagttatcaggggttctttgcagataagggatgtgagaaagacctgctttcctttttcttagttgagggcaggggtggactaactcagagacgtccactggatcattaaagagtgtgggaaagggctcatatttgtcaataggtggaggccccattaactcttcagtcaacccaatttcactagcataaatgggccaagagaaatgggtgggcacagggtgtttgtggggttgtcttgatttgcacaaatcactatgtgggctttctatcatttccttataagtaggcccaacattagccataattgatgtgaaaaccctctcatcacgtgggttagggatagggcaggaagtatatttctgaatgatctcgttatcaacatcagaggccttctttcccaacaagtgaaaatgcaacaagctaggagaaactgacctgggccttttatcctgaatcagcctatcttcacaaatctgatttgcatcaggcctagtagctccgttatcgctaggttgttttggactaacctccaccactttcaaattttttctagaattaccacctggttgattagtctgaaccctataactttctttttcggcataccaggattaacagttgttttcatgcgtgtattggagttccccaaaagattcttccctttatcctttggattaaacactggttcccccaataagttgccagcggagggcgaagctttgggacgtatggagtgaacaccactggccatatagagacaatcaagttgatttctcgtgttgaagcatttgtaaatagccgactctgctttgatccacggtccgaaagctggtactgcttcaccttcgggagggtaagccagggccaaggatctcttacacaccttcttgtcatgccccaaatatccacaatgataacaaatcttaggcaatttatagtatctaaattgaatccattctttcctcgcccttttgatatcaagataaaaccctggacatagttggtggtaagtcacgatctccacctggaacttcaagaaacccctatgttgaatggttctttgatcagccatatcgtaacctttgtactccactaccttggcaacaatcgtaggagtgttgacaattttcagatagggtccatggagccctatcacttggacccaaaaaaattgcttttcccatatcaacattgttgcaaagaccatcctctggccattcttgaataataagcattttgccattgatcaaccaaggtctattctcgggaacttcaaagcaatcctcctccaagtcgaagtaaatcccccataggcctggtttcaaagttttgaacttccagttccccttgagtttcttccaaatgtcagggaaaacttctttcactttggttctcgaaactctcttgccttcaaaaaaaacaagccaggacaccagttctagtaacctctgcattgagctgaaaatccggttccagttcgagggacattgaatcaagaaagttttgatgtaaagcttccaattctccctctctcttctcctcatctgaagcttgaggatctgtattcacagtatcttccaagattgcagcatctaccgtagatgaagtatgatcagttacatttatatctccaccatccccttaattagactccctcctggttgatctcattaattccacttaccgaactatgcacttcctccatcaaaactatccaagtcaaccactgttttaaccaccttcaataaatacgcggacaaaaaaaaacttttaagctgatatgactagaaatcttagagagcaacaagaaaagaaaaatatatcagaggagacacacaatcctctaacaaagagtgcaccagtaagtcaaaaagataaaggcttttcctccgttggatatcctaacactctcatggtagagagaattggtatgcttcagtacactaaatagcgttctcagtacgtaaaattatgtaatatacatttattatacaaagcacgccaaaaaaaatgtgtgaaaatacaattctaccctcttaccatacaaattgagatcaccaccttttgtatgtttgtcattttcaactttaataactaattgtaccttatattattaaaataacatttttgtaactgaataaaataaaacaaaacaaaataaaattaattgatggcacggttacacttttgtgcaccaaccaatttcccacatattaaaatatacacaatattcagtacatgagacccaccactacaataccatggcaccattctgtatgatgggactaaaatattaatcacacatttactaaactgtaactagaattagaataattaatgagataaatgaaggaattaaaaatgtaaaataattggaaacaatatttcattatgttgtttactaaactatggggacaaaaatgagaatcattttattttatttacataactaggaaaggtaatgcgaatgataaaatttgactaaattgcccttgttaaaaagtataagtatttttatttatagttttttgaaggacatatttatctttttaatttttaattaacaaaataaaaataaaaataaagtagttaggaaagaaaaatgtatttcttaggaaaaagtgaggagaacatttttcttttcttttttctacttaatttaattgggcccactagtttctccaatataatatttagtaaacaaatgaatttaaatgattactatacatctttgtattttaatttattattaattaataatttcttaaaatcataaaaaaaattatacaattaaagtgtactataatttgttgacaattaaaatatccataaaaggatataaacaaaatataacttacataagtactagttagagcaataatttatagggttcttttttatttttatatgttaaagtaattttttcttatacaaggaaataaacgaataaatcaacgggtgatttcaatgcaaccgaaatttaaataacaactcatgcagtacttattggagcaatttaaactctaaaaataaaaaataaaggttcaaaaatgatatattttgattcccctaatttatatataaagaattttgtaatataataaatgaaaatagaaatcacttaacatttgtttggtatatttctctgtcgtgtgattaagtttaaagtcacatatatgtggtaaggaatagcaatttggaccattccataaacagtgtattctctctattgtctattctctgttttgtgtagtgtttctgccacattttacactaaatttgaaagatgaattttagtgtaaatagaaaagaataagaaaagaaaagtatgaaggattaaagacaaaattaatttttttatatttggtgtatttttttaatcattttttttctatataacttttctttttataccaaaaattcaaatgtatttatgtatattccactttattccgtacattttcattacttttttttttctaacaaaaatctaacttcaaaggtaaccttgtgaaatttatcacattccattatataataaataaattaaaatatcaattaggaccattccttagtttttgttttttataagaataattagcaattttgtcccctgaactttcgacaatattgattttggcccttaaaatatatagcttgttaagaatcccccttgaacttttaca

SEQ ID NO: 20570 - DNA, 2816 bp, Cannabis sativa
aaaaaaaactaaaatcttctcttctgaaaatgccaaaaagaaaatttaaaatgatgggacaattccatatccattgtcagccattagagctgtggagaacatctggtcaacttcaacttctacatcagttctcttagcaaaccttcctttgatccttggtctggtctctgcataggccttccttgacgcataccttattgtcttctcaaacttccttgtcttctttttctctctgtaccttaggactcttgcttccctgtccattggggtgagctgtgttggcatttgaatgggtggccctgagaaaaggtcaattgtcccttttggtggtcttggattggagattgagatatcgctcatggttgagtctggtacaacgctcacatccattgatgaaacagagacctgatgattaggatgaaacgacatgtcgttagaaagctaacaccatacattaatagttgaacaaattaagtaaagtaaacacttttgatgagaatagatcggattataaggaaacgtgtaaaagggaaaaagggataaaagcgtaggagctttatatagttcgatattccaatccttttagggagaaaggtttaaaaagataaaagagaaaatggaataaagtgcagattaaaatatcataagataccctttcagatttaacatacagaaaccacgtatgtaaatgtctaaaacgtgattatgtaagcaataggattaaaaaaatgatattcatgttatgcataataaatatgaaataagaaaataaaatcatagaaacttacactgtgactaattgaaccgttatagctgtaaccagattttgaagattcaaagtccaaacccaattgaaaaccagtctggctctgctgcaattggctttttccataaccacactgaactggaaccacactatccccaccaccaccgccatagcttttctgttgagaaacaccgtaactctgctgcatctgattattgctctggctgtactgatgattattattattattattatgatcaccaaactggttatcaacaccggaattgtactccaccagatccaaatactcatccacttccccaccaaacaagtacccattcccctgattctgaccgttcttaacaggattcagcaaaagccacgaagcagcttcactctcatcgtcctcctcctcatcaggctcctgaatatcatccatcccttcgtttccctcaagctgagagaagaacccatcaccgcccgaaccgacccggtcaaccgacggaggacctgatataggaagtaccgggacacggtggtggcgcctggcgagcggattggccgagtggatgtccgcatcgcaagtggcgcagagcgaagcagcgtcggccttgcagatgaaggccgccggggctcgctcgcaagcctcgcagacccaaacccgctcgtgccgcgatgccacgcggttagctgcgtggatccgagcatcgcagcctgagcagaggtatgcagagtcagctcggcagtagactgtgcaggctgctgctctgcaagtgtcgcacactcgcgcccatgccttggtccctcctcctcctccggggccggagccggtggtctcgtccttcatcatcataatcagcagaagaagattatgttaattaaatactatgatgtaaaagtagtgaagagtgtgtagttttgagagaaaaagagtagagagtttttctctttggttttggtaaaatgaaaataagtaatggttttagcttaagcataaggcttgggtttagttttgtgttggtaagttttcccgggtgattgggaagagatccagggctcaccacgtggcaataaattagtggtgtggttgagttgttgcgttatcttgtggctggctttagtttgtgaaatggggtccagtgctgagtcagtgctttatgggacccacctcttttcccattggttggaccacgaggagaatcattctcaagcgagagtcgacattagagagtataggaaatagaacaacaacactcgctctcgtcgaccaaaccgtgtcaagtttgcggagtgtgtggtgggtcccgcaaatggaaaggaaaagcacaatataattttctgccaaaatcttagaaaggaacacaattactgcatgaaaaagttgcaacaatctttaatctagacgatttttcatccaaattaaaaaattgttacagcatgttttggtgaatttcatgatcatcccgaatgagggaagagtggcttccagtaagaagttctaattctgtatagtttcactttttcttcaaaccaatattaacacaaccagagaaagacaacaacgagtcaaaataaaatgaattaataatgaagttgaggttttcctgaataagcttgagtcatgatttcttaattaatatatcctgatttgaatttgacttctaaaaattatactcatgttatagtacatatatttgaaaataaataaagtggaattctcactaaaaattttcaaaaataaaattttttctgaaaaaaaagttattttataaaataaatttagaagaaaattaaaaaatatggaaaaaaaaaatagcataaagtacccctttagtaattgtttacccttctgttatcataaggtacttggttagttggttacccttaatttttccatatgtttcaattctttcttaaatcttctcataaaattatatttttgcataaaaaaggctaattagaattttttcccttttccttaaactattgagattgttaaatttaaggactttcgtctaattttagtaaaaaaaattctaaatgaaagttc

SEQ ID NO: 20571 - DNA, 4845 bp, Cannabis sativa
  modified_base (3392)..(3393): a, c, t, g, unknown or other
  modified_base (4797)..(4805): a, c, t, g, unknown or other
aaatgtaaccacgtccttcacgcttcgagatcgctgctgccaaatgagatcatttctagcacactagatggcccagcacaacatcacggctctggcttgggaatcaccttgcaacaatctgaacatatcagccaaccattgcccgagagaagaaacgtctctactagcagcagccaaaccagcaaactcccaacaagaccaagcaaaattacaagacaccaagatgtgtcattcagtttcagcaaacacaccacacaaaggacatgtgttttcaaccaaaacctttttggtacacagatttactttagtagcaagacagctggaagctgccctccaaataagatcttttgctttgggaggcacttttagggaccaaaatttcttccatatctcattattttctgaaaaaaccgatgagtgcttcaagctttggagcaggttgtacgcacttcggactgagtagaaaccatttttctctgcaacccaataccaagtatcagcatcacccgaatttagaggaattctgaggataatgacagcatcttcaggagaaaacaaatctctcacaacctcaacatcccagcttctactgttagcttggaaaagacaattaacagagaagttttcaagcccctgcacgacaaggattggtgttgctcgatcactagtaggaagccacgggtcagttgtgatttgcacagtcaaccccgcaccaattctttttctcaagcctgctttaacaacgtccgttgcagcaaaaatgctgctccaaataaagcttgggttcgacccaagttcagcagaaagatagtctccttgcgggtaatatctagctttaaatactttgccaaccatggagtcatgtcgaaacaataacctccaaccttgcttgctaagcatggcaaggttaaaatccctcaaacaccgaaatcccatgccaccatcaaacttatgttttgtcattctttcccaattcatccaaatgatgccaattccattgccattagaactattcgatttccaccaaaaattggccatcatccgctcaagttctttacaagtgccaatcgggaaaaggaatacattcatagcatatgagggaagcgcttgaaccacggtcttgatgagtatctccttcccagcccgtgaaaggaatttgccctcccatccattgattcttttcctcatcttctctttaaggaaacccaaaacagcatttttattgcgtccgacaatactaggaagtcccaaatacatactgtccaccccagcttcttgaatgcacatcaaactacaaatacgacaccttgtagccatactagtgtttgaactaaaaaatgttgaggatttatggagattaactttctgacccgaagcttcctcaaaaaaccgaagaagtgaaagaacatgattagcttcttcattagaagcctgacagtaaacgtagctatcgtccgcaaaaagaagatgggatatggtaggtgcactcctagccaccttacaaccggccagccgtctagtggattcataagaccttatcaaagaagagaatccttccgcacaaacaataaataaatacggagataaatgacaaccttggcggatacctctggtaggggtaatcggccccaatttctggctactgttgataacatgatacctaaccgagttgacacaactaagtatcaagccaatccaacgagcactaaatcccatcacccgaagaatggcctccaagaaaccccacattattctctttacttcacaaaatgtaatgaaccaatttattaaagagacaaaaaaaaattgaatatcctcaataataataccatctacaaaattatcacaccaaacacttaataacattaatagcattaaagcaatcactctcaaaaatatggacactaacttgcttcctatgacaccattgaaaagcgtccaagatagtcttaagctccgtcttgtttccaccattaaataagtttaattgcattaaagcaagagtatagagaaaaaatattagacaaataatctaataatagagtccactatttttgttatttatttcaaatatggataaaaatgaagcacgtaattgatggggagtgcttccttatcctaattcctattaaatattttaatacttattggaatcaacaggaggaatccctgttaggacaagtgcacaaaaatttaaatatattatacatactatactaataatttaaaatacaaaatattatccaaaataaaattaaaaatcattaaaattaaagtagtacatactataaatacataaaaaaaatatatatattacaaaataaataatatcatacaatatataaaaataaaattagagcccgcgcgtagaaaatgtaatttccattctagcccgtaccaattttaggcaaagaatctctgcgagtgtgggatacctagagggcatctctactgataattttcatccttgatatcaaaagcaagttaattaagttcgaaacaaacaaattattattactagaaatgtactcttaatttagtagttctcttatcctaaataaaataaacataaaaatgacaaatggaaaagtgacaaagataatgaaagttctttgttctgttcaaaaagcaaataatttgataaataaagtagttcaatgatctatatatgtgactttagaatataaaagaaaagatgtattacaatttgagaggaaagagactctctaatagcacatcatattggatttattagccttaaaggctttaatggaccacaacattaaagatatattttcataatgttttctttaaaaagaagaagaagatactttttcatgatttttgtaatgctaaatttataaataaaaagacaacacataaacaaccatgcagtaagatgtaagatgataaaatgaaaacacaaaagtataaattaacaaggctaatgattgatgaaaagatgattctttataataataaggctaattaggatttttgccctctgaactttgacatatatcaaattatgccttttgaactaatttggcagttaaaaatcccccctgaactattgagattgttagatttaagaacttttatccaatttcattcaatttaactaatttggtgattgtccatgaactaaatcatgctcctcgaactttaatatctactaaattatggccctcaaactttgacatgtgcaaaatcatgtcccctgaactttcatctatgttagacctttttttactaaaattagacaaaagtccttaaatcaaacaatctcaatagtttagggagaatttttaacagtcttcaaagttcaggtgcatgatttggtacatgtcaaagtttggggggcaaaaatcctaattagcctaataataatnntaataataataataagaaaaataattaaaatagtatggtagagtcggcccaaaatttaatgggaccgacaaatgtaaaaatataaaaaaaaaaaaaataagaaaaaattgtgcctaaaatcttcaaaaatattttattttgatgtaaattagtctttaacatctaaaaatagcggtaatagtctataagttcttatttcttataatttcgttagtccttattttaattggtctgttaacatatttaaaattgtcacgtaaagaaatgttattggtccaaaaaataattttacttaaaaaataaaacaaataaaaaaaaaaattctttgtttttcatcaattcagcaaaattaaacaaaacattatataaatccgaactaaacaattcttcttctttaacgttcgatctctaaaattaaaagaaaaagcaaatctacgttcccaagatatccaaaatacccttttgttatctctctctctctctctccaccagcttcccacctaactctgagaacccaatcgacgattccctctcacccaaacggctaaaaactcacccaaaaggctaaaatcccacccaccttcctcaatctatctctctctcactccctcacttttgatctctctcactcgctcactcgctattgaaaccaccaccaacagcaaactccatctggaacaacgccaccaccaccacaaaactcaggccatcactacctatttctatcaaaatgtaccattttttaggctatttatgatttttacctctcgaactatgacatatgtattattgtgtctcctaaacttttcagcccattaccaatggtccctgaactactcacggtgttgtaaaaatgtctatctatcatgttatatgtggcaaacagaatgatgacatggctgcttagccaattgtcacatcatcactatgtgtatagattatcattaaaaaaataaaaattatgtatttttcaaaaatcattaaactaaaaatcaattaatgtttaagaaaatttagtaaaactaaattaaaaaataaattattttttcaaattaattacacacgtggcattgatatgttaatgacgtggcaactggctaagcaaccatgtcatcattttatttaccacgtgtgacaaaacatgacagaaggaccattttacaacactctgaatagtttagggactatttttaatgtgttaaaaagtcagggggcacaataatgcatatgtcatagttctggcggtaaaaatcctaaatatcctttttaaaaaaaattagatttttcattgtgatttccattggatgtggatttgtcattgttcttaaaagtttagatgattttttgtagattttgtagattttatggattgtttatggtggtcttgttgggttttatgccctnnnnnnnnntccatttcaatgtaatccattttattcaacatcaataaag

SEQ ID NO: 20572 - DNA, 2878 bp, Cannabis sativa
ttatttttaaagtatattctgttaaaccaagaaatgtcgttagatagacacttttaatatataaagatgtatacatgccatacaaataaaaagaaactagaagattggagatggtagaaaaaattcaaaaaggaaaacaaaatgacaaagttacttacattcaataccaaaggatcttggctgttacaattgcaattacgattgcagattccgaggtgtagtgtttgatggttgtggaagatgaggcagagggacgcttccaatggtagactcacggtggagtttgcatgcattggggaggcgaaggcaaaatctggagtggggtacaatattaggggagagaagtgcatcgtttgggagactaaggttgagggtgagggtgttttgggtaataaacttataaaagtgggtatatttaaaggaaatttaaaatgcagctatttttggttaagtgtgaaaaaaaccagatatttttttattttttattaactcatttcatttttatctttcctttctcggtatttaatttagaccctcttttattgtttatatccccatcatacccttaaagttatgaaaacaatcttaagcaaactactagaagtgacctgagcctgaaagaagcttaatgtatggattggttcttctcttttcgaaaaaagtttatgattttgtgttttagaattgttgtgggatctgtgagattatggctttgtttatggggtgttatggattggttttgatgttcatttgataattttgttgttgctttgaggtgagagtcaagtttgagtttttaagctcaaagtttgagtgatctcatgaaaacttttgatttagggcatgattttgatttctatcatgtagagattgttgtatggatgttatatgattaatttgtgcagtttggaatcaattggttagattttagtagggttttgagaagttaaaactcgaggttttatgtttccctgtagaaaatgattgaccatttttggaaaaacggtctaccattttcccagccaagaaactccgaaaatttcttaccatttttagtgatgtttaaaacccccattttcatgatttctcgatattgagggtattggtaccctagtgacctaaaggaggatttacagtgatgaattaaggacatggaacaggtgaggtcaagtgattaattgttcttttagttgttgtgacataaggctcgggatcgttgatctttctccatttaagtcgactggcatacctaaatcgaaacttgatgtaagaaaagtacattcataccacatagcccgttaagatacgatcattatcgttatcaatcgattatgatcgaggtaatggggctgtgattgttgttaagtggattaaagtcatgacgtcaagtgaaaccgttgttaagtttcttacttgttgattgtcttattatacaatgacagagatatatggatgtcgggttaggacatcggttttgcctcattagacaatgaatatatggatgtccggttagggcatcggcttttccttattatgcaatgagatatatagatgtcgggttatggcatcagctttaccttagtaggcaatgagatatatagatgccagagtagggtatcgccattgccttactaggcaatgagacatgtggatgtcgggttaaggcatcagagttgtcttattaggcaacaacagaaatagttattttatgaagtaacagatatggcttgtcttattatacatgtacttgagtattactatttaattatgttattattctgatttagatatctaattgttatttacttttattgtttacttttcttgttgagtctttgtgacttacaggttctttgaggtgcaggtaagggcaagacaaaactagggcagccatgagacgatagtcttattcggaaaatgtacatatcgacttatccgactcgtatgatcgagttgataggagttattttgggttgtacctgatgtgcattttgacttactgttgtatgtagccttttttgtaaaacttttgtaacacaggatccctgaaacaattttttaacgatgtcatcctgttcattgttatggttttattatagtaaaatttttattatcatcatagattttattaaataattaatctattattactaaacgatgttccaaaagtacacatgtggcgttcctagggattatggtgttaaaccttagtattagagcaactatgattttaaggtcttgaagactggttggatatgtacatatgctgcgaagataggttgactcgtgctatagtaggtgtgatgtatttacttgttatttgattatttgcttatttattataaagtatgctagaaaagtaataagataataatggtgatgtgattatatgtgtgagatatgcttattagtattgatatctggttgagttataaatggttggaagttgtggatcataggtgcattagatcaagcaaccataacgattaggccgattgaaccgcgagctggggctcaggataggtggttaggagagaatcctccaccacctcagaactgggaacaagtgtttgctactatacaagatacatttaagtagcaagggaagcaaattcgagacctcagaagcaacaagcttgtcctttacctttttgacaactttgacatttgttttagcataaagcaaaatttacaccacaatgaatattatacttttgtatttaatattatgccatttttaatattttattattaaagtttagttagcatgttcatttggattaattgactttcattattattattattttacgattgaattttatatttacttttgtattattattattttactattgaattttatatttacttttgt

SEQ ID NO: 20573 - DNA, 2878 bp, Cannabis sativa
tgttggtgttttctttccacaattgaattttgttgtggagtatcaacacatgagttgtagtgcattattcctgcatttgtatagaaggaagtaaggttgaattctttggcattgtcagttcttatacccttaatttttgcagcaaactgagtaagtatagttttgtaaaatgcaggaattattgtttggacctctcctttagttttcatcatatatgtctaggtatatctagatttatcctcaacaatggtgaggaaatatctatatccttcaagaataggtagatgaaaggggccccaaacatccatgtgtagtaaatcaaaaagattgacagagaagttgtgtgaaataaatggttgttttttttttttggttgatgacaagttgaacaatgaaataaagactgtttatgaaaagaaaacacaatctctttatttattcctgttgaaattgttacagatggatgaccaaggcgattgtgccataggtcattcttttaaacaacattatggacagtatcctaattatatggtaaagatttggaaccagcagagattggagtgtaagatgtagagctttccaatttttctatccatcccaaccttcgaagttactaggggtccttgaatgaagcagtgattgttagtgaaaaggactaaattatttttatcttcaagataagaattaacagaaaaaagattgtacttgaatgaagggacatacagtacatttgtgagtttaaggtgctagtttatgtagatagtacccgaattagcaataggtattaaacaaccatttggtaatacaacatgcttaagatgagagttaccattgaaagtaaaaaactgcttaggatcaaagcaattgtggtgagtagcaccacaacaatccaaaaagatgaagataaagaggtattaccagtgagattggtagctgcaacaaccgaagaagtgttagatttggaattctgttgttggagttgttgaattagaaaagagattagttgttgatagtgagcagtaagatcaggtggtgtagtagacaaggcctgaactggttcagtgcaaggattatgtgcagatgttgaaccttcagtagtgcttgtctggttggcttggggattggatttcaattttttttttgatttggtctgatcaccatgaccaggaggaaatccatgaacaaagtaacaattgtcaacaagatggccaggcttgtgataaggagagcaagaaggccttggtgtcttacttcttggaggatttaaaggctgaacaacaacagccattggaggaaggtctgatccaagacttctttggcgttcttcttgaacaaccattgaaaaaacttttaaaatagaaggtgaaggttcaataagcagaatttgagctcttgccgagttgtaggattcattgaggccagtgcggaactgaagcacctgatccatgttgtagaattcttgaagacgttgaagagcaccacaagtacaattgattgtaggttgaaattccttcaattcgtcccagagagatttgagcttggtgaagtaggagttgattgattgatctccttgttaaattctatgaagctctgcctttagttgaaaaatacgaggaccattgccttgattaaaccgattgatcaagtcattccacatctcaaatgcaagattgaaaaacattatactttgggcaatttttgacgaaacagagtgcaggagccatgacattaccatgttattgcatctggtccaagaacagaacgcaggatcaattggtattggttttgaaagactgccatcaagaaatgccgtcttgtttttttgcagcaaaagccatggtaatagctcgatgccaggactaaaaattaggtcctgtgggaggagcagaaacaagcatgaggccagggtgatctcctgtgctcaaaaactagggactggataagtcctcgtgagtaggtcgatctctggttttcatagcagcttgttgaatcgaagcagaggtgattttaggatttggaatgggatctgaagaagtatcgccattctcctcatttgcagagctcctggtatgatgtttggccattgttgcaggaaaagaagaatcgatcttgagatgatcgagaaagaagaagagaacggaagcgtatgatcaagctgataccatattagttgagagaattgtagaacaaaataatgtgaattctcgttagtattaaatgaataacatggtacaatatttatagagcaaagctctttgatacaagggaagaaggagtcgaggaagttgttacaactgagaatgtataactaactctaacaaccaagagtacatgtgtccaactaatctaactacttaactaacttcatagtgtctaataaatgcacaagatataaaataagaaaaaaataattgattatagtgatgattaattcatattttattgaaaatatacaaaacttattattttttattcttttatcatttaaataatagtaatatggtaaataaagtaaataaaatttagtaaaagtcaataaaaaaatgaatcataataattagttatattatagtaaataaaaaagtagaatttattgtgggctaaatttagcacatgctatatcttgtgccaaatttggcacaacttttaacatgtgtcaaatttaacactttctcttttgaaatattttagcacactttttaaaacattattggtgtataatttttcttaagtgtactaaaatatagcactacaccacctttttggcactccattaaagatgctctaacggaacaacatttttcgcattttcatgtaatagctaagacgttcacgttgatacgaatgcttactgtagccagcattctttcttcataag

SEQ ID NO: 20574 - DNA, 1105 bp, Cannabis sativa
taagtccaaacttcatggaggcctagggcaatttgtgtaagtccaaacttcatggaggcctgtgattcagacaaactaaggatattaacaaggctttctttatgagatggggttggaaaatggtaaatgagactacaagtttgtggttccagactatggaaaacaaatatcttaagggacatagcttttgggatgtgcaaagtaagggatcgaattcgaggttgtggaaagccatcctcaaaactcatccccttttgagagaagggatatgtcgtagaattggtgatggaaggtctacatcaatttggtttgacccttgggtcctaaccgggaatagtcaacctgaaccattactggatgctacgcagggggccaacttggtggattatttcttaaatgacaatcattcttggaatgaaagaagggtcaggcaatggtttcaccgtgacgatgcgaggcatattttaaacattggtctaccgaattctcagcaagttgactcgtggagatggttaggtgaggctaatggtttattttccattaaatcagcataccatataatcactaagcgtagatgtgtagcctctcctagtgggacatggaaactcatttggaataattctattcatgcgagactgaagcttctgtggtggcaaatcatgaataacgctctccctacgcgtgaaagaattgcaatggttttgaatcttcaatcaaccctctgcccaatctgtaacaaggagagggaatcatccttccacttgttttggaattgcgattatgcttcagctgcctggtttggtagcaattggggaattagaacaaatttaagtccttcacagagttgggaggaatggatggactagtttggatgcatgagaaatagacccccccaatcttagtttcaccgagtttatgacaggggccttatgcatttttgaggtgatttggaagacgcggaacgaagttattcataatggacatctagtaccgattacggtggcaattcgagatgcttgtaggcggctcaatgatcacttggtttgcaaaatagatcgccacttgaagcatgctactgtccttacaccctcggaaggatggatga

SEQ ID NO: 20575 - DNA, 4080 bp, Cannabis sativa
taatatcaataaagtagatttttacgtgtttgatgatgaagatgtactcaatcggaacaagttgataggatttccttttttacgttcccatgtccctccagtgtggcgacatgagggcataaaaaagaaaagagaggaatgaagttttctcacgactaagttagcttcggtagcttaaaatggtcgatcaagtatttagaattccttggcgcgaaatacattccttgtagtctggcttattattcaacttgtacccctttgatcactagatttgtaaaattaaatatagattaataaacacagaaaattcatatgtttttttattggtctgcaaggtctaaaactacaatgaactgcattgatcctttgacaggacattctattttctaacaaggttgtttcatcatctgttctttaactctttctttagatgttacttggagttcctcccattatcactgcaacactagagtgtgacaatgtagaagtatgtttcaaactgtttttctcttattctgcagattacaatgagtataatttaaaggttgtgataacttcaagatcagcatctatatggattaaggatgcaatgttgtctatagatgcttacttagttcaagattcaatagtacgaactccaagaatcaaactaaagcaagaggtgaaaatcactcaataatatttttgttgaaaagatccattcaaatcaagataaactttcaagcaaaagaaaaatatcacaatattctaaaaataaaagtttaaaattttttcctttacaaaactcataataactattttaactagtaaattgatccaatcaaaggctacaaactctataattagttagactcataattcttcacttcatttcctcaatacacctctaatcacattcacatgtaaccaaaattgtatcaaatcaataacacaactcttcaataagcacaatctttcttacacaaaatggagcttttaaagtttacccgatatcaattgtttcgatcaaaatcttcatcatccttcatatacttttcttgcactgctgcaactgtaaacagttttgttaagaaaaaacttcgtaggtaaatattattgtgaactacgtatttcgcaaaagttacagattaaatcttccatttcgttaaatgataaattgaaccgtgtatttcttaaaatagtactgtgaattaatttttttttctcaaaatacaatttattaacaacctgatttaaattatcgaaaattgaaattagggtactactttgtatcattttgaaaaaatacaggttccattttactatataacaaaacagagagtctaatcggtaaaatgaagagttagaagaaagaaaaaaaaaagaccagagtaaaaggatatctgtaataatcccaatcagtgggaccgatagcaatcttgctaaattcaactgcacttgcttctattccggcgaaaatgtatccattgcttttgtctatgagcttcactagattccctacgctttctttatcctgaacaaacgagtacaaccacattactaaaatttaaatgtcgatgatcgaaacacagaataaactgacaaacacacctggatatcgagggttgtaaagttgacgatactgtagttgtctatcacttcgcagagctccttggtaagctttctgcaataaaaataagttgcatttagactagacctatacataagtaagacaaaatttatataatcaaatgaaaattccaacatgcaatttataacaatgactttgctgaaggcttatcaacaagaaaatggaatatcaaaatgaaattcgactcattaaaaaccggttttagaatctgtattttgtaccaataaaaccttcttattttttgttaaatcacaaatcatatttttcaaaatggtaaaaaataatattttcaactcaatttttgtcaatttttttttatctcaagccaatttctagctcgaatgaatacaaaaattgtaactatcctagtcataacacctccaaattaagttattattatattctattttgacaaaaattgagctcccgctattattgttaccattttgaaaaacagagtgcctgatcggtaacttttataaaacactggatctaattccagtttaatttcacgcttcacaaatgatgtatgtgtttttactcagcaaagatcttaagacctcaattttaatgtttggtaacaaagtgcttctaataaattcgtatatcgagtttcatctgatgcacttaccaagatcgaaaaaaacattaagaacacgcaatcaaccccacctatacttagccgaacgtggatcttgatcgagatggtgttgcaagtacgataaatctagaacatcagtatagaaatccaagttaaaggctgcaacacataaaaacgacaaaaataattagaacgaaacaagaatctgtactgatcaaaaagaaagaaacatgtgtcaaataaaagcccttaaaactcacctagctttccataattctctattaaatcaatctttgacagaacattaatgtgtggcaattccatatggagcatcgtcgataaagaaagaagcaacgcgctaacatatttcccgggatcgctgcagagatgggcatcaactaaatgcatagcagtcaactgcatccaacaaaactcccattaaagataacgagcaaaagtctagaaagttgttcaaagccttagaaatcaaaaaaaaataatcatacacacccgaaggtttaagctttttatgagtttcgtgataacattcttggcattggcatggagaaaaaataactctacttggccagggaaatcaaaaagaaaatagtgatctgcaaattaacaagaataattaatcgacaattcccaactaaataactaaatatctaaccaaataaccaacctttcaatagaggtaccaattttgcttctaaccaatcgatattcttttctagataatccatacaatacaccagtcctgaagaacatgatcaaagttgaaacatagcaatcagatcctactggtagggatatctctacttttagcatttagagaaattataagtaaaattttcttatatgactgtaaaatgtaattagattagatattctttgacctgttttcgaaaaatttcaaaattattttataatcaaaaacaaagtttgaacattcaattacacgggtgaagcaagtgtgcaaatgaatctttggtatccgttttcgacattgtaattattcaaaaacagataccgtcatataaaaaaagaattgaattataattgtttaaaatgctaaaaacatagatatcactaccatagtcttatcctataaatacatatatacatactcgtatacttatattcatataaaaaaccaagctcacctccattaggaccaagggaatgctctgtcatcacatcactcagttttataagatcttcaatgttaatggcacattcatatctataggtacccattaaggagacttgaaattcaaacaaaaaatacttcaaaaatcagaacctgaaaacttgtaaaagaggtcaaggatacggcagcgaatcattagcaggatcaagattgataatagcaaccttcctgcacacaacaacatatacattactttatcattcactgactcgaaattctcctccttggtcataacagcataataataatgataaagattgaaaaaagaatccaattttagaaatgcaatatagtatatacctcccaatgagttgcaagaactgagacatgccattgcagtaggtggtttttcccgagccaggtggaccgatcacaacttgcccgaacaccattttgaattcctcaattagctatggattacaagtttaatgttaaaaaaaatgtgagagtgtagagaagaagaactacatctacatccgaaactgataacaatttttgagagtaaagatgaatcgaaatagtttcggaaataaaaaaatctccattgaatcaaaataagagagcattaagcaaaaactagttagaaatgaagcttctaaaatatacatcaatcaataattacagtaactttgagca

SEQ ID NO: 20576 - DNA, 2264 bp, Cannabis sativa
aaatgttaccaaacggcacctaagaaaaccacaatgcaaatttaaaaaattccaagaagccaaggcatgagctgccaccattgattctcagttacaccaggaaactgaaaaggaacagttatccaacaagaaaaaaagcttagcaaatagatgagaaagtctccgagaaggcagcttccgagagtagcaagcctaggtcgcaaggagaccatccaccagtgcccgcacttcactctccaaagcagactctgtcgggaaccgatcaacaaaaagaccaatggtctccccacactcgtctttaaccaccacacctgaggcacctcgaccatgttaaaacgcaccatccacatggatcaccacatctccactgccaccaacaccgcaactccaatcgtttgaagttggggagtaacagtaagatgggtattccacagctcaatgaatatctcctggatgctttttaccataaagtcaattgggagatgacctttattgtgatagtagtcattacgaaaactccacagtttaagaagcaagactgccccaaaaagtctagaactcctttctctgttgttgagaagaatcatcaaaatatttaggtgaattcagcaaccacttgattatctctgctcccaaaacaaacataaggtgatccaccctcacatcccacaaactttggaaccagagagttttactaactctacatcaaaagaaaacatgatcatgagtatcagcattctgctccccacacatagcacacacactagctgcattaccaaaaatctggctcaattaggatgtaaaaggcagggcattccaatagtgcttccacaagaaaagtttaaatctttgaggcacatcaaaacaccaaacattttttagataaacattgactttgccaaactaagttgcattcaaggcccaacaggccaatttgagactgaacctcccatcttgagttgcaatccagagaagagtgtcatgatcaaaataactaccattcttgcagctcaatattctcgtagctacccccgaaaatgaagactatcctcacctcatcctccttccaacacatattagattgatccctgaggtcccccatagtatatattgtcattattaatcaaggaattcagatgctccaagtggaccaataagtttgaatcacagagccagtttggttcccacactggcacacgagaactcttgcctattgcccaggcagaattaactttgataaactctgttgtacctcagatacctttagccattcctaacgcattccccattaaggtaatgtaagattttatcaatacaagcagaattttgacaaacactaagtttgcaaaaaaaaaaaaagcttgcaaaagaggcagaacttaatgtagggacctttatttataaaagcacaattacaattcaattaaagaaataacagaaaataaaagttactaaaataactattgtaattgaaagttagttacaacttgctaactaattatcacaagaaggagtagctttatcattctctcttaaaacaaaaggtgtggaacgcacattgagtttgccttttaagtaagtaaatatgtctttgcttaaagctttagtaagaatgccagccatttggtcaataaaagggacatatctcacttcaacctctttagcaatgatttggtcccccaacaaaattaatgtctttcaatatgtttagaccttgtatggaaaacaggatttgcagcaagaggagtcgctctttgattggtaaccaaattattggaggtgctggaagtgtcacataaagctcaaaaagtatagaacacaaccatcaaatctcaattgttgtgttagcgagagacctgaactcactttcagtgctgcttttagaaactacatgttgctttttcgcagaccaagagatgagattgcctctaaaaaagacggcatagctacctgttgatttcttatcatcaggaaaacttgcccaatcagcatctgatctgaatagccctgcaaatataatattaagtttagcctttatgtgtaatccttcatgaatgatgcctgttaagtacttaaacaacctcttacacgcattccaatgcactaatgtgggaccatgtatgaactggcttagtttattaactataaatgcaacctctagtattgttaatgttagatattgcaaggctctaaaagtgttcttgacaaagtgtgatccaaaaatggtttaccattgtgtgctgaactggttggacttggactca

SEQ ID NO: 20577 - DNA, 4983 bp, Cannabis sativa
  modified_base (27)..(35): a, c, t, g, unknown or other
gttaaaccaagaaatgccgttagatannnnnnnnnaatatataaagatatatatttatacgacaaagcattaaattaaaatttcaatatattaaattagagttggtgtaaaacactcacacacgatcgatccctatatatagctatacgcctatacgtctattaattcaattatataaggctaccacgaattttttttttttaatcacaactaaaattataactaaaagtaaaaaaatatcttaatcaaaagttgtagtcaatttttttcctttaacagtgttataaataaaaaaatcgtatccaaaaattttagttacaataaaaataatgctccgactaaaaatcacttttaatcacaattaatctttatgactaaaagtcacaactaattaaattatgtcacaacaattactcacaattaccatttagctacaaattatttatctttggtgacaatatttattgtcactaatatttttttagctacaacctaaatatatttagctacaaaaaaattgtgactaatatttgttgtgactaatatgtctttagctataacaaaaaactgtgactattgactaatatttctttagtcacaacaaaaaattatagctaatttttagtcacaacaataaattatgattaatatttctttagtcacaacaaaaaattgtagttaatattttttcagtcacaacaaaattaaaactaatatttttttagtcacaacaaaaattatcactaatacttgttgatctacaattttttattgtcactaatatccttttagttacaatttcattatcaatccaaaataaaatatatagatattaaataatgatgacattagtaattttgtttattgaatgtattctacaacatttttctcaaaattaagtcacataaaaataagataatcaaactcaaaacttaattgaaatgcttcattcatcaatttgacatttttatgatctcttgaaattcaatccaaaaataaagtaatatcaaatcaaactaaacaagtattagcccttgagagagttgttgaagaaggtattgtgtgagcatgattaataagtgcgaagaagcgattcgaaatttaaaagaagtcatgattgtcattcatcttttattgaaactatataaaaaaaaatacttaaatgaataaataaaatattaaaaagcttttaattagtaaatattattaattagtagtaaataagtaaataaaaaaacagcattaattataatgtaaatttgactcattatatttcctgtaagatttttttttgacgcggtgattaaaatcacaaatgataaacaaaatatcaatctacaatccgcgacggcacctcctcgtgtcaggatagctcattgtttaactgaagggcatgctttgccaaaccatacgctgcagaattcttatctcgagccacatgggacaaaactgcccccggaaatttagacaataaagctaataacacaatcaaacaacacctaaaaacattgaaaatatacctttccaatataaaattgtcgtcagagctagcaaaactgaaaaatatcacaacaccacacaaaacagttatattagaatgacattcttcaaaataaaattaattgttaggtatgtaaagaataaagcttttcaatggaccatcacacatgttatctgttgtaaaatcggtagagaagcaagaattcagctcactagcaatcaccaatagtctccacaagaacatgatccatctttaaaatggtggaatctgtttgtatctctcacaattatctcccttgaaactattttgcaaatgaacttgagtgcagtatggcaatccacacaaactcttagattcttcttcaccctaatgggagctccaggaggagtggcaattaacccgaaagccactgcaagcttctcactatgatgcaacagaagctcttctttttcatttctatctacatcatgaaggtccatctccaccataggaacatacccagctttcctcatgagatcgcgcagctcatcaagctttgcatagatctccttgcttctcgaatgacttatatcgtgtactataaaagtatgtactttgtcttgaacctcaatccaactgattccaggttccttctttaccttattatatttcataactcttctcacgtctgctacattttcccacagaccagctgaagcgtaaatattagcaagaagaactagggtaccggatttttcaggctcgagaactaagagcatttcagcagcgcgttcaccaagctcaacatgtttatgaagtcttgctgcacctagaagcgatccccaaaccgacccatttggttgaaatggcattgtattcacaagctccattgcctcatctaacttccctgctcggccaagtagatcaatcatgcaagcataatgttcttgcattggttcaataccgaacatctctttcattgattcgaaataatttctggcttcagttaccaagcctgcatgattgcaagcacagagtacactaactaaagttatatgattgggttgaacaccatctttaagcatctcatcgaacattctcaaggcttcctccccatgtccgtgttgagcaagtcctcctatcattgcagaccatgagactattcctctctctgctatctctgagaaagaacgacttgcatcgtcaatgcttccacattttgcatacatgttaactagagaattcccagcaaatacgtcggacatgaacccaaacttaagaatgtgaacgtggatttgtttcccttgttcaaatgctgataaagttgcacaagcattcagaagagaactgcagacaaacggatcaggttggattcccttgtcctgcatttctgaataaagctttaaggattcttcaccttgaccatattgagcataagctgcaatcatggatgtgaaagccactaaatctccaactttacattcttcgaaaattcttgctgcatcttttacttggctacattttgcatacgtatcaagaaagctatttataacataaatgtcagattggtaaccagttttcatagaaattgcatgaatttgttggcaaaccttaatagcttgtagtgtagctgttgattttaggactgtagataatgtaacacggttaaaaccgatcttctgcttgaacacctcaacgaaaagccataaagcttcaaaatcctctccattctgcgaatgcccagttattatagcattccaagcaatcaaattcttctttggcatcaaggagtgaaccatctttgcatctttcatcattttacactttgaatacatatcaataagtccaacatctacaaacacatcagactttgtatccatcttaaccaagctagaatgcagctgccggcccaattctttgaggcctaatccagcacacgctttaagagcacttgacagcgtgaacatattcaggcgcagtcctaatcttttcatgtccattatcaatctaagtgcccatttatgatcctcatgatgaacacaaccagctatgatagcattccaggatactatatcaggttgtgcaatttcattaaaagccgaaattgcttcatcaagacctcctactttcgcatacatgtcaaccaatgcatttgcagagaatgaatctgattcataaccaagctttaccaaatatccatgaattttctttccttgagtaccatccccaagacttgcacaagcatttattatactagatagtgtaaactcatttggtctaattccactctcaatcatttccatgaacaatttaactgcctctctacaataatcatgctgcatataactaaaaaaaagagcattccacgaaacaacatctcgaaccacaatctcattgaaaagtcttctcgaatccccgaattccccacattttgcatacatacaaaccaaagtattcgccacgaacacatctgattcaaaccctgtaacaaaccccaccccatgaacctgcttccccaagttcaaatcctttgtaatggaacaagccttaagaacactaggaaaggtaaactcattagacttgatgccgaacgagtgcatatcataaaatgccagtagggcttcagcactaagcccattctgaacatacctagatatcaaagcagaccaagaaactaaacccggttgagtactttcatcaaacagtttctgggcatacccaaaacactgagacttggagttgaaattaagtaaatggtttctccaagcatggatttcttccacgcctcctgctacctccttcacagcaaagtcaaatggaaccacctgagaatatactccattaaaaaaaatatgttccagaatccaaatttgttaatatgacgaatacaaagacaaattgtcatacaaaatgaaagagggaaagagagaaagggaataagtaccttgttgcgacatatgggagaagagaatgagaatgagcggagaaagagaaggtttctgaatttgagcaaacacagagaagaagaagagagaatccggtgcggtggtgacattcaattactagcgtagacccgcaacatcaccagtagtgactatgggcgttggtattgagtttttgattgaaagaggcagaaaaggctgaaactttagtgcacccattaatggagtttcctcttggtcttaccaaatttcaatggggatgaaattggttagtgtataagttgttaaaggcatcatcttgatcttgtgtcttataatgtaagaattactagtattgaaattgaatataaaattgccaagcttgaagaagagctaatttaagcctttgaaataatctttagtttactaattagagcctattgttacaaattattaccccattcattcatacaaagaaatgaagaatcaacctcatacaaagaagattgtataaaaatcaaaatatatgattaaatttggtgcttattgtgttgtgcagtggttgattgagagagttcttaa

SEQ ID NO: 20578 - DNA, 2300 bp, Cannabis sativa
actccccctgttctcagatctggcagtgttgttaaaaatttgactgaatccttttcgaaatctcagacaacaagcaaagttaagattaatttggaagatattcaagaggaaatttcgttttggaattcttcaattgtatgttatgttctaggtgccaacccacctcttgctgtattggaaggatttgctaggagattatggaaagaaaaggtggacaaggtgggtatgttggcttatggtgtattcattatcaggttcttctctgaggttgaaagaggtgaaattctcaaggggggtttcatcttcttcaataaaaggcctgtaataatgaaaccatgggatcccgattgtaatttcaagaaggaagacatcagaagggtgccaatttggattcatcttgatgatcttgaattgaagtattggggacagacgtctttgtttaagatagttgagcaaattgggcaaccaatcatgatagattcagttatagagactagagagaaactgaattttccacgggtgttgattgatgtatcagttcagcaggaattcccagatctcatttggtttgaaaatgaatatggtactaatgtctcggttgcagtatcttatgaatggaaaccaactatatgcgctcactgtcgtggaatggggcataataccattgattgccgtaggaaggaaactaaaaagccagaatggattgtcaagggaacaaagaagaacatggatcatggcaaggcagataaagagaagcaaggagtgaagaataatcctcatgaggaatttcaaccagttacaaatggtgtgaaagtaaaatcagtagataagccgaattcaactactatcaacaactcttttcagatgcttgctgaatgtacagcagatatgactgtaggcgacacagctcatagggtatcagttgcagaaggagaagatacaagaggagggggaggtcctcctcttcacaatggataaaatcctaagctggaatgtccgagggatcaatagccagcagaaacagaactcagttaagcaatttattgctcatcataatgctggtttagttggtcttctcgagacttgagttaaggcccataagttgggggtcttatacacgaatatgtttgcaggatggtgttttacaactaataatgcgtggcacataggtggtcgcataatagttgcatggaatcctagaagtttcaatattaatatcttgttttgttctgcccaattaatacatctccatgtgtcttccatagacgataagtgcaaattctttgcaacatttgtgtatggtttcaatgaagatgtggtagacaaagcatgtggcaagatttacaaagcattagacctgatggttcttgggtggtgctaggcaattttaatgacattttggaaaaagaggagcgaattggtgttcgggtcaagtataaatcatcagtgtcttttattaactgtatatcaacatgtcaattggaagatgtgaagtttggagccagcttttacacttggaataacaagcaagagggtgatgatagaattttttcgaaaatagatagaattctagcaaaccaacaatggcttgagtcctatccgaatgcttctgtattgtttttaaatgagggtatattcgaccacactgcagctttacttacaatctttccttctatacttgtaggaaagaggccttttaagtatttcaggatgtggcagaatcatcccttattcaggagtaaagtagaagagatttggaagaggactttaagtggtacaaaaatgtatcaccttgtcactaaattgaagatgctgaagccaatactcaaggaattgaataaggaaggcttttcggatatatctatagctgatttcaaggcaaatgaagagctaaaaaggcacaagatgagttacaaaaagacccactgaatagacaaatacagtggcaggtgaaggaagctagagagaaatatgtggctgctcataaggcttactgctccttcatgagtcaaaaaacaaagctagcttgggtgaaagatggggatatcaactctgctctttttcatagcagtattagagatagaagaaggcaaaataatgtcttttctatcattaattctgctggaataagagttgaggaaccgaaggaagttgctgatgcttttgtggaattttataagatacttctcggttcccagatggaaaatcgaattcctgttaacaatcgtatagtggagaaagggcctagagtcacacaacagcaagcagaatttcttgtggcaaattacacagatgaagag

SEQ ID NO: 20579 - DNA, 2636 bp, Cannabis sativa
tatttgaggtaaccattgaaatttcctatatatatataaactattttgacctcctaactacttgagccaatttgatacattttttgaaaaaattaaaagttattttattaaaaaattgtgctataaagatgtttggtaataattagaaatcaatttattgataaatttatgaagaatgtacagctaaaagttaaatttggtacaacccaacattcaaaaaaaagttattttgataaatttgattaaaatactataacaaatatatatgttaaaatatatttatttctttattatatattactaaaaataaaaatatttaaaattaactaatattaaaataatattatccctattcctgaatgaagaaacatgtggcataagaagaggagtacgacttcgaatagccagtgagtaagtctcctccgcgaagccaagtcatggagaggctgcacgaacccaggaatggatcaagaccaaaggatacacatagattcacttagcctcattgtgtcctctgagacacagaggcctttccacttctccgagattcagagtggttcaggcttagagcttacttaagcgatatccaggaggatactcgtagggcatattgtgaatgcagaacacccaaaaggaatgcaaatgtctaccttggagatgaacccagattgcccaatgatggttatgctttttttgacacgggatcagatcttgtcccccgtgtgcgcgcatcctttacacctttttgccagatggttattctaggcaattactttcaaggtaaaaccttttggcaacccgtgtctcgtacgaagggtggtcccctattgtccagctacttcaatacacgagaaaaaattcttctaaggggctcaatagttagctttctttgcatgtattttatccaattaataaactttttgcagaaatcctaggcgggtcatgggcatgtacatagcctccctttagcctataaatacccttctactttacgaagggggtcaaaaatgaagataatcaaagctctgctaaaatttctctaaacttttctcttcctcaagagaaacaaagggtacatagttagggtttcttgcatcaacattgtaagaaaatcaaagacgccttcaaaagctaatagactgactcatggactaaggcttgctaaatcctgtaaaaaaatctccatatatttgttattgttctttaccatttttaagctcttattatattagtttttaaaaatcttgataaacattttggtgcttttattcagagctgaagaaagatttgaaccaccactgctactgcaacaattgtgttcactcaaaaaatagtgaccaaaaagacccctcaaagtggtcttcacattgtcatcgaggatgtaaccctctttctctagagcatggtcctgagccatgcgaggggagggaatacatcaaacgctgacaaccaaaatggggatcctagtgtcgatgatagccaaagtgtcagagaggaggggaagacgacaatgaagagtatgttaaagatggatattacaaggatgggtactactatgagcaagaacctataattgtttgagtgtctagaaagctacaggagacccaagagaaattggcctgtgaagagaagttttccagaggataaaaagaatgatgggtcacctccaagacaaatttggagatctaggtgaagaagactctgacaatgatccttcaatggaatgtgtcgattgaaataataaggaatggtctattgatgttggaacctctactcttgtacaagaaaggggaaaggaaaaagtgggtgaccctcagaacctgatagctctcgtacctcctcgaaaaaatgcaaatctagcccgcaggcccactcaggcgcagaaggctaccaatgcctctaggcttggacgcccttctgctctaaaaggccttacagatggaaaaaaaaaatctaccgattaagccagcagtttgagtgaacttagtgggcgtttgggtggtggagacatcaatcgtggacctacagcggaagagcagttggagacgacttggggctcgaagtttggaagtgccctttgtccatcaatagagctcaccttggcctttggaggttgtcgtcttcaatggaggagggttggggatcggttttggagagagatgcaagcatagagatgagataagataaaaaaaaataaaaaataaaaaaaagaattgaaagaggctctagagagaggaaaacaaatattaaggttttgaaactattaccctaaataatattttaattaaaaaatataaaaaagtgaaaaattgaaaagatttattgagaaagagagagaacatgattactgtgccttttcaattttttatttttttatttattttttattaaaaatacctatagtgacgtgcaaggcaaatggggacacattttcctagtcattcctgaagtgactttataagtcagtttttttaataaataaaaaaaattatgggtaatactttttggtgactcttcatatttttagtgacctacaacatgagagagtaacaccgaaagtttatagtctatttatgcatgtcactaaaaatcaattcttaactatttagtgatccacacaaaagtgtcagtatata

SEQ ID NO: 20580 - DNA, 5048 bp, Cannabis sativa
acttacataaattgaatctacaagcttacataataaaaagtctgcttctaaatgtcaaatggctatccctgcttggcatgccaagtagaggccatcgttgaagaacgatgggcggctacgccgaaagaccgtgggcactagctccttactcttactctaatgatgagttgatagaactactactgcaaaatagcattaggtaagttggtcactgatagtacttgcggaggtgctccacattctaatatcttggtaggagaactagctccatgttctcgttgtaccttcacaacttgtaggctcccttacttgttatctctgtaactcggtaggggccttcctagttggatttgaacactcctgctactggatctttggtgtttaggaacaccttcggagcactaggtctcctatgaagaatttcttgtcctttacttgtttgtttaagtgccttgcaaccttttgcttgtaggcctgcagctttaggttggcttgatctcttctttcttctatcttgtcaagggtttttgcaagtaggaggttgtttgtatcctggtcataggttgtcctcctgtgagatggtggcactagctgtacaagcaacatcgcctcatagccataagctagagtgaatagagtttgcatgtggccgtcttctcggtagtcctgtgcgaccataggacatttgggagcaattcaggccaattgccttttacctcttcaaggcacttcttcaaggtgtcctttgaggatcttgttaacaacttctacatgcccattttcttaaggatgggccacgacagaaaagcttttgatgatgccatgtctgttgcagaaatcagtgaacatgtcactgtcaaactgctttccattgtctgacataatcttatgaggaagtccgtaccgacatgtgatgttcttgacaacaaagttaaggacttttttggaggtgattgttgttaggggtttagcttctgcccacttggtgaagtagtctacaacgactatggtgaactgcacccctccttttccctttgggagttgaccaatctggtctatcccccatactgcaaagggccaaggagactgcatcattgtgagcttgttgggtggagctttagggatcttcaagaatctctagcacttgtcatattttttgacacagtccatagaatcctctatcattgttggccaaaagtacccctatcagagtatatttttagatagtacttgcccccaacatggttgtcgtagaagccttcacgcacttctatcatcaaccgcttaactttagtcttggtgacacaccttaagagtggcattaagaagctccgtctgtacattacttcgtctaggattagatacgtagcagcctttcttctcattttctttgcctcattcttgttttcaggcaaggatctagtttggaggtaagatgcaataggtgtcatccatgttggactgtcatccaacatgttgacttctttagcgatggaattcttcattcctttaggaactgtattggcaccaggttttccttatcgacaatgatgctacttgccaaatatgcaactacatctgctgtggcattctattctctggggatctgccttattgtatagcctttgagctgacttagcaagtcttgaaccttactcaagtaggccatcattctttcacctcgagctgtgtattcacctaggacttggttcatgactagttgagagtcgatgtatatgtcaaagtggtcagcccgtacttcatgggccattttgaggccagcgatcagggcttcatattcaacctcattgtttaaggcttttgaagttgaatttgattactcaatgcagctattgccctaggtgttatgagggtaatgcctacaccggacaattggtcagtgcagcttccatcaagatgaagtttccattttgattcttcaggtttttgttgctgctcttcctctcgcttcttctttggctcttatttttctcttgaatcttgagagatttcaagagatgtgtttgtacactcagccacaaaagtctacaagagcttgacctttatggccattctttgttgatatgtgatattgaattggccaagttcaatggcccacttgagtagtcggctagatactttaggtcttttaaaacttgtcgcaatggttggtcggtgtacacctttatttggtgtgcttgaaagtatgtcctcaactttctggatgccaagagcaagttgtaagttagtttctccatgagtgggtactgactttcagcgtcaattagtctctaactgatgtagtatacacagaccgtccgttagtctaagaatgaaaggaaatgttaacttttaacttggtacccatggccctttgtaaactcacccaaaactagggagtaaatttagtatcacgatctaagataatcgatgttggagcaccatgaagtcctacaatctctttcatgtacaaatctacatattgatccacatgttgtccacactggtagtaagtgtgctgacttggtgtacctattcactatcacccaaatggaatcatacaaccatgtagtcttcggtaacccaactgaaaaattcattgttatatcatcctattttcactcagtaatttcttctaaagactaaagtaatcctgctacatatcgatgtttttccctaacttgctgacaagttaggcatttcattacagactcaactacatcacttctcattctcggccaccaatatagtgatttacacatcctgatacatctttgtcatccctagtgcaacgaatacgttgtagtatgagactcatctagtacttctcttgtcttaagtcagaacacaaattctatctttataccacaataactcattctgtgacactgaagagttcttcgctgaaccagcctcgaacctctccttatgctctaccaacatcaaatcattttgttgtgttatcttaatcctttccagatatctaactataaggtgatattggctaactttccaactaaaaactcaattccagcttttgtcatgtcttgtttcaactttgaaggagttctcttcaattcatagacttgaccgtaacctttttaactcagggcatctgccaccacatttaatttcccaagatgggagaggatttcataatcataatcttgtaaccactccaaccatcgacgatgcctcatattccagtctttatgtgctaagaagtatttaaagctttcatggttggtataaatctcacacttctagccatacaggtaatggcgccaaacttttgggtaaaacaccactgctgccaattcaatatcatgagcgggatagtgttgttcataatctttcgattgcctagacacataggaaatgacctttttggaatgcattaagacacaacctaaccattattttgaagtatcacaataaatcacaaacctctcatcactagttggaaaaatcaattctagtgttgtaatcaatctttatttcatctcttgaaagctacttgcacatttattagtctagacgaacttgtgattcttttgggtaagttaagtaaagagtgttaaatcttggcaagcccttctacgaatcttctgtggtatccatctaaccctaggaaattttagacctcaacaacatacttagatcgtggccaaactcgaactactactatctttactaccagaattctatacttactcaccacgtgtcccaagaaactcacttgaggcaccagaattcacacttcttaaactttgcataaagtttatgtttacaaagatgctgcaataccatttgaagatgtttctcacatgcttccttaaatttagagtaaatcaagatgtcaccaataaaaacaatcccaaaattttttaggaagtctttgaatacccgattcatcaactctataaatattgttggagcattggtcaacctaaaggacactagtagaaattcatagtgcccataccgattacaaaaagcagtcttgggaatatcatcttccttaatcctcagctggtgataactagattgatattaattatagaaaatatggtctttccctgaagttgatcgaacagatcacctatccttgataaaggatacttgttttgaattgtcaacttattcaactcttgctaatcaatatacattctcagtaatttgtccttcttctgaaaaaacaaactggcacaccccagagcgaagcactcagtctagtaaactacaaatcaaacatgtttagcaactgaacctttagttcctttaattttgttggtaccattcaatacatggccttagaaactcgctctacccccgatatcaactcaatctcaaagttaatttcttattttcgtggtatgaaattcacataccacttgtacactctcgagtctcacatgtatctacttagtaatacctactacacttgcaagattgcttatatatccttcccataggaagtctctcgccttaagcgcttttaatttgggattcaaggtccatgaactgtacccacaaatacaaatgaagtctcgccctctagttcaaatgtcaccattctccttttacaatcaatggtggtattatacttgactatcaattcattcccagtatcacatcgaaatcttccaaatttagcttaatcaagtccaccaacgatctctatcttctacatacactggaagagatctaacccaccttctagagataaccatttctcgagtaggtgaaaacatatcaaacccacttgacaaaaaattatatgacctactattcaactatggaaagtgtatcgagctcaacatttcccaaatagcaccttttgtagctcaaacattccgagtaagtctgtcgattcttattctgcccagacagaaaccttcattaccttggaacttctcgttaggactcatagctagaaggttgtttggtttccttcactactagaaaattgggttttagtgacacacattgagtgactttaaaactatatagtgacacttcaatgcgcgtcactaatgaaggtgact

SEQ ID NO: 20581 - DNA, 5838 bp, Cannabis sativa
atcttttttatttaaagtctcaattattcattgctttattttattataatttgatgtatctatgtattatattcaaacattataaaataatacgagtttttgaatttaactcattaccatattagtagcccaaataattttagcaaatttaaaaaagtttattttacattatttatttaactaagaaagtttttattcttaaattatatgatatttgatacaatattctaatttttttagctctcaaataattatagcagatttcaagatttatttttttagaaaaaatgaggctcggtttggtcagtttaaaccgagcaaaccgtggattaaaataattgggttttttatatctatataatggtcgatcggttttttagattataaccatgaaaatccaaaaccgaattttgaatttttttgtgtaaaaaagcgaccaaaccgaccgttgctcacccctaccatgcactgcttgcatgcgagcccccacatggggtcgcatgagaacctcccacttgcaacacacgcacgctgcatacactccagacatggctcgcatgcgatccccctactcacaacacacgcacgctgcacacacgtgctacacacacgggctgcacacacgccacacacggctcgcatgcgatccccccacatgggctcgcatgcgagccccccacatgggctcgcatgcgagatacccactcgcaacacacacacacacacacactacacacatgccacacacacaacgcacagctcgcatgcaagcctccacatgggatcgcatgtgagtccacaacctaagcatccacacacgatgttcacgcatccatgtatggttcacaagattggtcttggagctgtatggatgtatcccaatacccgcaagtactgactttgagaaatgtgcaccgggtgagtagactaacttaatgcgctctcgcttgtctcttggtctttaggtgactaatcctgagagttagcagcgccaattttcggggttaacataaacgacaaaacataatacatgtacactaaacatgtacatatgtgtatctgaatactaatcttatcttaattccataatcaagtgtagtagttaacctgagtagaaaattgcttgatgagcgaagaccttatgtcacattaacgtaaaacttataagtgtctcactaaaatactttcgggaacttaaactcataatttgaagtttccatattgataaatatcgttgcagtatgctaaatactgagaaaatataaaaactatggtacccaaaaatgctcctaaatgggtgaccggatccctaaacagttgcccaaaattctgggcaagacacatttatttgttttccctaaattggtaccctctttgtattagagtttcccaaactcgagttttgcaactaaaatctaccctacacatgtttaaactctaccaaaatttttaggacattcctataataagttcaaaacataaactacaacttagtaacaaacattaaacccataattaaaaaatacaattgaagctccaaattttgagtttttaaaactcaaatttggtttcagtcaactacaactacaatatttcaacaattcaaacgtaattctcaattaaaaacaagcaattaaacatgtctaaactcaacacaaactagagaacctaaaaacatttttttcttcaaaactaccaagataaagagactagggttttaccttgcaatttctactaattactcttcaatcacagcttgaaaacttgcaccaattagtagaattttgtctaaaaaaggttagtcttccttggtttagtctagggaagagagagaaattttgtttttgtttttgattaatataattttctcttgattttttattgttttcagaatatatcctcaatctttacactctaatctaccaaaaaggtttaaataactaattaaattagtttatttggaaaaaggaccaattgtgccttaacaaacatactaaattactgacaaaattaagagtataatggtcataactcaattccccgcataacttcaaaattataactatccataaatctttctgcgttaattccaaaatactaaattgcaatacattgatactattggtcattccatcaagttttcactattgtcgggcataaaacatgaaaaatattaaatttcatattacaattagtgcacttagaataaaatttctataattgagaattatatgcacgtataatataatttactaattaattattactaaattgctaataatctgttaattttcatgtctaatcttgtagttattacataagccttctagtagtataaatatacttttagtatttttattgtcacttttgtacttttaaggttagagtaggcgcaatcaattacctttcatatttttagattttattttattttaattatatttaacaagttatagtaattagtttcaatcatttattaactggtaaccctcggaggggtaagtagttactctaggaaagataagcagttaccatgtgagtgcaaaccaattaccttttgaagataactagtgataggtaagtagttaccttgggaagggttacatattagccaaagatatcatgctagatatattaatataaatatagttaattatttaccaaaatataataattggctaccatgcaattaattaaaaaaaaaactaattttactattgttaaatttataggtaatcagtaatcgatattaaaaaagtatctatacattgacatttagattcacacaattgataacttgttagtactaaggatactaactagttacacttatttgggctacatgtaataggaaactagttactaataagattctaacaaattatcctgatggtatataatatgatataatatgagtaaatgtttattgctacgatagtaacaagataccgtaatggtaaataattacctataatattagtaagtggtaaatggttaccccatagatcgtaatatgttttcttgactaaaaaaatattataaatatgtaaaaggtaaataatcaagaaactagtcgggtactcaatctaataagtttttcatatatttaaaaaaaatagagtaaacaatgtaaaaggaaaaagtaattgtagtataaagtataatgtataatagagttttttgataatataaatataacgtaaaaagattgtttaacatgcagcaagtgcactggggaaaatcaacaatgaccgatgcagaaagaagacttatagctagtgcactcttagacttgtcaaatgagagatttgttttgctatctgaggcatgcattcctctcttcaacttcaccaacacatacaactatttcatcaacacaaaactcaactttgtccaactatttgatgatcctggaagggaaggtcaaggaagatactcttccgaaatgtcccctcaaatatccttatccaactggcgaaaaggatcgcaatggtttgcctccaatcgaaagcttgctgtagagatagtgtcagactcaaaatactatccaatttttcaaaagtattgtaatcctccttgttacgcagatgagcattatatccccacacttatcaacattctttttccagaggaaaactcaaatcgaagtattacatgggttgattggtccaaaggtgggaaagcccatccaggaacatttggaaaaaagaatgtttcagaagaaattttggataagataagatttggtacaaattgtacatatattgatagtggtggtaatatgaagagtacttccttatgttttctttttgctagaaagtttttaccagaaacttcacaacaattgttgcgaattgcaccatggtacgtactactaaataatactggtgcttaatgatgtaaaaaaatatgttcaaagttacatatacatttatatactagattggtgtttcatgcaaatgcacgaattattagttatttatttgttataataaaaatgtcatatataatttaattaaataatcaaatcttatttcaatcgaaagtaattttatttaaagttctaaaattaaataaaaattattgatctcaaatttggccaaccaatagcaaaattgtatttagtgctgatgcttgccacgtgttacacaataagaataaaaagaataaatagagacgatattttatagaggtttggcctccttagttagcgggtaatgacctatcccccatttagttctattgatactagaaatagtaccccttagatcactatagtagtcggatctagagtggctctcttaagattacaatgtgagaactagaattggaaaatctcaagtgatagagataggctatgtgtgtgtgtgagagagagatgagatgagttatcagacttagagcttaagacatagagtttgagacttaagattttagggtttgactaatactctttatatagtagagcttacatccctaatatcccttaaaaataaataaataaagctcttatttacataataaattaataaagttcaactgactaaattgcccctcaaaaataggaaagttgctgatattttcccaatatttttgtgggatgttaacatccaatttgttgcttgactagctatccacagataaaagctacgcaccaaaaacctgccaggcaaaaagcttgatggccatgcatctgccagggtgcatgttggccagccacatagtatctagaagctggtcagcctatgttagccatagggccagccagggattgctggctagcccctttgaggtggccagtttctcatttcatcatcccttctaaaaactaggaccctttgggtgttgaagtgctaagtagaaagcctggtcttcttgttggtgaattgtactcccacgtggcattgatattggacacgtgcacatgccacataaggtgggcaaaattttggataacactttctcctcaagtcccgatacggacatctgtgtggatagagactttctagcatagtcgagactgatgtatccttaactctatagatcttgcagtatatttagccttttaaatgttttctcttgactgtctaatcagattccttagcaataagttaagaacattactcttgtgcatgtttttttctgttacatactacatggcaagtgagaagggatcccacaaaagctatataagctcatggggggaacttacttctcatttcccacatttccatctctctctacagaaagaaacttttgaaagctccttgttctctctagaggttgacaccccattgtcctccatctctcgagatttttgcatcattttgacgattcaagtttcccatcttcttcatcaatagtttctagtagtgggtaagctttaaaattctattattcactggtttatttgatttttcaacggttgttttgaagtttttcttcgttttgaatatttcttgattctcacgttagattgtaatctttttggtaatttaatccacatggtatttttgggatgtataatgtgtgatttcttgacaaaaaatcttcaattttgacctttgttgtgattcttgactctttgagtcacgaagaacatgtttgagttcttgaaaaaacacacactttgatccataacacaccctggccggccataggggtcttgttcaagacttggccaaccatggggtcttctcatgggagctgacccactataagggtttaccctaaagtctaactggcccatgcttgggtttagtgtaataccctaggattaagagaatggattagcaaaatcctaactagttaattttgtattattgtggaattatatta

SEQ ID NO: 20582 - DNA, 3921 bp, Cannabis sativa
aaatcgaatatgaatgcacaccaatcttaccataaatgggaaaattattttgtcaactaacttgccaaaaaaaaactttacaaaataaattttggtgtattttatataatttttagtatttgatagaaaatttaatatttaattaaatttacattaaaaaaatataatatttttatttttaccttatgtaaaacaataaaagaaaatgtaaaataatataacttatacaataattaaataataaaaatgaccaaaaatattaaataaaaaggtagaacacttatggtatgcatcaaattttttgtaaagtgactatattccaacatgcacaagtacaaaagcaacaaaaagagtaaagaatgtcaaagataacaacagtagtattcccactagagagcatgtcaatttcaaagaactcttcctaatcactttgaagttgactttgagtttttgtagctcttcttagtggctagaacaaaagtaaacccccattagtaggtggcactgcagtagtagggtcactaataggctcccccttagttaatggtgcttatgcttaaccagtattaacagcttcaacagcagggtcaacaataggcgtcccttgagttgagtggatggcgctgcaacaagacgatcatcatcaagacgggcacgggggatccacatggataggtggaaatccaagatgagtgaggacaatctcatgaaatgcttgggaacaagcctgaggctgagctagccaaaactctctgtgaaagtcatgaaagtcttgctgaagctcatgagcctaggtgacgatttggcatcgagcaaggtggcagagaaattaaggccttgagcaagcatgtcttgccttttccttgtctgatacatcgagcaatctttcataaacgatgtataagacaagaaaaaggcaagacacgactggtgccttggagagcctgcctaagcatttttggagccttcggtgaaaatttaaaaatgttaacaatatattatgacagcttaacaccttaaaagattatgtgtttaacttaggattgtagttataagattcactcaactccattcatttcattctttaaatatataacaatagaattagcataatgtaagcttactacaacatttttatatctacgtatctatgtattcaagtaaaattacagtacacatgaattcaacaacaaatagggtagatagaccagaaaactaccagaaaagtcactaaaatcttacattgaaaaatgggggttttgtactaaaggttactagattcttgcatgctgaggctgaggtatctatacaatgttagctgagagtaaaataagtctctgaagtgtttgaagagcccatgaaagtcatcttcttgactcaaatgaaattctgtacacgtttactaccctgcagaatgcttaaatacagagctacagacttgaaaagttctcaaatttgaaccaatagaaattcaaaatttgaaactttgttctctacatttgcttttacacaataaagtaatctctttccattgatggtatggtatatcaccagtaatctttgcaagagcattccccattgctaaaatggtggaagcgtattcgatctctcattattatgtctctatggtatttcttcgaaatcactttcataaaagcatggcagtcttcacaagatcgcaagtttttcacaatccgaatttcagtccccgggcttgtttttatgagtccaaatgcaagagcaagcttctcactgtggtgactcaactggaacgccttttcctcatcatcgacttcaagcaagacctcgtgaagtttcggctgatactcttcttctcttaatttctcttctatttcatccaacttggcatatattttttcggcttcaggatgatctgaatctcccactatgaactcatgaatcaccccatcaatctcaatcttactagcccccggtggcttgacaagtcctctcttgttcatcaactctctagttcttgccttatcaagccactttcctgctgatgcatacacatttccaatcaacaccaaattgccacaatcatcatttgaatccatctttaaactcttaagatgatctatcaaacgctcagctcgattcatatccttattaactttgcaaccccatattaaagttctccacaaaaccccatcaggtttgataggcatttttttgataagctcttcagcatcacttaagtgtccagctctagcaagtagatctacaacacatccataatgttgaattgtaggccagactccatacttcttgtgcatagtcttcaaaaatctgtaaccttcactcaccaaacctgcatttcgataagctgataaaaccgaagtcattgttctctcatctggttttatgcttagctcttgcatctgattaaacaagtcaatagcatcttcacacttcccatggcttgcaagcccggctatcatagcagtccaagaataaacatccttattaacactaatctcgtcgaaaactcgccttgcactctctatacaaccacatttcacatacatatcaataagtgcagtactaacatgagccttcaaaccaatcctctgctccttcacaacctcatgaactctcattccaacgcttaacgcccctgtctcggcgcaagctctcaaaatcgacacaacagtaacgtcatttacttcaactctgtcctcaaccatctcctcaaacaattgtattgcttccatgggtctatcattatcaacaagcccatcaatcatcacagtccaagacacaacatctctctcagacattttatcaaacaccttatacgcatgaccaacttcctcacaagcacagtacatgtgaatcaaagaatgctgcacatacctatctgagcagaaacccgactttaatatcaacccatgaagctgtttcccttgttgactcagtcccaatcgagcacacgacttgagaacaaacgggtacgtgaacttatcgggtagggtcgggctgttacgagccatatagaggaaaaagtgtagagctttgattgggtcggggctccgagaataggcacggatcatggtgttgtagtggaatgaatcgggggatgggatagagtggagaatgagacgggcataagtgaggtcgccattggaggaaagagctgagaaggtgaagatgttggtaaggctcttttgttgggttttgcctgttttgagtatttgggcatggagttgcagagcttcgggcatggagtttatctccatcttcggaggtggtggcggcgccgccgatgtgcatggcagagctccgatgagagtagaattcaacatgtaatctaatgttatcttatcatatctatggaggcacacagatcatgtgtaatattttcatatgttaaccaactttcactctcttgttaactctacttgataaaattttcaaactaaacatttgaattttgagatactaaaatttaggataaataacaccacgagtacttaaagttttgagtttgtaagctgtataaacttaatgattttttttagtgatataaatacttaatatttgtaaaactgtcattttttctattttcgtcaatacatgctacgttttaaatttattaaaaaaaaatttgaaagtaacaaatactatatatttccatcaagactataatttaaaatttgagtcttatatgtgtcatatttaagacaataacagagtcggtactgatgaaattggacaaaaattacaatattataaacaatgggtttatgtcgctaaaaaaaatcattagattgataccgcttataaactcaaaaatttagatacttataccactatttaccctaaaatttataaaataatttcatttaatttactcgatatatactttatggtcagacaatataatttatggttgtttct

SEQ ID NO: 20583 - DNA, 2241 bp, Cannabis sativa
attatattgcaatagtgttgtaatgtcttgattttcttccattgtaataaaatctctaacaggcaagaatcgtgtgtattgagactacaaaattttatcacatgttttgtaagtgcatatttgttattatgaatatttattaggaaaattatctcatattctatttttatttttatttttaatttacggattgggttgcttcgatagtttacccggtaatttatatgtgggttgttatacgaattttagttgcgatgtaggttgtcatgttagttactataggggtttctctgtaaaaaatcttgtgtattgaaaccacaaaattttatcatattatatatatatataaaaggataataaaaaaaaataagacctttaaataaaaggcttgtgcagtaactcaaactgtcacatgtttgggacggccttattataaaaatgatataacttattacaaattattatgtaaatggtaacaatcttattatatagagattaagatcatttccttataaggtaatagtagaacagggtcggccctatgttaagacgggttagacacgtgcctaaagcccactcattattttagggacccttaaaaaaatattttaaaaaatatcatttatctttatagtaaaagtttaatttttttttttttttttgcctatgatccatttcaactcaagatcagccctgcagtagaatatatatgttcagctcattactaaaataataagagggatgagcaacattatactcttgagcaattaaaaatgtgtaatatatgctattagaattagtcaaatatgttagttaattattgtttatagattgttataggttgttacttaagtcagcttaagttagttaaattactaactaactcagctcctctaattgtctatataatgtaaactcttgtaccattcttttatacataaatacaattcaagcattcaagtttctcttcttcttctatgttctctgttttcctcatatgatatcagcagtaaccttgcccactgcgtcaacggcgagaccttctagacactctcaagatggtgtcctccatccacaaatgagcaacctcaattggagtccaatcctgatgcaacttctgttcatgttcttaattcctcagttgctgtaatacgacatcaaagctcaacaatacgatctcaagttgacaatgaaatcctcgatcctgttcaatcttctctagatttactagctggtgacattcctcatttcactgctcctcgacgaccttcgtctcttaatcatcttgctcatgaagatgttctgagtcccttctttcttagtaaagctaaccaccttggattaatccttatctctatcgtcctcaatggtgcaaactactaatcatggaaacacgagatcactatgtcttttgcaacaaagaacaagtctgtgttcattgattcccttcctcaatcaacagttagtaatcatcttctcaattcttgaatttcttgtaataatatggtcatgtcttggctagtaaattatgtttcttctaaaattaattgctcaaagcatcatgtattttgatcttgccaccgttatgtgacatgatcttcaagaaagattcaatgagggtaatgaacttcgcatctttcagctacaaactcaattcacccgtttgcagcaaggtgatcaatctgtcacctcttacttcacaaaattgaaatcaatttgaacaaattgaaggaattccaacccaatacaagctacacttgtggtgcaataaatttttttcttatagttcttgactagtctaaacaagtagtacgcttcaactcaagctcagattctcctcaatgagcccatcacgaacttgtcttggatattttctacgattgttcaagaagatcatcaaatgactcttggctcttgagatttatctactttggcatcttctgttcgtcctttctcatccaacaatccatcacgctcaaagaagccttcacctttatgcaccaattgtgacaaactaggccattatgttgacaaatgtgtctttaattacatggatgactaggaaaatgaattaataaaaagtaatccaatctttcttaacaggttgtatattggtttccttaagggttaattctggtactggatgatagggggtgtgcataaatcggtcaaatccaatgagaaccgaccgatccaattacaaccgaccgccaaacattggatattcaattgtgatcagat

SEQ ID NO: 20584 - DNA, 1818 bp, Cannabis sativa
catgggtttagcagtcttttgggtgatggcctcgggccttcctaccccgtatctgaatggggttaatactcgtacgatagcctccaaagctggtaagtttgtccgtggagatttggccgagactaagaccgttgttaggcggggatttttaaagtttcaggttgagattgacacatctcaccagttaatttctagttttttccttgatataaaaaggggaagaaaggagtggatccaatttagatattttaaactcccaaaactctgttataaatgtggctatcttgggcatgacaagaagacctgtttcagatccacggcttttgcttatcctccccaaggggcagcagtccctgcttatggtccatggatgagagtggaattggcggtgtatagctattttaacactaggaatcaactggatttcttcagggaagatgctaccagaaactctactccggtgaggcaacagatggaaaatgttttcaggagctctactccggtgatgcaacggtcagaaaagggctctcaatccaatgacaaaggaattggactgatcactgataacctcaaagcgacagacggcagtgatgcaactctgaaatacaaaccagttaggaaggtgatcagagtaaatgaaaagggtccaggagctattttggggaaaaatttgaaagttgtggagagtcaagccgtttattcaagggagaaaggcaagggtttggctgttgattctcctcattcgagaagctatattagggagaggaagactcgttcagtctctcctagaggattgcggtttcataaaaaaggtaattcttgttttttatctgaggctgatattcttaataagtttacctctagaccccctccaaaccctgctgataatggcatccttactaccattatggccaatattgggcccacttataatcagatgattgaaaagccccatgcccaattatgtaattctagacagccccataaacaccctgagcccacccacttcccttggcccatttatgctgagaaagttggtctaactgaggagttgatgggccctccccaagttgacaaatttgaaccaatcccaactatctttcatgacccagaagacgttacaaagctcattcacccctgcccacaacagaaaaaacgaaaggcaagtcttaccttagtcccattcgtccaacacctggaagaaaataccatggaattttcctttgaggtgcctcatctgccacctttctcgtcttccttggacaccccatttaagatgggatctagtgcttcttcttcatctgtgaagaacgataaaagaaggaaaaaaggctctcgatcaaagctctctggagcaaagcaaaacaacatacaacagctagcttcatcataagacgatctaactcagaaaaaccttattgattccttgaatctagtggaggttcaagtggaatgttcccacgatttaactatgggcgaggaggcggcccttatcaagcccccaacggccccatgaagtgcctctcgtggaattttcggggcctcgcaagggacccgacatcccaagctttacgggcttgggtaagaaaatataagctggattgtattttcttgatggaaacgaaagtgaataaaagaagaatggaagatttggctcaaactttgggttttactgagatagtgtgttttggtgcaaatggtttggcgggtgggtcgtgtttgatgtggaatagaagtattaatttgatagttaatcatgccttggatggtttctttgtggctacgttatggttttcgaatccaccaatattggaaatt

SEQ ID NO: 20585 - DNA, 4560 bp, Cannabis sativa
gggcattgaaaaattgtacagggtaaataatactctagggagatacctggctatcttgaaaagctaggaaaagtattttgtaattgtctttcatacatcactaataccagactttcttcttcttctctatggcttggctatttctgatttgagcgtatagggaggtgactgtgtgtgcatcaacatgcatgtgagagtgtgtcatgtcttgtcaagtataactgtacctttgacgaggaagccaaaaaggcagaatgcatcaaataaaagacagaaccagctactgcaccggctagatacaacttcagcaagaactcagacccaaaaacatggccaagctgtccagggtaaaaacagatcagatgtattatcttgttgaaaaacaatattacaatatcagacaattaagtcacggtgtttagattacacaaaggtaccattttcaagccacatagtatgaccaaataacagtaatataatggtgtgccccagctagggtcttcaatgaataagagatataattggcaaagtcataaagaaaattgtgaaaagatggcagtagaaataactaggcaaatatgatagttgataatgcatgttaaaattataacacacaagaacatgaggctttgagagacctcacttctcccaagagctactgctcaattccttacaattatcatgacctcctcatttttcttaccatcctatttatacaattagattctagctcattaccctttttatttcatatattctaccaatcctgggtctatcatatgaatctaattaactgaaagcactaaaatttctgaaatatcataaataggatagaagaaactgtgtgaccataaacaatatcataagaaattgtttccactcagcaaatgccacaagaacaattatagtgttgttcctccaaaatcacactccttcaatagtacaaattaagcatagatagttcttctttatgatcacaatttattaaggttttattaattttataacctcctatataataatgatgggactcctatccacaagcaacttatacacagtttcgtcctatcagtgagcaatatgaagttgttctcacagaataaaattagatttctttatatatatatatatatatatatatacaaagttgctttaccaattataaaagaagccacaatatatgcacaatatagtgagatactctggctcaatattatgatagaaaataactcaaaatttgcagcaagccatttaagaatagccttatgtatgcaaaactgctatctatatagtataacgaatcagctaataaatttattctaaatacaatgattcccaaagaaatacagtacaaaaagagaaataaatggataaaataaacttagaggaagagaagagaggatacatgattcccgaagaagtacagtccaatcatgttatgaatgatatgctccatatcagtatgactgaaagcagaagttatcaaagtatgcagacgtcctcttttaaagttttccactgaaatctgtttggagaatatcagcaaaagagaaaagaatgagattgggtagatgtgtctatattctatgggactattatttcttctcagtgacaatataagttgaagtgcatcaactcatacttaacatttttcttactcccaaacaccacacaagcactgagttgccaattctgattctgtgacaacatcgtatcatcgcaagagagattgcaccccagataccagatgcagaaataaaacatacatagaagacatttacattcacaaatttgtaaacaagaactcacagtgaaattgttcatcataaatctataatctgccaccctccatagcagaaaaatagcgacattagctataagcaagcccagaaccatatcattaggtgttaacccacttaaccatgatctcctgtaaaatggagattgtgagttattcacatggggaaaacacatatagactacaaatttccaataaaatatataagctacagatttcacatgctactactgtatccattgctgacaaatgaaaatggtttttttttttagaaaaaaaaaaaagagaaaggatcctcttgtcttagacaagaccctccccaaaatgaattgaaaagcctcacttgtggcagaggaaaacaaaagttacaatttcaaacaaaccaataaggcctaagccctatgttactctctaaaactgacccaataaataaataaacagccaaaacaaaccagttcgaaacttcttactgccattacaaaattgttttccactctctacataaatctaaaaaggacagatcctcaaagtgtttggttctgaagactcaagtagctgtccaaaatttaattttctcccacacgcccacttctgagttaacgaccccttcaaatattctggcatttctttccaaccatacagcccagattgttgccaagatcaccgttcaccatagctttgttctgcgtttgctgccaattaatttggaagctatcatttgtgttacggagcttggcaaaacccaagatagctcgaacttcattagcacattgatccataagcgtcgaataaatttgcactccaagaataggtgtccaacatcttccccgtccgttgccttttcaactaacacaccaaccagaggaaatgtataggaatggcttccttttttgcatcttatcgtggacattcattttgtctaaatacacaagccacccaaacactttaactttcgatgggacacaacttttctataaattcttcgtccaaggcaagcccctagccgttggatttgataccaaccagcaaaaggctgatttacaagaaaaaactccatacggatctggcttccaaattcgactatcatccaaggtattcaatatttctacatgttccactttattcattaacgcaataagacttggattctctctagccattaagttccttctaaacttaaaattccaactctccacccaaagacctggtaacccctcatcaacaatcagatcctttataggtacgttccttgccttagaaatcactactaagttagggaaagcactaagcaaagaagaattgtcaagccaaacatcttcccaaaatcaaatcctgtcccctcttcgattttgaaatataccaatcccagatactcatcatagagatctgaaatatccatccacgggcctggcctttaggagacaggcgacttcctttcttagagtcccagtaattatcagctctaccatatctacttaccaccaccctgtgccataacaaattctgtctaaaggaaatctcctcagccacttcataagtaaacctttaattctcatatccatccttccaataactaatcctccctcatttcaaggcatgcaaacttcctcccaaaccactaaatgatctccacctgtagactcgctaccttcccagaagaagtctctcatcatcttctccatagatttaattactgacttggacactttaaacaatgataggaaatatatagagagaaaggatagaactaaatgaatgagagtcaacctatttagataaaaatgaacatttccatccatcgagtcttttagcacacttgtctagtactggttcctagaaactccattttctagatgaaccccccaagggcatccctagacattgcaatggccaacttcctacttcacatccaatcctagatgcaagccttgagacaatcctctcctccatacaaattctcaataattgacttttactcatattaacctttaatccagatatagcacaagatatagcacaaaatatttccactaacctcaacaatctgtgcaacgagttcgcatcattgggaaagaatatagtgtcatctgcgaattgaaggtgactaacttgaactctctcctttcctacctcaaatctgaataaattgcctgagctgactaccttattcatcatcctcccgagcacatccgccaccagagtaaatagaaaggagaaagtggattaccttgtccaaggccccacgacccattaaaccttccccttggtctaccattgacgaagaccaggaatgaagtagaagaaatgcatcctttaatccatttcctccaagtttccccaaatcccttattgcacaaaaccaagtctaagaagtcccactcgactcggtcataagctttttcgaagtcaattttgaaaaccaaactactcttacctctaattctacagtcttctactgactcattagcaatgagaattgaatccagtatttgtcttccttcgacaaaggtcgattgagtttcgagaatagtatcatccagtacaaacctgagtctaattgaaagcatcttggcaattatcttgtagacaattgttataaggttgattggtctatagtctctaaccctacaactgctaagcttctttggaatcaggcaaatgaatgtttcactgatgcttccttgaatggtgccctctctttcaaatgacttaacaacttccataacatcttctttgattacctcccattgagactgaaacaa

SEQ ID NO: 20586 - DNA, 1560 bp, Cannabis sativa
gggcacaaaacccaacaatatgctaaaggtttctctctttaattcaaaaatataaagagagaaagtggttacatggggtgtaaaattgctaatggagttcacgtaatttatcatatgctatttgctgatgatagctattcttattgaaaagtgtgaattaacgtataaaaatgtcaagtatgtcagtcataagttgttgccttagagttaggagttagttctcattttttatgggtgtgatgttatgtaatttgttactgatgtattttattaaaaagccaattggcacgtgagtaaaagataattattcttttccctacaactacatggtatagagcctacatacctagactgtcgatgaccctaaaaaaccctaaacacctcttctctaatggctaacttaagtgaagacactaccaataataatcctagtattatcactcaaaaaaataccaccacaactgtccaacaaactgctgccattgatgtagttcattcatctatgcaaattattgtgcatagattgaatggacaaaattatctagaatggtcacaatctgtcaagctcaagggaagcttggattcctcactggagaaaggaagcaaccaaaaatagatgatgtcaggtatggagtgtggaaatctaaaaactcgctggttatagcatggttggtcaattttatgtatgcttcaattgcgaagcctcacatgtttatgactacagctaaagaagtatggtagtcggtatgtgatacttattctaatttagagaattattcttaagtaattaagttacaaactcgacggtggcaatccaagcaaggacaatgtagtatcacaagctattacaatgagatggtggtttggtggcaagagttggacaaatataatgacgatgtttgggaaagtcaagctaatatgctccaacacaagaagcgtgaagaaatggatcgtgttttcatgctacttgttagaattaacccgaatatggatgagttgaaaagaaggattcttggtcgcagacctttgccataaatcagggaggttttctccgaaataaaggtagaggagagttgccaaaaattcatgtccaacaatgaatcatcatccattttaggtaaggaagcttccactttatttgttaaagaagttgaaactaataatgacaaaaagaagaagccatggtgggatttttgcaagaaggaagcttccagtttatttgttaaagaagttgaaactaataatgacaaaaagaagaagccatggtgtgattttcgcagaagcattagcacacatggaatacttactagattttacatggaaattcgcctggaggtaagccaataagacttggagcgcctcaattcgtggctaaatctacttcagaataaagtgttaactcagggcagtctcctttcaccaaggaacaagttaaacaattgttgaatctgttacattctaaatctcagcctttcttgtttccttgttcagcatggtaatttgtgtttcttatcttcttctcttgtttgtatccaacctaaagttgggaatattttacca

SEQ ID NO: 20587 - DNA, 2747 bp, Cannabis sativa
  modified_base (2698)..(2706): a, c, t, g, unknown or other
tctctctctcagatatctctctcttctcactctaacttctctctctactgtattgtgtctctctacttcttgcccttcttcttgtatttcttctcttgtgattctctctcttgaaacgagagtagtagtcctctttatatagaccaatggacccaagaaaacttgctgtccttcttgacagttaagttagttaaagattaactaactagtcgaatggttgtttggggtttatggaataataccacacgaaaacttttatctcaaaacctaaaactaatccttaatacttttagttggaagtttgagaacgacaaagctcccatgattcaagttactcctctgacatggaaggttgagaagaatggatggggagggctcttacagtagttgtggtacccactgtcgaaggtcaaaagaagcagttgattcagtccatggaagggatcgtcaaaattgcttttgtggcattccatgaattgtgagaacataatgggaggaagcaaacccaggccaaaattttagaaagtgcaaatttttaaaaataaggtttagatttttagccctcttgtttgattcttattactgttgattataagaaaacccattatttatttttgattttttttttcaaaattaaggagggtgtaagtaccgtgaatgggtggatgttgaatcttgtaaaaggtgcagacaaataatttcgagtgtcttgacaaagataaacaaacttgaaaattaattgatgttgtatgaagtaaatgaagatttgagagaaaatgaagctttgtgaaaaatgaagtacattacagaaggttgtaacaaggtccatgagtgtgattgtggtcataaatggggtttgaaaaacttgaaaataaatctgacgataatttgtgtttttgcttttttattttttttggataaagttgtgttaatctctatgtaatttaagttttcagtggtatgtaatagagatatgatacttgtttagttgttgttgttcagtttgtaatggcatttaaatgtataaaatatagtgtttgatgaaatttaagtgtgcaatatagctaatttgatcaaaatagtagattgacattgtgtttttaagcaatttactggagcaaatattgtgcctcaatctttcaaagattacaaattggatcaaaatgatgctttaattctatattaataacaactattattacatcaaattcattacaacttaggccaccaatgtttgtaatatatattagactttgcaggttgcttaatttgtcaaaactcgtataatcacaaattggatcaaaatgatgctataattctacattaataacaactactattacatcaaagtttattacaaaatatatcaccaaattctgcaatatatattaaattttgtagtctacaatatatattggatcaaattttacagttggctcaatctatttctcatgtcttgtccattttaaaacaactactattacatcaaagttttttttacaaaatatctgccaacaaagattcattaaaaatatggtttaatacatccacttttaaggtccttttatatcaaaaaagtcactgaattcaaaatcatgacaaaatgaaagtccaatagctactatgcatttggggctgattgacttgaacttacttctcttgccttctgcttgtttctctcaatgttcctcttaacagtttgaggatcaggattatgattgggaggatgacccatattattcttttggggaggttattgacaccataaatgataactctatgaaaatagagttatttagctctttttgtccattaaattaattttgttctcaagcatttttagtttattttagtgactttttaattagttttacttaattttgtatacatattagttttagtatttttagattaattttagttaatttttgtaatactttatcaattttatttagtttcccaagttaaaaatattattctcaatattatttatttttgtaggaacttaaatgtacattttgggctagttatcaaaattgagataaagtacatgaaagatgtttcatcaaagtcaatggactcattaaagcccaatactttgtgcaaaatgattattgttatacccaaaatttgactggcactttagaaaaggacacgtgtcaactcgagagaatacgaatcaacaaatataatagtaattatattaaacgatattaaaagggaataactaattaaatgcaaagctggtagagtatatttacatcttgctaactgtaaagtcttaagcaagacaaggatatacaaactattgtctcgcgcattgacgagaaaccatttaacgtcaaaagtacaaaacgaggcactaacctcgatacgtatgaagaaaagtaagcgagacatgttaattgttagaacacttagtgtaacgccctaacaattaggcacgctacgctaaccaataaagaaaccataatcccctaatccggaattactagatagataagcgcgagaaatttaaacttttatctaaaacagaatgaaaataaaacttgtaataacttcaaactttaccataaaaagtgatatatttcgggctcccaaaaatattttacaaaatattacaagtttttttcactagggaacctaagcggcaaaattagagttataaaagtgcatcactggtagaccccaacccgcnnnnnnnnntgtggcccgaacatgtacaagcaccgccaagctctcgcact

SEQ ID NO: 20588 - DNA, 2926 bp, Cannabis sativa
ttgactgaagttacatcaagctaatatatttgatatgtcaaaaagttgtaatcatgcaattgaaagttgcagaatcattacaatgcatattgaatcagataaaatgcatttcaaaaatgtagtttcaaatataataatatgggaaactgaatgaaactacactcacatattaactaactaatagaaacaaccattagcccaaaacagctaaattaatccttataatattatcttataactatatgtgagtggatttcaagaacaatttcaagaagggatgatgttgttcagtagtgtgtttaaaaagctcgaaagtgtcatataatgaataattaccatccaattcagaaccggatttctactccatggatgtgatgtgtgatgaaaaacaaaagttgattggcgtctcatgaccttgtttatttttgctgttaaacaaattaagaatatttacacataatatacaaagtgttctacataaaattattggttaaagtgaaaaaaaaaatacaaaggaacataataggcagttgtcttagctaagagatagcaacattatgaaaatccactaaaataggctgtaataaactgcttgatatgaacaagagattagagtggacaaattgcattttcaattagcttaccaacatattaggattatgtatcaaaactgataacagaaattcaacttaaatttgagagagaagtactagataaaatgtgtaccttgcaaagtagcctgattttcccatttcctccaactataaatctacaagaatatgataaaataaaccatctatattctgaactacactcatttcatgcttaactcaaaccatcaagactacaaaccttgctcatggcgagaccaacagccacacaactatacaaaacatgagtgataccgagaacaaaaaggaagcggtgaagctgctcaagtccctcgtatgaaacaaatggttcgcggccctgagtgaaaccattagaagtatttaagagctagttatacaaatagactaatggaacttttgaaggctgaagataaagtttacctcaccacattgatgagatgaatgtgaacttattgcattttggtgagttgttgtctcgttgtgagaagagaaaggagattcaaaatgagtgtgtccactgatctcataatctttctcggaacaaatatagaaacgactagtgaaaagagatgaatctacacatatctcagaaatccatcttgcacattgtgctaaaagtaatgatataagtccaagtagcatcaactctacaaaaatacaaaaaagactcaaaagaagaaaagactcagcagcagttcacatacattgataactctttatttgacaactcaccttccttaatcttctccaaagaggcaaagagtgcttttcttctagtcttctttaaccactgtacagaagaaatataatgataacgtgtaacatttatttctcaagtaaaatactatattataagctattcacattaaatgccttcaaaaagcctatttactcataaacatatcaaatatatcccaagtatttttattctttttgtctttgacaaataaagggcatacctaccacatttaaatctcctaatttatgtgctcataaaaagtaccaaaaaaataaagcatattttatcaaatatttgctctcaaaatcctctccatttcaactaaaccgagtttttcacaaaaggaacctctcaatatatatattcagctctaaatcctctacattttcttgcattttctcaatggccaaacacagttcgtggcaattggcaactagtctttcttacatgaacttgtacaatcacaatgtactggcatgttttgcactttctgttttttctcaaccagtcagagtaataggattgactattttccaatctctcatataagtttataaagagtgattttcatgtgggtcctaaacgtaaatcattagttgatcaacagaaggaaaagaaagaaagaaagaaagaaaataaaaagttcctttaattttctctttagtcttttcccgaccagacttacaatgctgaaagaaattcagggtgggacccaaaaaaagctctaagatcacattttttgaacttgtattactgttgagtttctcagcagcaaccaaacaaaactcattgcaacataaatctttgtctttttttttaaaccaaagaaaaagtaacaataaatactctttgagcttacccttccaaatctgtatattgacctttctaccaacaagcaaacaaaaaccatgactgtaaccactgaggccactgagtaagtgggagtctcagccaatgacctttgctgctgcatcaactcctccattgctcaaatcagcagcaacccattaactcttacaccataaactcaaaagggtacacactagaaagtcttggaactttccctagaaaatgaggagatgagagagagagagagagaccccttgggaggagaaagttaagtgaaagatccaggaagaaggggaagtgagtgagatacagagttagtaaaatattattttgaaattattattattatatatttaatggtttaaataaaaagtggaagtgaacatggttgtatctggattggatacattattaggaaatgataatacatggcattaaggaagggggatcttattagtattattttattatggttagttttttgtcattgtctgctatttctaaacaagcccaccatgcaaactttgaatgcattggagttgatgcatcaaaggacaatctcatgtgttattgcaagtccaacctactcacatggggtcagagagagtcggcaactcgcttcaccatgtctcctacaagtaacaactctctctatacatatatctagctccgacaccgacttacttactcttacgaattattcctg

SEQ ID NO: 20589 - DNA, 5884 bp, Cannabis sativa
aacatgcacctctgctcttcaaacacgagatttaccgcagtgcggagttcctcctgatcatgatgtagggtgttggtatgaccctgcatgagtccaagagcagtagggaggttctggatctcagtgtcatctccaatggttgtttgaatattggtggcgggtggaatggttgtactatgaacgccctggtcggctgctgaactggtattcccagtctcttgcacaccaggcgcaatctcatccacaggagtcgtcacaccgcgacccgtagttgatggctgtccgggattaaagactggcggaacccttgtgtttcctgggttttgtagtgcaggatccaccacctgtggattcactggatctaccacgcccctacgagtctttaccaccatcgtacttgtgattaagtttactataaagagcgactctcgagttcaactctcaatgaaagtaccaaaatattgacctcgctcttagccaatgacagtgagtctaattttgtaagcgataagtagtttataacgactgaaatattataaagtaaataaagacacaataattttatagaggttcagccccaagcaattcgatgagaattttatagaggtccgccccacagtaaggatttgcaccaaagtcatgccaggtccaattctggctagccatgcacctgcaggatgcaggctggccgacgttgtgttgtccagaagctggtcggccagcccccttgaggttgttggtctgtagcttatcgtcccgtttgagtgacggaacctcctgttgggagggtgctaacttgataatttcaacaaatgatcttcaacaacgggttcttcaaagggttgagaggaaaaagaaaggtttttcttttttgctctagtaatatgcaggaatgaaaatggctaaaagagtgtaaattcaaatttcatcccttatataggtggtaaaaggggctgatggtaatttaaaatttgaatttttgggtttccccccccccccccaaaaaaaaaaaaaggaaatttagcactcattgaaatagtacaaacatcatgcatgcggtgtcacacaactttcattgtgtgactcgaggtacaacttttaaagcgaggaattaaatgccctagacatcgaagggatgttcaatcaatcatgtctgatcaagggtaaaagttggacacgcgtcaacaatctaatcaaatcatgactaaataagtccacgtgcgaccaagaagctcccgcgcagacttggggagcaatgtaatccaaatttctacacaaggtgatgtggcgtctgcttgggtgacacatgatagatttcataacttgaacggaagattcttctcacatgaaaccatgcatagagatctaatgctcagagtgagaaggagctaaacatccaaacacggtgtacaagaacatccaatcaactccatcatgaaggcagtttgcatataccaaccagaggtcacgagttggatatctttagagatatatcgtatatatcctcaagcttgcaagacacgataatatccctaaattcatgggatagattcgtagtaatgagaaagaaagcaaacctatctagtttcccattttacttattgtaattataggatgtaaacagatttgccattatattccttattgattttgggaatcatttcacaattcagggacatgaattttattcagagaaaacacacgagagatgtctaaattcaagaataaaaaacttagagatcattgtagagctttcgagagggatcaagattttcttcttcatctactcacaagtcaatacaactaaaggggagtaggctattaccatcataaaggggccgaacctctataattttggcattttctttactttacattattcatatttattatttaaattattcttaaaccgctttaatttgactcactgttgttggccaaaagtgaggtcaacacttataatttttggaaataagttcaccttccttgatctcattccacagaaaccacttcaattgatattacattttgagcctagaatgacatcaagtgagagactaccagaggaactcctacatcaaaatagagaagagtatacttacctattatcgaagcgagcaaaagagagagcatggtgagtgttactaaagacattgaggacttgatacttgatgttttagagaccgtgggaggccaatctgatgaggttagaatcatcatcgagtgatgccacgtcagagtgcataaattgggataataatgctaaaacaaaacaatcatctggggatgctttaacagcttgatcaaagtttgctcttcaagcatccttgtggccttgccatataaagtctccatatatggatagaacttttgcatcccaaaacttctgcatcatagtgcttgcagcctcactatcaactccagcagtacattcaatagacaatctaattgactgtgtatgtttctaataatgatttcttaacaaatcatccattacacatgattggaatggaattccatgtccttgtatatgtttgaatagtaattcaaatttttcaattaaatctcatttaatctttaaatttagtaatgtaaaatcaaaaacaaatttttcattcatttcaaacttaattatagaaacatcaataagttactataaaaaaaagttacttatctattatttagtcaaaataaataattaatacatttaaacttgattttagaattatactatgagcattgaagtcttttgttaactttgcacacataagtttaaaaattaaataaactttatctaaagaacataaagtgttcaaaataaaattatttacataaaccaaactttaaaatttagaacaataaaactaaataaattgtctttaaaatttaaattaaagttgacttcttcatttctcttctaaaattttcttccatcacaaactttgtagaattctcacttcttagaatcattttcatcttctattcacaaatcttcaagcaagagagaaataatgtcagtggtttagaataatttattccaccatcgttaaataagtcatgaagaaaagcaaatcttatttatctttctctctagcttcgtaactctatcaaaatgtccatcttgttagcatgagcatatctctcataggccaattggtcatgaacggcagtatacttattgtgcattgtctttcaaatgtcacaagcatacactaagtagtcatactgttctcttatatcttcattaaatgaagtcaggaagataaacctggcgcgaatattatcattctaccatcagttataatctctcctgactgcataactataatgtttacgcaattcaatccggggagtttcaacagagactaggtgaaatagattttccttttgcagaaggagttctattttgattctccatttagcttaaaattcaccatcaaactcagtcattttgtaatagagatatctttctttatttaattatcattctattttatttgttattagactgaaataaaatatcaataatacgagaaataagcaatataatataaatacaatataagtaccataaatgagaaataaatgtcatgcatggaatttaaatataatgcatgagcacacttagaaaaacacataaaacaatttagaaatttcatgataagattatccaaagattaaagtttttccttaggttcggtcaaattaacatcgaataatctacaagacttgttcttgtttttattaattacaaataaaatagctcttattttccttacaaaataaagtactatttatttggtcaagtaatattcccgaatgtcaaagacatagacatgaatttgtgagtgtaacctattatttcggactctattacttaacttagtagcgtcactctaagggtcagtatcgcactaaactacataactttatcctatccataaaggaagctaaccttgacaatgtacggttcaacaccttccttaaagggacaaaaacaaaactgtctcgagaccctccccatactcttggtgttggactaataatggagaccatgggtttcataatagatgacaaccctctcccacaaacttttttaaaatgtatttgcctttattaaaatctctttagaaaagttgattttaatcattaactagttgtaatacattaattaaattactataatatagatttgaaatatcatattactatgtaatttttgaaaataccatattttgaaaacattagttaattatgtgactaactgttggagaaagtcacttggtgtgttttaccaagttattaaattattaaactgaacctagtactttatgtaattgatttcaacaaattcaatgcacataaaatatagaggataatcttaaataatcatgtttctaatatgagatgcatgattatcaaaagacaaactgtgtgggattttatgtataacaattaaatatgcatacactaacaattagcaaataattgatcaaatattaatatgtgaggcgagtaaatattgggtatttctaaaataacaagttttgacataaacataaaagaaataaactacactaagaataatctctctcatgaataactcttctttgttgttggttgatgtagctttaggaatttcacaccatccttctttgaccattaatctaccattaattcactattgtgtaattataagcactactttcgattactagttaatttcattaaattaatttgaaccccttattttatctttattaatagtaattaaataatttaaatttatctaattatttaaatcaaaaatattttaaaatatttataaaaaaattaattattaattaatttctaaaattaattattatttacaatatataagaactagggaactaagccacgctccgtgcagtgttgtccaatttttgtaatattttatatatattgtacttatactgagtgatataatttaaaatataacattttgatgtgtgttattacaaataaagtaatagtattgaaattagaaacatagttcactatttttaaaaaatataaaaaagtggtcattttgtgacaaatattaaagattgtgaaattaacaataaaagtacatgtgtttttataataaaataaatataaaagttaaccatttctcagtttaataaactgatcttgtgactaataatgtagacatttttaacagtctatttagatttttttttgtttaataaaaataaataatttaagtactatgtattaaagtttttatattttgttttgtggtgtcgttagaatgtcttctccacaaaggtaaatgtagtataatagctacaaaaggggtcatcacaacattacccgtttttaaaaactaaaaattcagggattatataaaaatgttagggataaattttctatatgaaatgtttagataagaggagtgatttttctcggtcaggcttgtctgaaaccgcgtggatgccgagtgaatccccttgtgcgcgcgtgtgtgcatcagttttagatatttttatccaaattcaaaaaatcataactaattcataaaaaatccgaataaagttctgaaaaagcgtaaattcattaattttttgtctacttttcagtaaaaatattttcagaacaaagcaaaaaatattttataacatacattacgatttccatacaatcatcaaactatcatgaaatcatccaaatcaacacaaacatcattttaaatccatattttattaaagtaaatcattatcatagctctagggtcagttgttggagtatgttttaccaggatctagatttactatcatttatgttgtttaacatcctaaatatgaatttctaaaataatgtaaattaaacacatataaag

SEQ ID NO: 20590 - DNA, 3187 bp, Cannabis sativa
  modified_base (2530)..(2539): a, c, t, g, unknown or other
tttttgacatggcggtcggtttcgatttttgaaataaaaaaataatttaaccaaaaaatcgttaaaactaccaaaaatcacctaaaactgccaaaaattgtcaaactgaaaaccgccaaaaatcgtacagtcagttatacggttataatttctaaacggattttcgtaaaataaaaaccgtaaccgaccgattttcaccgctacttttgtctatatcaaaatagcaaattctttaagttgagaagaatactttctctctcttactttttgttttcttctcaaaagagcaaaaataatattttgatatgtttaacttgacacaagacgtggtgagacttttctctctacctaccaacatagtaaatactttaagttgttgagaggaatactttcactcacttacattttgttttattcccaaaaaagtaaaagtaatacttataacgtttgacttgacataagaggtaatagctaagagtataagatataccatattaagggtatatttgtctttaaaaatataagatatatatacgtgtgacacgtttatcactttcatttcataatagaattttgagtgttctgccatggctttaccttactcgaccaaaatgcttcaagtttgccatgtccctccgtttacggcctcacccgaatccaagaaacacttttctctacccttaacatacttcgataccttttggtttagattttttccagtaaaacgtgttttcttctattctctcccagaaaccaaaaacactttcttcaactctgttctcccaaacctcaaacactccctctctctcacactccactactttctacctctagccggaaaactaacttggcctcaagattctcccaaaccactcgttctttacacaccaggcgacgtcgtttcagtctccatcgccgagtccgatgctgactttgacctcctcacctcaaacaatgctttcccttcctccttgcttcgtcctctggtttcttctttgcatgtttctgaaacaggggcttcggtaatagcccttcaaatcactgtttttcctaatcatggattttctattggcatcacagcccatcacgccgttctagatgggaaatcatcgatgatgtttttcaagtcctgggcttacttatctaaacagaatcctccattgttgccggagctcacacctttttatgacagaactgttataaaagatccatctgggtttgacatgaagttcttgaattattggattgggaatcctggatcaacttcctcagattgtagaaacaacccaaaactgtatgagttctatcaatttccaagctcgggaggaccctccgacttataccgagccactttcgaactaagccgctccgatattgataaactccggcaaagggtatcgtctaattgggatagttcaaaaccagagcttcagttatcttcctttgttcttacctacgcttacgtcttctattgcatcatcaaagctacagaaggtgatgaaagtaaaaggaaagttattttaggattcgtagctgattacaggaaccgtttgacaccaccggtaccggaaaattacttcggcaactgcgtgagatccaagttcagtgacgacatgagggagcaaatgcatggtagcaaagaagattcgttgactagtgtggtggcgaagacgagtggtttagtaaaagaacttgggaaagaaaaggatttcaagaaagaagaggaattgttgttaaagatgacttcaaaacagtctgaaatttcttactttgttggagtagcagggtcaccaaaattcgggttttatggcatagattttggatggggaaggccaaagaaggtgtctgtggtatctttaagtaatgggtctatttcaatggcggagtgtagagatggaaatggcggtgttgaggtaggtttggttttggagaagtatgaaatggatgtttttggttctgtgtttgtagctggcctaagcaccaatataccttaaaattctgtgattgtgtgtatcaaataaaggccattttcaacaaataaaataagagtttactcacttttcactatgttgcatagccatgaatcacctgcttaatggaattgagctaaatacacattgatgatccgcaacattaaaaagtttatttttatatataaaatatatgattaagtgatatgttccatgcgtttgtattctcagtcattagatgtttcaccgatatttttgaatccaaaataatatattttgatgatcacagataaaaaaaaatgcttcaagaaaaccaacttgaaaatcatagcagatagagaatcaagaaagcctaaaactcttgtgattttaggaaacataatatttgtgtcatgacagatgtgtttttttttttttgagcgagagggagaatgtgtcatgacagatgttgaagaaagaactctactagttaaaatcttatcatcaatcatttaaaaaaaaagagaaatgttaaaaggcactactggtgcctagcacctcttatgtgtcaatatcgctannnnnnnnnntaagtatcgggtcccatataattattataatagcttttagagagtatcgctaactaatcacaatgcgacatgtcgagaaagtactaggcactggtgcctaatagcaatgctcttaaaaaaaaatatacggtgtcctttggtaaacatcttcaccttcggaggaagattaacagaccatacttttttaccaaccacaaaactcaattgaggaagaagcacgatcgacacccaagttgtgaatagcaagccaataactattcttgacatataatccataattatcatactcccagatcaatttatcacgagtcggtaaagaaggtcaaggaatagagaaaattgttgcaacttcatcttgagtaaagagactgttggagtttgactcaaatgactcaaattatttatttttttttatttattcatctatatatgtaaagttgtaatttatttttgggtaattattaattgtgggaaaaagaaaagtcttggtgactaagttttgatgggtcttcttaaggaagatttggaatgtcttgggccccgtttgcggaagctttttaaaaagctaaaatcacttttggaaaaagttatgagttaatatgtgtttggtaaaatttaaaaaatagttttttcaaaaatttaagtgaa

SEQ ID NO: 20591 - DNA, 1954 bp, Cannabis sativa
taattcttagtattcccttatcttcaagtcgggtttgtgactcatggttttggcatttggaaaatactggcattttacagtcaaatcaacatacaaatttctacagttgcgtaaagaggcaggggttaacatgtacaattcgagggtctggaagtcaatttggcagctgcgtgttcctcctaaagctaaggatttgttatggcgcgcgacctcggattgtctccccacgaaaacaaggctgcaatctcgacatgtgcagatcgagaatcattgtcctaggtgtgtatctcaacttgagacaccatttcattgtttggttgcttgcccatttgcttcacactgctgggattgtagtggtataaggacaaacattcaggggttatttcctttgctggttggttggaagcagtgtttaatcatgctgattcagctacaaggaagataatcgctgtgacttgctgggagatttggaaaaccaggaatgatctggtttggtctgagaaaagctccactgtagtgagtgtctcggttcttgctcagagtactctttcaaattggtctcaagctcgagacagaaatttagttcccacaccagcttatcttaccggagctgatggtttggttaagtggaagaaaccagctactgccatgataaaaatcaatgttgatgctgcaacttttgacaacaatggaacatatattatgtgtgtgttgcaagggatgctaatgggagtttggttgaggctcttacatgttgttgggccggtatcgtgcaaccggagatagccgaagccatgggggttcgggatgctttaagttgggtgaagaagaaggcttggcacggagcagtggtggagtcggattgtctctcggtgattcaagcaattcgtagtaatcttccattattatcctattttggaagtgttatatctgattgcaaattgttattagaataattgggtgatgtttctattaatttcattagacggtctgctaatagtgttgctcactcctttgcgagggcatcctattttgttgctgatcgtactctcacaagcaatgacgtttctactgaattgcttcatgtaatcatgaatgattgcaattaataaagttgattatttttttcaaaaaaaaaaaaaaatcatgtaagtaataatctttcataaaataagagtatctctttttcttcatgctttctaatttttttgattagtattaacaattgaaatttttcctattttctcttcataggtttataaaaactaaattagttttgtaaaatatatattttaaaaataatgcttcctcttataatatttgcttattaaataattgctctctatatattttaaaaataaatatttgagtatgtatgtaatataacattatttacatgtgctacggaatttagtcctttaaactttatcacaaaatttgtctattatttattatttttattttgttttttaagagatacttgcaacataagtatttaaaattttgagtttgtaaacgatattattccaatgatattttttagttacataaatactcaatgttaataaaattataattttcttataattctaggtgtacagactttattagtgtcttaaatttgcaaccaaacataatttttgaatttattaaaataagatttgaaaacaattgatattacacatttctgtccaaaagccaataatttagaatccgtgctttagacgtgtcgtgtttaagacactaataaagtgtattcatgaaactgaacaaaaaaaatataattttattaacattgagtactaaatattattaagtatatgtcgattatatatttaaaattttagatacttataacataaatatttattttttaattaaaaagataaaataataaaaaaatagggaaattctacaatgcacccccttaaaatggatacattgatacaccctt

SEQ ID NO: 20592 - DNA, 3564 bp, Cannabis sativa
  modified_base (3279)..(3285): a, c, t, g, unknown or other
ataatctcaaagttgtatatacattttgtgaaacttctccagtacatatttcttttgaatcaactaatatctaatccaccacaactaactaaagataatatcataatcagtgagagattattttttgaaactgaccaaatacttttattgttaaaataaagtttgaatataaatatattgctttttttttttttgcaagatgtaaatattttgaatttttttttagctgaatgtaaatatgttatttttatttttaatgtattatagtctcttaagtttacctttatattttttttttatatatatatatgataattaatgattattatacaaaacatatgattaacctatgagtttgtgcctccgcctccttcaccaaacctagtatgtatatatataaatatatatttatattatcatcgactcatatcaatattattaaattttaatatgcagtacatatttttaccccaaacaagaaatacctaaaaaaatattattcattaattaatcataaaatgtaatatgaaaaatattttattttttattgtgtgcgaagtacataatatgatcacttgcagcaacaaagtccgttagggagacattcagaatcagtcatatatgagccaacattggattggcaatattgaaggcatgtttcgttgtcgcatttgggtaattgagcagtttcttggcaagagctccctgttccttcaacaccatttacatctacaacttcctttttacctgtttaattatttatttatttattataaagttattcaaaataataaagagatatcatccaaaagaaaaaaaaaattgtaatggctaatgcaattatatatctatacagaaaatcaccaatgaaagtaaagtatatttgttatagcattgctagttttttacctgaggtttgaatgaggaggagagctagaataataaaagagatataggaagctttcatgatgatatttgaaactcttaactataaaatgtatatgatatttcactctatttaggttagaataaactatgccaagtattatgtgtatttatatacaacaaatgctagtaataataaatgcataatttgaccaaatgtgtaacgcatagatgaaaaaatccttgtgtgttgtgtatgatattttctactataaatgagtaagattttttttcttttcaaatgaaacaaaacaagccatttgtcaaaataagtatgaaaataattattaaaattttatttgttttccatttttgggtgccaggcttggatttttttagtcaaaggaaaacctaacatatattcctaaaataaatctttatatggtaagctttaaagttttttggttggatctttttcctttcttacatttgattctgataaaaaaaatattatataatttaaaataaatcatcctttcctaaaacaactattttttttaaaagaaatgctttcttatcacagctctatattattatttttttgttgaacaatagctgttttatatgatgagattgaaaaaaaaatttccttttcggttgttttatttctattcttgttattatgacaaaatagcacaacatatatcctaaaaatattgacataaaagcatataccatttgattaccatttttgtttttaataaaagttattaccacattatgtttttttagaagcatacaatcatttatatatatataaatatatatatatatacactgggttaatattacgtgcaatgcacatattagttatatttttagtttttattttaattatgtatattttttagttgtataattattaattttttttggatgttattcaagaaacgaaattattttttattaaaaaaatatttaatttatgtgtttataaaaaaaaaaaaaacataataatattcaaaatttgttgttaattacaattttagtttaattacgtaatacttttaattttataatatttttctcatttttgaaataacacactttttctctttctttaataataataataataataatatatttttttagtaaaaacaatcataataaaaaaaaattttaaatatgtgcaataagtttaaatttgaattgcaatatcaaacaaaaaaaaatttatgttatacagatacatttaatataaaataaaagataagagagatatgtgtagtgagttaatttaaatttgaattgtaatgtttaaaaaagaacaagatttttgttatataacatttaatataatagaaaaaatcttgttcttttttaaacaaaaatcttgttcttttttaaatattacaattcaaatttaaattaactcactacacatatctctcttatcttttattttatattaaatgtatctgtataacataaataatagatatattattcagtacagttttgtaataaaatataaatcctcctagaatttatatttttagtaaaaaaaaagtaatgattaacaattatagtatgttattatgaattatattttttaaaaaataaaaactttacttttatacaataacaaggtaataagttatattttatgaaaggtaaaagtaacttctaacctcccactgaacagtgaaaactctagggataaaagaaagaaaataatatatatttaagttaattataacaaaattcctaatagttttaccttgctagcaattaactctcaaaatctaaattttgacagtaaaattcctaaaattacaatactattgataaagtctcacttccattcatctaatcctattatttgcttacgtgctcgatatacaagtgtcaggtcaactccatattaccatgtcatttaaaatataattatgtggcatttctaaaactaagatatgagttaaaaaaattgttattttaaaatttttaggacaaattgaaattacacaaaacaaaaattaaaataaatgaaaaattaaattaaaaggctaattaaatgttatttcttcttctctctacctaactttctctctctcctaggagcgattttagctccaatggaacccaaagctctatgtgtaacgccctaaataaataggcacgctacccaaaatacttatgaagccctattcccctaaatgggattgttaataaaattagcgcgaaaattaaactttaattacaaacagaatgcaaataaacttgtaatactttttttttacaaaataaaagatacatgtgtcgcgattccgaaagtattttacaaaatgttattacaagtttactttctctagccgacctaagcgacaaaannnnnnncaaaatacatcaatggtagaccccaacccgcttggtctagtgtggctcgaacatgtacattcttcatccagctcctacactcatggctgatcagcaattgccttaccctttcctgcacaatagagcacccgtgagccaagcccagaaagatagaataaaatatcaataacatgtttatcatactatataaactagggatgtacatcggtcagtttgggcggtttattctatatattttcaaatacaatctaaagttcgggttgctaaaatttaagtgca

SEQ ID NO: 20593 - DNA, 2299 bp, Cannabis sativa
atgacagtctcatttgggggtaccatccttctggaatactcacagtcaactcggcttatcatctggccaattcttcctccaacagttcctctccttcctcttccagccccaatcctttcaaaaactggtggaaagcagtttggtcctcctccattccccccaaaataaagcatttcatttggagagcttttcaccacctccttccttctaatcttaatctctttttgcgaaaagccttgtcaaacaccgtttgttccatctgtaagtccaaagttgatacaaactctcatttccttctagagtgttcaagagtagataagttttggaaatttacaaagtctaacagatactgtgatattaaagagtttattttgcacagttttgacacattccacaaagatgatctccacttactgtttgctatcctttggtctgcttgaaattccggtaacaaatttctttttgcagaaaaggaacctgttttcaaagatatagagcaacatgtaatttcttacttgcaggaatactcccaagctcaacactcccagatacatggtcatgatgtttctaccaatgacaataccctagattcgacatcctctattattgttcccaggctccatcctggaaaattcaagctttcaatggatgttgctgtccaactttctcacaatttgcatggaaatggggcatttattaaagactacacatgtcgggttattgctagtttttcctccaaggagttctctcgtttaccaccagtttttgcagaggcagaagctatgcatagaactttactttggtgtgaagcagtcagactcccaattggattaattgtttctgattgcctagtcctggtcaataaggttttgaaaaaacaaagagatccctccgctctttctgataagatttggcaaatcattgcctctctatctcactttcttaaagccacggtccatcactgccacatacaattcaacaccttagctcatgatgcagcgaagcaggctttgggaactgataaagagattttgtggaacaattgtgtttcacagttttagcagctctatagctttcttttgttacagtttttgcttctaaaaaaaaaaagaaaatccaaaaatcaatttcaaattcaatttaatctcatatctgaaactcaaactcaagcctatcaaatcttaattcaaaatccagatcgaaaagacaaaatttcaaccatctaagatttcaaatacattaataataaatcaaatttgtgtatgaacacgattgacctctatttgtacaaaataatgaggcttcagatatgaaactaaaagaaaaagctagagattttgaacagaaagcccctattctcttgttcttgttcgctgactttaatggtggatcgagaacctctgcctcgtcgtcgctctggaaaatgaacatccaaccacattgaagctacatctttgttcacaggctttaatgatggatctgagatggaggagttggagctagcgtgttagcggaggaggagggacagaggaggttggcgttcagcgttggttgtggaggaggacgtcggggacaaccaaagaagaaggagagatgggtagtggttggagagctgctgaggtggcctgtgttggtgctcaaaactaagatcgagagagagagaggagatcgactaagagaagagagatttacgtgaacaaaaaagaaaaaggaaaaaaaagaaaagaaaaaaaaaatatctaaggaaaagaaagaaaaaaaagaaaaaagaattttttttttcattttaatttttttttaaaaaataaaattatgcgtacaaatacaattgagccacgtatacattatgtacacgtggacaatccaacatgacacttaacacctaaaatggatgaaaattataaattgctaatggttttgtagttttgggggttttatcgccaaaatttgagtttttgggggttaagtgcaatcaaattgaaagtattaggagttatgccgcaattaaccttttttttttttattttttctcatttagcattgaaataatcattctttctatttcaaaatggaatagtcattccactaaagtgatggaaaagtcattttgttggaatgacattctaatactttaaatgcaactaaacaaatgaatagattaacctttccattccattttattttatctttatttgttttcagtcatgtttactatgccaaaccttattgttttaatagcacttgaaaaattgaatggtgatactttctttgaataaaaatcaatttgaatttgatgttg

SEQ ID NO: 20594 - DNA, 17988 bp, Cannabis sativa
  modified_base (63)..(63): a, c, t, g, unknown or other
gatcaataatagatcagcctaaattttgagtaatcataaactcttgttcatgttattagtttntttgattcactcgttaaagtttttcagagaagataattctttacaacttctgtttgggaataatgtggatggttgggaatatgacctataattatcaaatcccgactttcttaatggatcaaatgttagtttcctttatgtgttagttctagtattggaaagtagcgcgcaaatttagatgagatctaaattatactttcactagtgaactaattgtactaaaggataaagaagtaattataagggtaaaataacaatgtaactaaaactaattatgaaccgatacatggaggactaagcactggaattgattatattaatggacagcgtagtaaaacacactaaatataattctataattaataagagttcaattctatatttattgtggagtaatcgtagaattaataaatatggattatttggttgatgagactcaataaataatctaatttattggagcttagaattataggtccatgattctcgaatcaccaccttgaaatattatcaagggaagggataaagagttggataatgttgttcgaaaaaatctattttaaattggcaaaatagtcattatttgtttttgtaataaataaataacttttcaaattaattaaatgggaaaaacataaaagttgttaagataaaaatttattaagataatatttgttgagataaatgttgttagcacaaaagacatcatccttgtcctaattgagacaaggtatgcgcctaccctatagtagggtgtccctattggttttgtctttttgagttaattaattatttaattaattcaattagataaatatttgaatttaaaagtggttaaagatattgatagatatttaaaatcaaatatttatagatattttattataggtatttatttaaataattaaatatgatttaattgattgagaattaactactataaatagaagcctaatttgataaatcaaagaagcttttcaatatataatttttgaaattaatagaggagaaaagaaaaattattttttcctctcaaacagttcttactaatgtatatagaattaatcaagaaaaaattatacactttgtcctaatagcccacattattcattgtgtgtggttgatcgatttggaagactatggtatgagtttctgatcaaaccgaaggatacaacttacgagaacttttgaggataccctaatagtcatcaagacgtatatatattcatttcctattattttatattttgatttaatgtatacacatttggaaatctattgagactgtggtacaatttataatcattgatatcaattcttccgatgcgtatctaatttagtaccataaaattaacactcgaggtcgggcttcacattggtttcactcgagatttggcattagaaggtcagtgccatccgtagttgttgagagggggtttgtcgtttgagagaatgagtgggtgagagggggtttcgttagttatgggcttcgacgacaactgtctagggttgaagaaaggagaacttaatgagaagaaaggggagagaaagagagatctggttgagaggcaattttcttctagggttttcaacttttcaatatatgccctattttaaaattctgatatattatacaatatatattttgtttactaaaaataaaacacatacaatacaatacacgttctctaatgatgtatactttttatttttttttaaataggatcacgtctagtattgtaggacacgacatctataaccatctataacgtgtttaactatgctagacgtgaaaatgacacatgttttttttttgaaaaaaaaaatatattaataattatatagaacgtcattctacattttttatgtctagtaatgttgcacatgataaaatattttcatgtccgacaatactagacatgaaaaatgtctgcaactttatcaatatatcttgcaccaattatgcttgacatgaaaaatcttctcaactctttcatgtcatgcatcaattatgatggatatgaaaaataattatgaaaatgacattttatagtagtattgaaagaccaccctgcaatgaaaataagcagttgagcacaaataacatttcccaactaaagcagtgtctgagcctaaagaatgaggttgggtcttaaaaaaaaaattacatgataatccttaaaggttaaagaagaaacccgtaggtagtgttcggtaaccattaaaaaatcagttttctgtttaattaatcagaaactaagaacaaattataaaattttgttaaggtgaataaagaaaaacaaaaaacaaaatagttaccgaacaagcctgtaaacacatttttgttttcaaaaatatatttaataaacttaatttttggttgccaaaattagtgagaagcataattgtgaactgatttatgttatacaaatactaaattagtactaattaagttgattccataataaatactaaaatagcatatatattcctttttaataatggaaagatactaaagaaaaataatcttttatccaccataaaaaaggaaaaagagaggtacttggagttggtgatcatagtgtatgtgtaaatgaagtgggagaaatttaagcaaagaatcttggaaggacaaagattgcgttggttatatatgtactatattgtgaaaaatccaaccataaggagggaaagtaagtgataataataacaattattctccaaaaacatgggctgactgttatttttgggtacattagctaccactttgctaagtttttgcccccaaaagaaagtggaccatgtgtgaaaaggaacttgtgcagaagctttgggaaaaatagatttactttgagtctcatttatgatcccactaaatgcaccagacagagtttaggggagttagaaatcatttgggaattctataatataatatatattatcatctactactgttatagtggagattatttctaaagcaagtatatataatatatgtaaaattcagttgctaaaatgtctattatcttatcttgtaataattatattacaataggaattgatactttgattttgatattaattaataaggggaatgaactagggatatttggcaaaatagtctcttttaaaagtcactttacacaaaatattattttgataatttttcacaaatgcccatcctaacacctctgacgagtgacgcccattagaacaccctataaatagatttaaaagcgagatcatattgttaaaaaataccaaaagaatgtcattataatactaataacattataaataaatttattttcaccaattacttaatttaactcaataatatattatctttaaaaaaaaaaaaaaaaaaactcaataatatattgttttgacaatttttttttttcgcattctagacaaattttgagaaattatatacgtcaattcggaaattctaccttgctatatgaacgattatatgaaaatgtgaaatgaaatcgaacagatatatattatgaataaaggattgaaatatcttcagttattgatatttgagttttaatccacattgtagattccgatgcgataatcgagctttcaagctctctctatactctctttaaataaaatttattgtttgcacagaataagtgagtagctcggagaccgatgccctatgtttataattgagatagtctatcaatatctatctcacattaattgttaaaatgatttgacaatcaattcgggaaatatttagtaaattggaatctaaccatatttagaatattcattcttatcacattttgatttgtgatcatatacaatcagcgagataaagcaaaatcaatttaaataattttgtaccaatattagaaatattctaatattaaacatagaagtattctaataggatctgatagtgaattgccccagtaatagtaagtcacctcttgtaatgctcgacactctagtccctcaacatttctcattcgaagcaccctatctagacttacttttgtgttatattaagggccaatttgacgtagttgtgttgtgagggaaaaatagttttagttgagctatgagaaaaaataattgcaacacaattatgaaaaaagttaaactgagtgtttggtaaattatacattttgaggtattgtgacttgttaagattctattataatgacaatgataatgttatagtctagttcattaaaaccacaaatatataaaatctatgttatataaaattttattttctaattgttatagtgcaattttttttctagaaatacgagtatagtctcgtaaatagctgacgcgtggacccaatttctgacgtaaaacgatgacatgtcaatacatagcttcggtagggctaatcttgcttgatgtgaacttgtgagaagatgcgatcgagacagggtctagtcgcatactatgtcccacatagtcaaaagaataagcaggagtgagaggagttaatgttggtcgtgtatatactgattatatgagatgaccaagtatgcctctcctccgaaaagtaaagatcatttctttacataagtttggttcgaatgactaatgtgttcgacgactcgtcagagatacgcatgttccacgttgtcaacacataaaatatccaagtatgcgatcaaagatgaatgcagacatacaaacaaaatagttctaaaagcccattctgtgaatacaacatcgtagagcatgcgagctcgtgtattgaaatatgaatggacaagtcgcgacttatcaagtcatatacgttgctgtacttaatttaagaatggatgaaactattctccatttattccttaaacatttattttaattaaatgctgtcatttattgtaaaaatattttttaaccaatcggttatgtaatcctaaaggacactagctttctatataaaggggtgatccaaatcaaatatactaagctgaaattattaccaaaagtgcactaagtagaccgagctctgactgagccactataattctcttatcttctctttttttctatttttgtttatgtctattttgtagcctatattttgactactccctgttctaagtgagtactcgcatatttacttttgagtattctaacttcatttaaatactcacaaaattttgtattgtctaaattcatccgacaatatttggtgccatctgtgagaaagaaatcttttgacatttttggaggattatcgagatggctacagatcagacaaacacgaacaacaacaatggatctttcaacgttgggactctcaatgttcctatttatggaggaggaacaacccccgttgatgctgtcataggaggagtagggcatactaatgtgactcccctcaacctatttcctaagtctatagagcatgctggaggaacctcgacactagtagctaccatggggcatatttcaccaatgacatctatcgccgcatctgagggtatgatctaactcacaacctcacagtacacaactattcaggaacatatacgtgcgctacaagcagaaatttaaagaagaggccgagttcaagcccaacgtccaccacgagtcccaacctgacgttgcactgataatcaagtaactaatgatattagacgttataatgaacattttaataatactcgtaaatgtagggaacactcaagtgagaacaaccatgctggactcgacctaaattaacctgttacgaatttatacatgtaggggtcccattgttcctaatacaaattgacaaagttagagggaggaaatgtcgcaagaagaggaagatctcaaacgacgtaacctgcatagtcgtgcaaaaccataaattgaggtaaaagacttttatatccaaaattcgacttcacttcagaaggtgacacgtgtcatacagtggaatatgaaccacctaatataatgaaattatatcatttaatgcgaagaaaaaagaataactcgttaaataaaggattaatagaaaatattcataactcgctgactatgtagtcttaagcgagacaaggatagaagactattaaaacctatattgacgagacacatacttgcgtcggagtacacacacccaagaagataattcatttattcgaaggaatgaatacagttatgcaaagcaaccttatgttatgaatagagagataatcacctcgctgttctaaagaaacttgacgaagcgaatcatttgctaacacttagtattttttccacattataatagccaaggataattagtcacagatagcaagatacagttgtctaaatcagcattaatcatctataaggataagaattactagtagttaaacgattatctagtattatctacatacaatttaaataaaacgtggaaattgatattgtttcatcaacgattatattttgaattgaatataaataactgccaactatattcctataaataggggtagattctgcagaaaaagagatgaaggattctagagagaaaaatatatacgatcaattgtatattgtatcttgtaatagaaaatatcttaaagaaaatagactcgtggagtatgcagatttaattgcaaaaccacgtaaaaatatctggtgttacttatacattatttatttcttattaattctgtattatatttattatgtaaaggcttactatttttggttaacaaaaatttgcgttaacaacgatgatgaatctcattcctattcctcaagaactaacaatcgctcccccagtgtctacaccaagtcaagaatggtgttcagaagactaggaggaatgtatcatgtgcagagagacgacatgtaagattgcctcaacgaagtgtttcatgcatgatcataaattccaaggaatcgtaaaactgaggaagaacctcatgatccccattttgctgatcaaggtatccccctgtgaatacaatgcaaaaaatgcagttaacccgccgctggcaccagtcgtgcccaataatgtggtgataccggcgaacatagcagtagtggcttctttaccaacaggaaaccaattcatgcatgctaacaatcccatactggcaggagggattgataaagaaaatcttctgtgaccattaagagtgatcgagtagcagagaaagcccatttataaatacatgggacgtcccccttcaccgaagaagtgcgataagccaggctccctaaatgcttcagactttttaagtctattaaatatacaggtaccaccaatcctatagattatcttgataaatttaacaatattacggaatttgatcaggtatctcaattggctaagtgtcatattcttgctgtaactttggaggacaacgtacacgactggttcagccaattacccgaagcgtccatcttaataagggagacatttgtggatttgttcataactcatttttaggcaaccataacatacaaaccaccatacacaactctagcaaacataaaacaagacacgggtgagactttacacgattaatttaagcattttaatgtcatggtaaccaaagtggagaaggcccccaagtcttcgcttgtctgtatgctttttacaagtgtgctacaaagaatagaattttggaagaaactaccagtgtgacatcttaaaatgctagttgggttcttttccatggcagaaccccacaagcgaatagagaactctcttaccaagctcgagaaaagaaaagagaaacgaagatctccaataccaagaacacagtccaagagttcgcgattcagaagttccaagagatgtagtccaaggtgtagcacaaaaaaatgcagccccacaaggcgatgaagcccgaagcttcccaagtccccaactaggaaggaaggttccccgaagcaaaagggaggtctatgttttgttatttacacataattctgtgtctctcgtgatcacatatatgccatcgaagaacacaagggtgttttcaagaaacccccaccaatcagaggcaatcgtgacaagatggactcgaagaaatactgtaagtatcacaaagatattggccacacaacacttgaatgttggttcttagaagatgcaattgaagaattaattcaacgaggacattttggccaatacaagaagaacaattgagaaaccaatccctaaacgaatagggcagataacgcaggagaggtgagtggctccaaagctcctcataatattttgaccattgttggtggaccttacatcaattgagattcaaagaaagcgcaagagcaatatgcgaatgaggcaagggagaaacagctaaccaacatgaactatctaagcaaaggaccaacataatttttcaagaaagagtgtgacgatgttactttcatggaaagtgatgcgatatgggtacaccacctccacgctgacgtactagtcataattgctaatattggagatgacaatgtacattgcgcacttatgaataatggtagttttgttaaccttttaaacttgcagacttttaagcaaatgggactacacaaaaaggatcagaattgaagagatcgtgaggaaaagcccgacttcgactctagagtcctcgatttctcgaatacagcacaagttgctaaagaaacaatagagttaccaatcgattcctttgataattcaaaatttttaaaaattaattctaaactaactctgcagtagagagaaaggatggtcacctttctcaaacaaaacttaaatatcttcatgtggaagcatttagatatggttagaattttgcctgagatcatgtgtcattgtttgaacataaatcccgatgtgcgatgagcacgatgaaagtatcgcaaaatcaaccttttgaggtatcaagcgctcaaagaggaggtagactgcttacttgcatgtggcttcatcaaggagtcgctctaccctaactagttagccaatcctgtcttagttacaaagcctaaaggctcatggcatatttgtgtccattttatagacttaaataaggcttgtttgaaagacaactttgccttacctagcattgaccaacttgttgatgcaatcataggtcataagcttcttagcttcatggacgcgtactcaagatacaactagatcctgatgtacaagctggaacaggagcatacctccttcatcacagattgaagtttctattattataaagtaatgccttttagaacttataaatgcaggcgcgacgcatcaaaggttagtttacatgatcttcgcaaatttgcttggaaaaataatggaagtatatgttgacgatatgatcgtaaaatctcaacatgtgactgatcatgtcactcatttgaactcgatgttcaagatcctatgtcaatacaagatgtgactcaaccctctaaaatgcgtctttgatgtaggatctagtaaatttatgggcttcatggtaaaccagtgaagaattgaagccaaccccacaaatattaaagccttagtagagatacaatctcctactaagcctaaggatgtacaaactcttacaagtaaggttgtttccctaaatcataatgtttcacgttcctctgataaatgtaaataattcttttaaattctaaaaggaaatagaaagtttcaatggactgataagtgtgaagaagcttttccggctttaaaatcacacctggggtgacccccaatgctctctaagccgctgcctgaagaagtactcttactttacctcacagtgtcagattatgcgattagctcaatgcttattcgtgaagaccaaagtagacaacatcccatttattacgtaagcaagcacttactggatgcaaaatcacactatccacagatggaacaactggccttttccttagtcgtagcttctcgaaagttgcgaccttaattctaagtccatacaattgagatattaactaattatcctcttcgacaagtactggtcaagcctgatacatctggacaccttgttaagtggttgcatgaacccaaccaattttgtatatggtacaagtcacgatcagcaattaaaggccaagcccttgctgttttattcttgaatttccccatgaataggtggctaccataactaaagaacaaattgacccagatgttttgaaaggcacaagttggactctatatgttgatggagcctcgaacagtgaagggtcaggaggaggaattatgttaataagcctaaaaaaattcaaagttcatgcgtctttaaggttcagtttcaatgcctttaaaaatgaaccgaattatgaagctttgattgcaagtttgaaacttgctcttgaaataaaggtcaaatatcttgaagcatttagcgactcacaaattgtaattttctaagttaatggagaatgcctagctcgaggtgggaaattaaccaaataactcgcctatacttgggagttgttatccaaatttaagaaaaatattattaatcgaataccccgtgcttacaactcccatacaaattctttagcccaattggcctcgactcgagaagctaaattactcgatgtaattctcgttcgcatactcgacaagcccaccattggtcgagaagaagttatgcaaatagatgttgttgatcaagtcaccgagatgactcaaattgtcaactatctaaaaactagtaaacttcctaacaacaagcttgaagccaaaagattacggtattgaggatctcgatacattatctatgacaacaaccataccacataagttttaatcaaccactcttaaagtgtatcgatggtgacgaatgcaattacatcctccgtgaggtgcatgggagaatgtgcggtaatcacactggtataaattccttggccctaaagattatgcgacaagaatattattggccaacactgcgtgtagatgccatcatttttgctaagagatgcgacaagtgtcagcacattgctacatatgtcaatagcccgtcaagcaatctaaactccatcaccagcccatggccatttgtagtatcgggcatatatttaattggcaacctgccaaaaggcaagggaagagtcaagtatgtcgtcgtcatagttgaatattttaccaagtgggttgaagcagaagcacttgccaccatcactactgtaagactccgcaagtttgtattttgagccataatatgcaggtttggcataccctacaaactaaaatctgacaatggaaaatagtttgactgtaaaaaaatatgatcattgtgcaacgacttggggatacagaaagctttttctacaatcgcacaaccccaaagtaatgagaaaaccaaggcagtcaacaagataatcaaacattccatcaaaggaaatcttgaagaaaggaaaggcatatggcatattatggtcatacaacaccacaccacgataaaaaattagcagaaccccttctctctttcatatgagcaaagacatggtcccagttgacgtaggtgctagtttcctttgtcacgatgtttataacatcgaggactgagttggggaaacttttccaactgcaattattggaagaaaaatgtgatcaaactcaaataaaaaatgtagcctatgaacaatgcacaatgcattactttagctcaaagtttaaggagagaaatttgtgagtagaagacttagtacttagtaaaatctgccaaatactcgcaattcaacacatggagtttttagcgataactgggaaggtccatacctcattgctgaaaaaattagaaatgcaacctatcgccattctgatcttaacgattcaatttttgaaagagcttggaatgtcgagcatttgaagttttattgtcagtagtactcacatgtatatacttagtcaatttttattttcaaatccctaagtatagggaggatgcatgtatccttattacggctaataaaacatactactaattactcacacatctcattattatataattttcaaaactcttttattatttttgcagttagttagtgattttattatttttgagaacactaaaatattataaattacattataagaggtcgcataaattaaaatttgcaccaagctggaattatgatcgcataaagtgctaaataataaatgcaccaagttgtatttgcaattgcataaaatcataaactgcatattaaaatactttgcaaatatttttgataaatatctctaaaggatatattgttcagaaactgtgaaaacataaaaggtgtgaatcccaattgttttaaaaaagttaagtacaaaatgttagtacccttgtactgttattaaaaatgaaataaacaaaagatatactttttctaaggagcatgggcattgagattctcctcaactttctcggtggcatccgcgacttcagctccaggagcaaggtcttcagggaaaagagtattggacaggccttgagtctcagttagagacatggtacaaaaagcgttggccatcttgattgcctctggaccaaagacagcaaaattgaagtctggcagcttggtcaaggtagtatagacatagtcactaacggcatggtcataagctttcttccttccttctttttcgtttttcaagttacgagtaagattagtgatttgatcctctaactttttgatcttcttgtctcccttgtccttctccttattggccatttcaagcttacccttcttcaaaccttcctaaagagtagagttttgcttctttaaaagctcctagtccttaagagcttgatgatctgcaacaatagctcacgagtatacagtcaccctttgaatcatatactcaaaacatcgtgccaaaaggtctttggcatgtgtccccttgatctggacagcgaagtcatcgctgacatatttgtcctgtaagaccatgaaattgcgggccttagtttctggctccatcataggtttcttcctttttccctaggtgactgtatgctacttcttggataaattgatgaccggaggatcgacatcttcaatctttctcttttggagagggtttacagaagaaggagtcgcaagctccttgttagtctttgacttgcggttaagaactgagacactcttcaaaaagtcacatctataaagaaatacactaagtataagtaatcacatgaaatcgcagtggaaaattcaatttcaactaagtataatgggggcacattacctacaagttgtcttgttgtttgcctagaaagatattttttaatcttcactttctgcttctcaaacggctccttgtatactggttctcgttgaagtctggcgttagcttgaatcaatctgtgttctcataaattagcaaaagtacaaagaagatgccaatatcaatctttgattggacgactgttcaagacttgagtaattttcacgtggtcccaaggtaattctgatcgagctagtctacatgcaagtacgaacaaaggtcagcattcataagataaaaaggaggaaaatgctaagtataaaaatatgcaacgtacgaggacaggaattaaagtctattctaactccaagtaatgaaaacgcataaaactacttcgatttctagtctcccatattggaaaccgtgccctctactctattgacctatgagttgacttattttctaaagcagtgaaagccattgtcatggccaacgttcttgatgttgtagaaatagcaaaaatcctcgatagtaggttctccttgcgtgtattccatatacatcgcatagaatccaaggacaattctataacttttggggtgtgttggaaaggagaaacgtcgtaatatgtcaaaattgctttgataaagggatggaaaggaatcgcaacaacacaacgatgctagtcggaataatcattgggatggtgaagggttggtaaggacgttgtatcgacataaattttgtacaaccagtattaatcaactttagtttttgaaatatcgtcaaatcagactttcttacccgtgaaaccaagtcctcacaagaaaaaggttcatctaaagggccaactacaagagagtccacatcatctccatcatcattccattcgtccttgaaagcaggtaactcaaagtctttccccacttcctctacttctgcatccagagcagcccttggatggatgaagctcccttgagcagatacggtggactcgttttcctgtatctcgatagcaaccaatgcatctaactcttaggccattcaacctatctcgccagtagaccacgagtcttggttatctactcttgttggaatcatgtcttctgactatgacattaaaataaagttgttgcttttctaatgtttatccgtaattactatatctggctattgtctaagagatcgctcatctgaaagacagaagaccttttcaacgtgctatgaagtaaaagttaaggaggagtatcctcacatggataataattcaaattgaatataaatatcaacaaaaataatgaatctaacaccaaaataaaatagagtggttcggtatttcacagtgatttaatatttgttcgtctgaataaacatacacccaaccaattagtgaacattttagactctatcaaagtttggtaccaatatatgagaatactcaatgtgttctaactaaaagtttgaatattcaaacttcataataaagatgatgcgaacattcaagttacaggcaaaaattttctaaaaatttcctctatttgccttatttcttcttggggtttaattgcctagaacctaccctaaatattttcatgcactttctatcccaaaaagacatagatggcatgcgattatttaaagagaatatattaaatagagaaagtatttagtaaagaaccaacctttaaacgaagagcttgttcttttggactcaattatcacttcgtaaagcccatcgaacttcgaaacaatctttagccaaaggaagttgaaattttgaaaaaagacttatcttgaaattttagagaaaaaagtttcaatggaaattgaaaatgggagggaaaatgaaataaatcaatttcatatctcaggggtttaaatacaaattagcctcatctgcaaggatcttgacatgtggcatttgaaaatcaaaggtcatccaatccaacggttatctcaaaccacgcctgcacaaaccctgaagggtttgatgatgtggtatcttgggaaaataaaaaaataaatacaactgtcttttcaaaaccctcgataagacaacctaaggtcactgccatgtaatagagcaactttgctattcctatcaaatagtattgctattgacaaatagttgtcattgtaaaactaggggcatgtgttatagtgcaaattttttcctagaaatatgagtacagactcgtaaatagctgacacgtggacttagtactcgatgtaaaaggatgatgtgtcagtacatagctcagataggactaacctcggttgatgtgaacttgtaagaagatgcaatcgagataaggtctagccgtatactatgccccagatagttgaaagaataagtaggactaagaagagttaatgcaaatcgcgtatataccgattatatgcgatgaccaagtatgcctctcttgtgacaagtaaagatcgtttctttacataagtttggtccgaacgactaatgtgttcgacaactcgtcagaggctcgcatgttccatgttgtcaatgcataaaatgttcgactatacagtcaaagatgaacacagacatacaaacaaaataggcctaaaggcccattctgtgaatacaacgccgtagagcatgcaagctcgtgtgttgaaatatgaatggacaagtcgcaacttatcaagtaacatacattgttgtacttaatttaagaatggatgaaattgttcttcatttattccataaacatttattttgattaaatactctcatttcttataaaaacatttctaataaaccgatcagttatgtaatcctaaaggacacttgctttctatataaaggggtgatccaaatcaaataaattaagttgaaatcattaccaaaagtagactaagcaaactaagctttaactgtaccactataattctcttgtcttctctttatttttattttcgtttctatttatttagtagcctatatttgagtactcactgttctaagtgagtactcgcatatatgtttttgagtattctaactttatttgaatactcgcataatttggtgttatccaaattcctccgacaacactaatatatttttaataattttttttcctaaaatataaatttatacgtatatgataaaaaataatttatagtaattttaaattatatttttatcacgtgtaaagaaaattaaaaactcatgtaggaaactttaggctaatctgatctgttaatattaaaaataaaaaataaaaattatttttaaaacaaaataagaaataattgatttaaatattatttttttattgtaatatataataaataagtaaatatattttagtataaataaatatattatggagcattttgatcaaaataattttttttaaaaaaagttagattgtaccagctttaacttttaatgatagtttttccataaatttttgaataatttgtttttttaattgtttatgaaatacttttttgtcacatatttttttataaatgttttttaacttttctaaaagttgtaccaaaccaaccctaagtacttaaactcataatgcagtgttatgtacaagctttaattaattaatacttaataattaattagatttatatttgttaagcttgagactaagagtattcacataatagcttctctactttattttactctactaaaattctatttttttttttttttgttttatctcaaatttttacattttactatacattattttttttcttttttctttatatttatttaaatattacttttttaatatatatgaataaaatattatttgaagaatgaatagtattttttaaaatttgagtaaaaattgctcatttggagttttctttttctttttcgggacaatttttcatttttttttttttttttttttgagaaaaccttgtatccattgcataaagattaaagttcaggatacaaattacaaatgaaatttgtaatttttcatgtttctcatcactattttgaagaaaaaagtattataaatgagtgctctaatactacaacagaatatattctagcaattacaaaattacaagtagtactatttagtcaactactttttaaattagttaataaaaagtatggcaagggatcggagttctcaattatgtatgtatatatttataaggctactttttttggacgcacatatagcctatgaacaaaaaagtttcaagtaaagtaattaaaaataggatgaaaagtcaaagtggattaagatttgacataaatctaagcttttttgggttcttaatgacattttatatattttccaaataaaggaatatattatacataaaaatatttgataattacacaactgcatatagtactttgtcaccatttttttcaattaaatcctcatgtgtctcaggttttaactttcaattgcactatatggatttatactaatgaaatgcgttagtgaaatctgttttttacaaaaatattaaattttaagtaaaattttataattttattgatagaatttctttttctaaaaatcctttcattttataaagtaatcgcaaaacactaaacagaacaatcaaaaataatagttaaacaactaaaaaataacagtaaaacaacaaataaaacttaacacagtacacagtataaaaaaatatacaataattttgaaaaaatacagtactttaaaaacattccacccaaacacaatattttaaagggatattggcggctaaaccacctgaactttacggtttgtaacacttaaaca

SEQ ID NO: 20595 - DNA, 5033 bp, Cannabis sativa
atgtgataaaatattgttctcgaactatgaaaataattgcaaatttggccacttgaaatagacccttgactcatgcccatatccaataaattatttcaaaaatataaacgaaatgcaatcgagttgcaaatttacaataattttcataatttgagaagattttttttagaaaaataattaagagagggaaaactctacaagtatcatagttcggagataaaaattgtatttatttatttatttttaaactaaatctgtctgaattttatcacgtttatcataattgttgacacttttgattagtaatgtgatatctttgtctaattatgttatagaatttttgttgagctatgaagaagatggttctgaaactgtttttttctttttcgttattgtttgatacctattgtggaacttctatccttgaaatactagcttaaatttcagggctttatgtcgatagaaagtaaaaataggaagaggatttcgctactgaagttaggactgaaatttcacactgagaattctatgttttagataaagattctgtgtagttttcgactttgcattattgattaagtcggtcttttttgaatttaagtttttttgaatgaaaaatgaatccaagtggcacaggcaactgaatttgatcactttatgataattgaattgttgacacttgtgattaataatgtgatgtcttggtattggtgctgctctttcaatttttctttgtctaattgtgttatagaattttgagaatttctatcgttgaaatgccagcttaaaattttcagggccttatgttgatagaaagtaaaataggaagaggatttcgctacataatatttagctttttcagacaatttgttttgttgctgaaaagctaggaaagaaattcatattgagaactgaattctatgttttagactaagttgattaagtcagtacttgtctgtctttctttgatttaattttttttaaaataaaaaatgagtccaagtggcgtaggcaactgactgttgtggcaatgtcagcgtcgaacaggagggttagtattatggaggtcaggaagtgttatgatcgtgtaccgtgggagtaactatgaagggccttctaaagtctcaccaaataatcgggaaagagatgataattttatcccagatgtttcttctgctgaaaatccaatgaggacgagtgatgatacggcaagttcaatttctgaaaaaagcaacatggctgtgaaaactacaatcccccttcagaacatgacagaagaggaagctgagtttcacaggctattggatgatttaggtccccgctttgatgagtggtggggtacgggagtaattccagttgatgctgatttacttcctcaaaagattcctggctataaaacaccttatcgacttcttcccactggaatgagatcacggttgaccaatgctgagatgactaatttgcggaaacttgccaagacacttccttgtcattttgctcttggtaccatttcattcttggagtaatttttctatggatatgagaacttttcttatttttgatgtgctgaatttcttgatgaagggagaaatagaaatcatcaagggctggcatctgctataatcaaactttgggagaaaagctcggttgcaaagattgctgtgaaacgaggtattcagaatacaaacaacaaactgatggctgaggagataaaagtaagctctaaataggttcctacttctagctaaatacttttgttttatgcattgtttatctatatgttcttgtcccgaagccattatgtgaaattactccattagaaaaaaggataatatcatgtttagtcacaatctgtatctctcttgttatcctattccaaatattttgcaattggcggtggaagcgaacttcaaaatgatcaataaacaattttttttttattttcagataacaaagtagctcatggaaattacttgctctgataaatttgttggacaatatttcttggaggatacattactctttcagttgttgcttgatcaagccaacaactaaaatgtgtcttaactttgcagaacttaacaggtggtgttttactgctcagaaataaatattacattgtcatttaccgtggaaaagactttctcccaacaactgtagctactgctttggctgaaagacagaaattggcgaaacaggttcaagatcttgaagaggaagtgcgggttcaagaggttgaacaaagaattaagaaggcaacaatggatgtagttccatcgggtgatggacaaggtcaggcacctgctggtacactggctgagttttatgaggctcaagcaagatggggaagagaagtatcttcggaagaacgtgagaagatgattaaagaagccgccatggctaagcatgctaggattgtcaaaagaattgaacataaaatggatgtggtgagtactccttttgtttatgtgaatttattataagataagggatttttaaatattaatttttatttttaacaggcccaagcgaaaaagcttagagcagagaagctcttaagtaaaatagaagcatcaatgattcccgcaggtcctgattatgaccaagaaacgatcaccgatgaggaacgagttatgtttcgcagggttggtttaagaatgaaagcttacttgcctctcggtatgtatagttcagaggtttttttcttaatgaagatcgattctgttgtctcggatactaatgatggtttgtgtatggtaatgtgtcaggaatacgcggtgtgtttgatggtgtcattgagaacatgcacttgcattggaagcacagagaacttgtgaaactaatatcgaagcagaaaacccttgcttttgtggaagatacagctagattgttggaattcgagagtgggggaatattagtggcaatagaaagagttccaaagggatatgctcttatttattaccggggaaagaattatcggcgtcccatcagcattcggccaagaaatctcttgacaaaggcaaaagcattaaagcgttctgtggccatgcagcgacacgaggttttttgtcttcatcctttttccactccttcaagctaagtttaaatgtcattttccgatactaatttgtttcttatgattattaatggcatcatgtaggctctcagtcagcacatatctgatttggagggcgccatcgagcaaatgaaaaatcaaattgtaagcgaaatatctccttcccgtctttttttgcccgttaagaaatcattaaactaggctaagtatatctatatcggtgtgtgagtccaaacattaaaatgcaaaatatttgttttgactttgggattattacttcttatgatttcttctctattacatttgtgtgtgtgtgctttggggaaacttttaccggtacaaatttattaatagaaaattctctattcgcgagttatctgcaggatgcttctcatgatggaaagaatgacaatatggttcgccagaatgaagaatacatcgacgtgagattctcattccttctttggtttgcttttaatatccttgttcttggtggtcatttgaattgatgggttaaaaatatcgtttcttgtttgcagagtgaggatgaagatgacgatgatgaggccgaatcggattgggaggatgaagatgaagatgatgattcggaagatgacgagtaagttacaaaccaaaagctttggaaagcatgattgcattacttgcaaacactgacaaaaacatggcgacgatagagaataataataatccggggatgtgtttcagaaaagccaaacactgttttcgctaaactcgtctaaattccttgatttttaagagcagaggcatgaattctggaggacgatgaaaatggatatattgagagaattaacaacttcaagtcaagaaaagagaggaaaagaagtcgttgcttttgcatctttaccaaactggtgaatgagagagaggcttcatcagtcgccccatgtaaaattaattatacatttttaaagtaaattttttgtatttttttcttctttttcacataggaatttattagtgtataattcctttgtaatcatgcaggaaaattagtgtattatttatctatatgctccaatttttataattgaatgaatattttctatttttgaagaaaataagaatatttcattgaaatataatcgttacggcaataaattcaaagaaagaaaaattactggtgtttatgtagtgtacactatagtggtaattacataatcttgtgtttgaatatgaggtgatatttatataaaaaaaaataatatttttaatagttaatgtgtaaagtagaacatttttaataattacaaggtgtaaatacactttaagtgtaattgaaatttctcaatcactttaaattaaataattacctttaattacaccctcatttagaccagggatatcctaaacatattagacaaacaaacttacaatatccacaaagaaagaatttctcctaaataaaaggcatgtaaaaaaaactgcccacttaagaaaatctttcagaacttttactttaagtttggttcggtttaaacttttgaaatggcactaatctaaaatcttaatttgagatttaaattgctcatatgatttaattgtactgttaaagatgaaattttgatcatattattcatgtgtgatcatatgttgaatgatcatgatgaagaatgtttaagtcttttaatgtttaattgaccaaaatgaaagaatagatatatatggcagagttacaagtactttacttgaacagaacttcacaaattagaggcatagtaactatggtgagcactactaatagcattgagggccataacctattttcatgaattgtgagtcaaacttcaagaattccccatcgtggccgactaatcattgtcgatgacaaggaagatgaaacaccaatctgtagatttcagccgccatgaaaaaagaattcatattcactgttttcattggcgcaatatctgctgca

SEQ ID NO: 20596 - DNA, 2274 bp, Cannabis sativa
gataacatacttggttggaaagaaaggtataaaattgctttgggaacagcagatggtctcctgtatcttcatgagagttgtcttaaaagaatcatacatagagacatcaaggctgataatattctgctcactgaggattttgaacctcaggtacacttcaaatttcacagcagcaagagtaacaattgaatatgatggtcacctatatatgttttccattaacttttagaagaaaagtaattgtaaagacaattgccaaagcttcatacacacataatctctccttttcaaaagtattcttctcttttccacctctttcctgctaaatgatttagtccgtttttattcagatttgtgattttggacttgcaaaatggctacctaaacaatgctctcaccacagtgtctctaaatttgaggggacattcgggtatgtaatgttaaaccatttgttttcaccaacaaaagttgtttctaagtcctctgctttttttgaaaaatccagctactttgctcctgaatatttcatgcatggaatagtagatgagaagactgatgtttattcttttggagttctactcttggagctcataactgggcgtccagcattggatcatcatcaaaagagccttgttatttgggtaacttttccattgcatactaacatatgttatcaaacatcatcacagttgggtattcatttcatctcattctatcttcttctcttgtaggcaaagccatttcttgatgatgcagatgctaaggagcttgttgatccttctcttggtgacaactatgtcccagaagagatggataggatgattttgactgcctcattatgcattgagcgttctcctattttaaggcctcgaatgcgccaggcaagtacagagtaatttcctgggagtacatgtaatacacttttgtttctatgattcataattacctaagtaagatatgcttaaatttacaacaacttctgagaaattgaaaattctttattcataattggcctatttgaatcaaagttacttatgtttagtgaaattgcttgaaaataatttcccttcattgtaaatgtgctcgagtttctgactcaaattcttagcacggtgacaggtcatagtactgctcaaaggcaataagtatgtttctcaatctggagaagaatgtaaaaaaggaaccctccaaagaacatactcagaagagctcttggatgcacaagaatataactcaacaaagtatctgagtgatatgaacaaacaccaacaggttgctttcggctcttgaactcaaaatattactaaaagatgtggccttattacttgtaacaaacagttaatattattcatatagattaggttggtcttcttagggagtgtttggtagatagtcctgtggaaatttggtgactgaatattgtttttcatggatgaacttcttttggagttccaagtaaaacgcttgttattttattttattttattttttgaaaaagagagagaagccattgtcttagactagcccctaactaatatgtatagaaatctctcatttatggtggaggaaaaccttcatgtaaaacgcttgttagagcgagtattgtttccaatggacactcaaaacccttacctacatctacctatattgatatttatgtgtataagcttctgtttcactttgtatagactgaaatgtttggagtttgattttgaaccagcaaaacatatcaactaacattttttttttattcttctcaagttatttattgaggaaattatgtgaagtatgtagttatttttgttaagtttcataaatattggggaaattcataaataggtcaattacatatgaatattatttgaataattcaattgtatcaaataatttcaaacataattttatgtataatttttttaaaaaaataataaacagttataaaaaactttaaaggattcttaaaaaaaaaaacactatcatataatttttatataaaaatcataaaagattgaaaaataaaatatatattataatgcgtttaaaaattaaataattattaaaagtacttattattttttttattttagaaaaaaaaacgtacttttttttaaagctagaaaaaaacatacatattcactaataaattaaaataattcacaataaaaagaaatattataaaaagcatataagatacaatattcttatgtaatgaaaaaagaatacaatattataatataaataagtgctattttaaaaatatgggaaaaattatta

SEQ ID NO: 20597 - DNA, 3001 bp, Cannabis sativa
tttgaattagaacataaagggttgtcataattgatctctagtgggctttttaaggcccaacaacaatgatcctgaaaaagttacaatgtaatacaatgggcaaattagtaattttatgacacttcatatactctagtatgtagtggtattgcatgacatttttatagatggaatctaagcttgtattgtactaacacatttatgctttaagtgattaacaactctcatcaatcttcattaatccaatcatttataaaagtaaggacgatgcaaaatgagatatgtatatatatattatataatatgcatttcagctttgaaaatggcttaatttggaatatatcatatatatcgaacgagatatatattgtaattatgtatgttttttatactatattttatgtatatcataaccatagaaatatattataaatagatttataaatatgcaccaacagacaaaggaaaagaaaagtaacataagagtccaaagttatttaaggagtttctcagagcacagcttatatataacatgtaaatgtaacgtaatggtgtgcatgcatgtcaaaattgggaaacctatccatctgtctcatcctatcacagctatatatataaatatatatatatatatatataatgtgaacatataaaatgaatatatacggtgagaattaatacaataatgaagtgatttaaagagtgttatatatattgaatggtgaataatacataaggttatatgcggcttaaccagggaaagggggagactttgaattagtgggggctaaagtgtaattattgaaaatattaaataaaaaatacagaaaaaactaaataaatttattgtatttttagaaatttgggggattgggcatgcctaccattattgttattaggtatcaggaatcctaaatgtagcacattgtatttttgaaaataaaagtcatcattttatttaacgaatatctccgttatcaaactaggtaacaacttaattaggacagtgtccaagttgaacaggcgatcagggtgggatatagaggtcctcccaaaagagtgagccgctacatttgttgatcgttttacaaaatgaaaagaaagattacgcaaagtacttaataaattcttacaatcactaacaactttgccaaataaagaaatcataaccatagagctacggacaacttgaacaacagaaagacaattcgtttctaatgtcatattaagccaggaatgatcttcgatccaactcaatgcctcccggagtctaattgcttcggccaccacatgagaaatcgagccatgaaataactttgtaccgtcttcaacaaagaaactactggaatctctcgccacaaaaccaactccatagttagaggaattattaaacacaggcgcatcgacattaaccttaatactattaacactttttgagcactacattaaccttaacacttgtagcacattgtataattagctatattctataatatttattaaataaaatggagtgggattcaataattaattagggacattcttttagtatttttcatattataattatgaatcattgagagagtgagagtaagttttgatatagatttgcaaaattgaaattcacaaaataaataaataaataaataaaattaattaagatttttgtccttaaactttgacatgtaataaattatgctctttgaaatttaaaattgttatatttaaggacttttcgttcaatttcattcaattttgttaatgtaatgattgtcaaatcatattcttcgaacctcaacatctattaaatcacgtcctttgaacttaaacatgtactaaattgtattctttaaattttcatccatatcataattttttagtgaaattgaataaaaatttttaaattcaataatcttaatagtttggagagaattattaatgatctaaaaaattcaaaaagtataatttaatacatatcaaagctaagaattaaaaatctaaattttgtgtatatatatatatgtgccatgcatgccatattatatggtagtcggtgaggactatgagtgtcagtgtccattagagtcgtatgcataagttttgccatttaagattttatttttattttttttaaaaaaaaacaagatatttacaataataatatgaatagttatccaaccaagccatatgtagtaaatgttttcatttggttagtacttagtaggtagttttgtgaattgtgaaaggagcctcattataaagttgttcatgcacatcttgtatatgcaaatattcatataatatttgcctactaattaattgtacacctttctttatctttgtacttgttatttcaagagagagagagagaggaataaatttttctttaaatgtaattgaattatttcacttaataaattaatgaagaagaagcttcccttatgctccaaaacaaagtacacaagtattcaaattcaaggttttcaaaatgcttctattctagctaactctcttatatctataaagtaaataatgtaatttacttaattacccttcatttcttctttttttttttgtatccttatcttatatttcatactttggtgaatgtgaattcttgaagggccctcttatctttttcttctttttacattaattggtagtgaatgaatgaatttcaactaagcaagcaaagtcatgtcattagttaggttgggctttaagtcttgatctttttttgcttagcaaagtcctccccaagactattattatcattattattttaaggggattattattatcttcttaaattataaattttaatataaagttgtcattttccaattaatgaatatgccattaatttacatctctaaaatttatgaaaagtttcattgagtaactcatttgtaattaaaaataaaaattgaattaattttaagaaaccactttatttgagtattatcttcaaagtttaatagtttacccctacttttatcta

SEQ ID NO: 20598 - DNA, 1455 bp, Cannabis sativa
gtaaaataatttccaacaaataacctcttctttcttgagcatagttaaattgataaggcaagatcttgcagaagcatcaatgtttgcggcagtactggttttattttgctagacgaaatcattcttggctttccgaattgcacaagctaccatggcaagctcttctaattcccctgcttttcctctgccagccaacaccaaaagccagtagtaaaaatcgtcgtccagcacgttgccaatgtcgaccatggtcctactccagtaggctcgagcataagaacacccaatcaaagcatggaaaattgtttctttcgttatttggcagagaaggcagatgacactcacaacaacatgccttttaaccaactgtgcacaagtaggaagggaccccgaagtagccctccaaaggaagttacagaccttaagagggatttttaaactccataatttacgccagaaatcagtggcatgagaatcaaaccaggcccccttagtctcttacaactgtcgatatgcacttcgaatcgtatacctatcattagtctcaagcttccaagaccaatgatcagtccttgctgaatcactcaactgtatagagtagatgagattttgatctcgtacattaaaaagatcaataataatctctttgtcctaagttcttgaattcatctcaaataggtagcttacttctttgttataaagagtggtatgatttgaagtaacaaagggattgcaatcaaggagccacgaatccttcaaaatggagacagaagcacctattaatatcttcgaaaatactccgccaaacgaagcttggattatccttcaattcagatgaaagaaaagaactatgacatattgccaatatggggcacttccaaccacaatattgaagaactatccccgagcattttctttgtcttcattcaaaatgaggaaataagttcttttggggaagaaagggatcggcctggagcccaaaatagggacccatcacccatgttgacctaggtgttgggcctagcgcccaggttgacactttgtcaaccttggccacttttattagcagttcagatgaattattctgataatattctccgtttcatcaaaattaagatttgagtgagttcaggaaacaaactgggctatctggggatcaaaactgggacccaccaccaaggttgacctggtgttgggcacagcaactaagttgacacttcatcagcctaggccatttccaaggataattttttataagtcttctacgcatattatccatttttgtcaaatattaagatacaagtatttttgggaatcaaatagagtcatctagtgtccagaaactagacccaacgccctggttacattttatcaacctagactatttctaatatgttgacctcaaaaattaatcaatcgacaatagggtcgtatagatttgatgtttgccacgtg

SEQ ID NO: 20599 - DNA, 4208 bp, Cannabis sativa
tttgtttatcccgggatgaacttattcacctcgctggtctcatcaatcggtagttattactcctgtcctgccattgtctatatgacagtgagtttgagtatttttactaactgtatttctcgaggccagtcatctgaatatatttattgatgtataatatgaggtggttcatattccaactttgttacacgtgctagctttatattactgctcgaaatatgagtataacaattgccccataaaagtactttttaaaataaaaaagactttttaattaccttaagggtacgatcgtatttaccccatttaaaagttgcatgctttcattgtgggagtttaaaacttcgagacaaatcatttcaacatttaatgttctgactatctctttccattagtttctatctgttcgatctacccttttgtgaccgaacaattattgctttttgggtagtgcagccgatgcgatgctggattattatgagcaaaccaagaaggacgaagttggcgatactgaggaagaagaagaagggcccctctaagtctctaacaatgtagacttagttattttttttataacttttgaacaatggtcatttgaccgagacaatattttaccctttgtggcatttattatataatttaacttttaatttgcaccattggatgtccaatgctggtttaattacatttctttatgccatcttaccttgctttgtttgagttatgaatattttgaatgttgtgttttttgcttataagtaaacttttatttacacaaccaaaatatatttctcaacttgacttagggtaaattacaaaattaaatgtccttacataattgaatgttctcgaacactttttgatcagctgtgtttaagcagttaatattctatcacattagttatgtgcgagcagttaatattctgtcatattagttatgcgcgagcaataatcattctgctaaaataatttttagaagcaaactttaaatattttaaacaatatttagaacagcttcaattattttttaattacttgtgtgaacaatttatattatgtattaagaaccaaattttataccaatagaaactaataggtaccaaaaccaaaatcacaatacttattccaaaatgtcatacaatatatataaaaaattatgagtagcatatattgtaataatataataataatataattcaataccatttgtgtaaaagaatgcatcagagactagagactgaaatatattgtaataataatataattcaataccatttgtgcaaaagaatgcatcagagactaaaaattgattttaaaattaaaacagagtatcaaaatcaattaacactaacccttgtatccgcacaccaaataagaaaattaattgaataatatatgtcatcctatgatattggatatgaaatgatatgatgggtatatgatctttcacacactaatctttttttttatgagttttcactcaattaatgagaatggaggagaagaatagtttagattgggaacaaaccctaatgttactgaataagatgtttattggtttcatataattacatcatttatttagacaaatttaaaatatcaactcaaatagtcataatttataagctcacatattgaatcattaaaaataacccaacattaatacttatactcaattcaaaccacttcactaatttagcacatatgagatggtctaagtcacttttatcttcatgctcctattctatatccatacatttttcaaaatataattagtcaatgcatatttacctgcacgttcatcttctcgcaccaatatctatatatactgtattttaaatataattagtgcatatttacctgcacatttatcttcatgcaccgaaatctatgtatattttatataaaattagtcaatcatgcatatgtacctgcacaatatacttgattatattttgtgttgactttaggcacaaaaagcaccaactaactttaccaaatagcaactaataatatgttacaagagattttgatgcagtacttttttttttatcagttcttaatatcattatgtacggctgcaatcattcattgacaggctgccgtagatttttcctataaaaaaacaaagtgtttatacgtaatccgatctcaagtttcttacgttattgtatagtttcacttggttggaactatcgttaactagaaagtaataatggggttcctttcttttttgtttttctttgttctttttagagcaacttttgccatagttgagattgagaatctcagaccactgcagataatgagagatggcacaactatggtttcaactgaaggaactttcgaactgggatttttcactccaagtagttcaaagaatcgttatctaggaatctggtttagaaaaataccagttccaacagtggtttgggttgcaaacaggtgtaaaccgatcaacgattcctctggaattttgacaataaacgagacaggaaatcttgagctgttgggacagaataaaagtgtagtttggtctacaaactcatcaaaacgagcccgggaaccattggttcaactcttggataatggtaacttggttgtgagagatgaacatgatgaaagtactgagaataactatttatggcaaagctttgattatcctactgatacgttcttatcgggaatgaaaatgggatgggatttgaagagaggtcttacttggaaattttcatcgtggaagagttttgatgatccctgtaatggagattttacttacggaattgagtttaatgaacaactcaatacataccctgaatcagctatgcgaaaagggtctacaaaattttgccgaagtgggccatggaatggcctaagtttcagtggctcacctgatatgtgggcaaaccaactaatcgattttggttttgtttacaatgatgatgaagtttactacacttactctctcaagaataagtcagtgatctcaataatagtggtcaaccaaacagcaaatgttcgtcaaagattgatatggattgaaacagagaaaatttggaagccttattattcagtccctaaagaccagtgtgaccactatggccaatgtggtgcaaatgggaattgtataacaacagggaatccaatctgccaatgtttaaaaggttttaagcctaaatctccagagggttggaacacaatgtactggtctcaagggtgtgagagaaatagtccactgagttgccatggtgaagagagagatgggtttttgaaattttctgacttgaaattgcctgatgctcaacatacatgggtgaataagagtatgaatttaagggagtgtagggctaaatgcttgagcaattgttcttgtatggcttatactaactcagatatcagaggagaaggcagtggctgtgtagtttggtttggtgatctgtttgatattcgacagttttcttctggtggacaagacatatatattcgactttcggcttcagaaataggtacaaagctgcagattttgagggttagatccttatcaagatcaaacactataaatatgatgttgtaattagtgtaatattgtgcattgctcactttcttgtctataatttttaccaaaatgaaggagaaactttaaccttatatggttaacattttgctttatagtttctatggaagacttaaaagaaagtcttaaaaaagaatattaataatagatgcaaaaatccatgaactgatatgattagagattctaactgaaattgtttaaactatgtcacaacagctcatgtggaaaagattgatcaagatcacaaaaggagtttattgctattaatcatacttccaattgtttcaatcataattttcctagccaccataatctactacttacgccgactcaaagaactaaaattgagaggtataagtctggataagtgattcttgacatgaataattttatagaattttatctaatcttttattttcttcttgttcttattacaggtttggcaggattaggctattggaatactaatgctatagaagctgaaaatgtagatagtgatgctccaaatctgcaagtgtttagttttaataaaatcgaaaaagccacaaataacttctcaaatgaaaacaagcttggtgaagggggttttggcattgtttacaaggtaacaattttcaggattaaaagctgagat

SEQ ID NO: 20600 - DNA, 1505 bp, Cannabis sativa
  modified_base (1276)..(1277): a, c, t, g, unknown or other
ctttcaagaagggtaaggttgggtatgtccaacctgaaattgctgtgatcataggcatcaaagaagcgttgagttggattgcgactcatccttgggacattgtggtgttagaaaaacggatagtctggtgtgtgtcgaggcagtccaaagtaaagtttttatggcctcccagtttggtcttattgttcaagatattaggaatttacttttggctttatcttttgttgagttatgttttgttaaacgatgtgcaaataagttggctcattgcttggcaagagactcttgtttctctacaagttttgtacttcagttggaggattgttcctttgaagtgcgttctattgttttgagcgagttttttagttaataaatctcttgattaattcaaaaaatatatatataactaaatacagctgcaatgcatgtaacaataatctaatatataaaaatttgtttaaataataatttgttgcaacccattataacaagtcatgacaaaatgtaacatccgtggttacattacaaatataactattaaaacctcttccattatattatatttataattttctacttaaaaatcaacaaaacacattataaaaataataaataattatcactatgcactaaaatttaggaacgttatagctacgtttagttaagcattattcattaagtatattttttagtaataatagctcatctatgaatattttaatcactttttttaactcttagctatatcttacattaactattttacaattagttattatgaatgctcttaaacaattaatttataaaaatgtatagagcagtcacaatagctcttttaaaaagagcattttttatatatataaaaaataaataataatcatggataaaatatattttcaaatggttctgagcaaaatatttgctctacatgcagagaagtgctatatccgaaatttgtctattaaccagaaacttgacacgtgtacttcaaaagaaatatgaattagctcaatgattgtattattaaattaagttattaaatacaacttaaataactcgtttcaataagtacgattgatagagatattcaaactcgttgccatataagtagatgcgagataagaataataactattatccattaagattggcgagatagtgagtccatcttgggataaatagaatatataatggaagtgttcaagacgagatagcaaagagcttgcagctcattgacccacatacttaggaataagagcttgcagctcattgaccnncatacttaggaataagagcttgcaactgattaatccacatatgtatacatggagagaagtaaccaccttgctaataccatcgtagtaaaataatattacgaggagaagtatagcttgttggaaaattgctgtgctccaatagaaatatcaaaccaacatgattataactcaatgacaaataatacaaaggacaaaatcacggattaaataatgttacaactctaaaca

SEQ ID NO: 20601 - DNA, 1326 bp, Cannabis sativa
gaatctttaccctacccattaattttgaatttatattgatcttttaattcaataatttagatatttatttaccaattattttggatttaataattaataatgactaaattttgaatagctgaaattaattttaattttcaacctttttaaaagcaattctttttacctaactttagagagaaagggtttcaagaagacattttcattactatataaatctataaatttctcctaaaaatgaaattataaatcaataaaaatgaataatttttttttaagaaaaattttcaaccaccaaacaccaagaacaacaagcattctactaaagtaaggaaagcatttatacaatcataaaatcctttaacaataaattgtgaatacaaataaaatttgttgtccaccaaattttgaaaaaatattattatataattaaaaaaatttctaatatagaaaagtatcatataaatataaacaaataaccaaaataaattagtaagataatctcaaacatacaaaaatagaattattattatcataaccaaaatatttatctatcaaatttgggaagaacaaaaaaaaagaaaatgattatgattgtgaatatcaacaattgacaagtaccaatgaaacgcattcctacattttattaatccaggggtaatttcggtataaaaaagacaatggcatttttcgtaaataagtataaaaacatgggtaattatgtattattcattctataaatatagacgaaccccccattcctctaatcttccactcgtaccttctcatcctcacttttttctctctctctctctttattttctctctctaaaaatctctgggcccttttttttttatttttttcgttagaaaatttttaattattatttatatatatttttattttttattttccaaaatttacttttaaagaaaaaagaatctttttcgcctaagattatattttaggtgaatttttttaaatgcccatagctgacgtggcatgcacccaaatttctttaaacaatgaataccaaaacgatgcgtcttcctcctcgtcgagttttaacggcgtcaagtaacaacaacaacaaaaagaggaaagaagaagaagttgaagttaacgtcgttcagctcttgccgtcaaatacaacgaagaagcttaagtcggttcatcactctcagctcgtcggctcagataaggttcttggcgcctcggcgccggctaatcatctgttggctggttatttggctcacgagtttctcactaaaggaacgcttttcggacaggcgtgggactcggctcgagccggcttcgcaggtgta

SEQ ID NO: 20602 - DNA, 2553 bp, Cannabis sativa
atgacaagaattggttgtagcagctcaagccaccaactgatgagcaataatattaaaaagtctaggaattcaaatcacatagaaatgaggattaatataaaaaaaaactgaaaagattaagaaaaacagccatacaatttcaattaaaaatctttctagagcaaacaattgattcgaggacttgacaattagtgaaaaacaaaacattcctccaattctttgagtgacaagcgcaagcacatgaagaagagcaaatgcctcagactcaagaggggaagagatagagactttaatagtgagaccttccaccaagttgttagcgctacccctcacaaccactacctcgaaggcaatgccacccctcgcaacaacatccacaaacacaaacatagagctaggaacaaacctccctctcacaaccctcctctcaacaaggggattctccaaggtcatgcacactagataatatttgattgtttctagcagttcaaagtgcaagcaaggtcgcactagaaaactgagtaaatttgatcttctcttccgttctcaaagaatcaggtggcttaaagatccaccacactatatcaacatcattagaaaacgttgaaattctatacttttcttgagtaatcatctatgatgctcagaaaatgatatgctcatcctatagatggaattctggaaggatccaacaagtctgagtggatataatctagtcttcacaaaattctagtttccctctcaatttgtcaccaaaaagaccttgcttgtcaagttcctataaccttctttcactcacatgccccaatctaagatgtcataatttgagcaatttaatatctctttctttaacagctgcatctactttaccagtaactaattttccatccaaaacataaatgtcatacttgattttccctttcatgacagtaagagatccctttgtcaccttcatggactcttctatcttgacgtcactatttggtaggcatgttaaaaagatccaattaattggagcgggtcagaacttcgatccgacggatcacttctgatctaaaatattcggacacttattgattctcagatcagacctgctctgccttacctaattttttttggatcggatctgattcgatctaatttcaatatattaaaaaaaaacttaattcaagactcggactccgaacctggacccgaatcccctaggacttgaaactcgaactcggaccgaacccgctcaagatttaaacccaaacccgggatcggacccaaagtcgaacacgaatctgaacttggactcgggactcaggacccggacccagacccaaacttgagacccgatccagacccaaaactcaagactcaaacctgggatcagacctagactcggaccagggacccagacttagacccgaaccagactcgggacctagacccggacttgcatctgggacccgagacccaaacccgaacccaaattcggtcccaaacctggttctaaatagggcaagcaaaacaggtcaaacacgataacacgactcgaaactcgcacgagagttagcgagtttgggtttgccttaaatgggttcaggtcgtgttcgggttgactcgtctaacccgtttaataaacgggtcgtgttcgggttgacacaactaacacaaaattgacctgttaatgacctatataaagttattttagtacttcaacatgtcataaatgggttataaacgtgtaattgattacacgtttaaacaaaatatgcctataaacgggttacacaggtcgtgtcctgtcaatccgtttataaacggatcgtgttcggattttattttttgacacgattattaaaagggtcgtgttcgggttgagcattggctgtagagtagtttgaaaggcagtataatttgttttgattatttcatcatataaatatattataggataaaattcaaataagtaattatttaattaaatatattataagataaaatattttttattaaatgattaaataatcaattaggaccagttctttatttaaatttaaataaatgatttatttatctttattttattaggttaaataaaaactatatatatatacacttttataggtttgatctaaaatgatcgatcaattattttctaaaaataaaatagccaccaatcattctctctctctcctactcgtgtgtccctctctctaccatcataacgtctcataaattaagtacacactgtgatataaataatctcctgtaatcaatcatatgatcccacactcgttctgagtgttgagattaatgtggaagacctgtgatgtgagttcttgccaaaccaaataacgtttgattggaggaatgtttgttcatacgaaaagaatcaaccctaatagtttatcaacatgtataatgatttcatcttgaagtatagatttaatgtatataaatttattgagatcttgggtcttatgatttagattataagaatctaaaatatttttctaaatctactttctctttctattttaatttggaccataaaaaccaata

SEQ ID NO: 20603 - DNA, 4531 bp, Cannabis sativa
  modified_base (40)..(40): a, c, t, g, unknown or other
tgaaccatgcaacacaaaatgttatttatgatctttattnataagtaaatctgattatatgaaacgagttttaatagggcataaaacccaacaatgatatccatgtattttcttatttcttcttcagtctgtggagcttggtctttagtgagttttgagccaatggtgttacaactgattttgcatcatttatgttaaacttcattatgactttcttcaagtatccatgttgagttaacatgataaatccaggtcttttccttctgatctcaattccaagaattttcttggcttctcccatgtctttcatctcgaactcactcttgagttggcatttcacctcactgatcctgtgcttgtcttttcctattagtatgtcatcaacatacagtagcaggtaaatttctttgtcaaaataaacacatggatcattgtagctctttgtgaactttatcctagacatgaacttgtcaaattggatattccattgtctaggtgcttgcttcagaccatagagtgatttatgtagcaagcatacctgatttggattgacattgtcaaatccttcaggttgtttcatgtagatcttctcatctagggtgccatgtagaaaagctttcctcagatccatttgatctattgctagatcttgatcagcaactttggccatgatagctctaatggaagcttgtttcacaacaggtgcaaatatatcattaaaatcaacaccctctctctgtgtgaacccttttgccaccagtcttgccttaaacctcactgtgtcttcatttactccttctttttgtctaatagccatttgctatcaattaaccatattattcagcagcaagggcaaatgctaaataatatgcataaccaagctttgcaggaagtcttatgtctcttcttaccatatctctctggccaagagatagtcatttaggtcttcctgtggctcttgggattgatcatcatgttcagcttgagcttggctttcatcaacatttgtaacttcatctgagcaatgtgactgatccacctcaagtttgaccctgcattgagactcttctgtgtgcagtgttggatttggcaggggtttcatagccatttcctcttctctgaaagtgacatctctgctgatgatgcactttttgaatcctggttaaagacaacatagcttgtatcccttgacactaccttaagaacaaacatttcactgccctaggcttcaatttgtcttgcctcacatgagcataggcagtgcagccaaaaactttcaaatgatcataggtctgagcttctccagtccacttttcttgtggtgtcatgaaattgataccagtagaaggacatttgtttattaggtagcatgcagtgttcaatgcttcaccttagaattttctctctaaactagctcctttaagtatgcatctaaccctctcaagtagtgtcatgttcatcctctcagccagtccattttgttggggtgtgtctttaacagttaagtgcttggaaattccttctttgctacataattctttgaaatggtatgaacagaattcccatccattgtctgttctaatcttcttgagcttcttgcctgtttgattctcaagaagtttcttccaattgacaaatgcctcatccttggtcttcaaaagatatacccacacctttcttgagtaatcatcaatgatactcatgatatagtaagcacctccaagtgtgggaatccttgaaggaccccaaagatttgaatgaacatatgccaattgctccttggtagtgtgcttggcagcagtgaatttctatctgcagcttttaccatagacatgctcttcactaaaattcattttgcaagacacctttcctttgagaattccttgtttcttcaattccaccaggcctcttttgctcacatgccccagtctcaaatgccacaatcttgtcaagtcatcatcacctgcacctgtcacatttgaagctagaccaataactgttttcccattgagaaaatacaaaccatttatatagattcctctcataacagtggtggaacctttaatgacattgagtgaattttcatctattttaattctacaacctttagaggccataacaccaatagacaagagatttctcttaattttagggacatacctgacatctgtgattgttctttgaacaccatcctccatttacatcacaacagatccagttccttgaatggtgcatgctttgttgtcacccaataaaacaattcgtacccccagttttcttctcaagattgtagaatagttcttcacaaggacacatgtgaaaagagcaacctaagtcaagtatccattcttgaccagaatatgtgttagataccaccaacacaccagctgattcataaccatcagcaacatcagcttgacccttttctttactcttttctcttttcagtttgttcttcaaggcaaggcattcatccctgaagtgcccttctttcttgcaatagaaacacttcttgtcagttgtgtttcttgaacctgtctttgtcttttgattccctcgatcaccaccatgtttgaaattcttgtgacccatcttgtcatgtcttcctttgacaaacagtccctcacaactatgctctgttttctcatcaaatttgctttggatttccttggaattcaatgcagctttcacttctgacattgtaagagtgtctttgccatatagaattgtatcaacaaaatgttcatacaattttggcagagaactcagtaggattataacttgatcctccttatctacctttacatcgatattgttcagatcaagaacaatcttgttaaaatcatctaggtgtctcctaagttccttgcgatcttccatcctcaaggtgtacaacttcttcttcaagtacaacttatttgcaaaggacttctttatctagattgtagctagtttttcccacagtccaagggctttctccccatctgcaacttctctaagcacttcatctccgagactaagtaaaatgacagaatgtgcctttgtctcgatttcttgcttcttctttgcatcttcaacaacctttaatgcctcgacattaatggcttcatcaatgccttgatgtaccagcaaggctctcatcttgatcctccaaaggctgaaatcatttgctcgtgtaaacttgtcaacttcatacttggttgttgtcatttcttgattttaatcttgctgctttgatctttaatcaaacacttcttgatctccttaattgaacctaagctctgataccctttgatgtgatccaacctatcacagtagccaagatcaagaacaaaactcaaatgattaaagtcaaaataaacaagcaaatcttagctgaaagaaatgcaattaaacagtaaagaataaactgaaatcaaacacaagaatgaaatcaaagttcagccattgaggcacttcccgttaaacaattatgcaaagaatgattacacgtgaattggtggtccaatcaagaactcgagtgcagtagggtacatctgaattaacaccaagagttgctagtttttcatgccagaactcaaagtatcttcccttttcaaacactcatagcaccaagactctattacaagtgaatgaataaaattgaaccacacctaaccttctaactgatatggctatttataggaataaccaacttaactaaaaataactaacaaaccgacttaggtgtgagggtaggatgggaatgagcctatacacactacaaaaaaacccattttcatcgactagttttttggtcattaaaactcattaattagtcacccaatattatttgcgactaattatttttagtcaccatttagtcgctgaaagtcggtcttagaagagatttagtgactaatatatttagtcacaaataatgttattatctatgacgaaaaatttagttacaaaatatattaaaattagtcacaataaaattgatatattggtcacatatataaataccaatatgaactttcaacaaccaaaaaagtaaactttaacaactaaaatttagttataaaagggctaatattttgtgactaattaaatagtttagttggcaataatgaataaaaaattacataaattaattattcagtgactaatatttagtcataaaactaatttatactattttttttttaatttagagtatattcatttaaattatataataaaaataatttattcaaagctatatttaaatgacgagagtttcgtgaaaacaatctcgcaaataattaaacacacattaacaactatggtgaaatttatgaacaaagaaatggtttttcttagtattattagacaattaatatacagtataatatattaataaaatgtttaaaattattggaagaatcaattgaaaatggttatatagggtggttgaattttctgtcatctcgaggaagagcagtaaagcttctcttccctgtccatgaattccatagcttgtagtcattgcattccaaaatatcaagtc

SEQ ID NO: 20604 - DNA, 8033 bp, Cannabis sativa
  modified_base (7559)..(7560): a, c, t, g, unknown or other
ttagtcacaacataggaatgataagttataattagtcataactttttctttttagtcacaaattttgttgtgactaaaagtaatattttttgtagtgacttacacttaattttataaattaaaattttagtgataaaattttctaaatttctgaattgttagcaaatttaaagtggctattaaacttactgactttgagagttagttaaaatttgttaaacaatagttggaacttagaagttagttaaggtctgtttttcattcttttagagctttgtacatctgttagttaatgtcatcattgttttacaaacactattggggttcggtgggaatggacttctgtgaggcagttgtcgacttcttcacaactggggttatgcataaggggttcaatgaagctaatatagtcctaattcccaaggtgttaaactcgaaaaaagtgtcgcagtttagacctatctcgctttgcaacgtggtgtacaaggtcatttctaagataattgcaaataagattagacaggtcctcccaagacttatttgtccaacccaggtagcctttgtcctgggtaggaacattcaggataacaatgtgctggttcaagaaatcgttcactctttcaagtacaagaaagggaaagagggcttctttgttataaaaatcgacctggttaaggcctatgataaattgagctggcaatttatagatcacgtgctatcaagcttcaaggctcttgataagttctgtgggttcgtctgtcagtgcatttcaacgactacattcaatatttgccttaatggtggaaaggtgggtagacttatcccaaagtgcggtatcagacaaggagatcccctctctccatacctttttatttgggttgctgaaatcctctctcggctcttggagaaggcccttgacagtggaagaattaaagggatcaagttgagccggtatggccccaggttatctcatctgttctttgtcgatgaccttatcttagtgggtagagccaccgtagaggaagccacgggattttggaagtgctcggaaaaattctgtgactggtcaggacagcgcattaataaggtgaaaacatccatcttcttcagcaagaacaccagtgatgagatgaagcatgatatcattcagaccttggggctcaatctatgggaaacattagctacctgggtctcccgctattctgttgtcggaagaaagatgctgacttcaattttatcatggacaacttagtctcgaagtttcatgggtggaagttaaagtcgctatcgaaagcgagtcgcactactttgataaaatatgtgggtctttcgcttcctggatactatgcaaacgacgaagttgtccaaaaagcttgcgtataagatagatggcatggttagaaatttttggtggggttatgagaaaggcaatggtggcctgtatctcaagacttgggataaactttgcctccaaaaatccagaggtggtctcggcttccgaaagacctctgaaataaatcatgcttttctggctaaatggggtgagctctccttaccgaagttgattcgttgtgctacagagtgctaaatgggaagtaccttaagggtaaaccctttttaaattgctcttataagagctctgactcttggttttggaagaatgttgttaaatccaaggacttaattaagaaaggagcatgcaagctcattgtggatgggaaagatactaatatctgggaggatccgtgggtaattcatgggtagaatttctatcccaatccaaagaatggttgtattgagggttggaataaagtggcaaatttacttacgggtgatgggaattgggatgtttccaaactcaactccctgtgactaagtaaccaccaataatatccttaaaggaggtaggccgaggggacaaggtagtgaaaaatggatttggtctattgattcaactgttcagttttctacgtaatctacctgtcttgctcaagcattagcaagagcccctcctattataatggcgcccactctttggaacaaactttggaattctaagatattggagagccataagattttgtggtggagtatcctatcaagtgccataccgatcaagtcaactctagttagaagaatgcacattgatgaggtttcttgccccctatgtgatgaggaggaggaaactatggagcatctttttctatattgttactttgcctcccacctatagaggtcatccccttggggcatgatgcctgtgcccgagtcaaggggatggatgtggaattgggtcaagttcctatggggcctagaggacaaaagagtagatgtcaatgaggtcttcctgtatgcgtcaattatagtggatacgatctggcgaacacgaaatgacaagattcataccactaattacatttgtaacattaatcactgtattaactatatttctacttattacgtagattataacttttgtttatttcccacgtcggtaatttgtacgatgtcgatatggtctccctcgctggacgattgggtcaaaatcaattgtgacgttaaggttggtagtgactcaatgtgtgtggtggctttggctagggatcataaggagtcaattttatgggtagcaagcaatatcctcagtttttctgatctgcttattggagaagcggattgcctattggccctagaatcagtagttagagggaagctttcatttgtgatcgttaagagcgactctgagacggtgatcaatactctgaaggggatgccctccaattagggtattactaattatgcacctcattgtaaaaagctctcgaatcttttgactgaaagtaatttctcgtatatttctagaagttataactatgctgcccataatgtggctaaatgggcatttaactgtaatgtgactggtatggtggatccgtcctccattccaagtaacttaatttttaatgatcgcgaggtctaaattatttggtgtttaatatatctacgcatttttccaaaaaaaaaaatgcttataaatatactgtagaagccagccgtcgagcattcatttcaacaattcactttctccctcattttacttctctatctgcttaaatctccctttctgtgttcaaacagagctctgatattcaaagttcttacatggtatcagagtcatgtcgatcagtagtgacaatggagtaatattggagtccgaattgatccacctgttggtgaaagagtcaatcaacaacaagctagagctgcaaaccaagaaccagaagctaaaattcccttcccaaacaacaaccttccccctctgaatctctgattagatcgaaacaattacatagtctagagatcacttgtgcttgccgccactcgtgcctatgatcttgatgggtacatgttagattatttttaccttaagttttgggtcaattttagaatagcttttcttctttgataatacttttggaatggttttaagcttgatttctttgattttaggttctcgaggtgttaaagtacaaattctgtcaagtgacgaaaggacgggacgaactgaaagtgaaaaaaaattcaagcctaattttcttagctagtcgcgaccaacaagaaccatagtcgcggagaattaattggtcgcgaataagccttacataatcacgactaaccaactggcaaagacagtgaaattcaactttacattatggtccgagtaggcattttgtggtcgcaaccataggccacgaacttgatttttggacagtctcgtaatttgaccattatgagttgtaaaatttgatttctataaaagggtttcgaattttcaagcacattattcagaaatagaaccttaaaaataaaggaggagactaaggaagtgagtgtggcgacccagataaagttcaccatctagttctttcttttcccttttcaatttttttatggttatttttatttctagtttgattatgaatttgaatttagagattatgaactaatttctcaatttaggaatatgataaatgttgattgatgttatcacaatttagataatgtgatttgttagttttcttctctagataattgtgatttgttcttatttattttaatacatattttagattggccatcttaaatatgattcatgatcctaatataaaatctgagaagtgatattaggaatgctctaatagaacaaatataagttttgatgtaaaacgagagtatttacataacctgtataacattgagatgattacttaatgaaaatcatatattaatttatttaagagatgcaataggtaatatgtggtttaggaccttaatgatctgagaagagttagtgttatttcatattctatcatcacttaaacaaagaaaataaataaattgcattaacaattaggtaattgaaagaacatgattcatattcctaatctctcatccgtatttgaaaacattaaaaattgtttccaaattttttgtcaagtttaattattttccgtgttacaattattttgattaaccaaatagaaatataaatctagtttggtgaaatttaattttaattctttgtggttcgacctcacctgtgtgagtaatacttgatacgtacacttgtgtagtttacgattttgattaacaaatttttagcgtcgttgtcgagggatttgttaaaattgatattacaataattaaattaaattctactttggtttatctttctacttcttaccaactttttttcttaaatttttctcatcttattttaggtacttataatttatgcgacgtcaaggaccaagagcaagagtgactgttgatcctgagattgaaaagacctgcagaagaaacagaagaaacaagagactagaaagagctactgaaagggttgaacaagaagtggttatggctaataatggcaataatgacaacaatggaggtgttgtagaagaccaggccaatagtcgcaatccacctgaccattgcctagtttgaatcaacataattatcttacttttagtatcttcttagatcagctgataaaaaactgcgtcaataatttttccatacaattttggcaaataaataagtcacttacgttcaaattagttaaataaccactaacatgaaaaaatatatatatatatatattttgataattaaaagtgctcagtaatgtgcaaaaaaaaaaaaaaaagagtacttaggtaatttgaagtgttattataagttttaggaattaatttttttttaacaaaaaagataaaatttcattaattcaaaaaattattcatcattacaaaaatgaattctaaaggagcattgctcccacaataaacacgaacagaaataacactagtagacctcgttaagaagtgggctactttgtttgtaaaccgtttaacaaaatttaaagaaatatctttgtgctcaaaatcttacaattattaatgattcttataaagtaagataatattgtagaagagcttctagtagcttggaccactataagacaatcagtttcaatttagaatttattctagcgctggtttttatccaactaagagtgtcctgtattcctatagcttcagcgattgctggctggatttttcctctagtacaactcgactttgcttctgctaatgtacctgtatgacttcaagccataaaggaataattattacagtttgcgtgagtgaaaaatgcagcatcagtattcaccttaatcgtatcttccattggagttcgctaacacttatgtccatcttcagaagccaacaattctaaggatgcatcaaatgatatttcttgagcacattgccattgattaaggacaatttcttgccaacacaacaacctcacctacagccctgtgtttattatcccacatcagctcattttgacattttcatatcgccaaactagcatagaaatcaacatgcattcagtattcgaaaaactactgtatgctgccagtaaccagctagaaaaacttccatccgcatcagttgtaatccttgaatctaacagctgccagtaagctttcgagtaggatcaggtaaccaacacatgcaaaattgattccctttccaggttgcaaaaaagacaattaacatcaatattaacatgctttgatctaagttgttattttgttggtaaacaacctgttgatgctcgccataacacattcttaaccttaacatggacttttaatttccaaattctattccaatagccacaattgtcacccactaactgctcatccttctcctcttgtagctgtctgtattcactcttaactgagtagtggccaatttttttcaaacctccaataccaagtatcagcatcgatgggggacaaagcagtacttagaattaagctcacattaaattattgttaatatttggttgctaatatcaaattttattttagaaagaattggagaaataaacattaatcataagagtaatttgcggttaaaccctctcaactatcatttcacttgcacttaactctctaacctcaaattttagtggtaaaaccctccaaactctaaaccgttaataaatttaagatgtcatctatttatctcaattaactggtgacatggactgcttgtgtgtaccattatgtacatgtggcatatttatagtggtccacctaatataattatttaaaaactataaaaaaatcttttcaaatttattttaaaatttaaaaaatatttctcaattttaattaaaaaaaaaaatcaaataatggaaaattaattttgttaatttttttcttgtgtaaataggaatttgaggttaaaatctaaaaaatttatcaccatttttgattgtatttacttatcaaccaaatatatgaagaatattgaaagtctcaaacattattatatctataaaaatcaaaatattattagcgagtgttcttttctcagtaaacaaacaagagatgtgaaattcaaaagaagaacaatcttaataccattatcatatcaaacaaatcataggtttactgcccttttttttcaagattggggatggaacgagttggtgaaggagaggatggttggggacgggccagaggaggagcgaacgattggggcgctccagttggggcactccagttggtgtatgcgtgcgggtgttgtttttggtcgtgtgcagctggggacgagggcgaacagaagaggaacagacgattggtctcgtgcagtcggggattaggatgaacgaagatgaagaagaagtgtgactagtgttggccggtcgtacggttggtcttagcataaggataaatgaagaagaagatgaagttgctagggttcaaatggggcgggcttttcttttttttattaatttgggcccaagctgctaggtagttgcataggagagggagagtgcgaaagagagtttggtctctgttggaccatttgccacctggaagggaaggagagttgagcttctcagatctggaaggaagaagaagactcggggagagagagtgagaaatagagatcgatgagagagagagagagagnnagagagagagagagagagttaggaaaaattaaagaattaaaaaaatattatttatttattgattaataattttataaatgtaaatatttttttaattttaaaataaattctgaaaagatttttttttataatttttaaataattatattaggtagtcagtttatgttagtaattaactgagacaaatggatggcaccttaaatttgttaacaatttagtagtttggagggttttatcaccaaaatttaaagttggaggatgaagtgaaagtaaaatgatacttaggaggatttagtcgcaaattactctaattataataaaatactcgtattatatatgggtaaaagttattaaaaatgtgtacatatatattttaccaaaataatattataatttatttttggctaattaggattttttcccccgaactttaacatgtatcaaatcatgccccctgaactttttttaccgtt

SEQ ID NO: 20605 - DNA, 7156 bp, Cannabis sativa
  modified_base (240)..(243): a, c, t, g, unknown or other
ttttgtcatttaacaaaacacatggttcaattggtaacttttacaaaacagagggtccaaaatagtatttaccctttttaaaaaccactcttacactttgtttggtaggaatgaaaagtttatgaggtgtgtacctcaaaattggttggtataataggaggaaaggaaataactagtttattttattatctaaagaaaaatatatattaaaaagaggaattatcttatatactatttttnnnnttttttaaatttacagtttaggttactttggtagtttctatgtggattgcaatatgaatttgagttgcgaattaagttgttccattaattgcaataagaatttctgtgtaaaattctgtaaaaatataaataaaaaaatatatattttaatgtgtaaaatgtaaaaaataaaaaaataaaaaaaataaaaaaaaaacctattaaaaaaatagacaagttaattattaaaaaataaattgacatccatagatatttctttcatttccctcctttccttcctcccaactaaataaaactaagcaaagggttaatattttttttaagatttttttctaatttttttttatgttaattttaatatttatttgaattttattttcaaaaaaaaaaattaatgtatattttttttcaataaaatttcatataatttttttataatatataatatatatatatataatcaggtaatgaggtacggtatgggtaggaccgacaacaccttagttaaaaagggtaagttgaaaattactacttttattactcaattaatcaaatttacctatacttttatatttatttgaaacatacctctttttatgtgtattgtacccaaaatacactgacataagaaagtcacatggagagtatcttgaattaataggaacaaaattggtataatgtttaaaaaaaagaggtaaaaatgatagattttaaaaaaaatgataaaaataaaagagaacaatataaaaaagggtatagagtgtaattttctttagcgctaaaacgactaggcttgcatctcgggctaacccaactcaagacccaaaacaaatcatttacaaaacactcataattttttggtaattttaaaaaataattgtatcgtttagtaacacttttagttttaattttttaatcacaacaaataatttctcataattaagtgattcttatatatcaaacctaaaaaaccaacacaagaatgaaaattatgaattgaaaatttaagataaagcaacaagagaagagacagtcaatgaagatgtagaaattggcttcttatatagtgtactctcccatggttcctcataaagaaaattcatattgaggccataacaatacaactgcatcatttttaattaagataaaaaaaaaagacccaaaaaaaaaacagagaggaattacaagggcattacctatctacaccaatgcagtggaaactgaaacccttatgaagaaaataaagaagaaaggagagatatttgtacaacaattgtaaagaggaattagtacacttccacattccattgctctgccttcttcagctgcttcttgtaatcaatccattcaatgcctattcagaagaaataaaataaaataatgaataataataacatttcggttcttatattttcgctaaatatttgtttgaattttatgttttgaaagatctcgtattttgtaaattgattcaaaatagtcttcgaactcgattttggagaatatttggattaaaattgagttcggaaactattttgaactaaattacaaaatagggtgccaaaaattaaaaacaaatctcaactcaaataaaaagacaaacattttggatcctctcttttcgctaaatattttcttgaattctatgtttgaaagctcccgtattttgtaaattaattcaaaatagtctcccgaattcgattttagtgaaaatctttgtccccgaggagaatatttggggtaaaatcgagttcgaaaactattttgaactaatttacaaaatgagttaccaaaaaatatctatttggattcttggaatcgatctcattttgttttattcaaaaataataaaaaaaatttaaatcctttctttttcgctaatatttagttaaattctatatttagaaaaatctagtattttgtaaattggtttaaaatagtctcttaaactcaattttaggcaaatattttagagaataacatgactaaattgagttcagagactatttcgaactaatttacaaaatggggtataaaaaaaaatatatttttcaaaatattattctagtcctcttaccatctttagcagccaatggactcataatctcatcaatacccttttccattcccttgagtccacacatgtacacaaaagtgttgtctttttgtagtaattgccataactcttctgcatattcagccattctggtttggatgtacattttctctcctttctcatttgtttgctctcggctcaccgcgaaatcgagcctgaaattctctggagccttctctttcattttctcaaattcctaacaaacccaaaaccaaattcatcaacaactttgtttgtgttgaaatcatacaattaaacatcaattattatgactatctcaaattctaacctctttgtatagaagtgagctgcttgtgggaacacccaagaaaagccatgccaaaccattgaactggtaaaatttacatattataatgatatacaatacaatacgatataatacagtgtactgaacagagtctcaatagttaagaacatgtaaaatttaccttgtagttttcatgcttctcgaagaacatcttccacaagaatgatcggaatggcgcgattccagttccggttgcaagctataagagtaaatcaagtaacaaaaaattgattaaaaatgttacacactaaagatatttattgttttgattaaaatggcaaatttgacataccatgatgatggtggcattaggatctttaggcataagcatctcttttccaacaggtccagtaatttttacttcagcaccgggcttcaaatcacctgaaatttaccacttaagtcatcttcaagtttattattaataggataaatagcaacataagtacttaatatttgtaaaactgtaaattttttccagtttcgtcagtataaattctgttttgaatttattaaaaaaatatttaaaagtaactgatactacatatttctatctaaacccaatgatttagaatttgacccttatatgtatcttgtttaagacaataacagaatttgtattcacgaaattagaaaaaagttacagttttacaaacattagatacttatgccgctaaaaataaacattaaatttatgtagttatgcatctatttacccttattattattatatttttctaatggaatttgatatagaagttttcaatgtccttacataagaagttagagcaaactcccttaacaatttctccttgttcatttgtgtacacaagccttttcacacatagagaaacctgtgtaaagaaaaatcaacaccatcccaccaattaaatctgtaatcttagtaaaacaaaaaatatgaaattatgaagttaaacataatcataacaaactcacagtttttgtgtctccaaagtcaccaagagcactgctggcaattgagtataacctcagcttgtgaggctttccattcttgtcttcaccatctgcaatcactccaattgattgtccttctctgtatgggacctcacctaagtgtcacaacaagcaaaaacaccaaaaattaataacatagttacttccgaacacaccttaaacttaatacacatctcaaccaatccaaacacacattgagaattcaactaattgaaagtgtaattatcatgtgagaaaagttgataccttcagtgctgaaaaccatatgccaagtctctccaggggcatcatcaccagtgatcttagtgttgagaagacatctaccagtgtaaggatttttgggtttgaacttgtttacaacaacaccttcttcatctttctttgaaactttctcaaccttagtagcaggagcctctgtggtcacctgggctctgattgaaaccactcttccactaacagctgatgcatctctgtaaaaagtagcctgaaataaccaaaacccatatcctaaattcaatgaaaaaccacatacattaatcaagatcaaatttttatgtataaagttctgacctttttcaaagtgattctgtctggtgtgataatggaagtcctggtgggaagagaagtggattttgaagatgggaatgaaacagcagcagttactgcagctgccatggttggaaatattagagaaaaaagaaactaaagaagaagaagatgatgatgatgttatacaagaggaaaagtttgaatttttatgaggtggtaaggattttttagcaaaaaaaaaaaaagaagaagaagaaaaaaatacccaaaaagattaaaaataaagatgtgttttggttttggatttttggattatagattgggtggaggagattgcaagactaatgcagtggtagatgtaaggataagtctattcaggtccatatatatgttatggtactttactactctctctatctctatatgactcttattaaccacttgcttgtttagatttttaattctcaatacccaaaaggcaaattgtgaacatggaaaatgcacacttcaatttggtcactattatatcattgattacaagactaaaaagatcatattttgcttaattaatggtcaaagttgtaatatgtcacaacattagtgatctaatatcacaaatgctactctccaaaatttaatcatgcacaaaatgaacaatgtacaatccaaaccggttcaattttttttatgtacattgattaaaatttaatgtattctaaatttagtttgatgtactttagttttcaatgatttaacaaataatttatatgatttgtcaagcattgttgtacaattataattgttttttgtcattatttagagaggaataatttgtaacataaatatttaagtttaattttgagttgtggaaaaatatttaaatttaattttttatagtaataatatataagttatatttttagattttcactaatatattgttgttaagtgtcaaattattatctacgaaccacgtgtcatttttttatcagtatatttaaattaatttttaataaaaaataaaaaatttaatgatatggaccattcagggcctgttgcctggccatcgacttgataattaatgtccatgtacttatggaagttccaaaaatataattttagtattattaccataaaaaattaaactttaactatttatcaataattgaaatgaaaattaacattattagtacaagttaggcccatttgattcgtaaagcctcgtattattaggcccattgcgaaaaataataggatggcccaatttttgaaaatgatgctagttggtttaggaggaaggaatataataaaggaaaatttttggtaaattttttagacttttatgtttaatgatttttttttatatatatttttaccgtataaaataataaaaaagattatataaaaataatatacatatagcaacaataaaataataaaaatacaacataaaactacattaaaaaattgtatttcatataaataaaatcgtaaaaatatttaaaattccatacaactgtttttttgtatttttttgttgcttttatattttttttgaaataatccctataataaaaagaaaattacaaattttatgagttcttatattttttgttcaaaaatttgacattttctttcaaaaaaatgttattttatgagaaaattgaaaaaaaatatatatagaaaaatcgagtaagggtaaccaggtactcttatactaaccaaaagagtaaccatttaccataagagggtaaccaagtaccctatgctgttctttccgtattttttaacttttttttcaaaaatttcccataaaataaatatttttacagaaaatcatatttttgcaaatatattctctaaaaatcataaaaataaaaatttgccaatatgggatatttagcccaactcaaatcccaaaagagaaagaaaaatgctgagtactaagcaagaggttttggggtttgttagaacattaagagaacacagttgcaacgccgccgttttgtacttcgtcttcttcatctctgccataaccatgggaggagcagaaaccagtaaggagcttctacacttggagcacaagaatccctcaacttcatctctaggtctttctttcattcactctctcttatgtcttttattattatcattattccttactcatataaatatatgtatgtatgtatgtaactatgtatatgcagaatcagcggtacttgtttgtaaatcagaatctgaaagaaagaaaagcaagtctgatgaaaagcccaccattgctcatgtgcctcggagtcaatgtacttgttaaatttcccatcttttggtttgtaggttttaatggagaaatagaattagagtaatgttgggtttcatgaatatttcattttgattgatttcttttgtctttattattattattcagttcttggaaaagtaaaagactttttgggagtaatttcagaagccaatgaaaaattgcagcttcataaacaggttgccattctaatccttacattttgaagtaagattgaactttatgtaccaattttactgattattattatttatgtactaaattatgctcacagaattcaatatctattaaatcatgtcaatgacccttaaattttgacatgtacctaatgatgctcgtacactttcatctcaatagatcagagggagatttttaacgatcttaaaagtttaggagtatgatttagtatatgtcaaagttcgtagaactaaaatcttaattaactcttttttcttaaaattgatttaattgtgttttggttataggacaattctaagagctatgatattgaagcactagatggaaatgaatctcaagttattgaaatggtatctcatttctctctttgtttatttaattgacctttgttaaatgttattggaaaatt

SEQ ID NO: 20606 - DNA, 4882 bp, Cannabis sativa
  modified_base (2752)..(2760): a, c, t, g, unknown or other
aattaattaattgatttaacggtgttacttcgacctgttaaatttaacaaaaaataatcgtaaaccaacaatttttattaaataatttaatataaaagatatttcaaccaaaaaaaaaaaaaactcccataacttgtttctattaaattttacatatcttatatataaataaatgattaatataagtttatttatttatttgtttgttttccacgtgatacacgttactcaaaagttgaatcatatccctcccatgactattttttttttttttttgatcattaaagtttaaataatatacataaataacaattctcattttaaaatataaaaataaatataaataattatattgattgataggctagctctcggtataggcggactagacctatacctaggactcacttagatcaagggttcaaaaaaaattacaccattatatttttttttattttattttgaagaaataaaacagcaaataatatgttgcatagtactttttaattgatcgtagtctataaaaattaaaacaacaattaattttataagtttggaatgataaataattatatatgggaataatattaaatgttccacactttgatcataatatattttattttatttatataataatatttcacattatttctgttaatacagatttcttgacaaagcagcagtgaagactggatcaacctcaccatggatgctaagtacagtgacccaagtagaagaaactaaacaaatgatcaaaatgataccaattttgatagtttcattcataccaaacaccatagtagctcaattattaaccctattcatcaaacaaggcacaaccctagatagaaatctaggccctcacttccaaatccctccagcttgcctcatagtactagtaacaatctctttcctcataagccttgtggcctacgatcgcctcttcgtcccaattgtccgacgttacaccaaaaaccctagaggcatcaccatgctccaaagaatgggcattggattcgctatacatgtcatagtcatggttgttgctaccctaatcgagagaaagagattgggagttgctagatcaaaaggtgccctaggaaaaaccgacatagttcctctctcgatttttgttctactccctcagtttgcactgatgggagtaggcgacacttttatggaaccgtcgcaaatggagttttactatgatcaagcacccgaaagcatgaaaagtttggggtcttctttgttttgtttgagcaaaggagtagggttttttcttagtagttttttgttatcaatagtgagtgagataactaagaaaaatgagagtagtggaggttgggttttggataacctaaatgtgtctcgtatggattattactatgcttttttggcagtgttggcttttcttaactttattttgtttgtgttttttgctaagttgtttgtttacaattccgatcatcatcatcatcaccaagtcaatacttgaaaacctatgtgatcacttaattatttttaattattaaagcttaattgtcaagttctattaatgtctttaattgtttgttgtttattatcatatatagtcttataataataagtgttcatttagtaaactaatctaagagttatgattcactaaatatcatccacattcatatcaaagaattttcctttatttgatattgcagaatttctgtttactttgattgcattttcactagagtagaaatatagaaaaaagattgaactaagcactaattcttttatacaagttaccaagtttatggataatggataatggtaccatacattacaaaacatagaagaagaagcttattcttctttaattgatcaaactgggcctagatgaggaaattgggcccagtgaaaagatgggctgagattgcttggatcaagatgatcttgttgggctctcagaaaacgggcttttgtgctggttttatgtaaaaatatcactttttttcacaaaaattttaaaaaaaaaatgactagtgtctcttcatgtctttattctctctttggaaaaacagcttttgtgggcaaaaagacaattattggccaccatatattatccctttatcacaatactccataataaaaggaatctagctaaggagctatacacaatgtaagctcctcctaaattgagttaaatatgtacatgaggatgggaagaattgaaagattgtgcatataaactaagcactaaaaacaaaatctaagggtaaagtcaaacaaaatatttaagggtaagtatatagtacattctttaaacatgtatttcggtagactcttatttgtttcgacacctaagagagcttttaaattagtttaatttttttttatgatcgtgtatgttatagttatttaaaattatttgtaaatttttataaaactctgagtagtttacaataatgaaaaataaggttttaatattttgttgcacacatgcgactgtttttcttataaacttagtaagtaattgtttaaatcctactttcaactttgtaattattcagaatttttttaaaaatttacaattaatcttaaatagctacaatgtacgtgatcatgaaaaaaaatctttaaaaggtgtattatagacatttttaatatttaatatgtcaagtaataaattaataataactcatttgcggtataaatacttaaatttaactctcggttattaataaatacctaagtttaatttttggcagtnnnnnnnnntaagttatatttttggaactctgtcacatggcaataaacttaacatttaacaatcagctacctacaaaattttagaaatataacttaaatatcattaccgctaaaaattaaacttaagtatttatttgtaactgtgagttaaatttatatatttatgccgcaaattatttaaaataatatattcacatttatagataggttcaaattttgttggtagctagctaggtccacaaaaacaagagaaaaagacatgtaaagaatccactcaataataactaagaagaaataaagtatcaaactaataaacaaaattaaactaaaccaaagaaagaaagtttgcctaggtattgtatatatatatatatacatacatggaggtaattataattaattaaagatcatatagttttagttattattatggcaaggaaggtagatgatgatgaaaagggtcaaagtgatgagaattacacagaagatgggacagttgatcttaaagggagaccagttctaagatcaaacactggcaaatggacagcttgctccttcattgtaggtaaattattagagtatttcttaagcgagaacaccacttttgctgttatgaataagggcatatttataatccttgattttcaatctgatggctttaatttatttgtttatcgtaggagtgttgaggttgtattagattttaacatgttatgttatatgaattaggttatgaagtgtttgagaggatggcatattatgggatctcaacaaatctagtgttgtacttaacaaataagttgcatgaagggactgttacatcttcaaataatgtcacaaactgggctggcactgtttggatgacacctattttgggtgcttacattgctgatgcttatcttggtcgatacaccacttttctcattgcctcagccatttatctactggtatatataataaataaataaataaataaatattaattatactaaactccattcaaattcatcttttactcctgaatttgttattttactaagttcaaattgtgtcccttatagtatattttttataagaatataacttttatagtaacgtgatctttctattatattctattcaattttttagtgaaataagtgacccgataaatggtaattgataataaatgtaaattaaattatacatttcacactttttactttaattattaaaaaaactaaaaatataaaatataaagtattagaaaaattaatttattctatgcattaatgtaaaaatgataaaaaaatattgaatttgtatttatttattagttatcatccattactttcttttcacgataaaaatttaaaaaaaatatatgatggaagaattatgttagtgtaaaaattatatttcgaaagatattattaacaagttggggcagcttcgtaatgtaaataatttttcttttttccttaaacacacctaatctgaggcttggccctatatagcacactacattatgatgatcatcactaactatttaaatattcttcaaaactatatgtagggaatgttgttattaacattaacagtttcagttcccggcttaaaaccaccatcgtgtggtcacggtattaaagtagaagattgcaagaaacgagcctcgaattttcaagtggggatattctactgcgctttgtacatcatcgccatcggaacaggaggaaccaaacccaacatctcaaccatgggtgctgatcaatttgatgagtatgaacctaaagaaaagatgcaaaagctctcatttttcaattggtggatgtttagtatcttttttggtaccctattctcaaacacattcttggtctacatacaagataatgtgggctgggccattggatatgggcttcctactattgggcttgcatttgccatattggtgtttttggttggcaccaaattttataggcataaatggccttcgggtagtcctcttactaagattgttatggtgattgtggcagctatagggaaatggaaggtaactctcccaactgaccctaaagaattgtatgagcttagtttggaagattatgcaaaatctggcaaattcagaattgaccatactccatcattaaggtaa

SEQ ID NO: 20607 - DNA, 2149 bp, Cannabis sativa
ttttttttttttttttttcgaggaccaaaaaactatagcagttgctatgtaggtacccaggagggactcaaacctcagacctagtggaagcaaactacatgcctgaccatttggactacccatcttggataaatagtgtgtgtgtttatgtgctatatatacacatagatatattgatatcctaaatttgatgcaagaatgctaataagccaaacataatctgttttatgacagagttgcacgcaataagaatgaatctttattagcagatattaaactaatctcaccatctaagtccaaaacaagagtagtagaagggcaactccgcgtctgttttggcagcaacatgggccgaaaagttggaacaactgatgacaaagcaggtaaattctttatgaataaatagggatcaaagtcatcaaactcttcatagtcttcatcctcgacacaaacatcagtcgacatgggatcatgaccatgctcatccacacattctaacttggaatttttcattgcaaaatatatagctgaaacttcagatgaaagacttgcttcctcaacatctgcaatatgattaaaaaaagagaaaacaattaaaaatcaaataaaaagtacaccatagctacaagtaatagtccaatgaagaaacagagacaatatacagataaaacagaaattatatatgagcatatggtccccaattttaaaaaagaaaagaaaaacagttctaattacctccagttgtttccccatcatgtttagctatatgaaaggtaggagaagaaaatatagtttctaactcaatatcatcagttccatcactgctatcctgcaacagacaaaaataaaataaagcaacgcattgttatgattttacaaacgccacagccaacatacatgtctatacaagtaaacctacagtggcataaaaggccagccaattaccttatgatccataaaatcatcattatttccacccaaacaagcatcagaaatctcattacgcaccaactcatacttggcctccaaatttgtttcggcaacttgttcaccattcttttttaaaaaagtggaaactgaaccaatgcagacagaaaacaacaactatattaaatattacgttgcattgttattattttcattcctaagtaaatagtgtacacatcaaatttctaacttctatttgcaaagtgcattaaaagtatttattattggtgacgatgttgatattatattaggcgtgtatcataacatactgtacataaagagaatttctgagtccacgtggtttaaactctgattttgacataaatcaaatataatgtcaatggagggtacaaacacatgaattcttactgcatgaatttcagcacttaccaggcggcttccttgttgaagatgtaatcaagtcagaaactttcttttctgagtcctgctcatttgcagatattttcttctgagctctagaaaccctggatccagtttggcctctaccaaccgctctcccactaccctttttcttggtttgcatttttcacgtttggaagaacaccctagtcttgtgattgtgaggtctaccaagtgtcaatcgcagacttcattgaacatcaatatcagtattttccaatatacaaataccgacattaaggaaaaatgaaacaaaacacaagtaaaactcacttaagaactctgtaccagccactaatgagagagagactaccgatgtaagaaaactagaatcatcatcaagcataaacaacaattagttagagctgaaaaaacaaactaaactcattatctcatactagccaatcaaagcatcacaagttcttctcaaactaagacccgataatgcttcagaatgggaaatgcgatcaattttcgttctctaaatactcattatgcatattagtaaaaaatgagcaactccaaatttacaaatctaaaccctagacaacggcaaccctcacccccttctccgttcagagcatatttctctatagttctcaaattgaaaccaaaagcatcactctaaatccaaaaatatgcaaattactaagctacacagatttttcctaccacaaatcaaagcgtaatagcgaaaatcacaaaatccaatgcaaagaaaaaaacaataacttacttccaa

SEQ ID NO: 20608 - DNA, 3770 bp, Cannabis sativa
atggaatcatccctaaccttcaaaagaagattagaccattatgctaatcattctcataaggaaatatgagaagaaaagtgaagagaaattttgctatattttctttactctaaacattacactaaagagatatgtgtagaggttgtctaaagaggttcatctcttccctatttatagccaaagtgagtgaattaaaataattattttgatattttctagaaatttttggcataaatgaggtaggtgagatatgaaaagggtagaatggtaaaatatacaatgtgcaatttattggctgagagaaatagaaaaatgagccaaataaatgcaaaggaatataaaattatagtgtattttgaaatgacattttcttgaaggctgttggagagagaagctggcgtgggggacaaattgcagcaggagggccacgtgtcgtcgtgtgaggggctggtggagagaagctgcaggcggtgggacccacgtgttggagctggctggcgctcacgcgcctttgtttggtgtggggagcacgcgtgcgcctgggccttcgaatcagcgcacggacggctcggatggggcggctgctgcgcgcgagtgggcctttttttcaatccgaatctgatttctttttttgtaaaaatatatattctttctccaattcctttatttcaaaaatacccctacaataaaaaagacaataaattaaatctaaattaaatattttcaacataaaaatatatctcattaatttcatgaaatattaatttatattaaactttaagcttattaaatgtatatttttcactattaatcatcaggccttgcaggtctgttatcgttgttacttgtatctccttgctctcagtctttagaaagcgtggttgtacgctattcccttacacgccttgtcctttaatttctttcccaatatcattcttgttgtcttgcattcacccttcccgttatcctcacactccaccccaaagcacattcacaccatgcacaccatggctcgcatgcgagccccctatcccctcgcacaataccaagccctcatctcctcgcaccatgccaactctcatctccatccctcacggctcacgtgcaagccctcatcctctcccaccatgccaagctcacactcacggctcaccctaagactcacggcccctcttcccccatatccatgggtcgcacaccctgctaccccttatgactcgcatgtgagccccccatgggcttgcacgcgcgcgagctttcgcaccacgctctaacattcccccgcacacccatggacatgacgcctatccacgcatgcacaacctctccttttgtccacgctctcaccattgaatcactcagggatttaacactaaatggcacgggtgtaccctgagaattgcaagaatcgatagtggcactgcgaattatatatcgagtgggtaaacttatcggacgcacttgcattaattgcttcgagactagttttggaaattagcaccgctaatttttggggttaacaaatattatatcaattgttttggattttagtttttctttttatatggggatatatatataaatatgaatattatatgtttaaaattaataaaatatattattatttgaaaaaagtgaaattttagtgatgcattttaaagaaggtgtaatgtaaaaacttgagttagtagggaagcacacgggacggagaatcggcggagaatgctccccctgtccccatttctgttaaggattttaatccccatccccgcttatttcccatcggggatgggtggagaatcccctaatgggggagggggggaatcccctaataaaaaaataaaatttataataaaatttaaatatataaaaatagtaaactacataaaaattaaaatattacacattaattattatttaacaaactaattattattcaaaacacaacttaaaattcataaaaagaatactaatataataaaaaatacaaacatacattataaattataaaatattactaggattataaaataaaatactaaacgggtccacgtcggggtgaggagtatgatccccgtcccccctccctttaacattaagggacaaaaagtaataattcccgttcttgccccattccccatttagacgagaaatccccgcccctagggctgagcatttagacccgcaaactcgaaaaacctgaccacccaccctgacccgctacaaaaaaaaccgaaaacttaaaaatccgtgtggtcgggtcggattcaacccaaaaataccccacacgggtttcgggttcgggtattaaaaattagttttttgttggtcgagttacaacccgtaacccgaaaaaacattcaaaaaatatttttttattatattaaaaagttaataatattaatttatatttttatcacattttttactattcattcagtgtcactacacactattcgaaccaactagaccaaaagtccaagacaagacacaagacccaaaaaaacctttgaacttcttatacattattatatgcttatttattgtttactctattattatatgattatatagctctgtaaaacttttacccccattaatagagaactgtctagaaaactaaaagttcagaattattataactgcatggggtcctttggaattgttgtgggatgtttatgttaaatataaaaaaagccctaaaaataaaaaaaaaatggcatttttaaaaattaaatttcatctgagtccataaatgaaacattcgggctcagcccaatgtcacctgaacccgaccacgcccaacccgcaatacccgactcgaaacttgccatacccgaacacccgaaaaccaagtttgattgtgcattttcaagacccgaaatctaaaaacccaaacccgactacctggaaacccgaaaacctgactcgtgtgcagccctacccgccccattaggggtgggtccccccaaggccccatccccatgagagaaatatgcattcctagattttagcaatgtatttttttgacgtagtgattataatcactcatgaatttacgatgcatatatccacaaactgcgcaggaacctcatcgaaccaggatagctcatcgtctaactgaagggcatgcttgtcaaaccatgaactgctaaagtaagcgagcaacacgagacaaactgccctcggaaatttagacaataaagctataacgtcctcaaacaacacaccaaaatggctagagcttcaacttataacatcaaaaactatacgccaactcattaacgtatcaaactgctctacaaaatatctacaaaacaaaaggataaagaaaagtagattaacccctaacgatgatattaaaaactaataaaagaaaatctcaatagtagaaagatgacagctctcaaataaattatattaaaaaacttattagcaaaatctctgtaacagtaggcccttcacaaaatcaacctacaaaataacaataaaactctattactacacaatttaataaaaaatatgtattgtgaataaagatgtaaaacaattcatgtaatagtatcgacttgaaacacttatctgtcaaatcttaaaagttgtttgctgaagttacgaataccaaatatgaaacatttctcttatccattgaccatactacaaatctaccataaacaattaggggcaagctataaagatggcacaaaaggcatagaaggcatccaaaccatcaaaaaaatgatgccaaaataatgctaataaagtactaa

SEQ ID NO: 20609 - DNA, 1604 bp, Cannabis sativa
cctggttctagacctgtttgatatgactccaaatctaaagattgagcggctttccactgtgcaagataactaacagcaaatgtataaagatatgaagcattggttgattttttcttccattccttgttatttctagcaccacaaattgcccagcacagagtggcaacgaggcagcgattttcaacactagcagcaagaaaagaggtagcacaccagtctaaaaaagtcacaccaccaacagtagtagtagatacccctaccaattcccaacattgactcgccaaaggacaggtgaccaaaatgtgcaaggttgtttcgtcatgaagaccacaaggtggacataagctgttcacaaccactttcttagttaaaagcataaccaaagtaggaagacaatttgtacaactttgccacaagaaattttttattttgggtgcgatcttcagtctccaaagttcattccaaaactcgaatgctgttgttatattccagtggccatttgttttctgcatcaaattataggcactcttgaaagaatagaaaccgttcctctcatgaaaccaataagaggagcttgtccccaggttttgttgaaggggaatactaataatggctgatgcatccctctcattaaaaatatcattcaacacctctaaatcctagccaactccatctgacaacatcaaattatggaccatagcagaatctagagcagggtgagtagatgtgatgtacgggttatcctccaaaggcagccacagttccccttgcagctaagtttttaccatctctcacttgccaacgaacaccctgatcgataatgctttgagcctcccaaatactctgccaaacaaaacttagattgttccttaattcagccgaaagataggagctatgggtgtagtatcgagctttgagattttttgaaataagagagaaaggcctaacaagaagcgctatattatgatctttgaggctataaaaactcatacccccaacgttgttatgcatacacaacttatcccaagacatccaatgaatgcccttctctttagtattagtagttttccaccaaaactttgccatgtgttgctcttgctccatatcacgactaacatcaagaggaagaagaaagacactcatggcataacttggaaaatcttgcgccactattttaataagaagctctttccctacttttgacaggaactttccatatacgagtatctcaccaaatctaaatcaaccaaatcgcagtctaagagagcctgttgaaagccttcaattaaacttcttggatattgattaccgccttttttatcacctttcctgctaacattattgagatcccctataatgcaccaaggtaaggaggaaagatcatgaagctcatggagtaaattccatgtttgaaagcgcaaatctctcctcggttcaccataaaaactagtaagtctccaagttggatgtccttccgtagtgaccacaaagtctatgtggttttgggagtaccctgttatgcgacccccatcttgttctttccaaaaaaagagctagcccaccctctcttccttgggcctcaacacaaaacttcccctcaaagc

SEQ ID NO: 20610 - DNA, 2621 bp, Cannabis sativa
aacaattgcagaagatgaggaagcatttgatgtgctatattgtttagcatttgaaatgatggacgctcagtggctcgctatgcatgcttcctacatggaattcaatgtaatcttcatctctatctctcctttcccatatgaacacagaaaattgagttgaatttatcattacatatttggcttaattctgttctttgttttcaaatactttcaggaggttctacaagtcacgcgaacgcaactggaaagagagctttctttagaagatgtacacagagtacaagacttaccggcttacaatctgttgtaccagtaagtaagtacgtagcttttggagtgactgacctctttggaagccataaaagatgatgattttgagaattagtaatttcaatgacatgaagacatagagatgagagattgtatagaaatggattatggatttgaatgtctaggtcaccccttgaataattgtgaggagatctagttgtgatatatgaatcagccaaggattgaattagattctactatttgatgtatcaccgaacttgtattatagaagttgagcaaattttctaggttggtatagttgaaggaacaacatgatatgggaatatctcttgttttggtttgtattatattctctagtatctgcaaaacatgctacttcccctaaattttaaaagtactagcaatatccataggacataattattaactatgtatgcttgggaaaaaaaagggaaaaaaactcgaagcaacttaggccatcagtgaggaactctttgatgtcatccattgcttgtaaatatttgactttagttatttaaatatttctctccctttctctctttcgaaaaatgttaatcaaatatttctaaagtcactttcacaaaattatcagtctaatggaaatttagattttttcttcaaatatggtaagtcaagatatttcctaaatctattatatttcttaaatctattcctaagcgttggcatccatttttatatgaaaaagttcgaggacacttcttcctcttgtcaattctgtcttttctcacctaattaattaaaggacagttttttctatttgacacagtgatggagaaatccattaacatacaagaattggactaaacaagaacttgaattggtcttgaattggttggtagttgattttaaaaaatggactgaagctgaaccattactcactataatttctaaggtcttagattttgttgttaaaaacattatttattgatacagtctcccataaaaaattatatcagacaatggtaagcaatttgacagcgatatgttcactgacttttgtaatcaacatgatattattaaaagcttctccgcagttgctcactcacaagaaaataggcaagtgaaagctataaataaaatcctcaaagacacactaaaaaagtatcttgaagaggtaaaggaaaactggcccgaacaaattccagaagtactttggtcttataggaccatcgagaggacatccaccaggcatatacattttcctttagcttatggctatgaagtaatgttggccatcgaattagaaccaccgtctcacaaaaggatatcttatgaccaagaagtacgtaaatcacaacctcctaatagaaacccttgacgaaattgaaggaaaaagagatcagaccaacttgaagttacaagcctacaaacacaagatagccaaatactttaacaagtacatcaaggatagaaaaaattttgtcggagatatggtacttctaagagtatttcttaacaccaaagagcatgtagcaagagtacttggcccaaactgggaaagaccgtaccaagttacagatatcacaagtttaggcgcgtataaacttggttcgtagattaagaaaacgaaactaattctgttaccaaaatattggaacggaaaacacctcagaaagtactactagtaagcctatttgtgaaaaaatactgctcttaagtagtggttcctaggctgtatattgtctaagaattcgataacttcttgtaacacatcactcttaagtgatggcttctacacgatatagaagtgattcaatacttatgatctaaaattaatctttcaacatttaagcttttatttaatatatttacgttttcagcaacacacatttgtaagattaatgaataaataaaagtgattttttcactcaaattgtgtcaaataacttactaataattgacttattaaagttaatattatgtctaaacatgcatgaaaacaggttcgctcaagaaactggatagacaggcaaaagagcttggttaattgtaagtgaccaaaagaccataagtctgttcgatcacttggaggcacctacatccgcacaacataagacaaacatagtgaaaatacttaagataacaaatttaaagcaaagttaatggaaaaaaactaagtatgtgcaaataagtagctttgttaagcataaaaggaaataagtctggggttaaaggttgtccgaccagccatatatcttaacagaaaataaagccaggtttaaaagccacctcgctggctatatgtcttgaacttaatggcctttaaggatgtgcagaaaataaaagaa

SEQ ID NO: 20611 - DNA, 2851 bp, Cannabis sativa
acgattttgagtctgtataagtaagcgggtcagtcgaataaagtacaacacaaatccaaacacggtagactcgactcatattttcttttatgtcatggcacgataaaatttataattttttatagtacgatacgatttatattatagcatgacacatattttgatcagtactaatacggtattgtgttggatgataatactattaaacatcattggagctaattctttttttagaacatgaaaataagactggccagaatacagatagccctccactagtactgacaccgatgtcaaaaagccaaaatcaactccttttttttattggttgagaaaaaaaatcaccaaagttcatggaaaattaattccagttgaaagtaacgccaagaacatgtctccatcgatgagagagagaaagaaagatctggaagacatattaaatatataattgatgagaaaattatgatgtatgttatagaacagaaaaatattggtcattgcaataaaggctattgtaaaagaaaaaaagaactaagtgtccgcaaacgtaggtaatttcaacttgcttttatactttgtgccatgcatatatattatacacacattaatgtatatgacaccccacatgaaatctctaatttaatgttgtgttgtgttgtcttgttcttgtttctttgacttcattcattgtttttggaacaatgatcaaaaccccatctgtcattatgaaatttacaatttaatatgtgaataattgaaacttgggattcttcttttgaattccaacataatatagatggaccagacctatatattaatatgtagtaatcatgaaattatttaagcaattaaacaaatcttaaaatctcacttattactttattacaaataattaaaaaaatgaatatatagattcctcttttctacccttcaatctatcgatatctgttgttgttgatgatgtattacatcctctaaataaaacttccaataattcatattgaatatttggaattattttgtgttgtgaaaagataaaaacgtacttgacttttccttggaaagtttgataaggaaaaacatgaaaaggagacataatagtccaaaaaaattgaaaattatttccaacaacaacaaaaaaaaaatgaacagttaaaaggaaaagagagatggaatggggcttaattgggattgatatgcacccactggccagtactccactactcacgacgaccacaacaaactatgctttttaaattattgcttttgcttctcttgtaattgtatttatttgtaacctcttctttttcttaaaaaaaaaatcttgaatttttctcagaaaatatacattaacattatttccatttcttgatattgacaacacatctaaatctattgcgatatgcatgtatgatattgtttcctccattattatttaaggcttctttttcttttttggttcctagctagtaaaattaattaattacatatgcacttctaaaattttaatttatagctagatattgacatttgatgtagtaatattatacttataatttgacaaaactgtcatgttgatgaaatatcaaaatgataaatcaattttagaaacagtatttaaatctccaaatgaatattgtatttcaaagtagaagtctctattattatgatattattgcaaataaatctgccaatagattgttttttgaacaaccagataattttaattttttacaaaaaaatctcaaacatagaaattgttttagaccgattgttgaagtgtgaagctgtcttgaagagctattggtgctctaaattgatatgaagggaattcacatctcggatgttgaagggattcaaagagtgagcttgaggggatcttgagctgtgaatcaatggagttaattcaaaggtttcaagggatttgaaactagggttcttaaaatggatactcaagattaattttaggataaattgtaaatcctatcaatttgtaatattggtttatttttattttgaggtggataaaatgaatgtaaaaacaactttccttcatgacactactacataaccccccttttatttaagtccatcaaagttggacttaataagtcattctaatctattttgtgttggacataatatccagggaacataaaaaaaagtatttttcaagtccaatattattggactagaaaaatgtttctagtccaacaaaattggacgtgaaagtgggactaatgtttaaagtccacctttgttggacttgaaatgcaataatctctatttttttaaaaaaaaataaataatatttaatatttaataatttccataattattttccaattgtatataaattatataaaataattatacataaatcaataaatatataaaatattttcaattattaccattctttaactttattattaaaaaataataacaattacataaaaaaatatatacataatacagaaatttaaattaaaaataaattaagattacataaatacaaacattggacaataaattaaattactcaaaatacaaaaataataaacaaaaaaccttacacaaattactttataacaaaataaaccactgataaaaactacaaaccaccacaacaacaagaaccaaacaaaaaaacactgccagaccaaaaaataatgaaccacaacaacagaactttgaacaactgccaacagcgaccttggcgacgcaaggagagagagacaagcaggacaaatgggaggctgagagatcgactatggagatggtggtggtctcggatggacctaggtggcgctggtgacggaatgatagatagagagtcagagattgggcg

SEQ ID NO: 20612 - DNA, 6711 bp, Cannabis sativa
gttgaggtctgaaacataacttgcattaccatgttcatgttactgcatttctgtttagcgggttgtattcttaacgtgtattgttttaggattgaaattctccttttcagaacttactactttgaaaatgtgtgtattttggattttcttatacagggaagggaaagtgcattgatttttatctgcatcatcaatacagatggggttttatgttttttaggttggaatgcatgattcctaagaaaggaggatgacaatactcaaaacccatttacctgctaatacttaccagttaggcaggcaattctcaatctaatagagtagggtgagagtacaatatttgatatctgatacgtatacagattgggtgagggtattctcgaaccccaagcttgttagtccacttttcaaccctaactctaaaccctaaaaaatatgtacataactgtaaaaattatacaaacacattcctcatataattttatttttatgttttcaacttgaatagggtagaattacccgtttgcaccctttatttgttaaggtaatatccatgttcgatctcctttataagacaataattaataatgcatggtatcagtagaacttagttatcacaaggtaggttcggggtatagacatatcagaagacactcacaagtgttctaattgcccttcaaagtaataagtttgattattaacaataacattccatgaaaagttttactgtgctaagcttagctttctcctcttttttcccataatgaaggagctggagtttgaatgtgttccgaagtccctcatggaagaagtgcttgcctttctgaacgtaagctttgtatttatttcaccatttcctgcaaatgttcgtctctcataatttgttataacaggatgtcagggaagaccttaggtcctcaatggcaaaggatttggtgactatcaagaatgagagtttaagaagtggtaaagatcaaaactgtgtggatgtatctgttaatgatagccagcagaatttgattatttcacagcataaggatgcattgttggatttccagaaaaagatcactctttctaaacatgagaaacaagacagtgatattaattccttattgggccacaaggaaagttacagacaacttgcaggtatgtataatcatacatccaacacttttcactaattttctctcaagtaatttgttttgtaggtacattttttgaaggatcacgaactaatttattattattttttggaacaaatttattcttcttatttaatatctggcttttggttaatttagtattttctatgacatgataaaatttgtatgataaaaacagagattgaaaaggaagaccagcttcttgatcatttgttgcagtctacaagtctggcaatggaaaaagttagaaccagtcgtcaacaatgtattttggtagcatcactgattgatcgcatacctaaccttgccggattagcacggacatgtgaggtgtgtgtgtaatggtgcttctatatatatgttcattcatgttgtgtaattctcttagctagtcctgtagaaaactcgtattcttaatatctgttattcaattgattataccaggtgttcaaggcattaggtttagctgtggcagatgcaagcattttaaatgataagcagttccaactcatcaggtttgactttaattggttacttctgttaacctttatttacaagctccaatgtttttttttcctctttttcgttcgctctttgattctgctgtattttatactgtcataacttgtagtttaaaagtagaatttggtaaatgctattatctctgtggaacttgagttgcgaaacctttttaccaatcacttgctgtaacaaataatgggacagaaggggactacaattctttttaatgcaaaacctgcctgttgaggatcattatgcaggaaaaaacataggcagtgaaacaaaaatagaagcaaggtttatctcttttttttaacttcgtagctacattaggagtcattagatatactatggtgatacactaagagagtcggctaggtagtacaaaatgaggatttctgagaaatcttggctattcccacccttcaactcccctagaccagacatataggtctttcaacccaaaattttctcttttctgaaatctcctcagcaaatacatccgaaaaggtaaattcaacacaagagaagcatacgttatcttatgcagcttgtgattgtacttatatatgctgtattttaattagtgaagcaagtcaagtacatctttcagtataataaattacaagagacgtttttgtttttcagtgtgacagctgacaagtgggttcctatcattgaggtcccagtggatagcatgaaggttttccttgagaaaaagaagagagaaggctactctattttgggactggaacaaactgcaaatagcatacagcttgatcattacacatttcctaagaagatggttagttgcttacagaacctggttatttgtctctctaaattctaaaaagaggatgcgtattgagtggatttgaggaaagggaatagtataaattataaattattgcagaccgtatccctattgttattttcttctgttatcattgcctaaaatttattaagaaacctctcttcaccccaatctgaaagaaaaaggtaaagagactagtgcatggtaagctacctttgctagatagagagcattgcaagtagctgtttattgttttccattacaaggttttcttctccagttatgtagcgtgttgtgattgtcactgactcactaatgcttatgctcctcctattgctaggtacttgttcttgggcgtgaaaaggagggaattcctgtggatattatacatattctagatgcttgcattgagatcccacagttaggggtagtgagatctctcaatgtacatgtcagtggtgccattgctctttgggagtatactcgacagcagagatcttgattactataccattgaacacggtaaatttgtatgttcgactttactaacttgctgaactagaactgcccagaagcaatgcagtaatgtcttactgactaaaattatcaaattacatgacttcaattcattgacacattatacagttatcacatgattttttacgaagtgtagctatggtaaaatatgagaaaagaataatcttacagtagttatcagctattctgttctgtttacaagcttacaaaagtgtatagagttatactagttatacgccaactttaactgtcttcatgcttttgccaattttgtgagcattggtttctgtgtcaccgaggtttgcagcatgaattgcattatcttttggtacaccaagtaatttggtaagtgtactaaatgataagttgtttctccatttgtgatacaacattgtattgccactttggattttaaacttctgcatttgcatgtgcatgagctttatatgtccaaatgataaactggctctaacatttcctgtgaactaatccactcagacaattttgttaatgtcttgctgaaaagatgaaaaaaattcagcaagtagtcacataaagtggcagcttcgaaacctgtaagtattggatagagctcattcgttcttctttcttagtcttttgttggtcagaatccttctaattagctaatgagatacagactttcatctatgctttcttgatgtgagggacagtttagagagaaacccccgccgctttcgtccctgaaaacgtttcggttagattagattctcaaacattgacgagccattgatacaatagataagagaatgtcataaatatatcatgaaaacttgacttgttacctctaagcttttcataaattctttaatcttattacttgtcttctttttggcacttgctttcttagtttggaaactcagaagtttgaaaatgtttggaatcattagtttacaattgccaaagcaagttgaggctacaccatcctttggctttctttgagtattgactgcctaccaaaaccaaaaacaatggtgactatattacacaaaatcataagcccttttaagaacaaaccttaaacaagctgtgtaaagagctagaaatagagattttgatcaaacattagcactagtatttactatttagaatgtaaaaagagaaccagagtggtactttggtttgaggagacttgtgtttgttggcagaacttgttgtctgtagcacaggtagccttgcagattgccgaaggcggtgagagtattgaaggagctcagctctcctgttaatgaatcttttacctttggcaccatgtccacaatgaattaccgctcttttgatggtgtgatgaacatggtggtggtggtgatgatggtgatggtgatgatgattggctactattctcctcggcttctctacatatcgggtcactatcaccgcattcccttttctgattgttgcctgcaaattaaaatgatcacctttgtgaatttatgagggagagggagatagagagagagagagagagatgatattaccatcgtagttttgaacgttatgggatcaagggaaaggataaggagctatgatgttggagaacagaaatgtaaattctgagattgattatggttagtaaattagtcatataaatgtatgtagcaaggtggccaagaagatgcaagtccaacctgaaaggccaatatgtccctttggttgcaacgaaacttattaatccattgttcattgttcaacaaagttcttattatataaatagctaagatgtattttaagcaaattagttatatcaatcccaaaaagaattaaaacaccattatttaattgtttatattacctgccacgtgtcaatattatacctaatccacaatagagagtttatttatttattgtttaaatgagagttttaaatctttagaatactatcttcgctttaatttggtctcttgagtgctattttaaaatcataatcatttaggagtagcaatgtagcatatatctttatatgaaaactccaagacatataccttattaattgaattatatacctctcttagccttttctttaaccttttgacataaaaataacactaatttaaatttaattacatgtttactaaatataatcaaaattgaaataaaaaagtaaagacaatcacaatacttttttgtcgcaccagcaacgctatataacaccagctgatatgcaccaacagcaaacatatagaattgtaacgtaccagcatgatcagacacaacaagctgtgcaattctcttcataccagcagagcacgtcattccctgaatttatgcatcaacaacaaacaacaagttttgagctgcatcagcaaactcactcctcaatcgaatactccatacaactacatgatgttgctggttacaatactagaccaatgaatagtactccatagaagccaccaattataaatggtcttaaactgaatgtagatgcggcagtgaatgataaagaaaaaatattaggaatcggggcagtaattataaactacaaagaagaagttgtggctgcattatccaaaccagtctaaggctattttagaagcgatgaaatggaagcgaaagcactatttcatagtcttaattggacaaatcaacaacagatctagataacgcatgttgaaaccgatgctttaagagtgtcttctgttttgatctcttcacacaaagacttatcttgtttttcagatctaattgatgatgtacgttgtctcttgtcttttttccctggaattattgtcactcatgttcgtaggaatgctaatcaagctgcccacggcttagcaaagtatgctctagggttggatgaagatgtctgttagatgggggaaattccacatcctattttctctattgttgtaaatgacctttgatttataataatagtaaaaattgctcaaaaaaaaaaaaaaatagaagaatcaaaattatcattacatatgtattttttaaaaaataatcatttatattatataagtttttttattttaaatttttcatcaccctcatactacctcattggggagaagtattcccatcctttttcctcccccattccatcaggttcttccatttatcatttcggtaaaaatgttgatgcaaaccattaccacacaaataatttctattcattttaggtaaatattttataaggttttgttcgtattattctccaaaattacgatcaagatttttggtaactacttaaatattgaaatttaggttaatagatgagtatttaaatgagaattttttgcgttaacaagctttagtatgcatttcatttgtattaatgttgaggatagcaacaatattatgtttcacatgaattttgacgacgtttttacttagaacccgaatctagattcctttacaatgacaaagggtctcttattcatagttgagactcttgattgggctttatgttctatcaagctctttcggtacaaattcagtgctagtgataatatctcctctattagcctaaaggtgaggccccaaagctggtggtaggtatggatggatgagacttgtctagtggtgatgtgacatgtgatggtaggagctacatataaacacatgagaatgacgtatgtcagaaaatgtagtgtgtaaatcttgatatttattctgctatatgggaaa

SEQ ID NO: 20613 - DNA, 3102 bp, Cannabis sativa
attaggttgtaccctttgcaaatcctttttggtttgattaatggaaaacttacctatatttatcattaccatgaccactgttaattgttcatttttaacagctttcgttttgttaaaatggtcttgttttaaattgttttgaagtttgatgctgtgtgatttgactggttcagctcaatgaattgtaataagtcactacaagatttattaggtactctttcttgttcaattactgttttatagaagtaaataaaaataacaaccgattgtaagttttaaaaataacaaccgattgaattaatacattgttaataaatctcattatttcttataaaattacattattagttcataatctaaccatcaattacatttttaatttcaaatatcatttgtgtatattcttttttataaaattcaattgtatctttataaataataaatgttatattatctttatattatttatgatatattatatattaatatgagtataatatataatttgattgagaattagaatacatataataatgtgattgggagttataatatttatataaattgtaacgtaacagtgaattagttacattttgtaattttcatattatcactaattaaatatgtaaagaatagttatacaatttaatattttgaattttaaagttataatgcaagtatagccattggatttgattttgtgattgaaaatgtgaataggtaatataaaatgaaatagaaatgatttagaatgctttggggagttatttgcaaaagttaaaatttttagtaactagttactattttgttcatttttatgatttggggagttaaccagctcacattttaaatattaattttatgaattcatttacatgctcttaaaatttgttgttagactagtttctgtcttttaactcttaacttgaatcaaattagctcaactgtttaaaaaaatggacattatgcaaaaaaatagcacttttgtaatagttaagataaggaaaattttgccacacaaactccaccgaggcaataatttattaataagaaaaacattttttataattttaaaactttaaaaatgtattgataataaacaaaaattatagctcataaaattaaaaataaacataggaaataatatttttaaaaattctccagagaattgttaaaagataccattctcttcactatcatactgttattagcgtaattaggtattagattcgatataacttgacaaaataccttttagagaatatcgttaatcaattgtaacaccactataaaaggtactggaacattgatacctaacactctcttattgtgagtatggctattggtaagtagatacgtttagaaattgctagacaacactattgcaaattcaaaactttttgggaggtgaagagtaagtctagtgattcatacctttggaaatgtattctggatacaaggtcaacaatctctaagggttcaatatcggttgctgcatctggggattcaattaatttctggcatcaaccatggatcccatggatggaattacaagaatttatgactctaatggatgacttaaggagtagaggttacactatcagaactttagcagatgtttccttgggcaacgactggaatccggagttgatcctacaaatctttggcacagaattgggaaatcgtatcctcactataccaagaattccttctcctttcaaagagcaggtgttttggaaatatactcaaaattgttacttctctgtaaaggcagcttataatgtggaccaatcttggaggttcgaacctgtcaaagaaatttggaagtggatatggggaactggcattcatcctagaaattctgttcttctttggaggattctaaatgatgcgattccaaccagaagtcggttgcacttcttgcccgataaagtttgcgacttgtgtgatgctggtattgagaatcccttgcacctgttttgtaagcacattatggtttggaggtagtaagcacattaggatcggggacatcctaggcgaaacattatcggaagttttggaaaatttggtgcttcactataatgatataccacatggaaggaacagagtcgagttacttaattatgttggatgtgttctctctgcaatttggcatcagcggaacaaattttacactaaaaatggttctgtcaatcctgtgatggccttggcaaaggctgaaaaggatttcatggagatacagatggtgcctcggattaataagggaggtcagggttctggaattcattccgagggaggtctggttagggaagagaattacccatcaatcaattcttctacgagacatgtcctatttacagatgcttcatggataggaggggatacaggtattgcagctattgcagtggatatggctgctgggaattagtttgtcaagactcaaaaaatgcagactcagtcagctcttgaaggagagttcagagccatttttctagccatgtcctgggcgattgatcaaggctggagagaagtggttatcctttcggattcaaaggtggctatcaatgcattatcttcttcaagcacttgtccggattggaagctttcaagtgtttgtttttctataattaatgtttctaagtatttcattgcttgtaatttttattttattagtcgttccttaaattctttggcggatggtttagccaaaaaagctagaatttctagcgagatggctgttttgtatcaaggggagggtaatccccctgtgattcccatcacttttcttgcttaatgaacgatctgttctttcaaaaaaaaaaaaaagacaacactatcaatgctccaataattatgctcaacaaacaaagcaattaataataatattaaatcgcactaattggattggtctaaatgaaaccttgcggattgccagcgtggcagactcatccccttatataaatacagatctgcatcaacatatcttactcactaatttcatcaaactcaatactcaacaaactcttgttccctccaaaactcgaatctaatcgtttcagagaaaagcttccaaatttcgtttcagcaatggaaactacaaaa

SEQ ID NO: 20614 - DNA, 3526 bp, Cannabis sativa
  modified_base (26)..(30): a, c, t, g, unknown or other
  modified_base (534)..(536): a, c, t, g, unknown or other
ataaaatggattacattgaaatggannnnnatttagggcataaaactcaacatctccaccaattgtccacctcgcgtgcatccctaatatagatagatagtagctacggtgcactattaactcactaaaattttaaccctctctcctccacctcatcccaatcctaacaagcaaccaacaacaaccctatatgataaactaaacaagccaaaataaataaacaatacccattactcatttcaactagaaagatgcttgaacattaatcatgtatttcaagtttaataaaataaggactgatattgttagagaatttttaataatggaaaaaaattattaagatatattataactctattatcaaatataataccaggataatataagaaattaataaatatatattacaataaatatacactatatatatttattattttttattaaaaaaataaaagaaaaaaatgcacaaaatatattatataacacacatatatataacaaagaataatatatatacactcactcacaacnnngagtgtagattagtggggatcactttgatttaaacaaggcataacacctttgtcccaaagcttatcaccgctaactctaagcacaaagagaactctcatgaaaatagcattggaaattatcaagcctttaaaatttctaacaaaatgcttttttctttatataggaacttcatcattttaaataaacatattagactattatttatagtgtttaggatgatcacatctcacttttttaacattcatgatactccatgaatgttatcatcacataaatgggtaaaaagtagggctatgaatgttggggaataacgttgggattaaatctattaaaatcaatacattaagatttttttttttgctaaaaacaccttcaggcgacatgttggcagtcatagatttcaacatagacaaaaatagagttttgtatctcctttcgacacctcttcagttttcaatgtttcaactcattttaataacttaaataagtcttgtaacaccctcaaacaactatataaccataaactttgaatatcataattaatttttataacaactctcttattacacttaatttgtgatcaaccaaagagttacaaatgagtaactaatttctaactcatctccatgttacaatgcataagttacaatatgcaggttaaatatttaccaaaactgtaacatacattgttcacataataatatatattgtaacattttaattgatatattatattataaaacaatataacaatcctctactaaattaaaatgtaagcacactattgtaacatttatttaatcaatcaaacaagcattatgtcacaatatagcattctcctactttgattgaataaatatacactattataaaagtattacttaggtgcattaggtaaaatgtctttcgacttaaattttactttactgtaattagtacaaagtttgataaaattttagttgacatagcattgaattactagtcctgtaatgccctactagattagccatgttatcgtgatttccaacaactatgcactctgtaacaccctaatcataaggcacgctacagtgatttttcaactgcagtgctatctttgttaatcaaagaaattttcttgaaaatcgtgtcaaataaaaactttagaattaactaagaaactttataaactttatatatatttacaaaagtcgggatcccgttgttaaactttacaaaatattccaaaatgcaatagtcaggtcacacagcaactacaaaatgaaaaccccagatgttctgagaccgaacactctaggtcccgccgccatgacatgtacaacatcaccctagctcgaagctcactcttgttcagcctttgcctttccttttcctacacatgaaagtaaaactgtgagtcgacagacttagtaagaaaatcatataacatatcacataatatcaacttgtatctgggcacccatacacctatttacaaggcttaacaaatgagtaagaacattctatactagggtacaaccattgtaccacatacactacgtaccaacattgtacgagtgttggtagggtttgtttcgtactgtgagtaccactaagagatataccacacacaccctgtactttcccgaacttgtgctggtgacaccgtcatctactctttgaataatttgcactatatcaatgcactttgtaccacttccgtacaagtgttggtagtgtactaatcataataagcatgcacatatatttcacacatacatacattcacatatatatcacatattctacactactcttacctcatttctgaattcaagtgagttggccgacctgaacagaaaatctcgtgctagatagatgccataatcacataacataatcgggtaaataacactccaaaaccctaatctgggaaactcgaacctcaaacttaaggttctgctattactaactggaactacaatatcctaaaaaaatagagaatcacccaattaaggcactgaaattgacacgaatcgaggaaatgaattgttcggggaatctgccaaaaccagttaaccggttttacaggtgctggcaaatcggttcaccggtttgcaccaggtttccccaaacaattccaaacctgctcaaaacatgtccaaatcccaccaaactttccagaacacctataataaccctccacaatatatcccaatcaacagaaaccaaaaaacataattaaaaaatgccatggatgaaccaagcttgagttttcaaactcaaacttgtgcatccatcacccccacacccctaaatcagctgctagcacaacattctaagtcaaattaagcttaaaaatcgaattccaatacaaacaaaccctaacagcccttatacatcaaaattgcacactcaaaccaaaatcaaagcttcaaaaacaagaaattaagtgttctagggttacctttgcttgaaacctacttgaatctttgttaaattccataaaagatgaagaacaaggctggattccttctggctctatgtgggccaaacaaagagagagaaagaaaatgaatttctcttgatttttttatttttctttgttttttccctaagtgaataaaggttgaataattaatcctttgctgaataaataatggttagttgtcaattccctaagctgccacataaccccccacttgccaaattactgaaatgcccatggtgcttaaacttaagctaattcaagcttagggataaaacggtaaaaaactacaaccccgctcaaacccgatattttatttatctccaatatatatcccactaaaaaaaggctctagacttacccatgtgattcaaatgcttatccatcgcactttccgttgtcgccgagcgaaaattgtaagaatagcagaattcatatataataccaataatacatgtagaattaataaaatctccagaagtgagaaattataactttaatgcccatttctaaaaataggac

SEQ ID NO: 20615 - DNA, 1533 bp, Cannabis sativa
caataaaatcatcattgttagaatatgaaacatgttttggttttgtttgttctatattttgaattgttatcaaaatcagccataaagatgatatttactatacattattgccttttaataacaaagcagagattaaactacacacaaatctttacaacagataagacccaaagtttccttgatgtttcaatccaagaaaatacaggtaatgaaagatgttaagtattggaatggaatagtcatgagagacccctttaactataagaggttactgaaacgaatcacacttaagtacctgctacagtcccattaagcaactcaggtgtaattaaaaaataggatcacaaagaaatctagagaattaataataatctctactcaccatcactagctaatttccctcaccatatttctgacaatctcttttatttactcattctcgctactatttaaacgaataatgattgaaacacccataaattgcacacacttattacacacaatgacataattaatctgaaccatacaatcaaaagtgatatgactccattcaaaatataaatagataatatttaatacagtcctcgtgtgtaacaagtgttcgcaatttaagtgtgtatctagcattacacgtaagaaatttactacaattcaatcacccaactcctttctagtcccaactgagaacctatcacaaactaaaacagaatttcattttctcataccaattaacaaacaataataccaaaactaaatggcattttatttccattataaagacttaaaatatgttactcttttgaaatgttgttatcttcaagttaatgacttttcagtttgccatcattttttttctgaagttctatgacagaatggtcagccaaaaccttgattaataatgagtgatgcccagatggagttctaatcaaatccaaccacaacttgatggtatattaaaaacccatgcaaattcaaagttcttttgtttgtaatttgtttatatagtttcattgaatgggatagttaaggtgactcttagctaaatttacaatatcacttcaccaaacctaacctttcacctctagagaaaagaatagaaatctcatgtgttcatcctttttttcctccacaagttttgcacgacaaacaataaaggaaaaaaaaatgctcaatattgttataagacaagaatgaagaaagtaaaagtacattttctctgttattataatctatgaatgataattccattttacatcaaataaagcagtttctgttaacatagaagtagatacataagttaaagaactgttttttaagaagctatacagaattcaagcatataaaactgcaaaatattaggcgtgtccattcattaataatcaaattataccaattgtttaaatgaaaataactaaaaacatcactctctcataattccctgtcacaaggattgatatatacatatcattcaacttccacacagatgttgaatattaaaaataactgagaaactacctagcgagtagcgacgac

SEQ ID NO: 20616 - DNA, 1992 bp, Cannabis sativa
ttatgttcaacattatcatattccgagccatcgaatgtgatcgaaacagccaacaattacaatctcatcatcaaggttagtaacttaacttatagagtactaattaatgtgtcacatttatatagtaggcttggaatagaatatgattttggcataatatgatcatatatatgttgaaggtaacaatattagaaattctgggatgaccaattccaaagattacaacagcaagccttcatcttcaaagggtgacaagtttttgtgagaagaaatcaaactatcttatcccaattttgaagtcacatcgggggaatctattgatgagatgctggtatgaaatgtcatacatatataacatggttttacaaattattgttaatattattacattgtcatttatatatttgatctttctgcagaaaatttcctatgtgaggacttattttcaagtgaagccaaaaactgtaacacgtggtagatggtctaaatttgcaaggaagaaccggctacatcctagagattcatgtgtatttgagattgttagcaacgaaatggatcatactttgctcaaagttaccattacttttgatgtgaattgttagattagatcacatttacaagtacttggaatctaagtatcattgacagctaacttttcatctgtgcgagaagtgtttgttttgatttcgaagttcttggagttagtttttagaaaatttggatgaatttgaagcttgttactatttgcaaggaaactgattagaggctgttttaaggtggccttgaatgtagaaatgttcaatgtagattagatcacattcacaagtacttagaatccaagtattaatgacagtagtagtcttaatttcctctaaacaaaagagacttaagtgtttgttaatgttttgatagaagttcctgaagttagtttttagagaattttaattatgtttttatttgtgtgaagcttgttattatggggatggaaactgattagaagttatattaagctaggcttgattgtataaatgatcaatgtttaattataggttattgttgaggaaccgttgagcaaatgttattagtaaaaccttggtggtatactacggttgcaattgcattgttaattctattaaatgtagatttagtttccaaagtcttttttttttaaacaaccaaattcattaaagtgtaaagagtgtaggatataaatgttagataattagaagccgtagattcttttttttttttgaaaataaaggaagctttattaataaacttctttcatgattacatcacgaatatcaggagtaaaatcattactcctaaaaacacaatcagcgacataagatgtagctcgagcaaaagcatgagcaacaccattagcagatcgtttaacaaataaaatagacacatcattaacaccttccaacaacatcttacaatcagaaattacacttcgaaaataggaaaacataggaagtggactacgaagagcttgaaccacagtaagacaatcggattcaatggtaacccgattccaacctttcttcttaagccaacttaatgccccccttacacccatggcctctgctaattcaggagtgaccatacctggtttgcagcaagaaattgcttccaacacatgacccgaagcatccctagcaatgcaagcaaaactatacctgttagattcagaaaaaagagctgcatcggtattgattttaacttcccctgttgctggtttttgccaagatattgcaccatcagctgctgtcaaaaatacagcagtaggaacgtgagctttgtcttgtgctttactccattgttccaacatacttgaagccaagagagtgatagccgccacactagcatttttctccttccaaacacatacttgaagctaagagaggttaaccataatccagcattcagatcccactcgctaagacagcatccgagtttaagaagcttgagctataagaagaaaaa

SEQ ID NO: 20617 - DNA, 1799 bp, Cannabis sativa
gaccctcaaagttgcttgaatctctattatgaatgtcaatggctgattacaagttatggagattccatgctacaaaagccagcaggtaatctctcttttccttcacttataaaaaagtcagtgatcattactcgaatgaaatagggagacattcctaaggtagtacctttgaataaactggatgtgtgggttcaaacatgatatcatttgcaaccgagaagtatttcatttgtggtggtgaagatggtagggagtttagtggggggatttcattcagacaaatccaaataatttactagtacatggagggattactagtaatcttcaatgtgcaatgcgtgattgcgagctagtggatcttgagctaagcttacggggtatatccattaattacacgagaaaaaggaagagggactgctcattgggttgaagtaagattggatatataaagcattagtatcttattcttggttgagattttttcgtgaggctaagttgtataatattgaagtttcttcaagtgatcatactcctaataatttcatagttcccgctgttgaaactcgaatttctttgagttatagttttaagtttaaaaatgcttagcttagagaaccttcatgtagggtggtcgaaccctcatgtaatccctccattgcaccatcacaccagcatgatagttctctctctctctctggcgtacctcgctctaattgtctccagtaggtgagttgttcatctttctctcgctctctatttctctctcaattttttttctttttttaggtggatggaggcggaggcagccagatctgggatttttattattattgttgttgttgttgttattgaaagagtaatttttactagttgatgttttatttttttggattattgaatataatttattgataatgtattttgtatattgattaattggagtttcgtttgttttacttctgtgtttgaatctgttgttcgaacattttttttggttatagttggtggtggatgatctgagatatatcttagatctataattctttttttttttttttccggatatgtcgtttaaaaccgatggctaaattgttagcgactatttagaatagtcgcctattccttcccctctttttttgtcagttataaacagtcaattatgctcaatatcgactgttaataacatgatacccgtaccgtatcatttttttattggtggtataggcatcaattttaagaactgacaggaaatattatatctgactgttttgaacagacgcatgtggccttttttagtagtgtcttttaataaaagaattgataaatgcaaagaaaatattagaagttaaaatctaatcgtgatgagggttcagttagattgtatgaggatagagacacttgtttgagttgctaactcagaaagaggtttattgaaagtagagatcgaagcaagtttggctccaagaaggggattaattgtaactcgcttgaaaaatgataatggtgtttgggtaagttaattgggacagtggcctctcaaaagttatggtaaactatttcagaatttacttgctacttttgaagttgtgggtgatgggatgatttcttgggtggaggaaaaaggttttactattcaaaatgggttcttactttctcctatgacagctgaggtcaaacaagcattttttctatttttttaaatgcattccaaactaaatatgatagaacacttttattttttgctttttaaaattaaaaacaaaactcttgtttgtatttcaaaaacaaaaattttattt

SEQ ID NO: 20618 - DNA, 4533 bp, Cannabis sativa
  modified_base (2580)..(2588): a, c, t, g, unknown or other
tgggggggggggggagaattcaggccattagcccccattcttgccaaattaggcatcatctttagacacccttgccctcacacccaccaacaacaagggagagccgaaagaaaacaccgtcatgtcacttaaatgggtctcacacttcttgcccaagccaaaatgccactttcccattggtgggatgcctttgtctcaaccacatatctaataaatcggctgcctattcaaaagaataagtatatatctccttttgaaactttgctaaacaaaaaacctaattacacctttttaaaagtattttgatgtgcttgcttcccctttcttagaccttatagcaaacacaaattcaatttcaagaccactatgtgtgtttttcttggttatagtccttctcataaaggatataggtgtctccatccttcgggaagaatttatatagttcgaagtattacatttgatgaacatatgtttccatatcagtccttattcccatgtgatatcccaccacccacatctccatcatctctcacggacttaccatttcctgagccaaacccgacaccttctataccaaataacaccatcgctacagccactacaccacctcaaatcccacaaaataaccccaggtccacaggaacacaaatcccactctcaccagctcctaacatctctcccatatcacccaacaacactgctacagcagcccccactgccttctcacaccagcctacaccagaaactacccaaaccacctctgcccccagtgacatacagcaaccatctaacactactacatctcttcatcccatgaaaacaaggtccaaatcaggtattcacaaacccaaggtactagctgctactataactagttctaaccaattttttgttgtgtcaaaatcggtcaaaaaggcccttgcagatccctaatggaataatgctatgtccactgaagttcgagctctcctcaagaacaagacttggattcttgtgccttaccaaccagaaatgaatgttcttaacaacaaatgggtgcttcgcatcaaatatagggttgatggatctgtggaaagattgaaagctcggcttgttgcaaaaggattccaacaaacacctggagtagattattttgacacctttagtcctgtggttaaaccatctactcttcgcattatgttcaccatggctgtcacatacaactgggatatacaacaagttgatataaacaatgcctttttgaatggcgatcttcatgagacagtctatatgcagcaacctaaaggctttgaagatccctctcacccctcacagtctgcaaactccaaaaagccttgtatgagctaaagcaagccccaagggcttggtatgacaaacttaaggctgctcttttttcatggggattcaagaattccgtgtcagataactccttgtttttctccaacaaaaatggcaaactcttgcttatcttaatctatgttgatgatatgctaataactggggaagactctactgccattcagcatataattgcctctctcaactcacaatttgctctaaaatccatgggttcagtcagcttttttctcggctttcaagcaatcagagaagaatcagctctttatctcaaccaaagtcaatatgctaaagagatcctaaggaaaacaaacatggaggatgccgaaacatgtactacccccatgacaccaggtcacaaattatcaacaatggacagtgagccctttaatgatcccactctctatcgaagtaccattggctctctgcagtatcttaccttgacatggcccgatctcagctatgcaatcaataaacaaagtcagtttatgcagaaaccaacaaatgcccattggcttgcttgcaagcgtgttctacggtatatcaaaggcacaatcaatcttggtttagtcttcaaaccagcccaaattctcactcttgaaggctactccgaagcggattgggcttgcaatcttgatgatcgcaaatgaacaacatgttattatgtaatgcttggttcaaatttaatcacttggggctcgaagaaacaaacggttgttgcccgttcaagcactgaatcagagtatagatcactgtcatccactgctgctgaagttgttttggatttcatctgttttacacgaactcggcatcaccattccagccactcctgtaatctggtgcgacaaccaaagtgcccagcagctcgcctcaaatcctgttttccactctcggaccaagcacattgaagtggatgtccattatgttcgtgatctagtggctcaaaacaaagtgactgtctcctatattccaacagaggaacaaccagctgatctcctcacaaagccattaactctgcccaagtttaattttctttgtcacaagctctctctcgagtactctccttcgagcttgagggggatgttgaggagtctgttacatgaccgttacttgtgtctgtcaagtagttaattagttggtcagttggttagaaaattagttagccttcttttctttctgttgctttgtaatatgagtatataaatactctctctctctctctcnnnnnnnnnctctctctctctgtatttgaacattgagtcattgaataatacttttcaatcttgagaaataaatttcctctctccagtttctcacttggtatcagacgatctttggttcttccatggcgacctcaactggacctagtgaatcaactaccaactatggagttcccaccaccatgttcttacctcctcttcgcctcaatcgcaccaattattttttctggcgttctcaagtacttccagcaattcgagcccataaccttgaaaacattctgctcaatcaagatcctcctcaacaacgaattcgccagccacctgaatcaaccactctggttagtaaccctgaattcgttcgttggcatcgtcttcatcaatttcttctatcttggcttttttcctctatttctgaatctatgttgggtcatgtggtaaattgtgcatcggcgaatgaaatctggcgtactcttgagctcctctttggcacggcatctcgagctcgcatgattcatctcatgaatcaacttcagaatacgaagaaaggctctctcgccattgatgagtacctcttgaaaatgaagaacctggcggatggtcttcgtgctgctggtaacgaaatcactgaagaacaattgattctttatgtcttggctggtcttggacccgataatgaggcggttgttatcaatctcacttcaagagatcgactgacatttcaagatgtccagtttttactacagaaccaagagctacgaatcgaagcaaacactgcttcacaactggctgacttctctggtgcctctgctaactttgctcagtcaaagaaaaaccccaatcccaccaccaacagcaatcgaggccatccaaacagctacagaggtcgaggacgaaattcgaatggtggccgaggcaccaatggtggcagaggatcttaccctccaaatcgtgtcatctgtcaactgtgtggtcgtcccggacacaccgtgcaaaaatgctacagatggttcgatattagtttcaatggacctgatgacaataacaacaatgttccttcttcaaattccaatccacaggctatggttgcctctcaatcatctcaagatgaccctgcttggtacttcgacagtggggcatctaaccatgtgacttccgatgcctccaatctgcaacagcaagttccctacaaaggtaaagaacaattggttgtaggtaatggctcatctctctctataaaaaatgttggatctagttctatagcagctagcaaacctctctatcttaaaaacatcttgcatgttccctctattcaaaagaacctcattagcatctcaaaatttactagtgataatgatgttagtgttgagtttaactctgattgctgttgtgttaaggaaaatcaatccaagatccctcttcttcagggcaaaattaagaatggcctctacaagctgcccaaccatgttgctcccaaagaattcaagcacttggttgtcaacccctcttcctcggcttatcaatgccaaaccagtgataattcttctggtttttctcacaattgtaataaaaattcccttgtaaatgtgtggcaccaaagactaggccacccctctcaacatgttttgaataaagtgttgaattcattgaacatctctactacttctcttaatgtgtgtcatgcttgtcaatatggtaaattgcatcaatttactttcttgtcttcattacacaaaactacctccccatttgaaatcattcacaccgatttatggggaccttccccttatcccactagtgaagatttcaaatattacatatgcttcatagatgactttaccaaatacacatggatctttcctcttaaatccaaatctgacacaaccacaacctttttacaattcaatgcatatgttgaaagaaacttttcaaccaaaataaagagtgttcaatcgaattg

SEQ ID NO: 20619 - DNA, 3767 bp, Cannabis sativa
  modified_base (26)..(27): a, c, t, g, unknown or other
  modified_base (70)..(74): a, c, t, g, unknown or other
  modified_base (3727)..(3728): a, c, t, g, unknown or other
aataacaatgataaattatttaaatnnctataaataatttcctgattaatcataaataactgctaatttnnnnnttaactaagcgggctttacaggttagacctagagggttgcaatcttcgggacaacacatgcttagttttggctgtcgctaggtaacacttttgatataatgtattttatgtatgttttaaaaataaatttcaagatcccaaattataaatattttataatactgctatatgtttggtaaagtttcaattaatataaaattgtattaaacatactttttggttaaaactctttgattagcaaatgttagcacaataattaagaaaatacttgtaacatgcctaagctagtagtgcgttacaatgtggtatcaaagctactaggttttcctccaaggactacctagacttgtataataattatcaaagacaagtttgattcacgtttcagtaaacttttatgtgctttaaaatttaataaggtgatatgattagaaatgtatgacaggaagcatgttatgtgttatgatttatgccttaaaaaagcatataaagatatttttgattattaataaagagttgaacattttgatatatacatgaatattaagttattaatatttattattgaataatttatataaatattaaaaaattctttattcatatatgaggttgtaacttgtagctgtacaaagaactaagaccacttagctagaataaaactgttagtaacacattaaagttatagactctttaatcaatggttgctagtacagttcattgatgctcattcttcactataagtaatctcaatttggattactggtgtagtatgacatctaagtgaatgtgttatatataatagagattatatatgacaagaaccgatatgaattaagttgtctttatcagatatgttgtttactataaatacctaatctatatcataatgatgatcaattgttgattgtcctaaatcctgagtaatcataaactcttgttcatgttaatagtttctttgattcacttgttaaaatttctcaaagaagatgattcttacaatttctattttggaaatctaataatgtggatggttgagaacacgatctacaataatggatcattacttttctaacggatcgaatgttggttatctttatgtgttaattctagaattggaaagttgcgctcacatttagatgggatctaaattatacttccactagtgaattaatggtactaaaggataaataagtaattagaagggttaaacagtaattttacaaaaactaattacgaaccaacacaaggagggctaatcactagaattaattatatcaatgaacactacaataaaacttaataaatataattctataattactgagagttcaattccatattcataatggagtaatcatggaattaataaataatgattatttgttggttgataagacaacacaaaataatctagtttattggagcttataattatgggtccatggttcttgaattgtcaccttgaaacactgtcaacggtggggataaagaattatataatgttgttcgaaaaaatctattttgaattggccaaatagtaattatttattttgctgacaaataattcttcaaattaattaaatagggaaaaagacaaaagttgttaagaaaaaatttgccaagataatatttattgagacaaaagttatcaagaaaaaaaacaccatccttgtctcaattaaggcaaggtaggcgcctaccctatagtagagtgtccctgttagttttatcttttggattaattaactaattaattcattaattcaattagataaatatttgaatttgaaaagtggttaaagatatttcaagttagttgagatattctctcaagtggttgagagattccctcatctcaaatatcaataactgaatttagttatagatatatatttaaataattaaatatgatataattaataggaaattaactattataaatagaagcctgatttgagaaatcagaagataatttttcactgctatgttcgaaatacagaggaaaaaaggaaaaatatttctctctcaaatagttctcgctcatgtgttgagaattaatcaagaacaaattataagctttatcctaatagcccacattattccttgtgtgtggtggatcgatttggaagactacggtatgagtttctgatcaaccaaaaggatacaacttacgagaagttttgaggatactttaataatcatcaagaggtataaatacctttcatattattttatgttttgatttagagattcattgggattgtggtacaatggtaattagacatatgaaatctttcgttgcgtacctgatttagtatcataaaactaacaattagtatcaaagtagttctatgaatgtatatacattaaatgatgtgtgggttttatacatttatatatatgtgtgatatgtatgtgaatggataattatattattgtgaatatatgagaggtgatgaatcgttaattatatagtaaaatttggtgtaggtttcgttgttatttttcttagaaaataatgtaagctatttttgggcataggaattttttatgtaattttaattttatgaaaatttatttatatgtaaactatacacctatgcaaggtatattgcatgtgattaatttataaacttaaaacccgaccatgaacatcgaaatcacatgcatacgagcttgggttcatggaagaaccccgctcaacttcaggtatcatgcacttctccatgaaaagtgacattaatgttgattgtatgcatgggaaacaatgcacgatgcatggacgtcgaggatgccaagctcctgatggagctagttcaggatttaagtccccttctccctcgacatctgcttagtgccatcgtaagtcacgaaatgaaacagtctggtcctcctcctccgtctggtttcaattaacccgcttgcgtcttgttttaacccgcgttgtacaatttgcatgctttgcatgtaaggaccttatgtcggccattgacctttgacatttctgttagaaagcttatttaattgggaccttatttactattcaagtatgttaaattatatttaatccaacaacttaacatggattctaaaacaattaaaatcaacatataaggagtttaagaaaatcttacagcgattgcagcgaaaattaatgtctccttccgtttagttctctcacctttgatcctttttgtcgaagagtgtaatcaagaagtgaacctcaattctccttcagcgtgtgaaagactacacagtgttctatacttacttgagtatttccttgatatgtgtgggcatatactcaacactaatagcactcgaaattatagaagaaggctacgagaaattttaatactataaaatagtaatagcactttctgacaaggagagtcagaattctctctatgttatatattatatatgaacaagtatatgaacatctttgtatacatatagaggcgtgtagtttattttctgtagcaaaagaatatataaagtgtatatatattgttatttcttaggttaaaagctatactattttatttatagtattattcttagggttagatttagactcttaaaatagatcaagaaagataaaagaaaaaaaaaatgggattatttcacaaaaacataaaaacaacaannaaattacaaaaatacggttttacggaattttaaatattt

SEQ ID NO: 20620 - DNA, 1996 bp, Cannabis sativa
agagatgatgctgaaatggttcaaaacagtggagtaagtattgttacataagcaatgcattttgcaccagcaaaggacataaatccagtgcaatcgactatgacatcttacgaggttgttgatgaatttaaggagcttgattatgagtgttttgaattctacttcttaaatgttcttgtgtgaagaataaagctggagttagaaaagacgaacttggtttcactttggttgatttaagcaaaaaaggtagcaagaaagatccttctatcaaggctacccaagcaaaacaagtattttacataactgatcacatggattgtaaattatcagttgttttacgcacaccaaagcgataatatttagaaaatgaaaatgatgaagaaaatgatgatttatgtcaagatagttttgttgatcagtaatggattcacggacaagtagaagaaatcaatgatacatatgaagatgatgatggtgaatatattaaaagcgatgttagtgaaggggtatgggttgattgtgtatcatctaaaaggaaaaaaaatgtgttaagtgagtaagtatgatctttagttgactaataatgtgtcaatacagaatttgtagatacaaatgtgtcggatatgggttgcattgtattttggttatcacaaatgtgttaatacttgttttttgtttcctactaaataataacttaatttgtatatctcttgcagatgataaatccagaatatgaaaataggccaaaagggcgaggcataacaaaaagaaataatatcaacaatttaaaatctcaaggacgtcaaaaaaaaaaaaaaaactagagtggaatgagaaatgagaacctgttgcaaaagcatatgcagatatgtaatcatggattaggattaaagtaggatgaacagtccctctaagttttgacgattggagacatgtatatcgaaaactaaaggagaaaatatgaaaagatacacatgtaagacattagttctatacgtatgcatttactttaatggaatacttttaattactaattaattccttttgggattataggatgttttcaacattcctgaaacgtataagcctaaagtactttcaaatgcagaaaaaatgataaaaaatttcaaaaaactcatgacccagacgattatcctctcaattgctaaaagtagtgtgatagaagaactccatgctactgcaataaagtatccaaaacttgacaatgaagaccgaaatgagtttgctctaagtcctcttatacccttgaattttcagtacaatttcacttagtaatctttgtttaagtgtattctatcaaattatttcgaaacataattttaattgtatcgtgtaggctttaagtgaagcgtaagtcaccagagcgaggatgaatttatcacatcatcgttcctctcgtagagacatgcccaatgtcgaaaaagatttagtaagtagttcgtatcactacttttacaatgttaagttttaaacacgcccatagaagctaatctagttcttatatatagagaaaacaattcggtgttgacaatgttgagagatatcaactctcgatgagagcgcgagcgaacaacaatactttgatcgcagaatatgacaaggaaattgagcagaaaatagtaagtatgtcaattattgtaagaatgaacaataaaaatatgtaagttataactttgtcactggtttgtttcacagaatggattaaaagggaaagttgctacacctgagcactctggtcgtgttagagttgatgggtatgatgtttctttacttgagtcatattacttcttttttctatattttaaagtctaactaacttgttacattatgtaggtcatttgccaaaatttctactatgtttggctgaatataaagaaacaaagttgtggtcgatgttgacactactacaaaaatgggttttcccaacgtttttaaatagtcgtttaaagtattcccgtcggtttctataaccgtc

SEQ ID NO: 20621 - DNA, 4669 bp, Cannabis sativa
agaaaaccacatgctaaaagcaactgataaatgaagaactagcctcaccttacttcgagccaggcttccccaaacagtggataaaccaggatatacaggaggctgacgacccccaaagtcatcaaacgcataatcaacatagttgaccagaaaatggtttctttcagcatcatcaactgactcctgctgcaccctacagaaaatcttccaaacaatgtcaaatgaatccaaaatcaacaaaaataactttggacatacaaacaagtaaaatataacaatacatgtatgtatgcatatatttctctgcatctgattgtcagaaacttcaatctgtctcaggcagggataccagtattttccttgcagaagaaaatattactttgtgtttataatgtgtttggagcaatgcatagacataatatacacacctggtaacaatattaaccatggctctgaaagctgcaacctgaaaagagtgggaaataaattatagcattacacaacacccaatacaaataattaaaacaacttcaaaaacgagtcccgaagatttgacatcttcagagatttttggatgcacttaggttaaaagtgttcaagaggataagatggagtgttttttaacaaacctggagtgtttctccaccattgccaataagatggagaagcatattcaaaataggatgaagaaattgaagcaaagcagtggaatcaacattctttaaactgttaatagcctgcacgcaaaattaacgtgttctgcattaattagaacaagaaaatttgatgtttctgagaaacagctccttagcaacaaaaatcagcatactcaacaactttaatggcactcgaatttcattgacggagaatactatagtaaatctacagttaacaaggcttataatctacagcaaccaatgtctatatttttatcacccacccactaggtggaactagtagaatattcacaaatttgaaccttcagacctaaactgaccttcgttctacagcgaccattattgaagacaaattttctttctcgatgtggtaaatgtgatataaagataaaagtgtaaagaaaaatggaaaaagaaatactatgaatcaatacctcaagaagttcagaaccccatggtgggcttgttcgaagagtatgcctatcatactcaagaaaaaaatctctaatgcgttcattgatgggatacaatgatgaacaaagtcttaaccgcaacctaaagacattctttccatcctccaaataatcaagtctctcctacaatggggaaaacgagtaataaataagccattccagagactcattaactgaaaacataataagtgcaacacatcggaagctcaaacagtatctcaagcataccctgccagtatcctggagataatgtggaaccaactctttcataattggcaaagaaatctcagatcgcaacctgagcaaaaccataaccataatagtttgagaaatcataaaataaagaaagagagagaaatcaaacacaccgattatatgattttacaatagatgagagaagaaggaagatgaaataacacataattgattggttcccatgcagaattcaacagctaagatcatgcccatgtgagtttccagctatagccaccacatttataacactcactatccctaatgatctaggttaactcttaacggtgataactatcgttaactcttaatgatagaagaggcaggaagaagtgcatcgtaaacataagtttcttttcatgttcgagtgttcagaataaaagaataaatcaacgaggcaaagacatactgagcatgtgtggataatggcagcgctgcatatccaattactacctggaaaatgcatgggaaatttaaccatttaaatgagaccgaaataaagctaactgtataagaggaagacgaaacaacacataaatacgaaaaattatgtatcctatagaagttgaatcttacaggctttggagcttccaacttggtttgaagatcaacatggaaaaaagtgaacaaaagatgatgagttggtgtccaggtagcagggagggacagtttaatctcatcatggtaattagccacccgagcactaacagcaacttgagtatgagcgaacctctgaagtgttgttgccccgtgctcctttggatacatagcctactcacatgtgatcgcaaaactaagttaaatattgtttgaaaagaaaactgatttttgtaaatacaattcattatatttacctctaatggttgtctacgaatatcagtgtcatcctctctaagttcaacccgcacaaacaaattcctcttccgacttaaactaacagtcaacggatatacatagagaaaatgaaaaagctgcaaaaaaggctcgtttcttgttgtagtacggaagtcaaaggcttggaactgtaataataataacaattataagaataagaattacgaaaaaaaaaaaagaaaccaaatagataggcagaacaacagcttcatacttacatcatcagcaccaaattcctgatttctttgagcgtttgatccatttctagagatttctttggcttccaaagaattccacttagagttgctaccgtgaagcccatctgaaccattactggtatgctttccatatgcagaatcagcattgcgatcagcaggatcatctgtggtcagactaccactttctgatatattttctaagtcagcatgatcaatttggtgcttctcgatctccagtctcaaaacaccttttacaggtttttttgcgtttaggatcctacacattaaaggaaaaaaccataaaaaataatgaacactatacaataataagaaccaggattacatgagttgatgcggctgtacctggagtgagtcctcggtgtagctctctttaactttatttaagtttgatatctccactataacagagcttccagttgagtaacccagcttcccgtcgagtgtgacctttgcactaggctcaaaaacaccctcatgagaacttgatccagacacactaggagcaagtgggctgcttggagaggcagacccaccagaagctgcagtaatgctgttatcaaataatgaaacaatagcccaggcgaaggactctttgtaaggcattatttgggaccacacctgcaatttttgcttctctctctcagtcaagtgaacctgtttaggtggagttaagttgttagttatataaatgagattttgaccaaattagaacatggatactcatacaattatacacacatgcaaccacgagcagatatacaagccaattccacccaaataaaatataacatgtttgttttcttcaaccgaaaactgaaacacagtaagttttgcttgtgccatgcattatctccactctccacactttactataaattctgatcggtaaatttttttgtaacaaatatcctaacgacaattgtaagacaaatgaataataaagttctttcttccttcatctaattagagaagttttatgagagttattgttgttaggcacaggtgcattattaagaaactaaaagtaggagtacatagacattcacatactggctctttgcgagaatagactgaaggcgtaaccccaccatcttcagaagcatgcctctctaactgaattaacagacaaactgatgctgatggagcgtctaaatgaaagattccacgagactccgatgaaacatttgcctggaaaataccacatcttgaatattcagatgttgcaggaaagacaaaaaagaaatagagggtggatgaggagggggaataagaatgaaagctttttacaacttacatcttgcatttcactgggtagcacacgaaaatggaaatcttcagacaacttttctcttctatccctattgtataagcaaattgtaccggaaaacggctctataaaatatatacacatacgtatagagaaagagagaaacagagatcagaatttaccacatgcaacttaaaaaacttgcaaataatgacatgaaaccgtgaatacataaataaactgcttaccaactagtccagcttggaatgataaggatagaactttcacagagatcttcaatccactgaaacatcgaaaaaagtgggaaaagtgataaaacagatcagtgtggtaaaaattataagatcaccgaaatttttactaagcaacaacatttttttaattccatactgtgatataggagtttctggaatcctttgaccaaatatgagtgatctttcattttcccagtcaaaagccggttcgtaagctggtagtggggattgaccaaaatgctgcaaatatatttttgtttaacaactcatcaatgcataataattgctacaatgatccaatagatagaagatctgaactagcaaaacctttaaagtatttgatagtgacgagtcagaagcagtagcttcagtaaactgccgtccagaggtacttggcacgtcatcatcagtggtgtcttcagtcttagttcgtcttgcattagcaagacgcatttctgtaaaggggttgaagaaatttgtaaaaggaataagaagttagaaaactgattccatgttagcactcaatgcttcccttttctttacattgtgtagtttgtaagactaatccggcagaggaaatattataattatg

SEQ ID NO: 20622 - DNA, 2982 bp, Cannabis sativa
ggcatcgccattggtatcgaaaagcttggctttaagtgctcctagtaagccctctgaggctgcagagctagtaggagcacacacttgctcgaaacaaaagggctccaagttattgttggtgttgttgttttggtcatcttggttgggtggcaattcaaagttggtgcgcgcgttggcacctctcaatgcgcgcgcagcatcgtcatacgcgcgcgcagcttcctctgctgtgtcgaatgtgccgagccaaagcctgactttttgtattgagtcttttatctcagctacccatctgcctgaaggtctttgcctaactccaacgaatctttggtgacctcttgtgcttgtggtcgatgattttctcctcaaaccacctgttgttaccataactgattatcacaattcatcacaacaatttaactgttgtgtacatttatatatataaactgcttaataatatatattaaatatggtatctgcagttcattacaaatggacaaaccacaaagtaccaaccttagaaagagatttgttgtttattaaattagcaggccttggccttcacgttatagtttttgtttgtcatcagctgttatatattttaaaatttgtaaaaagacagataaaatatatatgtgataatatacaaaaacatcattgaccttattatatatatatatatataattttattttgttgttattatcccttatagctgcctgagccacaagtttaatttgtatttcttgtaagtgattattatttaattatttataatatgtaaagaaaaactaattatgttattgtcaccatacttaacttatctacttctccactaatatttcactatttttttttttattattattgaaattttaagagtatatatttaaaaaaatctacacaagattgtctcacttaaaaaaagaaaaaaaaatagtcatacttagtagcttaaaaatgatttattatttcaaaatcaataaatcgataataacataagaaaactacaagagaaacttaataatgcgtaaacaagacttttttttcacagttaatatctaccaagtgatgattgttattatatagattgcaaactttggaaagaagaggaagaaagaaggttattgtagcaatatagtgttattgttcttaggcaaaccataattgactttatatgtagaactattattaagaagtggatcatatatatatgggtattatggttgattatatggctaagacttaagcaaggaacttataaatcactgcgcgtgtgcatgatagggatgttttccaaactattattatgtgtgtcatatatatatattttgttaattttgaaaataacaataactcatgtttatgtcaaaattaattggtaatggatgaagtagttcgtgcttttataataaacaatcattatacataatattactatgagatagcgcttttgtatgatataaaaaattattaaattaaaatagttaaaaattcaatatttatttacactatgtataataatattgagcactattaatactatatttgttatctatacatgagatttaaataaaagtacaggctatataatcacacttggtactaaatattataaactaaatttccatgaatcttctctcccacttaatacacgcttttgagttttgaaatttttttctttcatatattataattatataatatggtcacatggatcatttgaatggaagaagtaactttgtgatgagactttgtcaaccccaaaaactaaaaagaatggtaaaaggaaactttgttggagagacaattgaactaatgtatcttagatagtaagcaacatacattggaggctaggttctattccaaatgtttaggttttagcatattctcttaaattaaattaaaattttcaagaccaatatgattgcccaatagggttttttagaagtgtatatatgaatatgaatatgtttggagcactagaatttaatgccccaactttgttgatttatccattgacccaaaataaaataaaataaaacccaccttttgattttccttttctcattcttcccttttattctcccctattgaaattcatcaaaagacttgtctttataagtggggctaattaatattattatataaactgtcaaaaaaatacatattcaaaaaaaaaaaaaaatctttcactttcattaactgtataaataattttgatttttgagtgtgtataataataataataataataataataatgtgaaaaattaaaaaagaaaaaagtatatttgtaagtaagaaaaagagagtaaaaagaataaagagagtttagaaagagtgatttttgatgaaaaagactgattataatatgtatgatcatcattattatgatcagactgtaaaaaagaactgagcttgaaatttggattggagccatataaggcttgaactccttcaacatcatcaatcttcaaatcaatcttcttaatccgaggactcaagctcggatacataacagcctctttaaccttcgaatgtcccaaacccaacaagtgcccaatctcatgagtcgccaccgattccaaatcaatcgccgattttgacttttccttagtaaagtcaacgctccatgactccgccgcatcaaggtggaacctcccgttttccggcgaaaaagcgtgtgctaaaacccctaaaaccccatcaaaaggctctccatccccgtgatctcctctgtaaaatcctatcttaatatctgctgaattgtactcctcgatttcggtgaagttcaccgggatcaccgccgaccaccggctgaaagctcgccggaacaccgtacggatttcgtctccggtgaggtatttcagcgtggcgtcgggggagaagccgtaggagagcgtcagaggcggtgttcgttcccacctcggcttgccgtagaagtaagcgtagtgacgtgtcttgtgcacggcggcggag

SEQ ID NO: 20623 - DNA, 3806 bp, Cannabis sativa
ttttcctttccatattttttaatgaaaaaagtcatattttttttttttttttcacaaagcacccataaaaaagcttaaacaaataaaggaattgaggattaaccaaaaaaaagataaaggaattgaggagtgtggagtacgtgggcctaaaaggtggactggacataaacccaaaatccattttggattttagcctaaaaagcttggatcatagatagtatccgattcgagcgccttaatcttgaaagttgaaaccaataaagccctctttgaatctgcaacaattagcttacctcacccccaaccgacttagcggcgcgtaccaaaactcaaccggagacttaaaacactccaccgccaccgacttagagaatataactcacgcgcttatgaagcgcctgctaatatttttcaaacatttacaaacttaactccccgccataaagtgattgcgcaagtccactcgcacgtcgactaacgaaccgcttaaacctctatcttattcgtccgtgcatttcacgctctttaagatagcgtgggtcaatcggcccgcacaaggggttatgatacttcccgggcacgactctttttggtgcacccacacgcttcgtccactccgtttgaaccacacgaaggcacagccgccgtacacctgtaagataaggatagagagagagaaacgcactgacactgtgcgccagttctagagagagaaaaaaatttcctgagagagaaagagagagagagagagcgtgcgagatctgatcgagaaagaaaagaaacgaagaaggtgacccagctcgaaaccctagcggtcttgtaagcccttactttctctgtgtaattatcctaaaatatatatttagatatacatctgtgtccttttgttatctgtagttttcccggtgttttcgggttcgattcaaggaggcttctgtaaaccctaggatttctttgagttcgtggtagaagccctaatttgaaaattaggggttttgtttgttggggttttttttcgttttgtttaggggattaggtctaaaaccctaaatcggattggtttgaatcttgagtattttcgggggaaagaaaactgaaattagcgtttcggaggggtacatgtatggcttcagagcctactgtagaaggaggtgatggagctagagagaagcagaggtattcggcgcacaaggtctacagaaggaaagtattcaaaggcaagaagaacactatcactgccagcgtcaacaccaacgacaacgatatcgccaaggacaaagccgatatcaataccacaaccaccaccagtagcaccgtgttagcgccagaatcaggtacttccaccgccaccgttgacaatgttatcaaggataacgacaagaacgataaaagcaacgatgggaaggagaacaagagcaacaatgacaacgagagcaagaaagacaacgagggcaacgaaaacaacaagggcaacgagagcaagaaggacaacgagggcaacgaaaacaacaaggacaacgagtgcaataacaaagagagtgacaagggcaacgagtgcaatatcaacgagagcaacaagggcaacgagtgcaatatcaacgagagcaacaagggcaacgagtgcaatatcagcgagagcaacaaggacaccgagtgcaataacaacgagagcaacaagggcaacgagtgcaatatcaacgacagcaacaaggacaacgagtgcaatatcaacgacagcaacaagggcaacgagtgcaatatcaacgacaccaacaaggacaacgagtgcaataacaacgagagcaacaaggacaccgagtgcaataacaacgagaattcaactcaaccgcggctgcaggctctggagttggaagatgggaacttgtcacaacacctcctttcgagattagatgctgtctctgatgattcgtcgagcttgaaccgacaacctgtggttacagatgtcattccaaactctagggaccctcctggagggaatggctcggtgaaggagggtgtggagaaccgggttacagttagtttggcctcacagtcgaaacatgaggcagaggagcttcggagaaagcttgagagcgagctggaaacagtaaggaattgggtgaaaaagatagaacagaaacaagggcagattgctggacgtactcatttgcatgtgtctgtaaatgaacgtgtcagcaatggtggatcaaaacgttctcattcagaggtggcttctgttggtgttacgcgagagcctattcgacctttgcaccagttgaatatatcagtattggagaatagtcagggctttgatattgtggaaaaggagaagaggacacccaaggcgaatcaattttatcgcaattctgaattcttactagcaaaggataaaattccgccagcagagagtaataagaagtcaaaattgaatgggaagaagcaaggtggagatttgggaaatggttttggtatgggaactaagtttttcaagagctgtagctctttgcttgataaattgatgaagcacaagcatggttgggtgtttaatgatcctgtagatgcagcaggtcttggtttgcacgactaccataccattatcaagcaaccaatggacttgggtactattaaaacgaggttgaacaagaactggtacaagtcaccaaaagaatttgccgaggatgtgagacttacatttcgaaatgccatgacctataatccaccaggccaggatgttcatatcatggccgatcagttatcaaagatttttgaggagaggtggatgataatagaatctgattacaatcgagagatgcggtttgggtttgattatagtgggggccttccaacacctacgcctagaaaggttccaccttcattaccttctcctcttgatatgagaaggattttggataggtcagaatcaatgacacactacggtgatcccagaccaaagcctatgagtgttactccaactgctaggacacctgctttaaagaagcctaaggcaaaagatccccataaaagggatatgacctatgatgaaaagcagaaattaagcacaaatcttcagagcctaccttcagaaaagctagatgccattgtacagattattaagaaaaggaattcatcacttttccaagatgatgatgaaattgaagttgacattgatagcgttgatgccgagacactatgggagcttgataggtttgtgaccaactacaagaagagtttgagcaaaaataagcggaaagctgagcttgccaaccaagctagagcacaaactatgcagaatgttcaggtgaaggtaaagtctttaactgtacttactaaaagtgctcccttttctggttgtgtctaatttaatttattatttttctgttttctttttgcagtcccaggttcaaattgtggcagaggtgcccaaagaaaagaagacaggttaaattttagagcttggttttttatgacaattgaaatcatttattatttctacaaattgatgaactatgttttctttattatctaaacagatgaaaacattgtttcctcttcgccaccagctcaaggaaataatcaggaggataataggagtagatcaagtagttctagcagctctagcagttctggatcgtcttctagtggtacggggatgccaaatgcattttctgggttttatctgcttcatttatctcacgttgacatgcttttattcttgcagattctgatagcgaaagttcatctgcatctggatcagatgcagggtcaccgagaacatgatttgtttggtaattaggtaaaatcttttt

SEQ ID NO: 20624 - DNA, 4661 bp, Cannabis sativa
ataataaaagaaaattttaattttatacttagttatataattaaaacatatatatataattatatcttcttacactacatcacaaatatgtttataaacaaaatatttaagttaaactcaattttttttatttattatttattttttattttttttgccaaaaaacttcttttctaaaatgaaagatttttctaattagatacaaaaattaaatataaaaactcaaattttcctaatactatctattcatatgtaatacatattaagagtgtcatatatattttaatttaataattattataaaaaattactaattattaacaaaaaaccagaaccagaactaaatactaagtgtgactagatacctaatagctagggacggacccacttaacaaaaatattgccttttaaaaaattaaattaaattttttttaaatttaataattatagactaaaatagtagaaaaactctcataaaattaaataaatcaagtaataataattataatatatgtataaatattttttaataataaaaaaccccataaaaaaaattctgagtctgttaatagcaatcccctctaataattattagtggcttatacatatattttatataatgatatttgtgcatcaaagtaatttttcctttttatatatattgtgtacttgcagtgagatcatgatatttagaggctgcacatatatgagaaaaatctatccaaaaatatcacataatggatacttcctagctcttacttatgcttttggaagatagtgacatatatagaaatatatttctttgcttctatattcattttattaatagatagatattatatagtgggtctaagagagcatatataaaactgtagactttctttagtgcttatcataaatataattattaatttgtcttcattgtgtgatatcaaataaatcaagtaatttgataatttgagccaagacattgaaaggtgaaattaaaagtcatctatatatgactaccatagacaatgaaatagttggtcacgtaattctttaattaatgttcattttcataaattttgtaattttaaattatagaaaaatataattttattgaatacttacatttatcataacatattttaatttaataattactatgaaaaaatattaattatttacaagacgacattttatagtagtattgaacactaataatatttaataacaatgctttattgttatgacaatttcctcctaattgagattaacatcattgctccattaaattaatcagtgcagttaattacataatctaacaactattctaacaatgcttttatatgtaagcacctaagtattacatatcaaacatttcttttacatacacagaaaagatggcagagtacctaaatattaacacttaacacctttacagctacctaccttcagataaaatttctcctccattccaaaggggcctttccttaatgtccgaacccaagttgcagattggcttattataagttggaacaagtggaatagttcggcctgagacgacggagcaattagttgctggagaagttgctcaagggaatagcaaatgattcaagctgtaatgtaaacaatggttcttcttgcattttaaatcagcagacaaccagaaagatccatctatggcagcgcttgttcaaaaacttcttcgaagtttttgggcattgtatgatgttctttaatggcttctcctctattcttttaatccactatcagttagtcagtgtcgtttaaaatgtttcgatgagttggggtattcgggtatatcatgatacaagtgttttagtatgaacagagcagtatcgaaatccctccagtactttctgcagaccaagatgcaaagataaagagactttgagcaacagaacatacaaatatgagttaaaatatttatgcgtctctctagctaaaatgaagtgtagttgagaagtagaattatgagaataaaaaggatacagttcagagcataaatttatggttttaggatccccgcctaatcctacaatatttcgagaccagaatacaatagtaattgctatgtagagggactcgaaaacttcagaatttgttaacgctctttagttgaatttatggtaatttttgtttgtgaaacaataacacttaacacttcaataattgatgtggcatgcttattgagtaaataacactataaatgacatcaaattccattgcagtctgcttcattttcatcaactaaaaaactctggaacgctaaataccaagcaagtaaataaaaattaaagtaaatttacacatacgtgtgagatccaatggctgataaatatggatgtcgaaatgtttcatcctgcatgatcaaacacaaaatcactctcattgagaaaatgagttttaattttaacatttaagcgcacaaacaccgacacttttatgtttgaaaaaatcaacaaggattagtctaattcaagcaaaacctgagaaggagtcaaacagggtctaactaagctaattaatattagcactgattccaaaagacgtctaattgaacaataagatacacctcttttctttaaagctgccagcaaagctgaacattaggaatgcaacaaaaggaataggaatgtgcatgaacactggcaaagaattaaacccctagcatttcaacaacataacaatttgaattgggtgatattggcagaaatgttaatctcgggctgcatgtttgaatcgagccagatgtttcaaccagaaggtacaaagctcatgaaggcagaacagcagaattacaatgttccattatccaccagctccaatagtcaacttagtggtttaattctttcaatttttccctttcaagttgaaaaggtttatttagtttaacatttaaagttgggatgttaagtgtcagtgtagtactagggctttaagcacagtacttcatgtcatctatggtttctatcttgggggaagaaaagtatataaattcttattcaaattgtttattctaagaataaaataacaacacaggagagttgggtgtcattttcaacacaataagtaataaccttaatctgataccaaaaaaattatgttgagatacaaaggcacataaataagtgaatgaatgggtgagtgtacctgaagcacataatcaatcctcccttccacacttcctgtcaatctcttcatcataagagaaccataagatggctctttttcatccgaagtttcagcgtcatctgtgaaaagaaaacaaaatcagaaaaagagcatacttcattatcagcttcctctttttcgaagtatttaaccttcacatacgtctctccatatgctagaaaataaagaagtaactacagaaaggggtaaagcaaaataccttctattctatcatcattttgagactggcaaatagtcaaaactttaacctgttcaacaaaagaaaattagtattagtacaatgatatgttctcatagattgcaagaaactaaatgccagccacacatgttaagggtgacttaacaaattgaatatgtaacagcacttatgttagaccctgatattaagtaaaaaaatagtgtgtgttgataaagaaagaagctatatcaagtaactcactacaatatctttaaattatgttacatatgggaataattataatacatttaggcaaaattatattaaaagaattaaaatgcaaataaataaaacccacccttatatagtagagatgatccataaaagcttgtgtctgagcagctacattttcagaaaattcctacaaaaaatagtatcaacatatcagcacaaaaaccacaaggatggatgaagagagtgacaaagaaatgactatatatacttcaaaaacattacctgaaatccaatgtacaacctccttccacctttgtggtagggtacaataacaggtcgtttgctaacgtattctttacacacaagtggttctattctgcaagaatatatttacataagttccattttctaggtttacttaaaaatattatatgaaggaagtttgtggtaactaacgattcaagaaaaactatgcttctaaaataatttattcgagcaataacattcaagaatgtaacatgagctaagtggttttttatttctcccaatagatatctggtcaaaaaacttatgctacaccaaatgacataaaagttactattgattctatgagtgccttttaagtaatcaagatcaaaccacacataaattgcaaaacccaaactctgcttccaggagctggtatgctatctaaaaggagatgatatagatagtgtacataatgtcctgaaaaacatatggttaaaaccattctttaatgttggtaaccaagctataagagacattcccgttggcagaacaacagctagacaactaaggttattgcgggcactttgaatcctggaccacatacacactcaccctcaagtagcagctgaacctcagaattttaatagtttctcttgctcctgagtgtaatcacaaaggataatgctaatctattttttttttaaaaaaaaagagagagagagagagagagaaaggttctttttagtatgttattttatatcaaattttgtttaattttaaaaaagtaaaaaataaaata

SEQ ID NO: 20625 - DNA, 4960 bp, Cannabis sativa
taaaatatttccaacaagaacaaggtcgccttcatcaatggcactcttcctcggcctgagaatggtaatttctctcttaactcttggctctgttgtaacaacatggtaatttcgtggttaatcaattttgtctcccctgaaatagctcaatctatcatgtattttgacttagctactgacatgtggaatgatcttgccgatcgtttcaatgagggtgatctttctgttcttcatacttcacaaaactcaagtccctttgggatgagttgaaagaatttcaacccattacatcttgtacttgtggggcaatgaaagttttttttggattactataaccaaaaccaagttcttcaatttttaactggtttaaatgagtcttttgcctcagttcgagctcagattttgctcaataaaccaatcctcaatttgtctcgagtctttgccatgataatccaagaagaacgccaaaggtctcttggttatgtggaaattcctctagctgctgcttccagctctaataatccaccaagaaccaagaaaccacgtccttcttgctccaattgtggcaaacctggccacttggtcgacgaatgttacttcatacatgggtatcccaccggttatggtgacaaaaagaaacaagataagaataaaggaaaagcaaatcttgcttcctgcagcaacgataaacctgatgcagacaattactccatcaacaatgatctctccacacgatgccaacaactgatttccttgctgagccaacagctcagcagcaacaatccaaaacctgcggtcatggctcctgctgcattgaaccttgcaggtaatacccgatcctttacttgggtaggtgacagtggtgctacataccacatgtgttctaacatggaatgcttcacttctttttccaatcataatcatcctcagcatgttgttcttccaaatggtcagcaaattcaggttgccaatgtttgtactgttaaaattaactctaatcttacactttctaatgtgttatatgtcccaacattcaacattaatctcttctccatttctgaatttgttgaaaacacatctcattccataaacttctttaacaattcatgtgttatacaggatcctattcggaatgtggtgattgggatagctagaaagcatggaaaactttacctgctgtaacaatgctaccctaatactgctacagcttctgttgtttctttcaaaaataaaaatgtaaaccaatggcacaatcgccttggtcatccttctttgtcaattacaaacttgttcaataaagagaataaattttgttctcctccatctgatcatgtttgtcatatttgccaattggccaaacaaaagaggttgcctttcattgctaaccataactttgcaaataactcatttgacttagttcatatggatatatggggcccctttcatattataagtatagaaggctataagtacttcctcaccattgttgatgataaaactcaattcacttgggtctatatgctcaaaactaaatcagatgtacaaaccataataccaaacttttttaacatggtttgcacacaattttcatgcaccattaaagccatccgtttagataatgcaaaagaactcaacatgcaatctttttttgcctcaaaaggcatcataaactaccattcctgtgtagaaagacctcaacagaattccgtggtcgaatgaaaacatcaacatatataaatgtggcttgggcactaggttttcaatccaatatacctctggtttattggcctcacttagtacaaactgccacatatcttttaaatagaactccatccaaattactcaaaggacttacttcatatcagctccttcacaacaaaccaccacagtatgaccatttaagggcttttggttgtcttgcatatggttccactttgccctcaaaaagacataaatttactcctagaagtagagcttcagtgtttattggatatcctgaagggatgaaagcatatatacttcttgatttagaatccaaacaaatcttttatctcaagagatgttattttctatgagaatatttttcctttattcacacaatattctatctctggaatccatggtttatttccagatgttgttcttcccactgttacaccagtgcagcaacaacatcctgatacaacccctaagaaccatcttccttcgatccctgattctatgcaatcacacttagcacctcgtgggtcgcatactcctataccagtgattgcaaccacctattctccatccattcctaagacagttcaatccatttctgcaaccgattccagcaccagtcacgataattcagacatgaaccttccattaaacaaaattgttccaaaaacaacttgatctggccatgcacttgccaaaccagatcacctaaaggattatgtttgtcatacaaacacaacagattaccccataggacaatttctatcctatatcaaattgcaccttcaatttcgagctgcagttcttccagcatactctgagatagaacctcagagttatgctgaagcctctcaatttaaacattggctgttagctatggataaagaaactcaagcccttgaacacaacaaaacttggatcattactaaacttccccctggccataaggcaatcggctgtaagtgggtttataaagtcaaatatgatcgaagtggggctgttgagcgttttaaagctcgccttgtagccaaagtttacaatcaaagacatggaatagattattcccaaacatatgcccccgtggtcaagtttaacactctcaaagtattcatggcacttgctgcaatgaataattggaatgtccatcaattggacactaacaatgcttttctccacggggatcttcatgaagaagtttacatgaaaattcctctgggatacaacgcacctcctaacacagtttgcaagctcaacaaaagcatttatggccttaaacaggcctcaagacaatggtatagcaaactcagctctacactcatattcgatggcttccaccaatctatatctgataattcgttatttaccaaacaaacatccaatatgttcctagctgtcctcgtttatgtcgatgacataaccgtggccagcaacaactcagatgccattgctcattttaaaacctacttgcatgacaagttcaaattaaaagacattggcaccatccgtttttttcttggattagaaataggaaggaccaataaaggcatttttgtttcacagaggccattcacccttcaactcttacaagaaaccggttatatgggagccaaaccctcttccactcccatggaagtcaatctaaaacttagtaaagaccaaggtaatcctctacctggtcctacttcataccgaagtcttattggaaagttgatttacttgactataacacgacctgatatatcctatgtcgtgaaccatttaagccaatttttatcttgtcctcgcatcccacatcttcatgctgctcatagagtgttgcaatacctcaaagcaacacctagacaaggtctttttttttccatccaacacttcccccactataacagcctttgcagagaccagcttatccccttccaatgttcaaatatcttttttctctgatgctgactgaggaagttgtcaagatacttgtcgatccgtctctggttattgcctcttccttggcaaatccttagtttcatggaagtcaaagaaacaacaaactgtgccccgttcctctgctgaagcagaatatagggccatggcccatgctactgtcgagcacacttggatcattgcacttctcaaagactttggaatcactcactctcctccaacaacactctactgtgactatacagctgcaatacatattagtgagaacccagtctaccacgaacgcaccaaacacgtcgaaattgactgtcactttgtttgagaaaaggtcgagcaaggctccatcaaacttctccatgtgtcttcccaaaataacttggctgacatcttcaccaaagccctccaaccaagccatttttcgaaaattgtatccaagatgggattaatcaacatttatactccatcttgaggggggctcttagaattgtaatgtcactaggttgttaggattagttagaaacagttttccgttataagttggttagccccgtaactaactcttttcttggctactgagtattatataaactctgtccctttatgtattcaataatactaagcagagtaataataatatcttcttcctctgttattttctatctcaaattctcatatttaatgcgacttttatccttctgctaagggaaagattaaaaatttatacacaaatatttgtgggttttctctcctcttatttggtttatttattttgaatttttaaggttttacaactggtttatatttttcttatgtactttttttccatttgaaaagattgaagatctgagatgggtattttgagtgctataatgggcatttttggttttggagtgtgaacttcaattgggcttgtaatcggctactacttgttcttgttcatatactttcagccaactgatgtcaaaggtctgttgtcacattatttttttctttttagtattctgttttccatttgtatgtgtgtgcgtgtttattaagaaacgtatttttctagattatgcagttgtatatatgttcgtaatagttgcttatgtttgttaagcttgttgaagaaggagaccctttaggttgttttgtccatttcttgtatttacactcatttggttggtactttaggtttacagcttgagttcataggtttttttttagtttgtttcaatgaggtcatttatgtacttgtactagatacttttgattttggtgatgtgtcgtagttgcagtggtcaataatggaaacaagaagcta

SEQ ID NO: 20626 - DNA, 2318 bp, Cannabis sativa
ggttatgccgcaaataactcatattcttccataaggactaaggtatttgtaacctttgtggacatcactatatccaagtatcacacattttatagaatgaaactagaatttgtgactttgatatggacgaataaagggaaaacaatatcagccaaaggttttcaaaaaagtataaattggtattttggagtaaagggtctcaaagggtgatttaccttttaggacatttatgggaagcctattaattatatgtcttgcagtctaaaatgcatcagaccagtacttaatgggcatttgagcttgagctagcagtgtgaggcccgtttccataatatatctgtgtttgcgctcaacacatccattttgttcgatgtgtaagggaaagagtgattaaagagtatgacatagttagtgccaagtggggtaaaggcttggtactctccaccccaatcagtcctaagttatttgatttttcttttaaattaattttcagctagccttttaaattgtataaaggttgcaagggcatcagacttttgttttagtggaaatagccaagtgtactgaatatagttatctaataagtggatgtaatatctaaaattagtgtgagaagttattggtgcacggtccatagatttctatgtacaacatttaagacatgactagcttgattatttgaaagtttaaaaggcagtaagtgagatttttcaaactggtaggcatcacaaaaatgcaactcttcattaacagaatgttttacatagataacttgaggacttgatttaatacattgttagagggatgacctaggcgtctataccaggtatcttttaggagaactgaaacaagattactaaactataaattagattgagttgcaactatagagaaaggtgtgttagtgattccgaatgtgttggtttctggtctaagtcaatagagtctatttttatgtgttccttacaataccaccttcccggtttgctggtccttcacaaaaaaatcaggaaataattcaatggagacattattatcatgagttaatttagacacactgataagaattttagtaatattaggcacatggagtaaattatttaaaatcaaaggtttttgtttttggtgtaggtaaaatactagtaccaatgttcttaaacaataacttactaccatcaccaatcaccattttctctttaccaccatattttgtcatgttgctcatcttatcagtctctgtagtaaggtggtttgtagccccattatctgcataccagttatcatcttgcagagtttgtagtgaggcaatcaaggcagtcatctagttttgcttgtcctgttttggattccgttcattttgaggtggatgtcccatgaatgtttcatcatatcggttatagcaaactgttacattgtgaccatattttccacacacttggtaggtaggtctagatccacctcctctgccgcttcttcctttgccttgataattattgcctccacttcttcctccatgtggtggatagtttccatgagacgagtgacctccttgaggagagtagtttcttccagctccattgttgcctccattttgattgtgaaaaccacctttggcaccaggattaaattgtttttgagtaagattagctgaagggttgagtagcttactcgagaaagacaaagctccaggttgctcgagtttgctatcaaaactgagaagtgtgcattgcagcttctgccatgacacttattcttgagattcaaggggaatcacaatggacatgtactctatgtctaggtctgagagaacatttcctctgagtagtttttctgggtatggtttccctgcaatagccaaagtgtcagcccaaactcttttctcttcgaggtaatctgccatcgatctgaagcctttcctcactgtttgaagctttgttctgagatcattcatattggctcttgaatgagctccatataagtcttctagggctgtccatagggcgacagcagtttggcaacccatgacctctgatgcaataccttcagtcatggagccatatagtcaactcattaggagttggtcatgaaaaatccaggtctcatactctggatttttttgtagatctgagtatatctctctcttttcattggtagcttcaacttgtataaactcatgtggatatatcttgggttcattgaggtagccttctagtttatggccacaaataatagtgaacaccatagttttccacagtgggaagttgttttaatccaatttaagagaaaagggctcactcaacgtgttgctgaagggagtc

SEQ ID NO: 20627 - DNA, 3095 bp, Cannabis sativa
tctcttttcatcttcttctcaactgggtcgggtcttgtctggtttgctccgtcaaaatgctggctcggctcgctgccaatcgcctccatgagatccgtcagattttccgtcaggtttttgtttattctcctcgctttcttccactttcccatttcccaatcactttctaatcttttgtttgtttgtttgtttgggcagccatcgcgatccttctctactgccctaaattatgtgagtaccatttttcattcccggtcaattcctgatcttttttgtacatgttcatatttgtatatttatatatgtttgtattgatgactaattcatgatttttgggaattgaacagcatattgactccccagacaacaaacctgacctaccatgggagttcagtgctgcaaacaaagagaaggtgagtgaaaatgtttaaagctaatttctttcattttattattgaagttgtaatatgtgagtgtgcgggctcagttaaatgcccaaagattgaaaatttccatttcattgttgcataatattcgaattgttcaacactagaaccttttattttggggtacatttactgttcgtgtttaaggctgtctgcctctgtaatctgttatcaaaaattcgattgtaacaatttttaagaattaatacaattgttagaatcaatacatttgatgggaaaagggaaatgtgggaaatctttatcaccaccatcttaagttgacgatttcaatgctgggaatttaacttttggtctgttttcctgagaaatacagtttttaggtaggtgtttgtatctatatttgtccacaaacatattttatgtgcatacccatatgttgctgtaacgagtgtatatgcatacatgtgtgtttatgatttggaaaaatttggttttcacaatgttatcctatctatgcttaggctaaggagataatttcacactatccgtccaactacaagcaatccgctgttattcccttgctagatcttgcacagcaacagcatggaggatggttacccgtttcagcaatggatgcagtatgtttaaattgacactttaaagtttaaagaactttctccgatgtattttattgtctactattgagtatgttcatttccttaagaaatgtggtacgaaaagaactttattgacaattttttttgtggataattcaggtagctaaggttatagaagttgctcccatccgtgtatatgaagttgctacattttattctatgtttaatcgtgcaaaggtgggaatgtattttttgtattttcatatttgtgcattacactttcaggaagatgctattctactagagttaattacatgaacacaatttctatgtttttcaggtgggtaagtaccatcttttggtctgtggcacaacaccatgcatgatccgtggttcacgagatattgaagatgccttactgaagcatttaggagtgaagcggaatggtgtgtgtattgtgttaggagtttttttctttgaaatttacaaaaataaaaaatcaagttagcatgctaacaatgatcctggcttttcatctgcagaagtgactaaggatggattattttctgttggagaaatggaatgcatggtgaatatcttcatgctctaccttcttcacttaagtctatattatggttgattttggaataaaaaaattgaggaatatgacctgaaaaggagttccactccatcatgacactaaggtcattagaggatattctagattaactatgatcatttaaaccttcggtcctgtttctaaggtcatagcgaaaaatgccagttcaattgtagatttccaaatttttttcacacattacatttttattggtttttgcattacctgttgctacctgtggtgttggttgaagaactggggtcctttctgaggaattaattcccacttttaaagtatatttgcagtggtttttaatgataggtgcttaattcaattaccttttgtctttatgcagggttgctgtgtaaatgctcccatgatcactgtggcagactactccaatggatctgaaggatatacttataactattttgtgggtccttgatatttactaaaccagcatgatctttgtgttttgttcatactagaagctttcggaacttatgttagtcttttttcgcaatttcaggaagatgttactccaaagaaagttgtagagatagttgaaaagttgagaaagggcgagaagccaccggtaagaaaattggctcagggtgtagtcttttatttcattttcctttacgccatttagctgggacttctcaatgccaaagacttaacctttttgttctttttccaaatcgaaatactcgatctttcagcatggcactcaaaatccaggacgaactaaatgtggaccagaaggaggaaacacaactttgttaagtgagcccaaacctcctccatgccgagaccttgatgcctgttaaatttatagcacatggtgtcatcaataaacataaagcttgggacattttcaggctttctttctgttgtcaatcagtattgttaaattttctctgctgatcagcaattgttttgtatttcgataacccctgtatggtttctggtggtcggatatgccacacaattccatttttgaatcaagctatgaactttatattgataccatattggtgagacctccacataaagaatgttttcatggtcatcttgtaagatcgctacataaagtctttataaactatttcccattgctgagaacgatttccttttccagattcatgattgaaattttaatatagcaaaaatcaataaaagagagcaaatttcattacattcataaacaagatgaacagtgtttgcattctgttgagttgagttgacacaaatgtcgtaaccaaccacactaccttcgatataataataataataaataacaataattgcactgaatagttcaaggtcctgctgacgaggcatacgatgaaaaacgttgtctcgaacgagaatcacagtactttttctttttgctatattttgtcttctataataagaataagtccaaatcttctactggttcgattatga

SEQ ID NO: 20628 - DNA, 1680 bp, Cannabis sativa
ttgaaataggaaaatagaaaaacttatatcgatttctaacatttttctctttttccttttcttcctcccttaggcaagacaagtagtaagaactagtaagtgtaaaattatgattatgaacattgttgataacttttatttttgttattattattaaatcaaaatggtgaaaggaaggcaataataagtaataagaatataatgagattattatgtgtattgacatgcagatctatgtacatatgtattgatcgaaaactcatagtaaatatataaaagaagaatatggttggtggtgctattggtttggttgtggtggccgtggctcttatcatatccaatattccatcagaaacagcagcgataagagatgtattcccccataaaccagcaatggtatctcctcctcaagcctccacacttgcagataatgacatctgcaaaactctggtggagccacaaggctacacttgccaacattatcaagttaagtaccgctttaataaatttttacattataaaccctatattaattccttcttacaaattataaattggaaacttgtactctgcatatgcatacagatgcactctgtataggtggtgccatatttataggcaaatagcaatgctgatatagtaaaacaaaactaatatatatgcgtgtgtgtagtgattaaggcatataaattaagtagtgggtgttttgttacatgtggtggtgtatttgtacgtaggtaacaacagaggatggttacactcttgggatgcagaggattccagctggaaggtcaggcaagaaagcaaacaaaccacccgttttggtacaacatggggttctcgcggtaatattaattacttaattaatcaactaattaatgcttttcaattatatatgtgtgtgtatgtatgtatactaattaattgaaatttcatattttgaatttttattatatgtatgtacgtataggatgctgccttatatctagtcagttccccagaacaatgtttgcccttcatattggctgataatggctatgatgtatggctttccaatgctcgtggcacagcctgcagtcgtacccacacatcactttctcctaatgacgaggttccattccatttctaccacctacctacttaatacattatactactttacattgatctatatatataagactattaatattgatttgaatgctgaatatcatatacaaatattatgtatgttggatttactggtgtagaaattctgggattggtcatgggttgaattgggtacttatgacctccctgcgttcatcgaaggtgtgcataatcaaactggcaagaagctacactatgttggacactccttggtgattaatctcactctatgtatatgcaattaattaattaattgattatttttttacgtactgacaatgatattagtaatgaaattgttattataataaattgaaatcaatattaagagtgtgatgaatgttggcacagggaactttgatggctctttcagcattttctacagatttcaagcagattgacatgataagatcggccactttacttagtccaattgcttatatgaatcaaattggttccacgttattaaaagagattactgtattctctttagctgaggtaaataacaaactctcctacttcaccttattt

SEQ ID NO: 20629 - DNA, 2731 bp, Cannabis sativa
  modified_base (1899)..(1922): a, c, t, g, unknown or other
tacaaaccgtaaagttcaggtggtttagccgccaatatcctttttatatatggtattctttccatacattagtaatattgtactatttcaaataattatccctcctatttttgtgataatagtaactaataaccagttacgctgtagaattctttacatttttacaaagaattgatgagacaaaatgtgaaagaaagcattaaccatttcaaggaaaaagagagagaagaaagattatcttttatgtaagtacgctttaggttattattaaaaggaaaatagaaatatgacaacttagcaatcatttctcttttcttgttttgtcaaaagaaaaatactatggaacaaaataaggtatcaagtaccacacgatgtggtatattattattggtgtaaattaatattaattctacacattttgattcaataaaaaatatagaaaaccacttatcattcagaatgcgctacatcagtgtggtgttgggcacattaagatgtccaatagcaatattcattaaatagccacatggaagttacggtgttattatgttgagaaatactaaaaggtatcagtggtacttaacactctcttacgtatcaatatcactattggtgcaattaagttttggatcccataaactttaatataataacttttaaaaagttttagacaccaccagtggcggagccaatagtaaatgttaagacggtaaaaaaaaactttattctgcaaaaatagcttattaataaaaaaagagtaatttatgacataaatacgtaagttttatgctaggtagcatataagtacctacgttatatttttggcggtaaaaatacatttcgtcacactcttagaacttccgtaggtacctctccgttttctttcaggtaagtgtccacgtgtcactcttttattagtccacatcattaattttattttttattttaaaattcattaaaacttatttaaaaattattttaaaattaaaaatatatatatttaaaatgtataaaaaaaataaaaatgtattttgaaacctaaaaattattcttacctttttttttcttaaaacatcaatttacatgatttttttttaaaaaaaaaatcatcaccgtaatcatcattctcagccattgccatcatccaaaattactgttcatcatcctcaacatatccaaaaccagattcaagaaaaaaaaacttaggaaaaaaaacccaaaaaactcagatttgtacaattgaaatggttttccataatatatacacaaaacatattataataccaaagcatgaaacaaaatgtacaaatattgattctcaaagttgcacgtctctaaattatttttccactagatctatctctttcaatcgatcttctcttccaatccctaagcgatttccattcaaatagatctaaaagtaaatattatcaaattttttattcaaagtaggcaaaaaaaaaaaaaaaacccataaattggttacctgtttgccaagagaactcatccgatgcatcaacctcgaatttaaaagtctcaaaatggaaagccacatccttattgtaccttcctgagcttgcggtggtggttgcctaagtataggaaggtggtcgatcaagtcgtttttgaagactcgatctgcccaatcctcaatcgttaatggtgtgtttctctgaatcatcttttgtatagctttcatctatgattgtcaaaagcttctcaaactacaagttaatgtgtgcatgtgtggtaggattataatttggggtttttcagctttactaatagatagagaagcaaagttatagtttgcaatagagagattgagaatcaaatggatggaaataaaaaaagagaaccaaagggatgataaattttaaagaagaagaagaagaagannnnnnnnnnnnnnnnnnnnnnnnagaagagaagaagaagaggaaaaaaaaaatgattttttaattttatgagatattttattaattttattatgtatttttctaatttcaaaatgcctaaatgaattttgaaataagagatataatttaaatgatgtgaactaataaaagggtgacacgtgaacacttggaagaaaatggagagatacttgcagaagttatagagttgacaaggtatttttaccgccaaaaatacgacttaagtacttatctgctacatgacacataaaatttaaatcttttatgctgcaaattactctaaaaaatatatattcttatagaaaagaaaaatattaatcttttggggacataaataaaatgaaaatgactttttttttttatagaataaatatgaaaatatgtgaaataaaaatgaaaattataattttacaaagacaaaaataaaaatatataatggtaaaaataaaaaaatttattttgtgggagtaaatatgagaatatgtaaaaaaataatttattaaaagttaagtggagtcatgtaatttcacatgattccactctcattgcttctgataacactagtgtttaataacattattctattatattgaataattaaattttatgtgagaagcaacaaaacaaatatttttaactataatagaatatgaatatatatatatatatatatatttgagaatataaaaatgattgtctatatatgaaagacattacttttatcctacaaataagtttatatcagactgctaataataatagtaattacagagagatgtcttatcaataaagtc

SEQ ID NO: 20630 - DNA, 3988 bp, Cannabis sativa
  modified_base (2103)..(2108): a, c, t, g, unknown or other
  modified_base (2893)..(2897): a, c, t, g, unknown or other
ttttttttttttttttgcaattgacttgcttgatatatattttttaatagtataaacataagatgaacaaagaaggtttctcaaacaaatttgtataaacattcttttttgatggaaacaagtcatttacttttattttcatataaaaataaaacatgttaaaacgagatttcactccttattattttatttgacatgtgagaagatatatatattaaacaaaaactttaaatctactttccattttccaattaccatatttgaatagaataaaataagttgaattaaatgcctaatttctctgacttcaaccgtactagtactttagggtcaaattcacaccaaaacacttccaaaataagtcactgtaactttttttttcttctttgcaaataaaaaggtaaacatattggggatatggtctgaattttctgtacagatttcgacctagtattctgttcaattatttattttggttagaaaaagtataaggaagaaaaaaagaaagaaaaacttttcaaacttttgaccttgtcaagtttttgttgtgataatttgaaatttgaagtcatccaaattttttatgaagggctttttataacaatattttagaaggatggatggatggtccctaatatagatatgaagagatactggttttgaataatagaatagaataataaacaaatgtttgtgatgatgagtaggattttgaggtgtaaaactgaaagcattggttgtggttgatttttaatatttttgagtttgagtttttgacctctcaaaatggtgggacctctttccatttgccatatatgactcttctaccctcttacacgtgtgtggacccttctctttttcataccaattttcttccttccattcaaatgtaatgctttgcaaggtaatattctcataaaagataaacccaacaatatttttgcattctaaatgtaagtaattatgtttgatataacataattatgtttatttttaattttattttgaagaatctcattctaatataactatatttttttggtttggtgttgtgatgtttttcagttttgttatctctaacgataactttatattgggaaggtatcttttcaatgtgatagggtattgtttgattgtggtattagctttattatttaaattttcgggagcagttttgtctcatgtggctcgggataagaattctgcagcgcatggtttggcaaagcaagcccttcgattagacgatgagctatcctggctcgagaaagtgtcatcgccgattgtagattgatgttttgtttatcatgtatgattttattcaccgcgtcaaaaaaaatattatgtttgatatactttacccttttgaaaaactactttgtaaatgaatttgaatataattggactaattattggatttaagatatttttatttacgtaattatataataattatgtaattagaagtaattaaggagtgtcgatcacattattcgtatgtcattgtgaagataagtgttattgcctataattacgaaatattattatttataaataaataattattgaataatttttaatgtatttactaacacgttaacatacatttgcatgtagtaggacgagagctgttttgtcgtaaatatttttatccatatttatattttataaataagggctatttataaaaatattagaaaataaaaataaattttgatatatatagcataaaaatttaattacactaatatgatatttttttaaaaaaaaaaaaaaaaaaacttacgaatatggaaaaaaaaatcatgaggaatgccataaaaaactttaaatttgtattttttttttcttttttaaaaaacaaaacactaaaataaataaaaaataatctcaactgtagatgtttttttttacagaaattaaacttgttttttttttatctactgtttgtttttttttttttgttgaaaactaattatttcattgaaagcagaaataaaaatcagtttcatctacatcatccttaaaaagaaaataatataaaaatttataatctaaaaataatacaaactttaaaaattattttcatcaacattgaaagaaacnnnnnntttcattaaaagaataaaaaatagtttcatcaacaagataataaaaaaatataatctaaaaacgatataaactttaaaaaaacagtttcatcaatattaaaaaatactaattattttattaaaagagacaaaaaaaaaacagtttcatcaataacataataaaaaatacacaaagtctaataactaaacttttacaaatgatactaaatttaaaaactagttttgaacataaaatttttatatcaatacctaataatcaaacttttaacttcattctttattttgacatttagttttttatttacttgctcaaaaatcagagttgatttatgcatacaataacaaagaaaataaaaaattaaaatcaaagagaaacaaagaaaattaaagaaacaaaaatacaataaaaacaataacaaaaataacaaaaataacaaaaaaaaaatagtggaatgtgagaaaccaattagtaaaataaccaaaaaaaaaaaaaacaaataaaaactagtttcctgaaataatcaaacaaaaaaattgaaaattaaaactcaattatgaataacaataaaaaaaattacttacaaaaactagttacttaaaaaaaacaaattatgaaaataataaaataatatgtgtgtcagaaattgattatttaaaataaaacaaaattgttgttcaaatatcatacaataataaaactgatttcatacaaactaaaaaatacacaataacatcataaaaatagagcaatcccattacagaacagttaaaacctgtgaaaccannnnngacgctataaaaaatcataaaaataataaatgttaaataataaagttaactgaaactagtttcataaaacaatcaaatgaaaaagaaaaaaagaaaaacacacacaaaaatacaaaaaaaatactaatcacaaatataatcaaaacaacacacaatggataccaataattttaaaacaaaatataagtgtaagttttgaatttagaaacaaaataataaaaaagtaacttaaaataaaaaaaaaattaataacatcattaattagaggaaccccaatacagaactctcaaaatatgtaaaccagtttcgaacaataaataagaaaaaccactaacaaaaataatcaaaaacaacacataacaataatttaagaacataatataaatgtgaaaatcagtttcaaatttagaaaaaaaaaataatataaagaaacttaaaataaaataaaaaaatcataaaatgaaacaatctcattacaaaaccttcaaaacctatgaaaccagtttcgatcctacaaaaaaatcatatatgatctatgaaaccagtctcgaccctataaaaaaagaaattttatctacaccctaaaaacttctaaagacaccccattttatataaaactagagaactaagccgcgcttcgcgcggtcttgtaatttttttaaattcttctaattcattttttgcttaatgtattaattcaattaattcaacttttatactaatatgatccaatacaaatattaataaaattttaaaataacataataacctaatctaatttatttaagtttcaaaatctaattcgattactaacttgattgatttgtttttttaattgaatttttagttctagaacatgatttcaatattaacttaaacatatacaaaacactacataaaaataaaacattgacaatcatttaagtaatagttgtactacataaagttatcaactttatacttttaatgtatataatttttgttttaaaagtagctaataaattaaaacagcaattaaaatgtctcaaaatattctacacaacaactaataagatacacattttttttagaattttctaattaggtgcgaa

SEQ ID NO: 20631 - DNA, 3561 bp, Cannabis sativa
aatataaaaaaaaaaaaattattaattttttttatgtgacaaaagaaaatataaataataaataatataaaaaatttatttatctacaaattttgaaataatgacatttaattatataatgttataatttgggatcatttgttataattcctcaaaaagtaaatgtattgaaggttggatataagatcattataatgcctaataaataatttaacttgtaacacactacaatttttattattattattattattatttatggagtgtaactttcagctctggaaattctgattttaaatatacccaaaatgaatccaatggaaactatgccaagaaataaaaaagttaaaaactatcatgcacatacattaattacaccaaaatgcataaaacttagattctgagagcttggatacttggctatattaaccctatcctcatggatatggccattattatgatgatggatatctcagccttttcagataataatgtacatgtacatcatcaatttacctctcttttttttctttagtggaaaaaaagaaactctgtcattctaagataaacatcaaaaagagccaaatggaaaataaaaagatttcatgaagaattgtgaaattgactagtgcaactttgtaggcctggcctgatgaatcaatggatgcccttgtgctgagttgagtttattatgactttgtgtactgtgttccaacttccagagaatttgggaagtggacaaattatatttccacacttttggaggttttaccaaagccatatatacattaatgagtcatatcccaccattccattctaactcaattttctcagtcccccacttgtacattattgtcactactgtatttttagtaccatatatacattagtgaaaaccagctcaaaaaccctcttactaagccaattgattcatgagattgaatgagtttattaaagttatcattaatgtactaattaactatgtgataccagtagataatggagatcactaatgtgaacatgtacaagtatagataaaaacaagaatggctgtagttagaatagtttgatgattgagttgggaaataagctggaaataccctttttcttgtgctcttgataatgtggattttgaaagagttgggttgggtggggatgatggaatttgtcaaaataggatgaccaatatgatgatgataataagataaatgctaaaaggcatcagtggtatcaagtatccttttacgtgtcaatattgctattggtttaataaagtatcgggtctcatatagtttaatataatagtttttagagagtatcgctaatcaattgtaaaaggtgctagataccactggtgctcaacaacaatgctccgataataatgagataacaaataaaagttggaattgtgaaactatgagaaaaagcaactttattgtgcctgtgcttgtgtgtgtggaacaatccaggaaaggaagaagtgcccaatccaaatagaccatttgggcgtgaagaaccaaaaagccaattggcaggtgtgtgtgtgtgaagtgtgattgtgtggactgtagagtagactgttgtggtccttttctataggctaatgtaccctattcatttcatcaaagtgtcgacactatgacttagaatcattttccttattgatattgaggattgactaatctcttttattattgtcttattgatttgattgaatcttcttttccaacataatcacaattttttttttctgttcccataatgtctcactcatatcatgtttgaatgacacaattatattttcactattttgcaaaatttacacataatatcttcttggtgattaaaaagtggttgatttccaccaattactaatatttgcattatattcattgttgtgatgtaaagcctcttttttttatgaaattttttatattgaaagcatatcattaactactcatggatgtacggtcattaagtgttaatcatggtttgaattttaaatgattgtctcctcattttaagcagaagggaaagttgaagttcatgatcattaggcaactaattagctagattgattaagttgataataataataataataatttagatatgttgttttgtttccttcctttaccacatggtagagactagagagctaagaacttttcatcttcactttggcttaaaaaatatatacctatcttttgtggtccaccacattaacctgcactcccacccccactatacactacccaaaagcatatttgtctttgtctctagcatagtcttcactttgaaaaatcattttatatatgcaatttgggttttgcataaagatttcatagtactaatttgaatttgagtcttcaactatatataattattataggcaatagggaataatatcatatgattcattcacatatggacacttcattaaaggataatgtttgttgataaagcatattaaagccaaaatttatagatcaagagtacacgttttagtaataaagctcatgtgattttgtgaataatataacaacaaaagatagacaaatgggaaaatgcccatattactaaaagaaagataagtaaaaaaaatgtattatataaaaattatatgagagttaggtgtgtgccggcgatttaatctttttctaaagatgactattgaataatattagataaagattatactataatacactgactaaaaacttttcaccaaagaaaagaatacaaattctctttctacattaacaattggcttgattcattgatttgacacatacattcatcagctaaagaaacaaaacatttaaatgtgtttttcttaatgaaaaattaatataaggaaactcccatgcatgtgtgtgagtgaataaagatcaaacctttcaatttttttttttttttttttgcttgatgaaacctttcaaacccattggagtggtttccatggttcaaaatgggcaactcataaatagtgtcccacatgtaaaaggattacacttgcaatttggcagcttagctatcaaaaataactaccattaattaattaaaagaaaattagagcttactaaataaaaatgagattaatacattcatcaataacactttattttcggctgaaatctcatcattttttttttttttgagatggctgaaatttcataataattagttaataatttcattaattattattatttttatattgaggagatggaattcgaacttagagacttattttttgtgagaagataattgttaacaaacattactggtgcttagtactctcctcgttgtcatatcgctaatggtgtaattaaatatcaggtctcatataacttaagaaaatagcttttaggaaatattagtaaccaatcgtggagcgccacctataaaaaatattagacactactagtgccggcgataaaatgcaaaatcattaacctatccctatatcactacatctcattaactatttggataatgactaattccttatgtatatccatagtgtctaaatcctaatgtgtgtccaattaactccat

SEQ ID NO: 20632 - DNA, 1989 bp, Cannabis sativa
agatagagatgtgtttggctatgcaattaaatctcatgccaagttgcaaacaaaacaaccatcataaccacataagataagatggttgtactatttgaaaaatttggaaagaaaaaaaaattgagtttttacttttgttacttatacatgtcaatttaaccccgtggttaagatctcttttattatttaggtttaatataataacttatgtacaaaatatatttattaatgttttacattaaaaaaaagtatagtttgttaattaactttttaggaaacaaaaaacatgagtttcacttttgttacaacatagacttgtctatttaacctatgagatagggtcatgcgattatgtgctgagaatcttattttgaaaaattattgttttttcaataattttgtaaaatactacattataacaatggtacaatagtaattcatttttaatccaaaatttattaagtagcgtttggttaaagagaatgtaatgaaatataataaaattagaataatttttattttatttttttgtttagttgtattttaaaatactgtaattttatttattctattttaaaatagaatgaaagatcattctaaaactagatgaaaaaagatttaataattttttttattaattttaaaattaattccatttctatttctattcgtatttttatttttatatttttatttcttctaacaaaacgccatcttgagattaagattggccctagtatgcaagtttcataacttccactttcaatgctctgtgtatattttaatttattattttaagtataaataatatataatatatgtataatataataatttatatacaaaatatatttgttaatgttttacattagaagtgtagtttttttaatttattttattaattttataaaaattacataaacatgtacataattacaatttagagcttctattatacagcttaattctttcatcatcttgtaatctaaatttaaatttacaagccaaataaaagtaaaaattagaggaattactttttctttttatcatatataattattaatgaatataaagaaaatcaaaagtaataacataaaataaaactccataaaaaaatcattattatttcttcttcttgttcctccaaactttggtttatgcattacctagcacttttattatacaaaatacaaattatagttactaaccaaaggtctatatatgaagcttagtaattgactcaaattcgataaataggtgtttcataaaataatatatgtattttgtagtcatatttttttttttaattttgttgatacattttatgcaaaataatctttaacattactctttccaaattttttaacaaaaaaacaaagaatttataaaatgtcattattctcattaattactattggatctagtctaggaatataaaaaagaaaagaaaatgaaagttaataataataataataataataatgtagtgttatgggaccatgaatgaagtgaagtgaataatagtctattgtatagtattgtgtatcgttttcaatcttagttgttagtaatagtggcttttgtacactaataaattccatgttatgttgcccctccttacacccaacctctttgtctcattctctttctatttgagaataataatataaaatttttgagtaattagcggcgaaatttactttatgtttaaatttttatattttttggtggtaatatttttttaagtttaattttatttataaatttaacgtgtctattaaatttcacgattaaatgctaactaagattgtcactgtaaacctttgtgtacacatgatactaaaacctcgaatctaatgaaaatatattatgtatatacaagtatatataatgacaatctagttagcatttaacagtgaaatttaattagccacaaatttgcaaataaaaacaaacttaaaatatatagagttaagtgtataaaattaa

SEQ ID NO: 20633 - DNA, 2823 bp, Cannabis sativa
tggattataaaacctaaaaccctttcgtaatttagctcttacaccataaacccttgcaactatatttctgagctgaagccaaaaggtacccgaatctcgtttattttctttgtgattcaagtttaaagctgatttttgtaagaaacttggaatttgaaaatggtgaaatcaataattttgatcgaacttgtaaggaggtttaatttttattggattttactttgtatgttgtattctttcttgctgaacaacgagactatgaagtttagtgttttttgatgtacatgttgggtttaattttttgtgtaactattcaaccctttcttgttttgtttttaagaaaatagtttaagaaaaatgttttggtggatggaatttgatagtttagttgctaaaatgggtaggaatcattttgaataaaatgtaattggatggaagggaaaagtggtatggttccctgatatattgtagtggatgttgatatacttctccttgcagtttgcgttgattttatactttgaaatgaaatgtagaatgaaaattttctcaaaaataagaatgtataaattaattatagaattttctgtatagaaagatcagtgcaaccatgggaggtggaactttattcaaatggtccaaaaatatcacttcttcccaagttgagcaaatgatacgagccgaaaaggacataaagaaggccattcttgtatttgattcggcaacagctgagtttgtcaatggttttcgtcatgatcataacacttttggtcttatgatctctaaattagtatcctcgaaccagtttagattagctgaggcaatgcttggtagaatgaaggaggagaagtgtgatatcaaggagaacatattcatgtctatttgcagagggtatggtcgtgtccacaagcccttggatgctattagggtctttcacaagatggaagacttccaatgcaaaccaacctcaaaatcatacattactatattgtctattcttgttgaagaaaaccagttaaaggtagcatataggttttatcggtatatgaaagaaatgggtattccacctatccttgcttcccttaatattttgctgaaagctctctgcaagaacagtgaaacaatggatgcagctattcgaatgtttcgtgagatgcctagtcgtgggtttactcctgattcatatacatatggtactttaattaatggattgtgtaaattaggaaaggttgatgacgcaaaggagctattcaaagaaatggagacaaaatattgtttgcctactgttgtcacatacactaacttgatacatggtttgtgtcggtccaacaatttagatgaagctatgggattttttgaggagatgataagcaaaggtattagtccaaatgtgtttacttatagttctcttatagatggagtttgcaagggtgggcgttcttccgaggccttggaactaatgcataggatgataagcaaaggccattcgcccaacatggttacttatagttctctgatctatgggctatgtaaagaaggaaagcttcaagaatctcttgaaattcttgaccggatgaagcttcaaggtttaaagccagatgcaggccaatatggaaaagtaataattgggttctgtgatattaataagtttcaggaggcggcaaactttattgatgagatggttcttgatggtatcacaccaaaccgtataacttggagccttcacgttagaatccataatattgttgtccaaggcttatgtactaccaacatcattgatcgagcttttcaattatatcttagcttgcgtacgaggggtatcacagttgatactaggacatatgatactttggttgaaatgttttgtatgaaaggtgacttacacaaagctgctcgaatagttgatgagatgatgcttgatggatgtgttccaaatgaggatacttggagatctattgttgacggattttggagtagaaggaaggtacgagaatctgttgactcattgcaagctgagttgctgagcgacgtccttgactcttgaacttagtttgtgtttctatagtcaaattgttctaactcaatgtttgatgagagaacttgttccatggtggaaaagttccaacgtagaagggaagccctggtaagaatttttcattttcttgaaacattttatgtattggataagattttagtttttctgatttgaataatattgtgatgtgtgctttcgtattatagtgagtgcccaggtacttttccatctatcacctttaaagtttctcgtgttctttatgagtataaataatagttactaaaatgttgtctggaagattaagtttctgataagaaccgaaaattccaaacttaagaacacaataaaacaatagcaaaataataggaattgtatattgaatgtatgagaaacccacttacatagtatgggagccctcattatttaccccttttatatgctactatatattctagtacaccatattattcctctctcaaaacacacaagttctcccttcttggattcatcatcaatttctggttgattgatctgttgagtaatgatcactttagttagacctagaagactccttacatacatacatactttcaaatgtattcttctcaagtgtattatagagtgaaattccttgtctttctattgtgaattgggctattaattaaggccattgttgccttattgtgtttgattaagtaaattcctcatttttcttttcttctttataataaatattttgcagtgcagggtattattagatgatcaacataagtcacaattcatcaactcat

SEQ ID NO: 20634 - DNA, 1864 bp, Cannabis sativa
ccatgatacaattgaaacttaacataatcttacctcatacttaatttttggaatttctgggaaaaattctcctttccattcaccagaatcattacaatcactttccaaattagctgggcatgtttgtggaccaccaatctgaattgaagaaagccacaaacaaataacacaaaaagaatgaataagagacaaacaatctcaaaaatcaaaaccacttcaaaaggaagaaaaaaaaatatgtatgtatctcaatgtaagatttctttttaccactccaaaggtcagcacactcaaacaaagcagaaccatacatatctctgcaggcttcattttcattgtcactcacaaataattctgcaaaacatgataaatgatcataatcatccatcaaataatcaataagccagagtaataaaaatgcaatctttctttacatcatctaaaatcaatcttatctaacaaagataaacccataattactgatccacaatatagagcaaaagacatggatataagaaaagtgtttcctttttccattcatgtatttatacattgtggacacatttttgtttttcaaaaacaaaattttaaaaacaaaaattttcctttgatgattaaaaagtttaaaaacaaaagtgttacaaaacaccaactaaattaataaaccaattttcattcttgaacaaaaaaaaaaaaccaagcccaaaaatttgagtatgtaattacatgaacaaattttggaaaattcagaatgaacctaacagatattagcatcggtttacacattcaatcaacaatcacacgaaaagttttcttttttattctccttctgtcatctcaatcttaagaaaaaacatatttatacatatccatttatatatatatatatatatatataaatacagaataatgatcccagaaaagggttcaaaaataagcagataacacagcaataaacaaaacccaaaagagaaaaggcaaaagaactcgaaagaaaagaagaaagctgagacttacagagtgagaaaggcaacaatggcgattagaacgaatacaaaggtgatcagtcaaacccactgtgtatgttatatataatagcttatttttctaataatagcggaaaattaggattaaaaagctaaacaaattaatttaattattaaataaaataaatatatgtttgttaaataaaggtgataacgtcgtactacacgtggggcaaccaaacgaggacaagtgtctctcggatatgaatttacctttttaactcattagcttttggcgtagtttgtttttgtagaggataatgaagaggggtatataagacatttgactccaaacgtatcttgaatgggataatatgataaagtcaccagttgttacaatcattatttattgatacggtttggcttccaaaatataaaaaatccttaataagtgtcgttctaagaatagttagccatatgatatggacgaaggtattagacattagtgccttttaacaatttttatgtaaaaattttgttatattttacataatatatttagaatgaatttaactatgcatctcaacttattttggtattgttgacgttaaaaaatagtcaatttcgtatcatttgataagtgatagctgtaaacagaaaaaataataattaaagagagaataccacaatttatagtagtttacttttcatatgtgatggtaatgaagttacattatcacaaaataataatcttataaaagaactcaaggaaaaataattaagtttagctttacttcacaatttctaaaagagagaaagtgtgaagagacagaagctatgaccttgtagagaggatggaaagtgtgaataatgagcta

SEQ ID NO: 20635 - DNA, 3884 bp, Cannabis sativa
aatatattattggaacctgtttatgacttgaccagaatattttgaactcaattatttggtatgaacgagaagaaaaaaaaaacctaccaatgtgcatatgtgtaacaaaataatgaattgaattgtcttcttttagttttgtttgagcaaaaatagagaaggttgcctaatattgtttctcttccaaccacaaaattaaaagttacacaaaaaaatatgttctttattatttttttatctaaatataaataatgcatatatattaagaaaaattaatttatattcattatttaattatcaaaaactaaaaaaatcaaaaaaataattttagtttggtttacagtgtcccactaataatagtacaatactataaataatctcatatatagaataacttttaattagtgtttggttggattaattttagtgagaaataataataaatttgaatttttagtgctcaattagagataacctaagaaagttagtgatgatatttaatttgagacacaccaattcttaacttgtaaaaattatatatttaccaatattaataaataaataaactaaaatgttataaaaataattttatcaaaatatgtatgaacttaataagattttgaagataattaatgagttgtttactaactcatcagtctaacttttaatggaaaagaagaagatgagaagttataatctcttcaacttatcaatataatcttacctaactttaaaccatgagatcttaagaaaatgactgaaattttaatttaatttataatcaacatagttatctttcttctaactacaactgaatattacatttattcaagtcctccaaaaggttcaaacttcatcaagcaagagacttaattttagaaaatatatagggtaaattaaatattattttggactctatatatattggactctatatatatatatatatttttttttttttgcaaaaattaccgattttattttgttaaatgataattcagactttgtatttttaaacatggtataaaataaatcttgagcttaattttaatcaaattaaaacttaataataatataactaggagatgttatgaaaagaatagttatatatatatttttttgcatatgttcatgctaaaaactggttttaggttggttatattaaaaaaaataacaaaaattaagattaatgtctattttataccattttaaaaaacataaggtctgaattgttatttaacaaaataaatgctctaatctgtaatttttgcaaaatacaacatctaaaatagtatttactcaaattaaaataaatatatgtatatatagaaaattttattcactttatagttatattgttttggagaaaaatgaattattccattaaaaaatacacaaaagctaaagagatctcaagatcaatacaagcataaaaccatctaaagcaagttaggtggttgacccggccaccaaacttgagaaatttctaatgaaagagaaaatttagctagagaatatgcaagagcgttactagctcggttacaatgaaaatagagacatggaaaaaagactttcaaacgtgaaggatatcagtaagaacaataccatattcattgcaatcctttctcttgtttaaaaaagttcaccaggcctaaacaatcagagaatatatttataggagtacatctcaatcgcacacaaaggagaagcccatggagaatgacagaagtctccactgaggttcaagcaaacttgagacaaaggtagcagttgaatataaaacgtcaccatcttgctgagaagccatcgcccctaaactaatttgccacctttcataacaattagcaacatcgacaaatagattttactcctccaaaatcaactcaagaaccgctctcccaatatgactaggagaaatcggcgaagagctcacaggagctattggagcaatttgagtttgagcttcctagtatcgccacaaatagctaagagcccagctactaaccatatcatagaaagaagcttattatcatgcactgaggtattacgacgatgttatattctccaacaaatgacaaaaaattcttcaaattttaccttggataaaatatttataaccccagccaaaagttcttaaaaattggaagtcatcttcaaattatccaaacccccgaacccaaaatgaaccaaatagatttaagagaaggacataaccacaaggcatgtaatgttgtttcattattttgaagacaaatatgacataccatagaagtctttatgccatgtatattcaagttggcatagggtggaacaaaattaagacttgctttcgagacaaaattttttatcttaagggaaagagaaagcttccaaataaaatttcaccacttcgatgacccttaagaagaagaatgttgaccccaaccaagcctagaaatcgagttccaaaaacaagtttaaactgaaaaaccaaccattatcataaaaatgtcaaatcaatctattctgtcgatcaaaactagaatgaggaatagacaaaataaatttagcctctgtatcatcaaaaagttttacgatgggtgggacatcttttaattttttttgctattattttgtaaattgtggctaactcgaactgctgtcaatgccccattacaaggagttcccaacttagcccaaaatatttcttccaaaggaaggttctcaatttattttcaaaacaccacattttaaatttttactattatttactaaaaaaatacaattatgttcttaaaaataatcaatttatttctaaaaatattatatttgatattttacttagaaaaaaccccaattattcttttttttcaaaatgtcacatttaaattttttaccattattaaatctaattattcacctatgactcgtaacagaagtaactaagtgtatgactcattctattgtaattttcaaaataggaagacaagaaccattattgaataccagtaatacttaatacttttttataagtgttgtcttacaattggttaacaatattctctaaaagttatttttttaagttatatgaatatgatacttaattataccaataacactatgataccgaggaagatgctagacgccaataatactttttaataattctcccgcatacattgatcaataaaagaattacatatgtcataataaaacaaaaacaagtacaaatccaacccttaaaaccccaataagtttccaccaacaccaaaaggtaccaataaataatttattaattatgtctaagcttaaaattgcattaatgtctaattttctaaagatcatattgtcatggctatcatcataatttattaaaaattaaaatattctaattagtaaacaaacagaagcatatgacttgaatctagatgccaccaacaaggagctttatatattatgaccaattaaactatatattccataattcaattttcttaattattctcctaaactaaagtcaaaagtcaaaaccaaccaataatttttattattattaatttctcaaaattattatattattattaaattagactactgcatgtaccaactctgatcacagtggactgatctgacttaaatttatttttatatatcacatatatataattatattaattattgtatctgtttttctaattaattaattattattaataatatcatttcatttattcggtgcatgtgaacattaacaaagatgatcaatatatagtactacgtacaataagtctcatatatcaaatcaaagaaatataaaggcaatatttaatcatatatattactctttcaaacattttctatggaataaaataaaagtattattactatagaatataattcatatt

SEQ ID NO: 20636 - DNA, 2286 bp, Cannabis sativa
aataataataataataataaatctggctaatattttaaaatctgacctatagaatgtagactacataatataaccactactagattctctgtataatttagtatatatatattatatgtaaaaagttatgcaatattttttttatacactacgtataactatatatttatatcaaattaaataacatatatattgtttatcaaactcttcattgtattatatattgatttttataaaaacttgtttttcagctttcaaatgaaatccatataattaaattcatgattctctagaacaattgactagtaaatgtacatatatattgaatcagttttttattatttatatatatataaaaaatatatgtgtataacttgtttctcatacactttcgtggacggcaatatatattgaattatattatattagatataaatcatataatataattaataagtgcatttatttcacgaactgtacatatgaaatttgaaattctcatcaaatcatataataatttcatttcaaaccccacaaggagtcatcactatatggaaaatataagcaagctagctacagacttagccatctgttttcttatcaaaaaaataatatattgtaaagataattacatttattgatttttttgccgattactgtaacaaattatatatatatatatatgttattgttgcgtgttatataaaattgttatatatataactataagtattcatcttgtgaagcaagtaatccaattaatatacaaatcaaactcattgcagccacacttattttcgaatcttggtattaaacagtaattagtttatatgcttgattaaatataggtatattttagctattaattatggaatgaattatatatatgtgtgtatatagtacatcatatgatatatcaaatcaaaagaaaattacgacaattacgcacacatgttctattcatggacagacatacccatgtatacatgtgttctatatattatgactaattagaattttcttttgcactcaaactttcatatatgtaccaaatggtatttttgaattctttagttatattttctctaagctgttaaaattattttgattcaataatttttttttttttcaattttacaaatctgacgtagtaattatatataagattatttcacaaataccacaaaaacaacaaaaataaggttttacagaattttaaatatttttacgatttttaaattttatttataaaaaatacgatttttttatatttgctcttgttaatttgttgttgattttttgttatttgtatatttttttgttgttgttttgatgttatttaaatgttatttttatgtagttttcttgttgtttttgtgttatttttataaaaaaactgtaaaaaagtaaaataaaatctttaaatgtaaaaatataattttttttttttttacaaaaagtgatgcgttatgtaattattccattatttatcttgtataaaatggtgctctccaaattttaacatatgtactaaatttagtcttctaaattatgtctatgtcaaatgcccaatagtaaaattgaacaacagaatttaacaatctaaataaatcaagaaattttttcacaaaacacaatttaatacatgctaaaatttatagaatttttttttttctaattagccatacattatttacctaataacaatttttttttataaaaaaaaaataaaataaaagggctggaaagagtactgtgagttgatgaattaattagccatgaaaacaagcaagctttgcatcatcctatgttattttcttcttatttttttaactttcgaacataacttattgggatggagattgatctccatttggtcactatctttgagttaaattatttgacacacacatataattctatatattatttattaattattaaaaaaaaatgcactactactcatcatcatcatcataggtttaagctgtcaataatgtaaaatagtttacacataattaaattgccgtttttgacattgcaacttaggaaaatgaatgaaaatgactaatgtttgtaaagctatatgtttaataatataaatatataaatatataaataatgccacataggaaaacttgtgaaggaaaatatagggctttccacaagaaagtaatgagagattgtatttgtacatgtgaattgtgataactctttcaaggcttataattacagcactaattgtcttcacatgcatatgctttgttgatacataactacttttat

SEQ ID NO: 20637 - DNA, 5709 bp, Cannabis sativa
aacctcaaatttttatttacaaaattacctttttaaaattataaaaatatacttttctcattaaaaaaagtaagaaaaaaactaaaaaaatgacgagaaataaacttacaatatataaataaactataaaacaacaaaaaaaaataatctcaaaataattataaataaactatgaaagcatttctactctccacatcacctaaaaaatacaatattttattttatctcttccacaacattttaacactttttgttctaaaatattttaatagtaagcgcgtccaaaaattattaaaataataatatattattatttaatgtatactaaataaactataagagcatctctaattgtaatattctttatattgtaatatattctttaaaagtataaaaaaatttcatctcacctaaaaatataatattttgttttctctcttctatattagttttgatacttttttgttctaaaatattttaatagtaagcatgtcaaaaatcattaaaataatattatattattatttaatgtatattaaataattaaattttcctacattatgacaaaataataataataaaaaaataaaaaaaagaagatataaataatgcttaacattatttttcactatagaagtaaaaatctattaaaatatactgaaaaaatattcatgtaatcaaacatttgttaaagtatttgtattaaagatgttttaaaataacttaaaaaacagtttattatttttactaaaaaaaataaatttataaatgaaaatgtttaaaattttggtttatttttgtaaaaatttgaaataaaaagaacatgagaaatttcctaaggaatttaaaacacgaatccaaatcataacaggcccaagtgcccccccgcgctggtcatttcgtttccgaccttagaaaattggaaatggcggttcgatcctccgtcgctgctctccttcccaaacatcctctttccctgtccgccatttccagatagagaggccttaccagcgatgatttgaagaaaacgaaaaagaaaatgaagcgcgattatcaagaaatctcagacgacgagtgggaaaaccactcctttaaaccctcccgagttcttggcaagaagcctcaaaacccttcttctacaccaccacttcctcctcctccgattgagtctttctcctttaggtcttcctcgaagctcgaagtctcaaatcagagcagcgacgattgcgttgaggtcggagaggatttggaggacgacgatgttgaggtctcgcatgttcggccagtgaatcgtggccgtagatttgtgattgaggatgacgagagtgatgaggagttacccgaagtgttcgagatcaagtcaacgactgaagaggaggatgacttagagttagaggacgaggttgcagatgaggatgatgtggtcgggaaggctttgcagaagtgcgctaaaatctcggccgagctgagaagagagctgtacggttcttccgttccggcctgtgatcgatatgccgaagtggaatcttcttccgttagaattgttacacaggtaactgcattgagacatttgataactttgaagcttttgataaatggcatttcatgttgaatttcgcaatgagccttaataattttgaaggcgttagtttaagttcattttggctgtttgtgcattgggcgtataacaaccaagaattggttaatttcacttttctttaactatttcgttccctagacttggaattgaaagcatttggtaaagtagttagagagttttagctgaattaggtaatgtgagaacataggaagttagcaacttaaacttggaaaagaaagtgtgaaaaaaagaaaaaaaagaggtcatggagattatgcacaaatgagaacaatttagataccagcccgagtttctccgggtcaccacattttgcatgtttggattttgagggaaaatatgagaattttcccttggttgccttaattttcacctgaagtaaaactggtaagtaaataagtttatattgtgttagtggataatattcagtctagtaaaatgttctgtttcccgttatatgtttcgttattttgatatattactaattatatataaatatatatggaatagtttttagatgtagtagacatttcaaaggcgtactttatttatgtaggatgatgtagatgcagcatgtacatctgaggactcaaattttcagcccattctcaagccatatcagttggttggggtgaactttcttcttctgctgcatcggaagggtatcgggggaggtactttttatatctctattcatcttttttattttttttttctcatttattttagggaaattaccccatatactattttttactttttttaaaaaaatttacggtttgggttgctctggtggtttctatgtggattgctatacggattttgatttcgatttaagttgatccgttagttgctataagggtttctatgtggaattccgtaaaaatgaaaaagcccttttattttattgtctttgtaattaaacatgcttatttgaaacaaaactatctgctttctatttttgttcttatctactttgaaatcatgtgctagcatttcaagctcagttgccaatacatttgtagaatgggtttaatcacaattgtcaacaatggtacttaattttttttttctttttgttgcagccatattggctgatgagatgggccttgggaaaaccattcaggtatcttggccttttgtttttctgcttaagttgtcactttttcgttaatgtggctttgatatataattatgacactattcttgtctggcaggctataacgtatttgaccttgttaaaccacctacacgatgatcctggtccacatttgattgtttgtcctgcttcagttttggaaaattgggaaagagaacttaaaaaatggtgcccatcgttttctgtcctccagtatcatggagctgttcgatcagcatatgcaaagcagttgaactcattatccaaagctggattaccacctccatttaatgttcttcttgtgtgctattcgctttttgagagacacaggtttggtttgctataatacaactgttggaaaataaaatattatattttctgtgttttgaatcttataattcacattttccagtgcacagcagaaagatgatcgtaaaattttgaaacgttggcaatggagctgtgtgctcatggatgaggcccatgctttaaaggacaaaggcagctataggtggaaaaatttaatgggtgttgctcgaaatgcaaatcagcgtttaatgctgacagggacaccgctacaaaatgatttacatgtatgctctaatttgtttattatgttttcagctcttatatcccataacaaatgcagtaaaattagattaccattagatcaatagattgcaatctcagaatggggcttgtgaatgtgcagttgcttcctcttggaaattcatgctgaatagcctggctttttttttgtgtacaattgaaacattttatttgaattgaatgggttctagtgtactaagctcgattaattatgattagtttcagtttcatggtttttctttttgttgctgatttgattttttttgttccaggaattgtggtctctgttggagtttatgctgcctgatcttttctgtactgaggatgttgacttgaaaaaattgctgaatgctgaagatagagatttgattggccgaatgaagtccattttgggaccattcatattgaggcgattaaaatctgatgttatgcagcaacttgttccaaaaatacagaaggtttgttagatgattttagttacatttttcatgtagttgttattattatttatttggtgtgttattatttattcccttctcttacgctaattttttggttgtgttagaatgagtttgagaatttgtgtgcaggttgaatatgtggcaatgagaaagcaacaagatgaggcttacaaagaagccattgaggagtatcgtgcagcttctcgggctcgtttggaaaaaagttcagagaatcaaaagaacagtatttttggagttcttcccagaaggcaaatatccaactactttgttcagttccgtaaggtgttattataaatattaagcatctacttttgcttgaacattattacgcataattgagcttatgttagatactcctgttattgactttttccccttttgtttccattgttctagattgcaaatcaccctttattggtgaggcgtatttacagtgatgaagatgttgttcgttttgctagaaagttacacccgatgggtgcatttggctttgaatgtacagtagacaaagtaattgcagaactcaaaaactataacgacttctctattcaccgggtaaaacttacttcgaacattttttgtttcttgcatttaagtttgggaaagatgtacacaacatatacttactgattttaggttcatttctttctgaaatttgccatcattatctacatgaaaagtcatatgtatattaataccctgcatcagtcatagtggagtttgtctgcctgccaacagtaataagctgtacaggagttgtctacttacagtggggtttaagataattttgtttttctcaatatgatgaatttaatacaaaatgatgttaaagtgatagcattttgattagttttgacctctgagcaacagtctgaaatttacaaagtgtgagatgggatcttagttttttgttttctcttgggtttccaccacttctctttgtttgcaacacgtactgatcagtaaatgatacattctatagataagtaaatataaagtctgagatggattatggaagacatgctgagatgcttagtttgttttacctttgtgttgaagtaaatgataactcaagaggtgtccatttaggaaaatgcaagagtgtaatgctcttctaaattttctattggtaataatcattggaggaatggaatttcgggtgtagtctattttcctttttctaaaattgaggaaaagtaacttatgagcatattagtttttaataggcaaatatttttgaatgaacgtgatcaaattgattgagatgaaattctagggccttgaggcctttaataagcacactttgtctactatatcagcaagtggcaaaaaaatatggtcttcttggcctttaataagcactttgtctacaatatcagcaagtggccaaaaaatatggttttcttggctaacgatattacttttagttccaaagattaggtaagtgctttgggatctcttaatacctttttttagtggtgggaagtgaattttataagattcatagttattattaaaagttaaaatagtaggtagatgtgtacgattttgaaattttttcatgaggatatacaatgatgcacggtatttgaccatcttgattagcgttcattaaatgtcttgtttaggatgagtttgggcactagtggaaactggaaaccaatccttttaaaaagctccagaggcttctccacaagtgattttacatccttgttactatctcatttttggtatttattttatttagtggatctagtatttagtaatgtgggctggtaattcatgtttagttttgttggttttcaatatgaggatattgtgtaaattccctttttaatatcttaaaattgtgtgtggttgtc

SEQ ID NO: 20638 - DNA, 1916 bp, Cannabis sativa
ttgcggtttgagaaattacaaaaaccacatatgcggtttagtttcaaaaaaaaggtcacaacccgcaccacttgcaccacgaacacccctaggccaccattggcatcttcttggtcaaaaacatgttgatcggtgttttgacctgttgaccaagttacaggattagaatgtattggtgctccatgaacaggtgagatatgaccacaatcagtttgagtattaattttgaactgagattgaggtgttgaaacagtatgaaggacattaaaaaaggcaaaccaaaaaggaacttgaacattgacatctttctcaagttggtgaatgtttaggaaaccagttttgaggggaaattttatttcattgaagattacatttattgaaatgtaaattcgaccagtgttgctcaagcacttataacctttgaagtattctctatagccaagattagcacacttggtagagtgatatctaaatttatgagtttggtaagctctaagacagggataacaagcaactccaaacatttttaagaatttgtaatatggtcttctagaaaaaattgtttcgacatgagacacattgcttataacaggagttaacagtatgttaattaagtagaaagatgtctaaaaggcatcagtccagaattttaaaggtatgcttgcctgagcaagaggggtaagccccatatccaccacttgcatgtgttttctctcagctctgccattttgagttaagctatgaggacatgaatgtgtgaacttaatgccatgttcataacaagatttgagaaagcctagtattcaccttcccaatcagtttgcatcctttttatttttctatcaaattgattttcaattaattttttaaacgtaagaaaggcagtgagagcatcaaattttactttcagaggatacattcaagtatatttgctgaaatcatcaatgaaagagatgtaatatctgaaattggtattggacattattgaggttggaccccagatatcagtatggatgagatcgagtgaaaagattgccttttgccttattagtattatgtttgaagggaagtgaatgatattttccatattgacatgcttcacaaaagtgacacttttcatttttgtaatttctaacatttaattgatttaacacaaggttcaatacatgattggatggatggcctagtctcctatgccaatattccttgattgacactgaatttaacacattctcagttctagactgagttacattttgattggaaattgaagataaagcggaaaaataactagacttggactttgtagaagaacagagaagagatttgtgttgatctgacttgacacagattggttcaaactgatagagtccctctttaagtgtctcttggagcaacttcctctttgtgagcttgtcattcacagaacaattgccagatgagaattacacaatcacattattatcatttgtcaatttaaatataaagatgagattcttagtaatctctggaacatgcaacatttcttttaaaatcaacatatcaatgtcatttgcaaaaatataacctgaaccaacatgatgaatggagagtttgttgccattaccaacaattaaggtctccttaccactgtatttactcttctgattcatgttgtttatgtcagaggtaatgtgattgttggctctattgtcagcataccatgtctcatatttaagcatctcaagtgtggcaacaaatgatgcattatttggatttggtttagttccatctacagagtttccagttggagtagtacacatataagattcatcatatctgttgtagcagtaggcagcaaaatggtcatatcttccacaaacttagcaagtaggcttgggaccattagatctaccacctctccttctgccaccact

SEQ ID NO: 20639 - DNA, 2417 bp, Cannabis sativa
tattttgcagaaacaaaaggttgcgctagcaaaacagcttaatcttcgtcctcgccaagttgaagtgtggtttcagaaccgaagagcaaggtaataataattaacaaattcactaatgtaactttgtttctcggtatttggctcattacactttctcggtaaaataaattttctttttttaatatatttgtttttttttttcttttcctcaggaccaagttgaaacaaacggaagtagattgtgagtacttgaaaagatgttgtgagacgttgaccgatgagaataggagattacaaaaggaacttcaagaactaagagccttgaaaacctcacaacccttttacatgcaacttccggccaccactctcactatgtgtccttcttgcgagcgcgtagccacctctggtgccgtcaccgttgccggaaccgccgctaactccggtaaacctactcaacaccgatttcctcatggccaagttgggaaagctgctccaggaaatcttcaatagttaacttataataatagtcgtactatatagaacttcgattttgttttttttttaaatataaaaatcttttatttttgtaaatataccttttggtttttgagccaatatatatctttgtcttaaatcccgttgaatctcttcttagctagttttagttatgaattttttgaagagggaaattgaaagtgttgatcgagtgatgagaaggttgacataattttgaatgtagaaagaaaaagaaaaaaaaacatttgttggttcttttaagggatttgggatatttattgattttgtttgttatgacatgaaattaatattaatattacatgttatttatttacgattttgtgacaacttattctgtttttggtaaataatttgcctataatcgcggcttcgattgtgacatgttactgtatctttcttatcttcctatataaatcattataatttgtttcgaattatgttaaactaattaacttttaccttgttaaacaaaatcaagttcgaatcccctactcagtcctaattatcacaaatatatatatatgatgaaaaactagaagtcatacgaaaatgatgctacaatccaaacacaagaagttcaatattggataagatattttggagaacaaaatatattctaaaaaagtttgttggattatttgccaccaaatggatttccattatttttagtcatcacttaatttttgccatttggcggaatacattaatatcgttacataaacgacaatcaccgttgagccaattaatagtgcttagaagttaccttcataatataaattataagattagactgggagttgggctaatatattaatatcaatttgtttagcctaataattaacaatttatattgagtttcatatcttcacaatgataactgataatataaaattccaaacgcaagttttattaatatttatattattttcttgagtttgatgttgacagcgtttgagattataaaataacattcaaactaggaaacaagagaagaaattagttagctaggttttatactgaaacgactcgcccaaataacttgaacaaaactccattttaattaaatttagacttttcattgttaggttagatttgagtcaatattatataaaatgtaagaacatattttttttttaagtctcatctacccaaatttcggaccaaataatgaagatacatattaggacaataaaaacagcctatactattttttttattttttttattacaacaagtgaattcaaatgtttcgtctgccattaaattttgcagacaagactgctacttgaggaaatatatatatgtataattataagtatatgtgaagggtagataatcaaacaagtactaatcccttaaaacaaaaaaagtacaaatggaatgattgttctaacaaaagtataattttcatcggtgacctaacaaatccaggtgggtattgcattaactttgtgaccaacccagattcatgccacttaattagttagggtacatatatgccaaaacagtttatgatctcatggggaagcccatataatagatacctaccccatcactaattaggtatagagttagcttgtttagtaaattatatttctcactctcaaattatttaatatatacgaattcatggtacaactactgtataggtatttaaagaaataaataaatatgatatattttcttgattgaaatgtttatataacttgagattcaattgcaagacctacatacatcctgcaaacctccctattgctatttgagctaacctcacgtagtggttaataaacaaatatgataagttacatataatattataacccttatataaaacattatttatattgaaataatttccatgtaataatagacattcaaaa

SEQ ID NO: 20640 - DNA, 3048 bp, Cannabis sativa
  modified_base (1352)..(1360): a, c, t, g, unknown or other
aacacaccgtttgaacgtagttttcggcgtgttaaacttttccaaattttttaaaattttgtaggatgtcttaaataactataatgtcacgactatgaaaaaaaatttgactaaaaaattattttgagtgctaaaacagacaatagatccaatgaagggggtgcattgtaaaattttcttaaattttatataaaataaaaattattaaaatttggtgtgtttaaaaattattgaagtgtaaataaaatttaatttctattattattattattatgtttctctgaatataaaaaaggtttcattctgttaaagcaaagaggtgggtgtccctgcccgacttggaagtgtggaccccacgcctgaccaccttgttgacctgagcctgcccaaaactcattttcactttcactttcacacgcacaggcacagctagcgctactaacttgacgtgcacaccccccactgtgaatttacaaaattaccccacttcattctttcatataaatatatatatatttttttattttttaaggaagcattcttttccattggtgttattttttttttatttaaattgattttggtctacataaaggtgtaggattgacaaaatatcccactaaatgaatccattttccaaatatcccacaaatgaatccattttctttattgttggatgatattttgatggaatgaagttggtattttattttcaaaatggattgacaaaatatcccactaaatgaatccattttccatttcaaataaataaaaaaagaaaaaagaatccattttgagtttagggaatgaaaaatgtgaagtgaattattatacaatattacaatgtaatatcacctagtcaagtttgcattaatctatataaaatgggctaccaatgtgttaaaaaagttgaacatacacacgtcatcatcctcatttttgaattgtttttttttttttttcttttctattccttctctaaaatccttccaaaaatccaaaaaccaaaaaagattaagatggagaataaaaagtcattactcattagccaaattctggaccagaaagaggaagtgaatgcgcgtagactaaagtctaaagagaaaaagaaaagacccacaattttattttttcgtttttttatatatatatattttttatttgttggaattactgtaaagctgaatattcaataactaatgtacctgtattatacataatccaagtgtggttcagtgacttgattcttgaaccaatatatatttaaatagagataagaagtaggggtcaattttgagacggtgacaaacttggggaccaattaatccactcaaaataataataataataannnnnnnnntaataataataatcataataatagtaattacttaattaatttaaattgaggacaaagtttggaccaagtttgaaagcaactaataatcaaacttttccattaagctatagaacatatagaacatgtgaaatcaaattcatcttcttatagctcttctaaaacctggtttttagggggatttttgatgagacaacaatgtaatagtattttatgtttggttaatatgaaagaaacaagttaagaaattctaggaatattgttggctttaacttgataaaaaagacaagttatgtgtagtctatttttttgttggcatatatagttgtaaaatatatggaaggaacatacatattttggtggtacttgaactcaagaacaaatccaataatttagtggaaaccaaccaaatgaatagaattacaataagaataaaaagaatgtttttttttttttttccttttaactttaactaatataatatatattttgtagttgaagaataacaaaagtgtgaacccaccaaaatatatgaaggaatctcaactgtaaagagatgtctctaactaagtataactagttatagtataataataattaaagagaactatgcaccatgggcatgaccttctctaaggtgatcataagtactttattttctaaagttcatagtatatatatacgtacaccttctattcggatgaattttgtggcttcatatttatgatcgagattaatttaacacccaaaagcacataattaatatattgcatattgcatagataagactaataaaatattgtacacatatatagatatatatatatatatatatacttatatatgcatgtgatgatgtgaggtgcgtgtgtatgtatgggtatcacatacctctcatatttgattttgagttgagtagtggcttcaagttgatcaaagagacaaaattttatttggtgatgcaaaaacgaaaagtgttgaagagaggttgaagtaagatttgaaggttgagaaagggaataataattaggagtatatatattaggttaaggttgagaaaaaaatgaggtagctataagttactagctaggttagtgttaacacataatttcgttgaaaaaaacaaggctctttaaaatgaaattaattgaaattgaaggaattgtttttatagaataaaataatagggatatgattttgttccgtgatgtactttcacggaatgtattccgtagtacactagatgggtcttacggtacattaaatgagtgtcagggtacgtttctactttttaaccctaattacccctagattaatctcagccgtcggatcaaataactctatcatctaacggctgtcgtacatcacggattacaatccgtgaaagtacaataacggaacaaaatcatatccctaaaataataataataaatatagcaagatgatttttattgattttgtagttaaatctgttgggattttataccctaaataaaactcgttataatataatcttatatgttatcaatagaaaattaaaagtcatttatgtttacatgtattattcatgtttatggttggatatgcaaattctattaaatccagaacataaagttattcacaattatagtgatgtcaacacagtgaaaggtaattgtaattatctgcttcaaaatattatatatgtccca

SEQ ID NO: 20641 - DNA, 3370 bp, Cannabis sativa
tttaatcaaacttaaactatgaaaagagtttgttaaattacttagcttaatattaataataattatagataataaaatataattttgtctttaaaattaagaaaataaatttataaaatttaatataatttttttttcatttggtttagaaactaaactattttattcttttatgttaagaagttctttctatttttggagaatgacaagtgatcatgtaaattttttattttctattattcaataaattttgagtaaaaaaattactatataaaaaattaggaattgaaagaagcgtaagtttttatttaatatttactaattttttttgataaaattacactaaatatagtatttatctaattactaaaacctatagctatatcttactaactattattactaacattttttcccataatatatatttcataaaaccaacactaattaaccacttttttattatacaaattatttgtactagtactatagttaaaaccaattattatgagagcgcaattataaattataaattttattgtggttggtaatttaattatattgaggaataaaattaatttatacaaaaaaaaaaaagtaaaaacttttatgtaaaaaattatggatatatataggaaataatatatacgtcacacaacttatcaaaataataaaatggaaaacgtttttttcctttgttgcggtaattttgtagaggaaaattcaaagaaaaaaacagtattaattagcagagagagaaacagataaacttctatgtatgatttaaaagatggacaaatgaaattgtaggacttaagacacttagtcaacataaaaacaaaatgagctagtgaaaaggagtttgattattaatttgtcttgttatgaaacgctacgactctcagcgcacaacactatttattaccacttattttatactctacattgtacgtcttcgtcggtatttatagaaaatcaaataaaaacaattgatcaagtaattaatatatattattctttattcacatatatattagttgtagccttttaataattcaattggttttaaagttgagcgaaatgagatcttttacaagaagagagtaaggtatctctaatcaaactctaaaatacttaaatattagtgtagtttttatactatatttatttcaatgtacaatagatcactaaaattatacttataaatagccaccaaaaaaattaaataattatatatattgagtatttatatttatttcagtacaatagaacactaaaattatacttataaataaccaccaaaaaaattaaataattatatatattgagtattaaaatattcttattatattaataaaataataggataataaataatataaaatttagtgtaatttttagtgttgcgattgaaattgaaaaaaaaaattagtcttgaaatagtaattttttttatgttaatttaacattaaatttaaattttaccactagagatggcctgagaaaaactaaataacaacattcaaaatctagtcaaatcatataatgacaaaatgaaagtaatctaacccttttatgtttttaataaacagaatcatcggataacatatattactacgcgtaacttgcttccataagtacagcttaagataagtctgattgcgaagtaattaacttgacggtttagttatatataaatatatatactgtatacaatttattggtttctcattgttaattatatatatatacactcatgcattacttatttatatgctacatcaaaacgaaaatgaaattccatgcttggtcctttctgaaaatgaatttgatatgcacatcagtaaaaaacaacggaagcgaagaaaagaatagcaccataaacagcaaaggaagaaaaaatagaggcataagtttttttttttctaaaaatacggttataatgcaatttgacttttccaaatttttagattatttttgtgtctgagataaagggggaaaaaaagacatgtgctggcatatatattactctttctctcaatcacatttgacacttgatctatctactgtcaagcaacacatcaataactcaacttcattgactttatgcatgtggttgctaatactcttttgaatttatataatatcatggccatggatggtaaacttttgtcgtatttaattcgcttcttcttcttcgttttcgaaataaaacttatcaatatgttactggtctgagaaagagaaatgaaaaaaataataataataattatcaatcatttaccaaaacaaaatataaaaaaagaaattacattccatcgttttcttttcttctaatattttagtcattctagtacatgtttgaatttaaaacatacctaatacgattatattccataatcaacgtgtataaatattaaattaattatatatggtcactaataagaggcccactaaccaaaaattatagtttggtgtaactatttagagcacttttaagcttgaacatcctctgtacatgactcttagtgggtgttcttattgtcaaagagctccaaataaacctgatcaccaaatgctcctattcctaaccacttcaatcttcatcccaaattacaattttctaacttatcattattggcttcatttcccacctcaaaacatagcattgatttaattattacatactttaattaccagttgaccaatgatttaggtaatgtccccacaccctatatcatggtgggaagactatatacgtttggctatatatagatatgtagcattatgtatgaaaatataaaaaatataaaagtaccctataaattctaaattaatctaattaactccattggaggaagaaaaaaaaaaatcccctagtactcaattattgtttaatatgttcggtaaggtttagacaaaacaaatgggaacaattgattggctatttttcatgaagttcaaatatttgaccagtgaaactagggactttaaggtatatatggaagcaaattacaatttcacttcgtaaaatttaattgagcatgtttactttaagcattcccaagacaagagatgctggaaacaatcaatgggaaaagaaaaatgaaaatagtataatgggagttgttttctactaatttttattaattttagttagactttttgaaggtagactaaactaaaatcaaatatatataatgaccaactttttaacgtacggggttccgacggctccattcggcgatgctatattgagtaaattaataaaattaaaaagaattttatgtagactgtacgtgcatgcattatttatgtatatgtttttctctaattatcccttcatttttttttttgttcagcaaaaatt

SEQ ID NO: 20642 - DNA, 3984 bp, Cannabis sativa
aaaaaaaaatgaagaagaaaaaggtgaatagtggagagagagctcaaatataataaaaaataaataataaaagctattataccttaaaagaaaaaaaaaataacgtttagaaactaaaacgatatatattaatcttttcattattaatttttataaaaaaaattcacaaaatgacaacaccatcacatcaaaatctttttactattaaatacaataaaaattttcataattatatatttttaaaatatatatgtcactgatgtgacaattaattttcccataacttttaaaaaaaaataaaaaaaaaacatatcttgaagtgacaaaaagcatgaaaatgaaatctttttatactaattcagtatacaatatgtagattatacagtaaaaaaaaatatatacgaataatagtaaaaaaaaggtttatgaaaaaaacagtatcctgtgtaaatatctctaagaaaatgtacatccctactaacagcaatactatttttggagatatatccccaaacatattttagaagcccaaccaatgggggcctaataaccttagtgttggtcacaactttgtttcttaaaaacatttttcttttccttcttttttttttggcaactatacaaaactgttaagtacgcatagaactaaatatttctaaccctgactctgtcaatactaaaaatatttgtttttatagaaacattcaagtttaaaaaaatgtctcgtcaataggttggttttatctctatatttctttcttcctattagtatgtgtttaggtataattaattggaattataaaagtaaataaagactcatatttattattagttactcctttctatagcgagctgttagttatatggtactaaaatatttatgggaattactatatatattgttttttaatttttttttttaaatttactgtttaacatttttttattataatttagattgcaactttaattgtaatagtaatttctatatataattctgtaaaaaatacaaaaacaaagaaaactattttaaaagtaaaaaaaaactaatttataatttttattaaaataaaataaataaaacgccatattaaattataacaattataatattacacccttataaaagtattaacgattataagtaggctttaaaatttctcttttgtctctggtatttctgtttaatattccccgccatagattatgtactgtagaaccttggactactaactaactactaatctaaacatgcactctcttaaagtagagagagagagagagagattggccttgcaatagcttttggccttttgtgtgcttttgtccaacccccagtgagaaaataaaaagtaacagatagcaaaagagaacagtgactataggtacttcttataagaacaagaacaactagaagaaccactcaaaaaccccacatcctctctctttctcatctctctctctctctcccctttctttccctccttgagaactaatttctaccatctaatcttggtaatatggacaatcagcgcaaccctcttcttggtgttagctgggcttactactgccatggaaaggtaacaattttcttctccttaatctcggaaccaagactacttactcaaataaatgtagtctaggaaaatgtaatataggatttgcttgctcagtaatcctagtcgtaatagtagtaatactataacactagttatttctgtgttcctaatattggaaattaagataagggttgttaatatggttgtgtctatttgggtgatacagaatgttgaagatgagttgaggagttccctttgttatgcaaaactagagctcgatcagacaagggtagcattacaagatgagctaagaaagaaagacgatcaactaagtcatctcagagatctgcttaacaaaaccatcagagaaaaggatgaagtccaggaaaaatgccgaagactcatttgggagaaactcctgcttcagcaacagcaacagcaacagcaacagcaaacagctcctctttctggaatttcaagcattgatgatgagcccagaagaggaatcgactctaacaatggcttctcttcttcagattgtgaagaaagcatagtctcctctccagtgatggaccaaattcaccaaacccagttgccaacaccaccagctccagctccaccttccatttcagaggcagccctggacctagtctgtgacaaatcattacctgaaaagggaaagcttttgcaggctgtgatgaaagctggaccacttcttcagacccttctcttggctgggcctcttcctcagtggagacacccaccaccgccattggagtcctttgagatcccaccagtgaccattccttcaccaccaccaccaccaccaccaccaccaacagctacaacacaagtaatattccaccaagattccctcattaacaactttaatggctgcagcaacgccattaccaactgcggcagagtcaacaggaaaagggtcctctgtgatgggtctgattctccaacagaagccaagtaccaaagaattgtgcttcactgactcatatttctgctattacaaagtaatcatttttttacttcccaattctactataggtttgatagttacagttttaatacaacgaaaaagagaggttagtaaaattaaaaatatatatatattaagttggggtattttgactgataatctagcattttgtacagaggtttgttctagtgaaccaatcccaaattaactcagtgagatgagtaaaagaaaggaaaggttgtttcatatcattcaggcccttcttgaagcggttgttgtgtggggattttgtctctccttttatttatttatttttcctttcacattttagtattttgctcctagatgtgaaacggggtcccttgatttttccaacaacatagttgtggactgtaaagaggaaaaaatgtaacttttttttttttttttgtattactagtttagtagtatgcaagagtttgttgtgttgtgtatctatgcaatgttgaaagaaagtgacagaatcacttctaaacattaagaaaaataggtgtggagttgttgggtttggaagattggtgtgggtgaggccatcaaacataagagcttttgttttgagggggcctttgagcttgtcgggttgagtggatcccacaaatcagaatcaggatctgattactggtgtgatgtatgattatatttatataatttctttttctctatttttgaggggaagttgtgattatatacatttaagtctctaaaccatgtttctttttctgtctatttaatgaatgtataagcaattattaactaaagcctcttttctaatttcatctgcccccactctccaacttgtttttaatactttgttctacttttgaacctttattgctctaaagttgaaacaaatagtaagagggtctccaagttagcattacgtttcagtactgaaaaaaaaagagcagtactgcactgagttgatgactaaaacctttaaatttacacaaatgaatatacaatgaaggaaacaaagctaaccttcattcatgttgtgtctttttcttttcacatttcatacgctagaccttgaaaatgaaaattttaactaattctattacaatttaggccttccaatgcaaaagttttatgtggcttctcgaatgtggaaatgaatttgttcttattctaacttctaacccaaagagcaaataatcatcttagctatgaacttgatataatctattttaaatttgggtttcaccaaatttgatacggaaatttgatattatatgcatttattaagccaaaatttatcccctaatcattagtgtatcaatattgtcaaattaggtcattttttcattaaacccgaaattaccccccaattttttaactcactcccgtctctctctccctccattcacctcgatctcttcaagagaaccgaactgc

SEQ ID NO: 20643 - DNA, 4832 bp, Cannabis sativa
cacatacattggtgagaacagaataactcaactaatcaaccagaaaaacaagaggataaggtacatggtgagggaccaataaaaggacatagaacttttttcttttttgttctagtatatacttctctaacaggcaggccataagaatatatgcagttcaagtccagcaaaagcaaacttctctggcatctttgaaattaagcctacatatgcatttgaaagaatctataacctacaaaccctaggcagagtacaacacacaaaataagaatcttctttactatacatatcatactatcatatcaaaccaagcaaatataacataacagataaattcattaaatcaaaaaaacttataatgatgtataccagagccataggtggcaaggagaaaaccaaataactttcatgtcctcaaattgaaaaatacctttatgaggaataataaagaaatgaaggacaaaatatttgaggtatttccattctcaacttgcatgagacacgccagttcaaagaaatccttgcttcagatcaataatcacatcgacaaacaatcactttccaacgatcaaagaaatgtattcatatagaaaacataagacctgcctcatagcagccaaatcctggatttagtgaagctgaattagtttcgacaatattccacagatatatttggtaatggggttatatctatcaatcaatttcatcagcaatcaaacaagttcaagaacaaagaaaatcggataacctaaaaaagaaacaaaaaattgagaatattaaagaaactaaaatgtgattgacaaaatcgcaaaatccattcagtgaaaatgtcattacaacttgattttcctaaaacttgaaagtatttgggaagtacctatcttcataggaacggtggctggaatttacattatcaccactgtgcaccaactaatgctgtctcaacaggttaaaactgtagcctactcattcagcactgtatcaactgctattctaaaccaaatgtgaaactttcttccatcaagaaattggtgaaaagggccaaactgcttaaaatcaaattcccaagaccaaaatcaccaaccacattaacggacaagagttacagtcaattgactacatatcacggaccctcatttcaagattcatacttgaattggtttctcctcttctctgccaataggtgaaactggtagaactccatcttccccatcactgccgcaagaattgcttacaagctttctcactcctttttcacatccaagtccatcaaccccattatcatcattctcctcaagaaccttttctgcatctctctctttcttgtgcattatatcacagaagaaatccgtcattattttctcgtagcctggcattttcgcatacccaggaaagtaattgatgtcaattataaggtaccgattcccaaacctggcatccctaataacatcgaagttgaacagatgcaatttcatagcacgccttaaaccctttgcgatttcgataagcaagctctgaggaggcatctcggtttcgtccaaatgcatcttcttgtagtacttatcgtcagttctttcgttagtggcgagattagatacctgcgagaaagacaacaaaccctccaagctacccactttctcctcctccgacacgtccggcagagacttcctcttcacgcacttaacatactctccaaccacatagaccttgaaaatcactccaccatggttcacaaactcctgcaagacaataggcggttttagactgttgagactatcgtggttaaagacgagagccatcttatgagacttagcactgccgtcagccacaagaggcttcgcaataatcggaaacttgagcccttcccatgccggacgatcgagcaacgtttctttatcataaatcactatctgcttcggaatcccaaacgtctcactcctgtcctcaatcttcaactcagaaacaacctgcaacatcgaaatccggttatgaagcctctcgatcgcctccggagagtcaataatcaccgcattagggttaacagccctaaaatcttccaactgctgccgccaatccacaccgtaaagcttgtgaagaacacaatcgaacggtccctggtcagccagaggacggtcctcgtcgatacgaacaagatcgacaccgtgagacttagcaagactaacaagagaatcttgaatgaagctctgttgtttctttggtgccagcgcataacctacgccgaacctccgctccgccattgatgattcacactaaccaaaccctttcgaagaagacaaaaacgaaaagaacaagaatccagcaaaatggtagtaccaaaacgctcataaaaagaaaaaaaaaatcaatcgatcgattcacacattcacagtagtggtcaaagaaatcaaaggtccaaaattcaataattttcttttgtttgttccaatcaaattaatatgaaaacctaaacggccattgttgagcttcgaagaaatcgttaagaaagaaaatgaaaaaatggatagggaaaaaggtgagaaagaatctggtgcgggtgatgggtatatatagcttcgactagggttaagagtgaagaagggtgataatgataacgtcaccagagtgagtatgtaaaaagggatcggattgtacacgtggcatattctttggctattatgccgattcgcggcgcgtgtgatgtggtaggtcacagtgttcgaaagttgtgctaaattgacgtgtgggttacatatagtcaatcattatttatttattcttttatttttcttttaaatttatttcattcggttaattttgtctaattttaataaaaaaaattcacaaattacacataatagacatcaaaaattaaagtatatattttaatttttctaaaaaaaaaaaaaaaaaacatatatcttaataatttagaaaaaaaataaaaaatataatttaatagtcaattattatttatttattttttaatttattttcattcaattaattttgtctaattttaataaaaatcataattaatcttttcattataaagagtgtattttgtaggttataaaattagtgagacttttctttgactgtggtcttgcacttgaagaaatttttttttttttttttttgacggtttggattttggtttgttgaaaaagaaaaaaaaatcttttggaggtattattagggaggtgttcattcaattatttcaagcaatattgacttattagaaaatgaaaattgatgttcttaagaaatagaaaaattgagggggagagcttacattggcttcttttgctctacttgcttacattgttgtatttcataaataaagtctataattaagaattgaaaagtgaggaatgagacggtgacatagcaatagtaatgataattatttatcattgttactgtcatgttaatttaaaattattgagaattgaataagagtactcgtattatgtaaaattgctgaggattgaggaataagacagtgacataacagtaatagtgataataatatatcgttgttactgttatatcaatttagaatttttaactatagcagtaacataataatctaaaattactttacgtttattaatttatttcctataatttttatttctttgatatgatatctaatatttttataattttttattgacattttattttatttattatttcctcttatgtaaatttaaaattattgttggaaggtatataaaaaaaaaaatagtgaagaaggaaggagtgattatcaagatattgaggtagatttggttgaaggtattagaatggaaatattatattttttttttgtttgattgtattttaaagtattgattattttgatttcttctattcaaaaaaaaaaaaaaaagtattgattattttaatgaataaagcttttcactattatttttttgtttttgtttttgttttttatcttacagaaatttttaactttttttatttttttactgtggggcgaattttttttaaaaaaatactgaaattaaaatacggtttattattttaactgaaaagatatttttgtaaataaaaaaattcaaagtgtgaaaattgaaaaaaatatatatattaacttatttttataattttttatctattatgcaaatttttcttatataatgtgtataatgttattataaatacatatgttaatggtatgagttaaagtttattattttatatatgtttttgaccactttgaccttttacttgtggctttttgttaaagttttattaatattgtttaaaaaaaacctttactaatattgtcacaaacaatttaaataattgccaatagtgatttcaatttctttctctactctatctattagttcttttttatttttagctaaatttatatggatattgagtagggtgagtatctgattaaatataatattttttatgctaatttgatctaatttaattagtaattaaattttaaaaatcattatccaaatccaattaagattcaaaatttaatctaatttgtaattgaattagttcagtttttaatagaacatgattttttaatattgactcaaacatattcatacaataacataaattaaaccttactactctttattttaatgaaaatattaccaatcatttaaatcaaatagtacatcaagttatggtctttatatttttattaactaaaaactaaaaattaaaatagctaatagcataaaaatatcaattaaaatgtaacgttcctgttttaagagatcacctattctaaaattactccaggtcaagcatgcttaactatgtagttcttt

SEQ ID NO: 20644 - DNA, 5066 bp, Cannabis sativa
cgtttgtcttttcattctttttttctaaaattaccagttatcaactagaagtattacgtggtatttaaccactcttgtattataactacatagtaggtgatgatttcctgctatcatattaatacaagctccatttattttttctaaaaaatatttgtccccaactggatgtatgcgccactagaaatagaacagtgatggtgcgtagttggagaaaatacaccaactaaactagccaatcaattcaatatgttgacaaagccagcaaaagaaacactaatgcaattgaatctttgagtctgacttgttctagtctcccccatccaccaaaatccagttgggcatgtaggttctccaattatcaggatacaagttgaaatgtatacttaactactctgtcaaactatatttcttataaagtaaatgtatgtccaggggaaggtgctagcagcatatttattgaattgaggtgaaatttttggattgttcatttactttgtgtttactatttcagtgctttgttatgaacatttaaaaactagcagttgaacattgtccgctgataaattatttcacttgtaaatgagttttgattcgggaatattatactcaagtattaacaatctttgcgtagtatcaagttactgcatattatgaagaaagatataacttttcactaaatcaatgtccatgatttttatttttaagtagtgatttatctcaaaacaattatctttcttattttgtttcagagggagaaggaagcatttaaaggattaatgattaatgcaaaagagggtgattaagaaacaatttgtgctgtgaaggtaaagccaaatcctttgcttctctttttctcttttctttttgatttggcatcctaggctttctcctttgagtgacagagagttaagaaatttgtttcataattagttgttgtcgtacataggtggtgtcaagggaatggaatccttgaaaatttatggcaccacttttttcagtcacattcaaataaagggaactgatggtttataatactccatatatttccaaaaaaaaagaaaaaaagtcacattctatattctgccttatctaattcttactattctaggtggtgttggttgaattggattgttaaagaggattaaacctgttgtttgataataatgcatgcagggtgttaggggagaaagaagtagcattttgtatcattaatctgacagcatgttctgctgccagctccttaagttgaaactgaagctcactatatcaattgctagtgcaagaacatgttccctatgcaccacatcatcgtatattgtcactccccccatcaatccatggccccagcgcctttaccctaagcgcttggtctccattattacctgccaacagaaccttgaccttgctctccagatcttccattatgctggtgactttcatcctggtttctctcacaactacgaaacctatcatgccattatccgtcgcttatctcgcgccaatgcttttccagctgttgagtcccttctttccgaccttcgtaaatcccaccttaaatgtggtgaagacctcttcattactgtcattcgcagttatggacttgccagtcgccccaaatgttcactaaaaaccttcttgcggatccatgactttggtgtccaacgctcagtgagatccttgaactgtttgttgaatgctttggttcaaaacagacgttatgatttggtccgctgggtgtttgagaattccaagaataagtttgaagtggtgcccaatgtgtttacttgtaacattttggtcaaagcactatgccacaagaatgatttggagagtgcgcttaaggtgttggatgaaatgcccagcttgggtttggtccctaacgtggtcacttatactaccattataggtggttatgctatgcgaggtgatatggttggtgcaaagaggacttttattgagattttggatagagggtggctgcctgatgccactacatataccattttgatggacgggtatgctaaacaagggagactggctgatgctattaaggtaatggatgagatggacgagaatggaattcatccaaatgaagtaacttatggggttatgatcagagcttattgtaaagaaaacaagtctggtgaagcactaaatttgattggggatatgcttaatggaaatttcataccaagctcggcgctatgttgcaaggtgattgatgtattgtgtcaacaagggaaggtggaggatgcttgtgagctgtggaagaaacttttgaagaacaattgtactccagacaatgctgtctctagtacgctcatatattggctttgtaaggaaggaaagatatgggaagccaggaagttatttgatcaattcgagaggggtttaattccaagtatgttgacttacaacacacttattgctggaatgtgtgagcagggagaattgtatgaagctgggagattgtgggatgacatggtggagaaaggttgtgctcctaatgcatttacctataatatgctgataaaaggattttgtaatattggaaaggcacaagaagggattagaattttggaggaaatgttgcataaaaaatgttcgcctaataagtcgacttatgctatgttgattgatgggctccattgtggaaaggaggaaatcgcgaaggttttttcattggcattggcaagtggaaacattgacaatgattgctgggatcttttctttgccaagatggttggaaatttggatactggagtaactgttctcaacaagattttgtcagattgttgattaagaggttgctttaaatgtataggagaattctccaataggggtgcctaaaacaaccctatgcataagggtgttttttttggcaaatataatcttaccacatcacaaatgtgttggtgtgtttgttgagcatgagtgcagcgtacgcttttatttttatttattttttactggacttgaagggagagacccaagccattcccatggctttacctcatcatgtttcttcatcatttccctgcctgactaagcttccatgccaagccgagttctttgatcatcttaagtggttcagtggttgagaaagaaagaatcgcagagtagagaagaagcacggttgggggtgagttttcctttcggttatcttttattttcagttttgtgctgaggaaggtgaaattagggtattaagtattatagcaattattttgcaaaaaaaaaaaaaaagtattatatcaattttttttctttttttaaattttgtgtttcatgtcgatttagtgttctttctcttgttgtttaagatttttatggtttgatgaatggaacatgaatttataatgattatcttggtattgggtgctttgctctttgcaaaaatactaaacggaccggtgcagccttttttctgacttgttgacactaaatgggtattcatttgattgaaatgggaagttttcaattcgtatttgtgatcttaattgatggtttggtcaataaatttatttctttggcttccattggttgctcaaaatttgcactgtgagaatctttcttcttcattcttctttctcgggctggttttttttgcttcagtgtcaatttgctgaaggggagtaatgtctaaggtattactttaaataaattgatatgattcattgacacagcaaagttttgattgaattatcttatgttgcattggattttgattttagaggccatcatgatctttcactgattttcaccatggagttacattcaatccttacatttagatttatttaccattattttaacttacagaaagatcccaatccattggcaatatgttgaactgaattaatatgtagaaagactttttgtatgcaatatatattatttttcaaagcaaaatgtattattttttaattagtatatggtatgtaaggaaattcagtttcttatattgaaaagaaagaagaaaatatagtcttcttgagaaatgatgaacttgttagtattattattataatattagatgcagtatttattcatcattttcttatattgttatgttgttttaaattgtaggctgtgaagattgcatcttaagcaacaaatggatcaaaaggggctgtgtctagttgagagctcagctatatatctcttctactctctttctttgtcccagcaaactaccctatcattccccaaaatagaaaaggaatggaagaactgttaaaattgtagccctgatttgatttcattagaaaactgtcaatctttgttagatgacaatcatgttgttattggatggtaattatattgtagaatttatcagcacccaatataggctcaaaatttatgtataatgtttactatagtagaatgttttcttgatccttttttgtctggatctagaaaaaagccattttgtccaacaaactaccaccaccactagatctaatatgttctttaaaatggaacccttcaagaaaagaaggcatacactacataattcatatttggtgtaatgtagtttttttacttattgttataaccttttcaatccaatattgtatgattcattaattgaaatcgtaattgacttagggttgtataataaaatgataatgatgggtaaataatattttgtactttgagttatgtaaaagttatcaattggattttattttgttaaatgataatttattttatattttttaaaatagtacaaaatagtatcttaagttggatgttcattaaaataaaactgaataaaaacttaatgttgaggtacaaaataaagatttaatcgataacttttgtaaaagaaatggtccaaaataatatttaccctaaacgactcagatgcaacaaagtttacgttagtaattgatacataaagcaattttctctattttgaaacaaacataaaactaattcaacctcaagctttttcagtaatatgcttgtttttatattcattgggaaataataggccatcaccgatgctggcactcaaaaagagagccaaaatgaccttattcttttttttttttttt

SEQ ID NO: 20645 - DNA, 2749 bp, Cannabis sativa
aatttcgtaaaaatacaaaaaaaactgttttgaagtgtaaaaatgaaaaagtctctttttgttttatgttgtaattatttaagacatcctgtaataaattccaaaaaattaaacatgttaaaaataaagttcaatctattgcacacgtaacccttttattttcaatggggtgaaataaattattttctataataataataataataataataataataaagtgagaactgctgaatttgtgtttaaattttggattttgttcactattttgtaaaagtacgatgaaacccatacctttaattaactactataaataaaataacaataattataaaacatttgacataaattaaatgttaaaaaggatcacccagtataatttcccaaaaatctcaatcattaactgtgtttcaaaaaacaaattaactactcacactcacatctatactattactaatactagtttgttcatcctaactcctatcactcaaaaataattttagaccataaaatgatataatcaatcataatgatactaataatagtacttgttgtttgttgatattcatatatagaccatgcaatttcatcttcaccatcatcaacctgcatgaaattgaattgtaacagtattaaaataaaagggattgattgattcaaatttcaatttgtaaattgcatttttatacacatcatcatattatatattcaaatatctcattcataccaccaatcaatcattcacatataggcagaggaagaagaaataataacgtgccaaaacccttgagaattgataaaaacaaaatgaagttggctaggcaagtatgaagtaatgtgaaatctaccaagtataaaaacaaagtaattgaagcactaaaacaaagccacatgggaaaaataccaaatttcttctatggttacaacaagtgcaataccgattcttcttcttaatcgagatcttcgtgtctaggctctgatgatccagtgttctggtttcctcggtttcccgagtttgatccgtcattggttccttcgttgttgttgttgttgtcgttgccagggttacttgtttcagcgttcgagccaaagagtctaaaaacccttggcaaattgatcgtaaatctgcgctctactgagcgtggtgttgtaggattttctccagtcgatgcaccgattccactgtcttcacctgcagcagcagcagcagcagcagcattggtgctcccccccatggtgggggtattgaatatcccaggtgtttgattttgattcacgggggcagaggctgcttgagtcctctgttcgtattcggggtcgtcagtgggcaactcgtaacgacaaacagggcaagagttatgcaactccaaccatgggagaatgcaatctgaatgataaatgtgtttgcagggtatttgttttgcctcttcaccgagctcgaatgtatccttgcacacagcacattgtgaattgtctgaagccaacatttcttctgtaatctttatattggggagtgcttccactgcagattttgatgctggaggtgtcccgtaacgattggggtcgttttctgcaagttgctggatcaattgttcaagcccagggccgaaaaagtagtcaccgagattaagattggtcgggacacggaaaccagttgagtccccagggttgccatcaatcacaaactgaacattggcaccattggctcttagtgtttgtaggtagttttgaagaaacaaaaatgggttgaaagcttcgggatcatgaaactgagaaccttgtgttggcgcaccacccaagagggctgagagatcgtcaacgatggtaccaccagcaccaccactacgaccaccaccaggaccagaggcagatcctgcggagaacataatgggaaagccactagcactaaaggatggtgcatcgggtgaaaaggagaaaaagggattaaagtttggactgggcatagggttttcaacttcttcaaggaagccaccaccgcattcagtacaaactatttccgaagaggggtctaggcttactgtgcgattgcattgatggcaaaaataaagttggggtgcattggcaccaccaccacctgcagagaagccgcccgacgatgacatgaaggttagaatggggaaaagaccgggcagaccaaatgtagaggttttatgccttctaaaccaatatcctttgatctttctttgaaagtatcagatgcctttcgtttaatttgtatgtgagccaaatcaacctttcttcacctgcaaaatagaatacaacaatattggtaaagaaacaccaaaatgctcgtcatttttctaggacctgaagcaatcaatacattagcagacaccttaccaaaaaagttagaaaaaaatacatcagcagactatatacaaataagtaacacaactacttacagagcagtaatttcatacgagagaaaatccacattatctattgtgtacaaatctaaggagtagagtacccctagcctaaatcctacattaggcaaactggccaaccaaactaaaagtgacccagttgactttttttaccatcctttctaattcaaagttttctaacttacctattgtttagctccttattttgttagttctatatttgctaatttctagaatgatctttttttattattattttagtaaatctacttgtttcccatttaattagtttcgtatttctatacaaagattgtaaaagttgtacacagtattctctgatc

SEQ ID NO: 20646 - DNA, 3986 bp, Cannabis sativa
tgttgctcctagaattaagatttttgaggtggaagaaggaaagggagatgaatccatggtgcacaccaagtctttgattgtaaacctgaaagagaattttgattctgatatttttgttgaagttgataatagtttttcgattgataaagaagagaagttgaatggtgtagaggattttgttcaagatgtattagttaaggacacttctggtgaggatgctgctcttcatgaagagcctttggagcctaataaaagagatgttttggagctaaattcggaattgatttctcatgttaagcatttttgtgctgaggaacataagtttaatgagtttgatactgcaagaaatacacagattgaagattctggtgattcggagtcgtttaaggaagaaaatgatgctattcaaggttgttgtgatgatactgatagacttatgggaaaccatttggtagagaaagaagaagcggaactgttggtgttggatgttgataatgggggagcagagaataatttgaagtatgcagtggaagaactcttggtttgtgaaaatggcaaccaaaacagtggtgaaggtgcaagactttatgatggaactattgaagagattccagagagtaaaatggatgaagaaattgattttgacaaagctaaggaaaattccttggctgccatgctggaatctactgataattgttgcgaggcgaatcagaaagagtttgatttcgatgaactcttcgtgactgatgaagcagaagagattgtagattctggtgagtgtcctttatcagaaatagttgatgattataaaatagaagactgtaatgaagacatggatgaagtagaaaaacatggtcatgtatttgatgatgatgctaaagatttggcaaatgggagctctgaaagagccgaaaagatcattgttgaagtggaagaaagggttgcagactgtaatgaagacatggataaagtaaaactgcatagtcatgtttctaatgacgatgctgaagatttggcacatgggagctctgaaagaactgaaaagatcattgttgaagaagaaagggttgctgctgcatctcatttgggaaaagtttgttctcaagagtcaatagaaggaaacaagtctgcctcatcaatggatattttgaacacgactactgtcctcagtcccactacttttgattcatcactgcattctggagaggctgcttctcaacagactcacatcgatactcttacttctttacaccttagtggggatgaagttgaggtcagcctaagcattgaggataaaaagaagattgagaagatgcaagtcctaagagtgaagtttttgaggcttgttcacagacttggtatatctcttgaagattcaaaagtttcccaagtgttagaaaagttattccttgatgttgagaaacacacaaatcattttgatgcccttgaatcaacaaagaaagtggccttggattttgaagcagataaccaaagtaacttggacttctgtttgaacattttggttcttggaaaatctggagtgggaaaaagtgcaaccattaacttcattttcggtgagaagaaagccatgatcaatgccttcaaacctgccaccacttctttgaaaaagattgttggaacagttgatggaatcaagattagaatccttgacacaccgggtctgaaagtacctgcagttgaccaggctgccaaccagaaaatgttgtcaactatcaatagatacataaagaaattccctccagatgttgtcttttatgttgatcgtttggatacccaaaacagagatgatgatttacctttgttgagatcaatcactaggtctcttggttcatcgatatggaaaaatgcagttgtcactttgactcatgctgcttctgttcctccagatggttcaacaggcttaccccttaaccgtgacatctttgttgcacaaaaataccatggtgttctacagtctatcagcatggctgttgataatttgtatcttatgaattcaagtattatgcatccacttgctcttgttgagaacaattcattgcagtctgatagttctaactcgagatcccaattgttgctcttgtgccattcattgaaggtgttgtcagaagcgagctccattgcaaagcgtgaaaagccttcagatcggaggaaatttatggggttccccatccattcatctcttatgcactatctactgtcatctctattgcagtctcatgctcatccaaacaatgctgagtctgatactgagtttgcagacttgtgggatcttgaaagtgaagaagaggatgaatatgaccaactaccttcattcaggcctctgagtaaatctcagattgctatgctcagcaaagaacagagaaaaaattatttcgaggagtatgattatcgtgtgaagctccttcaaaggaagcaatggaaagaagagattaaaaggctgagagaaattaagaccaaaggaaaagaggatggtgcacatatttatcatgatttcaaggaggatgaggagaaggaagattcgaattcgacttctgaatcagtgcctttacctgacatcacactcccgttgtcttttgatggagaagagtctgcctatagataccgttccctagacctctcatcggagcttcttgtgaggccagtcatggaaacttattgttgggaccatgattgtgggtacaacggtgtcaacctcgaaaaggaatttgttgtttctgatcgatttccaactgcattttctttccaaatcacaaaggacaaggaaaagctgaatcttcacttggattcttcattatctatgaagcatggagagaattgctcaaccttagctggacttgacatccacactcttggagatcaacttgcctacattgtcagaggcgaaaccaaagtgagaagcttcagaataaacaagacaactgctggagtaaccgtcaatttcataggcaaaaatcttgcaactgggttgaaagtagaggatcagattgcaattgggaagttcttagttttggcaacaagtgctggagctttgcgttctcaaggcaacactgcatacggtgccaacttggagctgcgtctcaaagagaaggatttccccataggacaagatcagtccaatctggggttgtctttgatgaaatcaaaaggagatttggctctaacagctttcctggagtctcaattctcaatcggacaaagctctaaaacggctatccatgttggcttgaaccataggcgaaatgggaagatcactatcaaaacaagcagttctgatcagctccaaatagcattggctggtattcttccaatcatgctctcaatctttaaaagtatatactctacacatggaacacaaaacttgtaaatcttatactttgatatgatgatattgagtaaaaacaagtatcataatttttgttgatctttttgttgatgcttcagggctattgaatctgttatacttcttcatttatattggtagatattccagttgtaatgtatctgaactggttgaactaatctttaatgaagtcttctgggcagttggtttaatctctttgttgtctgtcttaaattttgtcataagagtttttatgtcaactgccccttcacaaaatgtatgataatgtttttgaatggaccatgtaaataattcttggacaaaaaactgatcttttaattttttttatttttattttaagacaaaattaagctacttgaaaagggctacaacagtcaaaactaagtgctgtttacatgttatatcaattcagtagatggttcttcatttggccaaagaaagaactgaataaagtaaaagagctctgattagctaaactaattattacattggacagattttaatagtgtttatatatcatatccataagaatatgcagtaaacatacaacaatctatgtataagccaacactaatctttgcatattttcatatagtgtatcatt

SEQ ID NO: 20647 - DNA, 2637 bp, Cannabis sativa
  modified_base (379)..(380): a, c, t, g, unknown or other
attcttctggataccgaaataagtcaaggttgcatcagtacatctattttaagggagtacattatagaatcacccaaaaatattttaccaaaataaataaagatgtatcgatgtatcctttttaaggaggtgcgttatagaattcccgtcaaatttttgcaaagacaataaaagctccattgacaagtgcggtttattttgtaaaataaaattatgaaaatggtcctctcttttttccactgagaaaaatgattttgtgcgtgtgtgtaataattgattcaggtgaaaaaaataaccaccagtaacttcaatgtcacagtttatatgaagtttgaaactccaaaaattagttatatttttagaaaaaaaaaaaaagaannaaagaaagaaagaaagagagagatctagagaaattagtaattgtttggcactatgcaaccgcgcgcattcaattacagtatgacctactaaggaaaataaagaaatactggtcatacatacagtcatatacacgactatatctatcacattaattgatgattcattctaatttagatgagacctcctccttaagcatttttttgggtacgtatcagcaaccacaacatatatacatgtatcttattttattttaatatttgaaatttataatccactaaaaaaataaaattataagagtaaggtccagaccctggtccgattaaagtggacatgataagtcagccagtcaaatccaataataagaaacagaagaaattccaacagaaactccaactgatcaatccaccttcttcttcttttactttcattttgatctcttttgttttttaataatttattttgaagtagaaaaacttctaagaaagggaacagatggagtagttttactgggatagctaggttaggtcccaatctgatttatgaaatttggattttggtagatgagatggttattttggcagcatgaacaagtcatcttccaccctagaattatagtgtggccaaaaatgaaaacattttacagcaatcttatacaaaaatgaaaggactacaattaaaacttggatttttttattttttattttttcttcatttcgagtaataatataaactcactaattttctggtcatcttgggtgtggaccacttaacaaattatgcgttgtcttgtggaattgtcatgcatggcttttgctttgaggattctgaattggatttcagaatcaccttttgatctacaggaagttgcagataatttataagtgtcttcttcttgtcatctattccttctatttagtgcttttttaagtttttatatattgggaagtccagtcttattaattttcagggttatttgtatggaatacccttttatttatatattttaaatagatatatataatttgaaatatgttattttattgagcaatttggttattaaattactacatagaaaataaactttatactgttgctgttgctgcatgaacaaatgacaagtgtaaaactagatctacctatcacgatcagattaattcgttagacaagttcaaatatataattttcaaaattaatttagttacaaatttattaatttggagtagttattagttattactgttttaaatttgaaaaacacttgttttcattagagaccagcttatctattccatgtgaatccttgtccgtgtatatcaatcaaacatgatagtcgggacaagagagtacatctatatttgcttatttcaaaagggcaaaaaactaataagaagaaaagaaaaaaaaaaaaaggaaatttccagtctgcaaaacgtaatttatcagaaaaagaaaatgtaatttattattgttaagttgttaatacgttaaaattttgttaggggtggaacgtgatgatgtacgtaaattccaaattgatgataaaattaagagatttgatgaggttgtacccaaattaaaggatccttcgtactatatgtaagtatgtgtttcttatattttaatatatcaattatttgtaaagagaatatggaattttccaactctaatgggattcttcattatttggttgtcaacttgtttacgtgaagacatgactatccacctctgaggctctgcctttcttgttctcactttatttttttcctttttctcgctacactctttgaattgatgatgagatgaagctaacacttatccccacacgtggcactaaatgaatggtgatctcaaatgatgggttccactccttttcaaataaacctttagtccgttttccactctcaaatcaagataccgataggcatggctggctatagctagtgatcgagagaccttgggaattaggttaatgcgttgcttggaatccgaaaccgtgggctccttatattatattcattcattcatatgtatccggcgaagcgatcgacccgtatatttctctgatccacataattgtatacgcagtatatactgatttagatatccaccgaaaatgaaaaataataaaaacctgttcacaattagttagatttagaatctttatgagaaattataaacttttgtttgtgggcgaagctcatcaatatttgacacacattgatcatgtgatgaggattttctttttttttttttttt

SEQ ID NO: 20648 - DNA, 1627 bp, Cannabis sativa
attttatatagaataaatatatttaaaaaaaataataataattagatttgaattgtaatattttaaaaaactttatattgtatagacacatttaatataaagtaaaagataaaagaaatatgtgtattgagtttaaatttaaattgtaatgttttttatttaaaaaaagaataatacctttattgtatattcatatttaatatatgatagatatattacataatattctataatataggaacctctcataaatttttagagaattacatataatttaggatgctaaaattaaaatttttaaacagctaattgtacacgtgtttatttgaatttgatatttatacatgtatatccatacaataaataatttcaatcatgatttaattatcctaaatataattattaattatgatttttgaaaaatttatgaaagatctgtttagctacattatattatcagtgacagatttacaatctttaacctctataatatgtgtaaaacaactattaagtatatatgttaaaattattattatatttatatttgtcacctttatttataaatatatatcgtaattaatcaaaatatatatatttcttttcttattttttttaaaggccattcatctctatatgagttcattcatgtatatcatcaagtaataaaaaaaatagaattacatctaacttatgtgtaagatataaaaaataactatatgtagtaattttattgtaatcttattcatcaattttttttattattattgttatctatatgtatttatatataatttttataaaagtattttaacttatatttatatgtgggtttggaatttttccacatataagcactaccattttacaccacactatgaaactattaatacattctttatgaagtggggagaacaaataatataagagacatagcactaaataaagacaagttccaaatataaaagtgcaatatactattcttttttctttccacacactactctaaaaattaattaatagctaaacctttttatatttttcatttttataagagattttaacagtaatactacctcaattatactatattaatttgttacactttgttacacttgagttctattttgttatttacttttctcttaaaaattttctattacatagataggtgaactgctcaaatatatacaatagtaaacataacaaccttttttttaaaaaaaaaacaaatatagaatttttattaatttatcaaatcatccaaaagagaaaactgtacctcaacaagaacatcacccctattaaatactcgatttgatatagattaagatgctctagcaagactatgagcaaccacgttagccaatcgtttaataaaaaataagaaaatattatttaaagatactataaatttacgtcaatcatctataataaccctaaaagaaaaaaacataggtaataaatttcgaatagcttggactgctaccaagaaatctgactccatctccacttttttccatgatggtggttgagttttaatccaacttcttagtccttcctttataccaaatgctttagccaaatctagagcgcatatactaccaaaactgcccgacttagtcatcac

SEQ ID NO: 20649 - DNA, 1925 bp, Cannabis sativa
  modified_base (1877)..(1891): a, c, t, g, unknown or other
tgatagtatgattgagtggaagtggtgaacaaacgaaaaaagagtttaacgtattatgaagaattcatcaagcaaatttattaaatttgatattaaattgccacaaacctttatacttaccatttgggacaaattatttaaatcaaaaattaaatacaatcagagtgtacactaatataatgatccaattagattacaaaattaattaattgaattaaataatattcctttattagatagattaatattgggtgcaattaccatttggtcgacgagttgtgcttaaaaaaatatttagggaggactactcttcttgagtagacataaaattaaatattacttttattatgttttttaatttgataattgaaaacacataaaacactatgaatatttagggaggactactcactatatcataaattagttacagatgattacaaaatataaattacattttatcactaaagactgtaaattatattatggaaggaatcataatattaatgttaccttgcattattggcaatatactaaacaaaggcttaattaacatattaattatattttttgtccacattataagtttttgtaatttaatcgatttgtgcatattcataattaggggattttatatgtctaataattattatatgtttagtttcaatatgtaacattaatattatgattccttccataatataatttacagtctttagtaacttattaattcctcattgaattcttataaaaaaacttccatacattaatataaataaaattttaataaagtatgtatattatttcgtatatattgtaatcctttaattttgaaaagtttgctatcacttttagtccgaatgtgcaacatgtggatcgaaatggggttctaagagttttaggattgatatcggtggccaaggaaaagagagaaggttatttatcagaaatttccacaattatttaataatatatccaatttgtcctgataaatttttaatacatgtgtagacataacatattaaatttaatttatttaaactaatcgaagtagaatatctcttaataaaatgttttatttaaatggaaactcatttttaatttgataataagtttactaaacattatacacgttatttcaaattaattaaataatttcgcagagtataatattccttcaatttaacaatgagtttagtaatccatataatgatccaattagtaaatttcgcagagtatttctaataaagtttactaaacattatacacgttatttcaaattaattaaataattttatctcctatccagaatcataaattactataaactttatttagtaatcaacataaataaattctcattaaattcaaaatttagaattgaaattcaaaaaaatgagataatgataagtgagtaaatttagattacaatatattgaattataaaatacaatcttatcttaaattggaatattggtgtttttaagaaaataagatgataagtttttaagaaaatttataatttatgatatagtgagtaatcctccctaaattattaatcatttagggaggactactcactatatcataaattcaggggaaaataaggtggagtaatatacacaaggtcaaaaaaattagtttaaaaattagttatacacttttagtcacataaaacataataattgaaataaaagttactgttattctcaaaaactactcaaaaaatttagggaggactactcacatggcagttatttagtttttaaatattttttatttaaaaacatattaacatattatatattagcatataatagctaatttagggaggactattcaaaaaaaatttaggaatcctaggcattagttattannnnnnnnnnnnnnnttttttaagttaatatcttttctaatattaactt

SEQ ID NO: 20650 - DNA, 2145 bp, Cannabis sativa
taatagtgcgaaaagaaggcccgactccaagttgttcaagaatagtggcgttgagtttctcgaccctttgccttaggattagtcagttctatttctcaaaaaaacaataaaaaaaaagtacacccattctaataatttttattttatataaaatatatattttaaattttattagttttttttattattctttcaatattcttaattaatatacttttaagataaaaataaagtatattttaaatattatgacacaataagtaaaataaaaatttatatgaaattttatttcaaaaattttttaaaaaataaacatgattttaaaaaaggtgaaaataaaattaagtaatgatattaataggaaataatgtgaagaaaaataattaaaaatttataaaaagtgatttttaaaagttaatttaggttgatttttttttaaaaaaaaaaataaataaagtgtatttataattttatagaatgcaaataaaattccacatccgttaataaagtgaaaattttaatacttaaatgtgttttttttttttttccaattaaagtggtgtttggttgaaaagaatacctattatattaacatcttgttaatgaattctttttgaccctatttgcttcatgttgttgaccaagaacaatgccgggtttcctcacaagatgaatattaaacaaaatgaacttgaatggagaccctttatttacttttaaatatacaacaagtaaaataaaagtaataactcaaattaaaaaaatccaagcaaatgtcataaaacaaacaaacaaacaaactaaccaagcatgcatttgtgacaaaatttattcagcaactaaaaataaaaataaaaactttctttttcttatcaagtagaacatttgtcatacattatgggttgttctccaaaacacagttaggattaggaggcaaccattgcaattcaataccataattccattgataaatagggtcttgagggttgatattaaccacagaagtataagcagtacatccaccagacctgaccctaatgaaatgtgaattcatacttgaatctttcaagtaatgacaacaaagcctacttttacaaccacttccttcctccatttcatcctcaaactgcctgcaaagactgttgttagaacaattaagcggggatcgaagaatggattcggcgcaatttagcaacaacacagtgttgtgttttgatatgttgaaaggtaatgtctcatcaagccttattcctccttgagataaatcagaagaggaacatgtgtctttaagtatcataggtggtctaatgatgagtgagttagtgtttgtgtcaatgctaaggattttgtagtgaaatccttggagtgatgggaattcaaggttcccattgttgcaatagattttgtatctaagattaccacagtcatcattagtgctaaaagggtatggaacttcaaagttaccacattttggacaaccattatggaaagatgatacaagggaaactaaggtcaataataacaaacataacatgacaagcattttcagttttgtgtccattatgaggactagagagaaaaaagaaaaagaaaaaaacaagaagaagaagaaaaaaggactagagatagatgagcaagaaatatggtatgagctaaggtgtctatttatagcaaaaaatcatataattaagttactattttgtaattagatatagttattatgagttacttggttatatttctgtgaatcatcaaaggtggcaaagcaggcacacctgtcagtgtatggactagaataaaaaggtcaataaacaatatccaatatcaaattttttaattacaaaatatgtatatattattggttttatatgacaatgacacccccatgaatgttgaagctaattagctagattaatattcctgtaattgtttaatatgtgccaaaccatagaatctagtagtacattttgtagtagatctgcttctacctggcatccaaattatatggctactagaatatacatgatatggtttgaattaagaaaatatcaacatgattcaatggcatctttgataatgataatatatactagacaagtgtcaacctgtaaaaagaagggcctaacctctagtcaatttcatgaa

SEQ ID NO: 20651 - DNA, 1815 bp, Cannabis sativa
aggaacatacccaatatgtatttctggatcaacttctatgacactggagctcttgggaaggcggtctaaatggagattgttataaaaatccaccaaagcccaaattattggttcatgaatattaaacctccaagtcctgtcgttaacctatgacatcaacagaactattataaatacttcaactgcatgatttaataattacctttaatttccctaaactgcaaactaaaatttgaacaaaacattacccgtatgtacacatatggatagacctggatgccatcagtattctcattgcgcattgtaacagtcatcttgaaaactggattgtgagtaccagagagggcttctggtgccaataagacaggcatcaaagtcagaggaagctggttgtcgagctgcaagtggcctagtatgagcttgaatctggaagacatgaaacacatgcaaaacttgtacagttaatgcgtcattcaaataacagtaatacaaaatggaaataatgttgatttgaagtgaaaaggttactttttaataagaagtaatattggctttatatgtgaataatattactttttaataagaagaaaaaacttttaacaatgaaatgaaaaggttaaaaattaacagaggatattctttattgtagaaaaggaaaaccggcacaataagtcctcccacctaaggcgaccaagaaacaaatggataataatacttgactcattagcagcagccaattataaaaagtgaaaaaggctaccctcttccataacaaaacttttgtcaaccacaaaaaaaaaaaaaacaatcataatgcataaaaatgaaaacaagtaaatttgttgactgcaaggtgatgccttacctgcttgttgtcccaccatcatagccagtcaaataagatatgaaaactctctccaagtagatgtaagagagctcttttggtttatggtctattatcgaaatccctataacccccagctcaataatgatttcaataggagaagtattgttttgtacattggtctgtgtatacgaatgttcccattttctagcaagtgccaatagtcttatttcttcacatgaaattgaccctgaatccctcttatcagtgaaccaaatcacctttgtatcagctatttctacaacatggaatcgcaatcctaattcgtcattctctgcagcatgtaatccaacgctctccagatcaagtttccaaacatcaacaatagacccactgttgaccttagcatcaacaaactgttggccatatggatcctcccaagaaaaatttgttgttgaaagaggttgtaagtgtacccaagtatcttcatcaaaaccagactggcgaatactgattgcttgatttcttgatctattctcaattctgctcaagtaaagttctcaacgttagacacaaccagcatccacataaaatcacaactacaatacaaataactactctaatttaaaagtacctgataggaccatcagttgaccccagacgaaatacaataatgaagcgtgaaccttcttcatagccccggatttctgtcctcaaaaatattctagaaccatcacgtctccttaaagtaagaaaaattgtgtcctcctttacaatttcaacaggaaatgaccaattggtaccatccaattgcacctacagattgaataaagagattcttcagcattcagctgtacgaattaattatatattaacgtaagaaaaaaaaacttagctaaaagccacactaaaaatctagtaaatcaattaaaataaacaatgaactatcctattttcaactttctatgttt

SEQ ID NO: 20652 - DNA, 5619 bp, Cannabis sativa
tagggaaggctgggagctgctgcccatgacagcagtggccagtggggctgttttggcggcctacagagtctttttcgacagcccttatcatgattttcttactactgaattttgttctattcaaaatggtttgttgctagctattgatgcaggtttctccacaaagatgagcatgaactggtttcgattatatgctttatctcttcttaagtcaatgatgctttgatttgtaaatcaagtgctttgtggaatgaagctgttcccttttttgctacttgctaaaacttaatcttttcatgtgtagaaccttacatagtgcaaaatttttagcacatattccgtcttcaattggcaaacttattttgctagaccttgaaaaacctcacccaattggtcagatgccatgttggctataggaaaccttagccagttcagcaattttaggggcgacgtaccatgttctattcaaaacctcacccagctaaactttactaaatttaatcactcgtccaatctcttcctggttaaaaatactttcccaactatgccatattgagctacatcaaaataaattgcacggttgcaattgaagttcaaggggttagtatttttcctttgtgcaattgacgtggagatattggcgcttttgggccatcttaaagacatttctctaccagctcaactcaaggatcactgctgactccacaaccatcaacagagttttatgatgtttcaaacaacagactgacaaaagaaatttctctgttgatatgaaacgagttctcttgatcattgatttgtataaaagcaacttcactggagaactaccttagtgattggtgaagtgttccatgattttaacagttctgaatctgaatgtcagtagttacagagggaagagtccctaaccgagtggggaagacatcaaatgttgatttctttgagagatgaagaaactcaagcatcttgcatgcttccaaagatcatagaagttgcccttgaaatccaataactactgagatcaatcctcttcaaatttcttccagatttgaattcctgaggaatgaactctgcaacctacttacctagcaagctttaacctctctctcaacgatctctcggagcttataccgcagggaaaccaactctaacacctttgacagcagttgtgatgatctgctatgatgggctacatagataagtggagtagtcgttggactggctcttggtaactttgtgaccaagatatgcctgggaaataccaaggtaggaggcacttcattaaaacgtgtaagactattgggtttaccagactatgctacagattttagattttagttgtacaagtttctttcaaaattatcctctattattgccatctaacctaatgtttgtgtatctatctgtatttttatcttgctgacttgtcaacagagattttgtaaattaccatagtttccagtaaatgcgctctactagtctagaagcacaagaaagaaatatgcattgcatttctcatatggtacaaagtgcataagatctattatttttgaggagaaaaaactctaaagtgaaagccatttgcattatatacacaattacctcctcaaaaacacagtagctctcccattttgaccatatttagacaaaccttcttctggttgggcggcaaaaattcttcctaactgtaagcaaacttcctttatatacagctcagtcgcttgccctgcccagtgtttacaacaatgactaagcctcttttcctacctactgggccgtataaatacagagtccacacaaacaccccctttggtgtgagtacaatcaatctgggttactgaaaatttgatcttcatcaaagctgtgggattctctacaacaaaacttcccacatggtagttgacccagtttcccggactctccaaaaaacactgtgatacatcacgttgaccatcagaagtattgagctgaaactttacaggctttatgccccaaccatgaacgtgttcacagtttgaaacccgacgccccagtctcttagaggaccggccaagctggagtcgaatgaagatgctatattttcccttggggaattgaaagtcaatctctccttccacttcaaaccaccaggtttgttggagataagcaactgtctggaatctgaaattgaaggaaaatgaataaggttcaggttcttatgttgaatcggatattttaagtacaagagcatagaaagtcagagtgtaagtagaaggtaatatattacaagttatcagactctgacagcagtaaatttcaagatgttcgcccctcaaaatgactcaattcaaaatgaaattgataactggtgcctaaagacttatatggaaagtaaataactttacatagaagacatacaaagaaaaacttccatcctacttatggcaagaaaatggtttcttatcaatatatattgcaaattctatctaacaaacgtgtactagaacaagaaaattctagatagcatgtatatataagttccaaaatagaataaaaagaaaaggaaaataattttctaaacaaatcaaaacatgatgaacatccctacggtccaaaaacaagataaaagcttaggcgtatacccagaaagaacatataagtttgaaaacaaaagaattgcattgaaagtagtataacaagctcacctagattcctcagtcgaaatgaaattccaatatctccgatcatcaatcccggtaatcctcaaggcttttgaagaaatcgacaaaaagctattacccgtagttttatccagccaaaattcctaattttccataaagaaatcaattaatgaatccaaacaaacaaagagagacataaatcgggataaagagagagaaaaagagttaagagtttaccttagtgccattatcaaacaagtttcgcctgcaaagcctggaatagatctccctcttctctaacttgtcctttgccatggccgaattctcgagaactctatccataacatacaaatagttgcagggtaacttagattcccagatgaaattcgcagacgaagccgcacgaaatactctactcaatcgggcatatttacaaacatctggcggctccaagttcatcaaaatcattgccacgcagttctccggtaaatcatcaagcccatgctgatcctgaccgtcatcgtccgccattgaggatgaaaaactagctcccatcgaagaagacgaaagaataagaaaactcaaattggagtggggtgttctaaaccttgaacttgaacctgaacttgtgggttttatgtgaaagattgagagaaagaaatgtaataaagtcaatgtagtctgaccctatatatgtttcaataaaatacatgggaattcaaatacccagaaacctgaatctccgttttttataatattaaaaattttaatttaaaatattataaagaaaaaaagacagagaaaccgaaactgatcgaaaactgatactctacgctactttttccagagtttggatttgtatgtgtcacaggcacacgtgtggactggacggacacgtgtcaaccgccgtcttcgtactgcgttgggtttcgggaatgaccaagtacggaggtccttgggtggaagctggctttaacacaaagcgacatctcttattgatctgcggattcacacgcgtcagttccacgctcctttttttttgtttttgcaatgactctgttttattaatttttatcctagttgtttttctttatatttttgtagtttcttcaaaaaggattggctgtgtgatataataatataaataaaaatgtcaatataaatttagatatgtaatttttattttctctctgagacaaattaataaaagttttatattttttttaagaaatagtaaataagaggaatttttttatttttatattttaaaacatttttttttttttgtaattttatagaattctacataaaaatttctattgcaactagtggagcaatctaaattgcagccaaaaatcatataataactcacatagaaaccaccgaagaaactactttaaaaaaccaaaccgtaaatttttttaaaaatatatatatagggtaattcccataaataaatagtatttataaatttaatcacaataaacgtagttacttagtagttaatgaagggactcagccaaaataaaatactagaggtaggggtgttcatccaattaaatatgtactattttgcttatttaatatgtgtagatttatattttgaattcaatccagtccgtataataactcaaattcaattcaatctaatccatatattattttagatttgttactttttaacattgaattatttaatatatattaaaaatatataaatattgtaacaacaaaataaaataaattattattattttatgtctttatcaacagataaaataaaaaaaaattaacaaatttaaagaaagaaaaaaaattatatacataaagaaatgtttaattttattttaaattatattttcattatatatataataatggaatatattacattgatttcatttattaagttttaaaatatgtatatatatatatttaaacgaaaatatatttttattatatgtattagatttttaaattattattttacattaaaatattaattatatatgttttatataaaaaagtatggattgaattgaatttattactttttacatgttaatttaattcgctataaattttatattttctaatttaatctacactttccaagttgaattaaataagatcctacgagttaattagattaaatatgaatatgaacacccataataaatactagagaggccaattaattatttgtaataagtatgtgaactctatttttcatataattataagatagtttaatacaaaaatatgttggacaattaaaacttaactgctataaattcaatactatgcacttaataaccataataatattataaatcatatatataatcatctaagatagttttcgtgaaagaaaaaaaaaatcttaaaatcttaactttgagtactaaattcactcaccatatacatagaaagatcatatattattattctttttaagatatataatatctcaatttttattaaacaacaaaaattgataaaaaggtactacttataaagttctaaattcttaacagtgtactgtacctttgttgttatttatttattattatttttcagaaaatttgttgttttaataatatagtatatatttttgaaaaattctataatatatctttttttcaaaaatgtatcaatctatgtatctattttgatattcgaaatatatttttaattaaatttttttcttaggattatgtacgttataattatttatttaagatatcctgtaaaattttaaaaaatttaaaaaaatttaatacgccgaaaataagattcaaataatgttgcacacttaattattttattctatacgcatgtaaaataaattatttgaacacttatttttatattgtaaattatttttaatttttcaaaattttgtaaaatatctaaaataactagaacgtacgtaaatataaaaaaaattaaactaaat

SEQ ID NO: 20653 - DNA, 2209 bp, Cannabis sativa
tggaggcttgaagcggggacgttacatacttaaatttaacttcaattttacataaataccaagtttaactttttgcagtggtaataataggtagtcgccttgatgtcttaatttttattggtatatttaaattaatttttaaatataaagtataaatttaatgacttggaacaatcaagaactatcacgtagtcattaactgattctacgcaagtttcagaaatataacttgagtattattacactaaaaaattaaacttaaatatttatctgtaaccgaaagttaaacataaatatttatacgacaaattactttttttttttttatgtatatttacctatgatttatttttttacggattttcttaaatatatttttatgaaacctcataaaaattacataaaaacaatgtaaaatcaacaatctatatttttgtgaaaaggaaaagtttaaatctaggatcatttatttaatttttaaattttttaatgatgatacaatataggctgtggtagagaaaacaaatctggacccaagtgaagtaggggatatagttgttggaactgttttgccacctggttcacaaagagcaactgagtgtagaatggcagcaatctatgctggttttcctggtaagttttcaccttttatcatctttatgattaccatctatattataacccaatcacttttaactggaatctatgtatatcaaaagagaagattttcttttttggtttgtgtattcatctttactgtcatgaacaaaattgagttattttattctatggtatatactttattagtctaatttaaactcaatatcagatgacaatgcgtcatgttaagattttcttgatatgagtttagcagaaaagttatatgactaatttggtttgttcagatacggtgccaatcagaactgttaacaggcaatgttcatctggtctccaagcagttgctgatgttgctgcttcaataaaatcaggattttatgacattggtaagccaaaataatgaaatttctatctctagctctcgaatttcgatgtccttcattagattactaaaaccctttttggattcaggcattggagctggattagagtgtatgacagtagacaatattaccagagtcaggaacatgaacccaagagtaatacataacaactcttcttaatctttttaagcctttcttttgattaatcacaccataagaaactgtgttttgtgagctgaatagacatactgtgatctgatctcagcaggtagacaactttgcacaagcccgagattgtcttctcccgatgggtattacttcagaaaatgttgcagagcggtatgggatcactaggcaggagcaagaccaggctgctgtaagcttcatatgtaatgttaacttgcattaattaagggttaaggaatagacagtcgtttacattgtttgaagctaaacatggacaggttaattctcataggcgcgctgctgcagcaactgcatcgggtaaattcaaagatgaaatcataccagtttctaccaaggtaaaagaaaaggccatatacttctctttatgtgtaactacattttctagtgttattttttaagtatttgtctctatagattgtagacccgaaaaccggacaggagaagagagtaacaatttccgtggatgatggaatccggccaaatacagatttgagcactttggcaaagctgaagcctgccttcaagaatgatgggtccacaactgcaggtatttcatgattttgtagtgaaaaaaagttcagtattcatgatatttaatttgagcatagtgaattaaagattggactttgtttcttttctttcagggaattcaagccaggtgagtgatggtgctggagcagttctcctgatgaagagaagcttagctatgcagaaggggcttccaattcttggggtctttaggtatgattttcgggtcatttacattaaagttgaaacctttaactagggaatttttacacaaagaaacgacaatgtaaatgtagcagtaacatgaaaacaatgtgtaaataatataatagttaaaataatattaaaaacaactgggtgtagttttgtaaaaaaaaaaactttaaatttgtaaaaatattaaaaatactgtaaatttgtatatttgtatctttttttggataattatgaaaaaaatccctattaacaaacca

SEQ ID NO: 20654 - DNA, 5166 bp, Cannabis sativa
gaaatttagccacccctattagttttttaaaattgtttttcatttgtgaattgaagtttttgaaaagacggttttcaaattagaaaccaatgccgtcaatgaaacatttgggcgaacatgaccacaaatacagtatgaagaaatttctttaaaactccgtcatgtcatttccatgaacttttgaattcttttttttttttttttaaaaaaaatggtttgaaactggcggaatcttctagattttttctttgtagtatccttgttcagcaagctaagccaaaagccaaccttctttctattcttaagctcatatcttgacttacttcattctctcgtgcgagctccaatggagagaggaggcggaggttacaggggaaaaggaagaggcgccgatggctatggcggagaaggtagaggcggaggtcacaggggaagagggagaggcagaggttctacttctggtggctatggcgaacaaggtagaggcagaggaggaagagggagaagtggtggtcgcaatgttgtggaccatcatcagcaacatcgtttcaatactcagatcgaacgatccacgggtgtctggaggcagtctggtagtggtggagctcaattgagtgatgatcgccatcagacggaggggtcgagcagagattctggcgatggtcgtggagatggaggtgtaggaagaggaagcagtgtttgggggaatcgtggcagaggatggaaagcagtgacttcttctccaagtcaacttgatcagaatcatcaatccggaacagtttctccaggtacagaatttttcttgtgatcactttgtttatctatgttcgctgaatctttaggtacacagtcatggtcagtgctcgtgattctttttttttttctggtgaaacatatttctaaattgttttattgctatatcgatgattttgattgttctgattgctgtgatcatctatgggaatggcttcattgttaatttatttttttgtagataggatttggctttgaagaaagccaaggcaataatggcttcaattggttaatgtttgaatttcttaaacacctctgtttaatgttttacaggtactgtggcttctggagtacataaaatgacgatttctagtgagtcgtctcgtccttccggtggcaaagacaaaattgttccgatagggaggcctgataagggtggttcaaattccacccgaagtcttagactctctgtgaatcactttgttgtcaacttcgatcccaatgctgttatactccactatgatatagacgtcaagccagagattcctcccaagcctggacgatctgtgaggatctccaagcctgtcctttcaatgatcagacacaagttatcttctgacaatcctacacagtttccattatcatttactgcttatgatggtgaaaagagtatatttagtgcggtggcattgccgactggacagtttaatgtggagctttcaactgaggactcggtccggtcctattttgttggtatcaagcttgtaaatgagctccatctggacaggttgaacaactacatagttggacttctcccatcaatccctcgtgatgtcttgcaagggatggatttggtgatgagggagaatcctaacagaaaaatgattcctgttggccgaaattactatctcaaagaacctgaacctcctccggaaggtgaacttggagatggaacttgggctcacaaaggacttaaacatagcttgaagcctacagctcaaggtctgtctttgtgtctggactactctgttttggctttttgtgagaatatgccagttttgaaattcctcgagtaccatattaaggatttccgaccaaatgactctaggatgtttagaaacaaagttgaggctgcgttgagggggttgaaagtgtatgtgactcatcgaagaatcaaacagaagtttattgtgagagggttagcacgtgagagtgcacgaaactctaagtttgttgttgtagatccagatggtaaaattccagacaaggaagttcgattggtagagtattttgaggagaagtatggtaaggctattgtgcacgtagacattccctgcttggatcttgggaaagctgataaaaggaacgaagtaccaatggaattttgtgaaattgttgaagggcaaaattacaaaaaagagcagctaaataaattagcagccgaaaaattgaaagatctgtctgtacctacagcacttgagagagagcgcctgatacggggatcggttcaatcagcagatggtccttgcgggtatgtatctatatgtatgtccttttatgatttattaactatcagttatttatgctaaataacctttctcttgttgaatgctagtagtttaagttattatggaatgcctaatcttttttcttattgttagttgtaaatgaaactttatcattactaggcctttgtgtttaacatttactattgtaaatattgaacgtgtgttttgaggccgtgtagttatccgctcctatagtttttttttttttctaatcttatgccaataaccaagtggttgaacttatttcactttgcctttgtattgctctattgtcattattaccaaaccaagtgaacaagtttgcagtataaggagatagttgtagtagtatatctacttaccagatatgacagaactatttgacaaataaatttaaaatatatttgagcttaaataaattggtatgcaaatgaagtcaattggaaaattggacgtgttgttgtattcacttattgatgcacgagatcacttagttgaaatcagtgtatatgaatagtgagtactgattttgttatctatcacttatcattggcagcggaggcatctcccgaaattttggatttgatgtcaacatgaatatgagtactgtaacagggcgtgtgattagcccccctcagctaaagctcggtgctcccaacgggaagattactaccataacagttgacaaggaaaaatgccattggaacttacttggaaaatcggtggtgcaaggaaaacctattgacaggtgggttgttctcgacttcagccatgagcgaaataattatcaaggttttcgactagatcctgatatcttcattccaaggcttatcaagagatgccaaaaattggggattagaatggcgcagccgttgctttatgaacctacatcaatggatcaattctctagtgtggacaaacttcgtgagctttttgccggtgtttgtgaacgtgcttccaataagtttacagctcagttgcaacttattgtttgtgtaatgtctaagaaggatgcaggttacaagtatctcaagtggatctctgaaacggaaattggtgttgtcacacagtgttgcttggctaagcatgcagccatagcaggcgaccaatatcttgctaatcttggtctcaaacttaatgctaaacttggaggtagcaatgtggaattaggtacacagcttcctattcctgcaggtttgggccatttgatgttcattggggctgatgtcaatcatcctggagctaggaatgtgaaaagccgatcaatagcagctgttgttgccacaatgaattggcctgctgcgaaccgctatgctacaagagttggagagcaagacccctgttgcgagagaattcttaatttcggagacatttgtttgaagcttattgaatcttatgctcagttgaacaaagtttacccagagaaaattattatctttcgggatggagttagtgagggccagtttgatatggttctcaatgaagagttacttgatttgaggagggcacttcataccataaatatttctccaactatcactcttattgttgcccaaaagcgtcaccaaacccgtttgttccctaataggaatgatggaggttccactggtaatgtgcctcctggcacagttgttgacacaacagttgttcacccttctgaatttgatttctatctctgcagtcactatggaggccttgggacgagcaagcctactcactaccatgtcttgtacgatgaacacaagtttacttctgaccaattgcagaagctcatatatagcatgtgttttaccatggctcgctgcaccaaacctgtctccttggtaccgccagtgtactatgccgatcttgctgcctatagagggagactgtatcatgaggcagagatggagagatctttgtcatcgtcttctgtgagttcagtgaaggagaggttgtttaaattgcatgatgacctggaaaatgaaatgtttttcatttgacagtgtcttgcaatgatgatgttacattggcaggtaataccgttaagacaattcttcatcaaaaaccacacacaattacaccatatgatcgggtttgtgcgtgaatctaaaggatttgagtcgataatctggctttactcactttcatggtttgtgatcaaccatggtggcatgtaggtaagtagagccaggagtagaataagacttaaaaccattcagacttgataccattcagtttgttttttatttagtattctggtaatgtttacctgtttgtgattgctagggagtctttaatattggtgtgcttagattgcttgttaatgttgagtcttaaataaattgtggaggttttgtatgagtcagaacatttcatattcatatgttgttctctttcttttcgtcactgtgggttgttgctcttgttttgaatttcctattttgtattcattatataatagcatttgtttctactgtcttgcttgggccaattaaactcctcctcacaaggaatgatgctttcaagtatgtatgttgggaaatatgggtctctcgaatacatctgagagcactttaggactgtagactaaatgaagttgagcataggcacatgtataaatgaaataatatgataattgaccttacgtagctgaaaaactacaatctataagtcattcataaacgatggtccttcaaacaccatattctttacatggataaatatctatgttattcttgaattacttatccaaaagaccaaaactacatattcacaacagctcttttaaactctgttctttaaaatttaaagaaaatgacacaagtggaggtttttttatatcctttgaacctttttcgtatattttttaatattttttgtcctc

SEQ ID NO: 20655 - DNA, 1753 bp, Cannabis sativa
cctgtcctcgtccccgtccaaccacgaaccccatccatgttctcgtcaaccatgaaccccgtccccatcgaacccacaaatacaaggagagagaaacacacacacaagcacatgcatacgcacacacacacacacacacggagaagagtgggaagctggtatatatttagggtttctcgcaagctttgaactgaaacttaagtatacatgtccgttttgaactgacggatgaagtctttgcaactttaaatcacacacatgaaaactttatcctttgattctcaactaacgactatgattttttttttctttttgcgatattgtagaatcgacgacatttatatttccgtcaggaattgggctccggggtaggactgacagaataaactctgtgtggtcttttttgatggttcacgacgttgaccatcgtgctgaccaacagaaaatgtagtagtgcatacacaattatgaagaataaaatattggactataaatctctcatggtttctaaaacatataattggtgtatcagtattgccattttgtgaggtgcactattgatatttccaatactttttaagtaaaaacatagataaaaactctaaggtggcatttaattgagaggaattaaaatataagaataggaatggaaataagaacagaaatagggaggaatgggataaaatttaaaattcttaaataaaattgataaaaaaattattaaattttttctcagcatgcaatggaatggtattttcttctattttaaaatggaatagtcattccactaaaatggtaaaaaggtcattccattagaataacatttcaatactttaatatgcaaccaaacaaaaaaatagaatgaagatggtttctttttcattttattacttctaatcaaatgccacctaaatgctacatatctctctagccatctctcttttgcagtcgcctctcgaagctctaatccattttcttcttacttctctgggttgaactatcgacaaagcttcctttggcggtgatgctctgacccaaaaggctctgtctctcccacaaacacttggtcatctctttgatggtgttctcctctcctttttcgatgagaggttgtcactttccatcaagtgtttcctctattaatggttcttcagtgaagtgtctttcggctaaacaggtaagtactcttatgagtaccactttgaaattaacaaaagatgagaatagagtcaaggttgacactactctttatcatagtatgattggtagtctattgtatttaactgctagtcgtcctgatattagttatagtgtgggagtttgtgctagatatcaaagtaatcctatggaatctcatgtatctactgttataaggattattcgatatgttaatagtactctcgattttagaatctagtattctaaagatagtaattctaatttagcttgttttagtgatgcagattgggcaagcaatgttgatgatcgaaaaagtaaaagtggaggttgtttctttcttggaaacaatttggttttttggcacaataagaaacaaaattttatttccttgtccacagtcgaggctgagtacattgctgctggtagttgttgtactcaattgttatagttgaaacaaatgttggttgactatgtatttgaattgggtgttttaactattttttgtgataacattagtgccataaatatttccaaaaatcatgttcaacattctagaacaaaacacattgatata

SEQ ID NO: 20656 - DNA, 4730 bp, Cannabis sativa
aagcctttctacaaatgatcttcaaagaaaactagatgctaaaaaggaaagagctaaagccaaaaaagtaagaccccacggaaacgatttgaggaatcacatcaatgatcgcgtttgcaaaagagaatcctctagtgataagactcaacgtcttgaacgtaaagttgaagagttgatgaagatcattgaaaagatctctaggaaataaagtggcgtcgtgctcgactttgaggaagaggacacagagccttatgtgaagaaattattgatgcaccattgtcagagcatttcaggatgtcctatatggaattgtatgaagaacgaacggaccccagggaccatttgtccaagtataattgcatcatgcaagtagtcaaggccagtgatgatgctaaatgtttgtgcttttcattaacattaagtaagtccgcaaagaacttgcgaaagaggttgtctccaggattgatccacaacttgagagacctacaagcgatgtttaggaaacaatttatagcagccaatgattacaatttggaagccagctccttgacaagcgtcaagccaacaacaaggagaaagtctgaagaagttcatccagcgcatgatggatgtggctaccaagacaaaggtcacagttgacatgaaaatggtggctctaacatcaggactaacaactagatctttactatggggagatcttcaacgtaaaagggaagacaccttaagtgaattcttaattaagaagagcttaaggaaggattcataaatctagaagacgcttatgcctaagcatatggagtactccccaaaccctcgaccaaagtagcaaatgcctaaccttcacatatgacaactccatctatttaccctccccaacggcttttactactcccacggtgtatggaccaagtacttccatacagccaactatagagactagtttttcctggcttggggctgcacagacaggatacaatttcgttcctagataaacaaactagaaagcaaaagctgtagaatccaacgtaactcattctaggagcaaaaggagtacaaagggtccaaatcaaagtgaatatgcaaagaaaggcaagacacaagatttaagatacactgagtatacaaggctcatagatactcgagagaatgtatacaaggcaacctacaacatggtacactacaggaagcctctgccaatatacaagggcagaaaacatagaagagacataaattaaaagtgtgaatatcatagtgatatttgtcatactaccaattagtgtgactacttaagagatgaaatagaaaggttggtacggaacagacacttgaacaattaggttagaatcccagtcatctatccaggataggtagttgcacatggacagcttttcgttcccaaacaatagggagccataaatcctccttatggagtaagccacctgccacttggagatgtcccttcaaatttgagctttcaccctccagtttggtgattcttttgtgggattcctcaagagtttttgcagttgtagccagcttactctcagcctcctctgccctcttgatggcctttgcttccactgcctctactttctgctgcaggtcgagatggaaatttatctttttctctagagtagtctcattaatgaatttgtcttcgataacatgggcttgtctatcgtactcctgggataaggtgtcaatctttttatccttttcttagacattaagcttggcctacttcagactagcttccaattctttaatacaggtaagagccttggaatgcaagtccttatacttgtctccccagtccttctccactttggttgccttttttcacgagccaaagatttgtctaaggagtcggacaccctctgctttatgttggcttccattttggcatttgctttagctaaagctctctctacctcttctctcctctactcagcgtttgcctgctctgcccttagcacctccaagttgtaagctagttggacgattagggagcagttcctctctgccatcaggccaatctgcgaaagaaggaacataagtgaatcaaaataaagtaaggacactaaaccttcatttgtgtcagagaagtgttaaatttaaaaaattagcatggatcttcatgaagtcggccacatacattggatccctacttgccatcatggcaaacctatcagccttaagcctatagcctatggtagcgctttgttccaataagtcggccaaaaatggtaacacgtcggtcccaacgcgaggatgcaacttctccatcatctctactctattcacaagaggaggggtagctttgttccacctgtcataatcgacaaacttagtattacgcttggaggagatactggtggatagtttcttcatctcctcaacttcgtaaccacaccttttttagtaaaactgatccactacttccaggcaagcttcgtccccttttatcaactgcaaaggtctgacaagaagtgtgaaaggtgccgaaggtagtggaggcaactcagtcctatccctggacagttgagtcaaggtggctggcataactttaagcgcaaggggtggcagacgaggatctcgattatcccttgatgttcaagtacttttcctaggtggccttctgccatcatgagaattagacccccttcagaattgagtatttgttgattgcctccttgaggctaccagatgcaagactttctctttggtctacaccctcacctttttgttagcaccaccgttagatgaacctgcttgcttcttcatcactataggaccgtcgtagtttgagctttcccctctagacctatccaaaggctccataaacaggacaggctcaatcaggtccacaatggcagtggatgcagcctccatacccatgagccttaggagcagcttctggattcgaggtcggtagtgttggttcctgggacctactcctagaagcttgattctcctctctgccatcaccgcccccttggaaaatctcttaaatcttgtcagagtgagtcttgacactgcctaagaatttgtttgatagcccaatttgaagagtggctggttgatctatacaaaacaacaaaaaatcactcaaacaaaactataacaatagttatggttcttataacatatcatcatgcaagacattaagacggtccaaaccattaatcctagcataattgacttttcttgtcaacttgtcagctttggtcgagacggtgcttgttgagacaatgctaggtttgcttcctgagtcagtctttaaaaacttcatctcttttcttacttcctgtattcaaacaaacacttgagctctttcattgaactcggtgatgtttttcactggccgaccttgtaggtcatcccatagctcgcctctagcagtagagagatcagttgtgatccctgcctgaagagcaataagctgggtactatcgtccatatttctcaccctcacagcagctgtgctaaaacaacttaagtaggccttaagcgtcccacccaactattgctttatgttagtgagtgaagatccaacgtaactcattccagaagcaaaaggagtacaatgggtccaaattgaagcgaatctgcaaagaaaggaaagacacaagaattaagatacaatgagtatacaagtctcattgatactcgagagaatgtatatactgagtatacaagtctcataggtatttatttagttaaaaaattaaatatgatttaattcaagggttgttaactagtataaatagaagcatgattttagaaattagactacacttcctgaaaacttaatttttgatattagagagagaaaaaggaaattgatttttctctcatctgttcttgctcatgtgttgagaatcaacaagtaataagcctatacaatttatcctaatagcccacacaatccttgtgtgtggtggaatgatttggaagacactggtatgggtccaattacaatttcctcattatctaaattaagggatacaacatatgaaaagtttcaaggataccctgataggcatcaagagatatcttctaaacttactattattatgttttgatttaatgtacacacatctggcgatccattgggatatggtacactgataattagataatacgaaatacttctgttgcgtacctgatttagtaccaaaaaaaccaacacctccctctctcattgtgagtcttcagtgttgctttcttggtcactatctttggaagactcataagatacatctttactgctaatcccttattcttgataattgtttgaaacagagggagaatcttaatcactaccccctttcccgagtcgtcatgggaagtaggaggagattcttcatcactaacttctttctcgagatcttcttaagaaatactaggggactcgccatcactatctccttgctcgagttcatcttgccaaatagaagaggagtctattttagtggaggcataagttgttaattctccttcaccttcctagttaatgtattttttagactcaaagaaataaataagcagtgcaaatcggttgcttctggttgagcaactcctttgaccttcttgaaggcttcttcgagcttgattaaactacctactctatctagaagctcttgaatggtgtatattggtttgagcttcaaatctttatagaagggactcattactgttagtccaattttttggaaattattttacca

SEQ ID NO: 20657 - DNA, 3209 bp, Cannabis sativa
agctttattgggtttagttaaagatgtaagttgtcttctggccacacaaacatatagtatatgatacatatatataatattatttatctaattgaaaatttataatcacaaaggaatcatttaatcagggatgacagtggggagtgaatcgaagtgagtgtgtgagagagagagagaagtggtaattttgaaggcatatatagggagaatgtgtggccttgtgaggataattgctggcctgcaaaaaagcactttggccaaatcaaagtggagacaaattatgttactgttcttgaaatgttatttattgaaaaaaaaaaaaagcaaattcttactttctttcgctttatgtataagtttattattttgctaatttactttatgtattgttattgtaaaagattcccaattgagcatgttctgatatgagtcacttcctctatgtgtcttcttggtctgattttcttgagcctcaaagtactactatttactcatcaaaaacccaaaactgaaaatttgaaacatcttttccaccctttatttcttttccatatttatgtactctttttctttcttcttcttattcttttagtaatgtggataaatatatatagaacactataaatattagttcctatgcatataataaaatgacatgttatcatagaattaagaccaaagaggatgttactaaaatgaaactattacaagtagtggaatcttatgtggcctagtatagccaaaaggcttggcttttaggaataagaaaaaaaaacccaaacccagtaattttgcggtgtaattaaaacaaaaagataaactaaaaggaatatatataatatatatataagaaacaacaaaacaaaattatttcacccactaaatagaaaaagaaaaaaagaaaagaaaattgacagccaggattaatccatagaaatgaataataaggaggcaaattttgtaataagaatgacaaaattagagcttttaaatcaaccttttaactcctttgtccaatgacttttatgtttgacctctgataaagtctctccctcatgaaccagccttttgttccacacttttttctctttaagtgctgtaatccaaacaaagtttttattaatttttattaaaaagtaaagtataacgtctagctagtaaaagagaagaacacaaatacaatttaaggaaaaataaataaaagaaaaaaagaagaataagaagaagctataagggtatgctagctgagattcgaatcgttatagcaccagcaaacaaatttcaaacccacaaagataaaaagttcacagtgtttcatgtcttttgttttctgctatataaaaatctttttagatcatacaaagtaattttgcatattcatccaaaaagaaattgaatcttattactttttacaattttccattagtgtacaaacacaacttttttctactaaaacaagttaaaaaccaatgtcaaacattgttgatgtctactaattaaacagctaataacaacgttattactacaattgaaaatttgtgcatggcccccactataataagtgtcatcatgatcatgatttagtgttcaaaaagaatattttctcatatgcctcatgtttggggttggggtaaagataaatcgtcaatatatatgtagtgtagtgactagtgagggacctatatgagactcaacaggaaaaaagaaagtgcctttctttcactatggccggtttggttctgaaagttcagataccatcattacattaagaaagtgggttgacactattctttttgaaaagtataaatatttgtttatatacatgggcattgccatagcaaaagtgactttgtaatgcctaaggaaaattaaagagtgtacagtctttgtaggtctagctttcaggtaggatatttgggccaaattatgaggccattcatatggtatataagccatacccaattcaacattgggattttggactcaaccaaattgttcatgtgtggatataatttgacgcccgcccacctttcataactatccctagttttgcaaaccctctaagtttaactcaattattatgctcattcaagaaaagaagaaaaaaaaagggacaaaaatgcaaacccagaaaacccaaccaatttgctaaagaaaattaacaaaaatgtggaaaaaaatcaacatataatttataggactaggagtaatgtcacaaaatatagtaattttaggaaaaatgaattaaaaattagacaccccaacaaaatattataaataaacttaacaatatttctaaaaacaattattgctcatagtatatagtcggagcagtcattaggagttgtaatggtcgctggaaaagttattagaaaattagttgttggagttgtcctcgccacaggaaaagtcactgagaagttgtgtgagttatcgttgtcatcagagttattgtcttcatcggggtaatcaaagtcaccggaattagatgttgaaatctgatactgagaaatcaattatcttcataagatgtaattaaaaaaactaacatagagaaatcaattataattaaaaaaaaactaacatataatcaaaaaaattaaaagtgacacataaaaataaaataaccaaataaaaaaattaaatcgtataacccaattatgtagaacaacaaaatcaacaatttcttacaaaatacaaccaactaaaaaaataaaacaaataataacacagctaaaacaatcaaaagataactgaaacacaaaaatcaagtacttaaaaaataaggcttaccacatatgaattattaagaaatgacttacaaaactaaaccataaaaaacttgctatgtttgttagataattaaaaaatctaacctagagaaaccagttacttatagcaaccaaattaaaaattaacacacaaaaaattaattatataaaataactataaatcaaacacccgtaaaataactatatcaaaaatcagctgagaaacaacataaaaaaattaatctaaaaaacatagttactagcatacacctataaatattgaaaaattagttgctagaagaaaaaaaaatacatatgttataaaaactaaactttcaaaatatgtgggaaaaaatcacatgaaaatgtaaaaattaataaaaaaaaataaaactaccatacttttggaatatcaaaaaatctcaaattttatgtaat

SEQ ID NO: 20658 - DNA, 5466 bp, Cannabis sativa
ttatgcaaataacatgtattttactattatatttctaactagtaaaaattatacttttttccctaaatgattttatgttggtattttgcacgatctttccagattaatagatatttcagaagtaagaatgaagttgtcactggagactgcgccagctatgagacctcacgggatgttaggggtgtggagccctattttatcggctgttggaaatgcattcaagattcaagtaggcttttgatttatttttcttcattttttgcttcatttgatgtgattatcatgttacaggagtctgctccattttatttcaagggcttgaaattaataaaaggttaccactactaatgacattctgatccttctatttcaggtgcatctgagaagggttatgcataaagacagatttatgcggagaagctctataagttctgctattggaaaccgaatttttagggatctgatccataatcctttacatttgctattttcagtagatgtacttggtatgacgagctcaacattagcttcccttagtaaagggtttgcagaactctctactgatggacaatttatgcagttacgttcgaagcaagtaagttttcttaatctcattgaaagtataatcaatgaactaactttgatatactttgaaaataactaactttaagatggtttaggtgtggtcgaggaaaattactggagtgggtgatggcattattcaaggaacggaggcttttgcacaaggtgttgcttttggggtatctggagtggtaaagaggcccatggaaagtgcaagggagaatggtatattaggacttgcgcatgggcttggtcaagctttcatagggttttttactcaacctgtgagtggggctttagatttcttctcgttgactgttgatgggattggggctagttgttcgaaatgcttggaagctttgaatagcaagaccacatttgatagagtcagaaatcccagggctatccattcagataatattctaagggaatactgtgagaaagaagctcttggccaggtacctgttcatgatattatgcattgttaagtataaacttgatttagaaaaataagtgtacataaaataaaagaggagggagctggaatcaaactaagagagttgaaaatatataggcggtctaagacaagtggcctctttctctttttcaaaagaaaaacaaaaaaaaaaactctaagagagctgaaaatggattgtgctttccacttaacttatatcatagttgcatttaatagctgcactgagaatgtttatatagttatatagtatacttgtttaaaagaactattcccctggtaccattattagcataattttcaatgttggattatatcaattcttctcctctatctatctatttctctcttctttcttttaaaaatagaaaaaaaaatgtttccttgttgtggctgtagatggtactctacttagcagaagcaagccggcactttggctgtactgaaattttcaaagagccctcaaaatttgccttgtctgattattatgaagaacattttgttgtccctcacaagaagattgtcttagtgaccaacaaacgagttatgctgcttcaggtttgagactaaaccatgaatgtgatcacttattgtaccgaggtttatttgtttgacaatcactcttatttcttgtatcttattctagtgccaagctccagacaaaatggataagaaaccttgcaaaattatttgggacgtgccttgggaaggacttatggctttggaattggcgaaagctggcttcaatattccatcacatttgatcctccatcttaaaaattttgagagatcagaaagttttgtcagagttattaagtgtagtgctgaggaatcaggtagtaacgaaccacaagctattaggatctgttcacttgtacgtaagatgtggaagactcaccaatctgacatgaaaagtctagttttaaaggtaaccgtttctttcttttctttttttttttcttttaaatgagaaacgatcgacttttattaatagtaaatcttataaccaaaggaactgctaaggaatatatctaaagctagactcacacagccacaacttacaaaaatgactcatgttcataaaccgaagggtttcacctagtcctagatgtgctccgggctccggctgcggcccattctttctttatctaaaaatcatatttttcctctcctgccaaatgttggttgactcggactcttgcatagaaaacaccgtgaaaggaaaaccacttggaaagaactttagttctgaatattatccatcgtatatactttattcaatgctaccagccacctgaaactttgattgcataattgctaattccctacaaagataaaactctagctcatattcacatttctcctttcaggttccggcaagccagagacttgtgcactttgcttggaatgaagctgatggaagagaactgcggacatcaaagtctgtaattaggtcgagagagctgttgtcagacaggtctgcatctgatgagaaaagatttgttaaacatgttatcaatttcacagagatttggagaagtgaacaagaatcaaaaagtcgatgcacattgtctaaaaaacaggttctttaattacttccgatcaagtacatgataaggaaagaaagtatgtttggtgtctcacaggggacacttccatttttctatagtaataactgacatattaccttaattttaggtcccagaagatggtagaatgtgtagcatttggaggccaatttgtccagacgggtaattgcacaattagtacttttttattagtttattttcttcaataatgtggttctgctctttcttgcttctgttctgtgtttagcaaaagctttctcagttaagacaatttcactagttttatccctatctgattacttctagtactgaaacgttgtctgttttactttcagatatgtctcaattggggatattgctcgtattggcacccatcctccaaatgtggctgctgtgtattctaatgtcgacagattgttcgctcctccagtgggatacgacctggtaagaatatataaaatatatatattaaatgtgtgtataatcaaacatccgtaatagatttatgtattactcaagtgtatattatggtggtcaggtctctactaatccacaatgtatattttcacatacatgaatatatttgcacattggaacacatatttttctatttgaattgtgaatcaacacccctttaggattatgtttcagcacagctatttcccacaaaatatcacatccttgcttgttagatttattttgtccgcatcacattactatatagttttatagaagtcatctttaacttactgttgaagtttatctagtgcaggtataaaaattgcattaatttctcttttccattattctcattattcaccattttcattcatcagactataactctatcttagtgaatttgataaaatctagaacacctagaaggtggttgccatgaaaatttcatataaatcatagttcctagtttatcatagattggaaattaaacactatcaacgaacaggtatggcggaactgcttggaagattacgtggcaccactatcgatatggttgcctcgtgcaccagagggatatgtatctcctggatgcattgctgtcgcatgttttgaagagccggaacctaatgcagtgtactgcgtggctgaatcacttactgaggataccgaattcgaagagcagaaggtttggtcagctccagattcttatccatgggcatgccacatatatcaagtcaaaagtgatgctcttcactttgttgctctaaggcaaagcaaggaagaatgtgattggagacctacaagggttcttgatgaccatcactccattctacaatcttctagttctaactctcagtgaaaccaaaaattgctgttaaagtccttactttttttttttaaattttgtaagcaggcccttatttgttttgattgttttgttgtacagtgtatagtatctctttcttgactcttttatcttttttcatagacgtttacttatttttgaacctcaaggtggcttatgcgttgttatacaagccagattaaattgcactagtttattcagattttttttttctttctcattactacttatacacgaagaactgtatagagtacagacttgaaatgagtaaaattgaaattgttttggttgcaaaatgtgtagttttttttttctttatcaatttctgactttatgatttatttcagttacaataagtcaagtaaggggggttcttatattatttcataatgaagcaaacactagtacatagtacatatacagctcttaaaactcttttatgttcccaacataaatacaaaagccaatttatagtattttgcaagtctttcattggtgatagtcttgtttatttggttcaaactaaactaaatacatttagtcaccagtaagtgaacatgaaaaaagatctccattgtcttgaacagtactaaatcaaatacagaaactgaaccatgaattatcaaagagacattgcacattggactgaatcataaattgtctatatacataattaatgtactgaagttagtgctatggagataataaaagtaaccaatcaaatataaatattatattaaaaaggactaccttgaacttttttttcaataaagaagaatcattctccagatgcatcatctcgtacatgatttagctatgattatattaaatgatttctgtttcaggttagatttgagtaatgtaacctgaaatatgggttaaacagaaatctgggttgtaaccttgccattcatagtgaaactttaagaaaggctcataagaacactgcatcataaaccaagtacttttttttaaacacaaattcatagtaaaactggtacagaccttttttcatacttttagggtgtaatcacttgccatcatcatatgaggatttaaccaaatgatgagccatgctccattgtgaacataaaatgataaatttattagttatgatttgaactgaaatagccagagaagctcatttctccaatatgtatatgtttctctcaacttaactgaaaaaacagctaaaatttactctaaatgtaatattccctgtgacattaaatttcaagcttcaaccaagttagcccaaaatctcaagttagaaactgaaaatctcttagagcttgatgattactgaaaaatgaaagagaattttatagcttgtttgttagttataaacatgccataccaaacttgaattctgtaaaaatgagcttttcagtctattcagaaccctctacaaaaccaaaaaacaaatcacatatttaatttaatgtttcccaaaggtaaaagattagactaaagttggaggggtgcgccaagcccat
